United States Patent Application Publication US 2025/0320254 A1 - sequence listing, part 11

SEQ ID NO: 51097 - protein, 2067 aa, Homo sapiens
MKDFQFRALKKVRIFDSPEELPKERSSLLAVSNKYGLVFAGGASGLQIFPTKNLLIQNKPGDDPNKIVDKVQGLLVPMKFPIHHLALSCDNLTLSACMMSSEYGSIIAFFDVRTFSNEAKQQKRPFAYHKLLKDAGGMVIDMKWNPTVPSMVAVCLADGSIAVLQVTETVKVCATLPSTVAVTSVCWSPKGKQLAVGKQNGTVVQYLPTLQEKKVIPCPPFYESDHPVRVLDVLWIGTYVFAIVYAAADGTLETSPDVVMALLPKKEEKHPEIFVNFMEPCYGSCTERQHHYYLSYIEEWDLVLAASAASTEVSILARQSDQINWESWLLEDSSRAELPVTDKSDDSLPMGVVVDYTNQVEITISDEKTLPPAPVLMLLSTDGVLCPFYMINQNPGVKSLIKTPERLSLEGERQPKSPGSTPTTPTSSQAPQKLDASAAAAPASLPPSSPAAPIATFSLLPAGGAPTVFSFGSSSLKSSATVTGEPPSYSSGSDSSKAAPGPGPSTFSFVPPSKASLAPTPAASPVAPSAASFSFGSSGFKPTLESTPVPSVSAPNIAMKPSFPPSTSAVKVNLSENSSQSAPPMSPFSSASKPAASGPLSHPTPLSAPPSSVPLKSSVLPSPSAGRSAQGSSSPVPSMVQKSPRITPPAAKPGSPQAKSLQPAVAEKQGHQWKDSDPVMAGIGEEIAHFQKELEELKARTSKACFQVGTSEEMKMLRTESDDLHTFLLEIKETTESLHGDISSLKTTLLEGFAGVEEAREQNERNRDSGYLHLLYKRPLDPKSEAQLQEIRRLHQYVKFAVQDVNDVLDLEWDQHLEQKKKQRHLLVPERETLFNTLANNREIINQQRKRLNHLVDSLQQLRLYKQTSLWSLSSAVPSQSSIHSFDSDLESLCNALLKTTIESHTKSLPKVPAKLSPMKQAQLRNFLAKRKTPPVRSTAPASLSRSAFLSQRYYEDLDEVSSTSSVSQSLESEDARTSCKDDEAVVQAPRHAPVVRTPSIQPSLLPHAAPFAKSHLVHGSSPGVMGTSVATSASKIIPQGADSTMLATKTVKHGAPSPSHPISAPQAAAAAALRRQMASQAPAVNTLTESTLKNVPQVVNVQELKNNPATPSTAMGSSVPYSTAKTPHPVLTPVAANQAKQGSLINSLKPSGPTPASGQLSSGDKASGTAKIETAVTSTPSASGQFSKPFSFSPSGTGFNFGIITPTPSSNFTAAQGATPSTKESSQPDAFSSGGGSKPSYEAIPESSPPSGITSASNTTPGEPAASSSRPVAPSGTALSTTSSKLETPPSKLGELLFPSSLAGETLGSFSGLRVGQADDSTKPTNKASSTSLTSTQPTKTSGVPSGFNFTAPPVLGKHTEPPVTSSATTTSVAPPAATSTSSTAVFGSLPVTSAGSSGVISFGGTSLSAGKTSFSFGSQQTNSTVPPSAPPPTTAATPLPTSFPTLSFGSLLSSATTPSLPMSAGRSTEEATSSALPEKPGDSEVSASAASLLEEQQSAQLPQAPPQTSDSVKKEPVLAQPAVSNSGTAASSTSLVALSAEATPATTGVPDARTEAVPPASSFSVPGQTAVTAAAISSAGPVAVETSSTPIASSTTSIVAPGPSAEAAAFGTVTSGSSVFAQPPAASSSSAFNQLTNNTATAPSATPVFGQVAASTAPSLFGQQTGSTASTAAATPQVSSSGFSSPAFGTTAPGVFGQTTFGQASVFGQSASSAASVFSFSQPGFSSVPAFGQPASSTPTSTSGSVFGAASSTSSSSSFSFGQSSPNTGGGLFGQSNAPAFGQSPGFGQGGSVFGGTSAATTTAATSGFSFCQASGFGSSNTGSVFGQAASTGGIVFGQQSSSSSGSVFGSGNTGRGGGFFSGLGGKPSQDAANKNPFSSASGGFGSTATSNTSNLFGNSGAKTFGGFASSSFGEQKPTGTFSSGGGSVASQGFGFSSPNKTGGFGAAPVFGSPPTFGGSPGFGGVPAFGSAPAFTSPLGSTGGKVFGEGTAAASAGGFGFGSSSNTTSFGTLASQNAPTFGSLSQQTSGFGTQSSGFSGFGSGTGGFSFGSNNSSVQGFGGWRS

SEQ ID NO: 51098 - protein, 1949 aa, Homo sapiens
MLPAFMCSPKSSENQGTVERGSFPLPQLRLEPRVPFRQFQMNDQDGKENRLGLSRPLRPLRQLVERAPRPTIINAENLKGLDDLDADADDGWAGLHEEVDYSEKLKFSDDEEEEEVVKDGRPKWNSWDPRRQRQLSMSSADSADAKRTREEGKDWAEAVGASRVVRKAPDPQPPPRKLHGWAPGPDYQKSSMGSMFRQQSIEDKEDKPPPRQKFIQSEMSEAVERARKRREEEERRAREERLAACAAKLKQLDQKCKQARKAGEARKQAEKEVPWSPSAEKASPQENGPAVHKGSPEFPAQETPTTFPEEAPTVSPAVAQSNSSEEEAREAGSPAQEFKYQKSLPPRFQRQQQQQQQEQLYKMQHWQPVYPPPSHPQRTFYPHHPQMLGFDPRWMMMPSYMDPRITPTRTPVDFYPSALHPSGLMKPMMPQESLNGTGCRSEDQNCVPPLQERKVTPIDSPPVWSPEGYMALQSKGYPLPHPKSSDTLAMDMRVRNESSFSASLGRAGGVSAQRDLFEERGEEYLSAFDKKAQADFDSCISSQRIGQELLFPPQENVQDAGAPGGHTQNLRCSPLEPDFVPDEKKPECGSWDVSHQPETADTAHGVERETPREGTAFNISSWDKNGSPNKQPSSEPEWTPEPRSSSSQHPEQTGRTRRSGPIKKPVLKALKVEDKEKELEKIKQELGEESTRLAKEKEQSPTAEKDEDEENDASLANSSTTTLEDKGPGHATFGREATKFEEEEKPDKAWEARPPRESSDVPPMKRNNWIFIDEEQAFGVRGQARGRGRGFREFTFRGRPAGGNGSGLCGGGVLGARSIYCSSQRSGRGRGLREFARPEDCPRAKPRRRVASETHSEGSEYEELPKRRRQRGSENGNEGSLLEREESTLKKGDCRDSWRSNKGCSEDHSGLDAKSRGPRAFGRALPPRLSNCGYGRRTFVSKESPHWQSKSPGSSWQEYGPSDTCGSRRPTDRDYVPDSYRHPDAFGGRGFEDSRAEDKRSFFQDEHVADSENAENRPFRRRRPPRQDKPPRFRRLRQERESLGLWGPEEEPHLLAGQWPGRPKLCSGDKSGTVGRRSPELSYQNSSDHANEEWETASESSDFSERRERREGPGSEPDSQVDGGLSGASLGEKKELAKRSFSSQRPVVDRQSRKLEPGGFGEKPVRPGGGDTSPRYESQQNGTPLKVKRSPDEALPGGLSGCSSGSGHSPYALERAAHASADLPEASSKKAEKEAKLAAPRAGEQGEAMKQFDLNYGSAIIENCGSSPGEESEVGSMVGEGFIEVLTKKQRRLLEEERRKKEQAVQVPVKGRGLSSRIPPRFAKKQNNLCLEQGDVTVPGSSLGTEIWESSSQALPVQAPANDSWRKAVTAFSSTETGSAEQGFKSSQGDSGVDLSAESRESSATSSQRSSPYGTLKPEEMSGPGLAEPKADSHKEQAPKPSEQKDSEQGSGQSKEHRPGPIGNERSLKNRKGSEGAERLQGAVVPPVNGVEIHVDSVLPVPPIEFGVSPKDSDFSLPPGSASGPTGSPVVKLQDALASNAGLTQSIPILRRDHHIQRAIGLSPMSFPTADLTLKMESARKAWENSPSLPEQSSPGGAGSGIQPPSSVGASSGVNYSSFGGVSMPPMPVASVAPSASMPGSHLPPLYLDGHVFASQPRLVPQTIPQQQSYQQAAAAQQIPISLHTSLQAQAQLGLRGGLPVSQSQEIFSSLQPFRSQVYMHPSLSPPSTMILSGGTALKPPYSAFPGMQPLEMVKPQSGSPYQPMSGNQALVYEGQLSQAAGLGASQMLDSQLPQLTMPLPRYGSGQQPLILPQSIQLPPGQSLSVGAPRRIPPPGSQPPVLNTSREPSQMEMKGFHFADSKQNVPSGGPVPSPQTYRPSSASPSGKPSGSAVNMGSVQGHYVQQAKQRVDEKPSLGAVKLQEAPSAASQMKRTGAIKPRAVKVEESKA

SEQ ID NO: 51099 - protein, 1255 aa, Homo sapiens
MLPAFMCSPKSSENQGTVERGSFPLPQLRLEPRVPFRQFQMNDQDGKENRLGLSRPLRPLRQLVERAPRPTIINAENLKGLDDLDADADDGWAGLHEEVDYSEKLKFSDDEEEEEVVKDGRPKWNSWDPRRQRQLSMSSADSADAKRTREEGKDWAEAVGASRVVRKAPDPQPPPRKLHGWAPGPDYQKSSMGSMFRQQSIEDKEDKPPPRQKFIQSEMSEAVERARKRREEEERRAREERLAACAAKLKQLDQKCKQARKAGEARKQAEKEVPWSPSAEKASPQENGPAVHKGSPEFPAQETPTTFPEEAPTVSPAVAQSNSSEEEAREAGSPAQEFKYQKSLPPRFQRQQQQQQQEQLYKMQHWQPVYPPPSHPQRTFYPHHPQMLGFDPRWMMMPSYMDPRITPTRTPVDFYPSALHPSGLMKPMMPQESLNGTGCRSEDQNCVPPLQERKVTPIDSPPVWSPEGYMALQSKGYPLPHPKSSDTLAMDMRVRSPDEALPGGLSGCSSGSGHSPYALERAAHASADLPEASSKKAEKEAKLAAPRAGEQGEAMKQFDLNYGSAIIENCGSSPGEESEVGSMVGEGFIEVLTKKQRRLLEEERRKKEQAVQVPVKGRGLSSRIPPRFAKKQNNLCLEQGDVTVPGSSLGTEIWESSSQALPVQAPANDSWRKAVTAFSSTETGSAEQGFKSSQGDSGVDLSAESRESSATSSQRSSPYGTLKPEEMSGPGLAEPKADSHKEQAPKPSEQKDSEQGSGQSKEHRPGPIGNERSLKNRKGSEGAERLQGAVVPPVNGVEIHVDSVLPVPPIEFGVSPKDSDFSLPPGSASGPTGSPVVKLQDALASNAGLTQSIPILRRDHHIQRAIGLSPMSFPTADLTLKMESARKAWENSPSLPEQSSPGGAGSGIQPPSSVGASSGVNYSSFGGVSMPPMPVASVAPSASMPGSHLPPLYLDGHVFASQPRLVPQTIPQQQSYQQAAAAQQIPISLHTSLQAQAQLGLRGGLPVSQSQEIFSSLQPFRSQVYMHPSLSPPSTMILSGGTALKPPYSAFPGMQPLEMVKPQSGSPYQPMSGNQALVYEGQLSQAAGLGASQMLDSQLPQLTMPLPRYGSGQQPLILPQSIQLPPGQSLSVGAPRRIPPPGSQPPVLNTSREPSQMEMKGFHFADSKQNVPSGGPVPSPQTYRPSSASPSGKPSGSAVNMGSVQGHYVQQAKQRVDEKPSLGAVKLQEAPSAASQMKRTGAIKPRAVKVEESKA

SEQ ID NO: 51100 - protein, 677 aa, Homo sapiens
MVLALGGYLGGFDGNFLWNRIGAEYSSNVPVWSLRLLPALAGALSVPMAYQIVLELHFSHCAAMGAALLMLIENALITQSRLMLLESVLIFFNLLAVLSYLKFFNCQKHSPFSLSWWFWLTLTGVACSCAVGIKYMGVFTYVLVLGVAAVHAWHLLGDQTLSNVGADVQCCMRPACMGQMQMSQGVCVFCHLLARAVALLVIPVVLYLLFFYVHLILVFRSGPHDQIMSSAFQASLEGGLARITQGQPLEVAFGSQVTLRNVFGKPVPCWLHSHQDTYPMIYENGRGSSHQQQVTCYPFKDVNNWWIVKDPRRHQLVVSSPPRPVRHGDMVQLVHGMTTRSLNTHDVAAPLSPHSQEVSCYIDYNISMPAQNLWRLEIVNRGSDTDVWKTILSEVRFVHVNTSAVLKLSGAHLPDWGYRQLEIVGEKLSRGYHGSTVWNVEEHRYGASQEQRERERELHSPAQVDVSRNLSFMARFSELQWRMLALRSDDSEHKYSSSPLEWVTLDTNIAYWLHPRTSAQIHLLGNIVIWVSGSLALAIYALLSLWYLLRRRRNVHDLPQDAWLRWVLAGALCAGGWAVNYLPFFLMEKTLFLYHYLPALTFQILLLPVVLQHISDHLCRSQLQRSIFSALVVAWYSSACHVSNTLRPLTYGDKSLSPHELKALRWKDSWDILIRKH

SEQ ID NO: 51101 - protein, 655 aa, Homo sapiens
MVLALGGYLGGFDGNFLWNRIGAEYSSNVPVWSLRLLPALAGALSVPMAYQIVLELHFSHCAAMGAALLMLIENALITQSRLMLLESVLIFFNLLAVLSYLKFFNCQKHSPFSLSWWFWLTLTGVACSCAVGIKYMGVFTYVLVLGVAAVHAWHLLGDQTLSNVCVFCHLLARAVALLVIPVVLYLLFFYVHLILVFRSGPHDQIMSSAFQASLEGGLARITQGQPLEVAFGSQVTLRNVFGKPVPCWLHSHQDTYPMIYENGRGSSHQQQVTCYPFKDVNNWWIVKDPRRHQLVVSSPPRPVRHGDMVQLVHGMTTRSLNTHDVAAPLSPHSQEVSCYIDYNISMPAQNLWRLEIVNRGSDTDVWKTILSEVRFVHVNTSAVLKLSGAHLPDWGYRQLEIVGEKLSRGYHGSTVWNVEEHRYGASQEQRERERELHSPAQVDVSRNLSFMARFSELQWRMLALRSDDSEHKYSSSPLEWVTLDTNIAYWLHPRTSAQIHLLGNIVIWVSGSLALAIYALLSLWYLLRRRRNVHDLPQDAWLRWVLAGALCAGGWAVNYLPFFLMEKTLFLYHYLPALTFQILLLPVVLQHISDHLCRSQLQRSIFSALVVAWYSSACHVSNTLRPLTYGDKSLSPHELKALRWKDSWDILIRKH

SEQ ID NO: 51102 - protein, 346 aa, Homo sapiens
MILNDLLGRKLSIMFSAVPSAAGYALMAGAHGLWMLLLGRTLTGFAGGLTAACIPVYVSEIAPPGVRGALGATPQLMAVFGSLSLYALGLLLPWRWLAVAGEAPVLIMILLLSFMPNSPRFLLSRGRDEEALRALAWLRGTDVDVHWEFEQIQDNVRRQSSRVSWAEARAPHVCRPITVALLMRLLQQLTGITPILVYLQSIFDSTAVLLPPKDDAAIVGAVRLLSVLIAALTMDLAGRKVLLFVSGYAVGWGPITWLLMSEVLPLRARGVASGLCVLASWLTAFVLTKSFLPVVSTFGLQVPFFFFAAICLVSLVFTGCCVPETKGRSLEQIESFFRTGRRSFLR

SEQ ID NO: 51103 - protein, 725 aa, Homo sapiens
MNVDDLYGTLYVPHDGTMDPAGTCTTLARAASARGAQVIENCPVTGIRVWTDDFGVRRVAGVETQHGSIQTPCVVNCAGVWASAVGRMAGVKVPLVAMHHAYVVTERIEGIQNMPNVRDHDASVYLRLQGDALSVGGYEANPIFWEEVSDKFAFGLFDLDWEVFTQHIEGAINRVPVLEKTGIKSTVCGPESFTPDHKPLMGEAPELRGFFLGCGFNSAGMMLGGGCGQELAHWIIHGRPEKDMHGYDIRRFHHSLTDHPRWIRERSHESYAKNYSVVFPHDEPLAGRNMRRDPLHEELLGQGCVFQERHGWERPGWFHPRGPAPVLEYDYYGAYGSRAHEDYAYRRLLADEYTFAFPPHHDTIKKECLACRGAAAVFDMSYFGKFYLVGLDARKAADWLFSADVSRPPGSTVYTCMLNHRGGTESDLTVSRLAPSHQASPLAPAFEGDGYYLAMGGAVAQHNWSHITTVLQDQKSQCQLIDSSEDLGMISIQGPASRAILQEVLDADLSNEAFPFSTHKLLRAAGHLVRAMRLSFVGELGWELHIPKASCVPVYRAVMAAGAKHGLINAGYRAIDSLSIEKGYRHWHADLRPDDSPLEAGLAFTCKLKSPVPFLGREALEQQRAAGLRRRLVCFTMEDKVPMFGLEAIWRNGQVVGHVRRADFGFAIDKTIAYGYIHDPSGGPVSLDFVKSGDYALERMGVTYGAQAHLKSPFDPNNKRVKGIY

SEQ ID NO: 51104 - protein, 73 aa, Homo sapiens
MVGSRSALQGACLCGTHTPALPGRLWLSEHHGGPLTLSLLSQQRPRARDRRTGVLLHHRTQTSGLTPVACDYE

SEQ ID NO: 51105 - protein, 704 aa, Homo sapiens
MSIPLLLQDKVALVERYVAGFPDLQRRLLVLMDSWCQPGFDIKDVARRYPEVTSLSLEKLSPKALSRQVLRLQERYGVAPALCPNAAIQQRLAALRHLCHKRFVEKSLSQENWTDHVQGLVGQSPWLQEQLSQLLVSHSDPVTAAQCAMELLLPEERLPAAVAVELRRFRLQGRATEADSRLEVKDMKDRYYQLPIPRENVHLLASWEDLTRHEGALLQCHQVVGVDVEWTPVFVAGGRPRPSLLQVAVEGHVFLLDVLALSQPPTGQGAQAFSRLVAQLLSDPSITKLGYGMVGDLQKLGTSCPALAHVEKQILGGMDLLLVHRQMRVASVPAPAVDRARELRGLSLLVQQVLGTALDKTQQLSNWDRRPLCEEQVIYAAADAYCLLEVHQALCREPARFHLSEDLAGSRRPRHRERPGARKPPGLQKASAPAAPRQVPVAVAVSEGAAPQIPARAFRVVCDNMLQGLARSLRCLGVDARMLGNGEDHRRAAEVARQEGRIILTSGQPFHKLRAQVGAGRCLSVDCSLKAQQQAKAVLKHFNVRVTHADIFSRCQACNCDQYLKVSRDMMKQLMWLSSHQEGPRSSGDEATQSQAVQEPGPAPDAAPEGCTYDRPCRWLQMADLRAETPDMLADGTRLQLAGVPVGVLRTPGLRCFYCCTGCGKVFWDGSHLGRVATHFRDMLESAPSPCEPSPAPSPASSPF

SEQ ID NO: 51106 - protein, 120 aa, Homo sapiens [sequence omitted]

SEQ ID NO: 51107 - protein, 4 aa, Homo sapiens
MKSP

SEQ ID NO: 51108 - protein, 403 aa, Homo sapiens [sequence omitted]

SEQ ID NO: 51109 - protein, 90 aa, Homo sapiens
MVLCPVIGKLLHKRVVLASASPRRQEILSNAGLRFEVVPSKFKEKLDKASFATPYGYAMETAKQKALEVANRLYQARGPCPSALMKIPLL

SEQ ID NO: 51110 - protein, 666 aa, Homo sapiens
MTISVALPQLKQPGKSISNWEVMERLKGMVQNHQFSTLRISKSTMDFIRFEGEVENKSLVKSFLACLDGKTIKLSGFSDILKVRAAEFKIDFPTRHDWDSFFRDAKDMNETLPGERPDTIHLEGLPCKWFALKESGSEKPSEDVLVKVFEKFGEIRNVDIPMLDPYREEMTGRNFHTFSFGGHLNFEAYVQYREYMGFIQAMSALRGMKLMYKGEDGKAVACNIKVSFDSTKHLSDASIKKRQLERQKLQELEQQREEQKRREKEAEERQRAEERKQKELEELERERKREEKLRKREQKQRDRELRRNQKKLEKLQAEEQKQLQEKIKLEERKLLLAQRNLQSIRLIAELLSRAKAVKLREQEQKEEKLRLQQQEERRRLQEAELRRVEEEKERALGLQRKERELRERLLSILLSKKPDDSHTHDELGVAHADLLQPVLDILQTVSSGCVSATTLHPLGGQPPAGAPKESPAHPEADGAPKSVNGSVAEEAPCKEVQSSCRVVPEDGSPEKRCPGGVLSCIPDNNQQPKGIPACEQNVSRKDTRSEQDKCNREPSKGRGRATGDGLADRHKRERSRARRASSREDGRPRKERRPHKKHAYKDDSPRRRSTSPDHTRSRRSHSKDRHRRERSRERRGSASRKHSRHRRRSERSRSRSPSRHRSTWNR

SEQ ID NO: 51111 - protein, 417 aa, Homo sapiens
MTISVALPQLKQPGKSISNWEVMERLKGMVQNHQFSTLRISKSTMDFIRFEGEVENKSLVKSFLACLDGKTIKLSGFSDILKVRAAEFKIDFPTRHDWDSFFRDAKDMNETLPGERPDTIHLEGLPCKWFALKESGSEKPSEDVLVKVFEKFGEIRNVDIPMLDPYREEMTGRNFHTFSFGGHLNFEAYVQYREYMGFIQAMSALRGMKLMYKGEDGKAVACNIKVSFDSTKHLSDASIKKRQLERQKLQELEQQREEQKRREKEAEERQRAEERKQKELEELERERKREEKLRKREQKQRDRELRRNQKKLEKLQAEEQKQLQEKIKLEERKLLLAQRNLQSIRLIAELLSRAKVPGGSLCSRQPRPGCPQCPPLKCGRRHGAVSPPAAAVATKPALMPRMTAPSREGVALVCRSR

SEQ ID NO: 51112 - protein, 218 aa, Homo sapiens [sequence omitted]

SEQ ID NO: 51113 - protein, 391 aa, Homo sapiens
MTHALQWPSLTVQWLPEVTKPEGKDYALHWLVLGTHTSDEQNHLVVARVHIPNDDAQFDASHCDSDKGEFGGFGSVTGKIECEIKINHEGEVNRARYMPQNPHIIATKTPSSDVLVFDYTKHPAKPDPSGECNPDLRLRGHQKEGYGLSWNSNLSGHLLSASDDHTVCLWDINAGPKEGKIVDAKAIFTGHSAVVEDVAWHLLHESLFGSVADDQKLMIWDTRSNTTSKPSHLVDAHTAEVNCLSFNPYSEFILATGSADKTVALWDLRNLKLKLHTFESHKDEIFQVHWSPHNETILASSGTDRRLNVWDLSKIGEEQSAEDAEDGPPELLFIHGGHTAKISDFSWNPNEPWVICSVSEDNIMQIWQMAENIYNDEESDVTTSELEGQGS

SEQ ID NO: 51114 - protein, 865 aa, Homo sapiens [sequence omitted]

SEQ ID NO: 51115 - protein, 906 aa, Homo sapiens
MLELLEEMPNGVPPEKVKSYIYQLIKAIHWCHKNDIVHRDIKPENLLISHNDVLKLCDFGFARNLSEGNNANYTEYVATRWYRSPELLLGAPYGKSVDMWSVGCILGELSDGQPLFPGESEIDQLFTIQKVLGPLPSEQMKLFYSNPRFHGLRFPAVNHPQSLERRYLGILNSVLLDLMKNLLKLDPADRYLTEQCLNHPTFQTQRLLDRSPSRSAKRKPYHVESSTLSNRNQAGKSTALQSHHRSNSKDIQNLSVGLPRADEGLPANESFLNGNLAGASLSPLHTKTYQASSQPGSTSKDLTNNNIPHLLSPKEAKSKTEFDFNIDPKPSEGPGTKYLKSNSRSQQNRHSFMESSQSKAGTLQPNEKQSRHSYIDTIPQSSRSPSYRTKAKSHGALSDSKSVSNLSEARAQIAEPSTSRYFPSSCLDLNSPTSPTPTRHSDTRTLLSPSGRNNRNEGTLDSRRTTTRHSKTMEELKLPEHMDSSHSHSLSAPHESFSYGLGYTSPFSSQQRPHRHSMYVTRDKVRAKGLDGSLSIGQGMAARANSLQLLSPQPGEQLPPEMTVARSSVKETSREGTSSFHTRQKSEGGVYHDPHSDDGTAPKENRHLYNDPVPRRVGSFYRVPSPRPDNSFHENNVSTRVSSLPSESSSGTNHSKRQPAFDPWKSPENISHSEQLKEKEKQGFFRSMKKKKKKSQTTDSTNGENPSIKKSLFPLFNSKNHLKHSSSLKKLPVVTPPMVPNSDSPDLLTLQKSIHSASTPSSRPKEWRPEKISDLQTQSQPLKSLRKLLHLSSASNHPASSDPRFQPLTAQQTKNSFSEIRIHPLSQASGGSSNIRQEPAPKGRPALQLPGQMDPGWHVSSVTRSATEGPSYSEQLGAKSGPNGHPYNRTNRSRMPNLNDLKETAL

SEQ ID NO: 51116 - protein, 641 aa, Homo sapiens
MKVLKKATLKVRDRVRTKMERDILVEVNHPFIVKLHYAFQTEGKLYLILDFLRGGDLFTRLSKEVMFTEEDVKFYLAELALALDHLHSLGIIYRDLKPENILLDEEGHIKLTDFGLSKESIDHEKKAYSFCGTVEYMAPEVVNRRGHTQSADWWSFGVLMFEMLTGTLPFQGKDRKETMTMILKAKLGMPQFLSPEAQSLLRMLFKRNPANRLGAGPDGVEEIKRHSFFSTIDWNKLYRREIHPPFKPATGRPEDTFYFDPEFTAKTPKDSPGIPPSANAHQLFRGFSFVAITSDDESQAMQTVGVHSIVQLHRNSIQFTDGYEVKEDIGVGSYSVCKRCIHKATNMEFAVKIIDKSKRDPTEEIEILLRYGQHPNIITLKDVYDDGKYVYVVTELMKGGELLDKILRQKFFSEREASAVLFTITKTVEYLHAQGVVHRDLKPSNILYVDESGNPESIRICDFGFAKQLRAENGLLMTPCYTANFVAPEVLKRQGYDAACDIWSLGVLLYTMLTGYTPFANGPDDTPEEILARIGSGKFSLSGGYWNSVSDTAKDLVSKMLHVDPHQRLTAALVLRHPWIVHWDQLPQYQLNRQDAPHLVKGAMAATYSALNRNQSPVLEPVGRSTLAQRRGIKKITSTAL

SEQ ID NO: 51117 - protein, 102 aa, Homo sapiens [sequence omitted]

SEQ ID NO: 51118 - protein, 543 aa, Homo sapiens
MNEQNRSAATPPSQPPQQPSSMQTGMNPSAMQGPSPPPPPPSYMHIPRYSTNPITVTVSQNLPSGQTVPRALQILPQIPSNLYGSPGSIYIRQTSQSSSGRQTPQSTPWQSSPQGPVPHYSQRPLPVYPHQQNYQPSQYSPKQQQIPQSAYHSPPPSQCPSPFSSPQHQVQPSQLGHIFMPPSPSTTPPHPYQQGPPSYQKQGSHSVAYLPYTASSLSKGSMKKIEITVEPSQRPGTAINRSPSPISNQPSPRNQHSLYTATTPPSSSPSRGISSQPKPPFSVNPVYITYTQPTGPSCTPSPSPRVIPNPTTVFKITVGRATTENLLNLVDQEERSAAPEPIQPISVIPGSGGEKGSHKYQRSSSSGSDDYAYTQALLLHQRARMERLAKQLKLEKEELERLKSEVNGMEHDLMQRRLRRVSCTTAIPTPEEMTRLRSMNRQLQINVDCTLKEVDLLQSRDSSDPCTIERKARRISVTSKVQADIHDTQAAAADEHRTGSTQSPRTQPRDEDYEGAPWNCDSCTFLNHPALNRCEQCEMPRYT

SEQ ID NO: 51119 - protein, 3558 aa, Homo sapiens
MAGLQQTNSEKILLSWVRQSTRNYPQVNVINFTTSWSDGLALNALIHSHRPDLFDWNSVVCQQSATQRLEHAFNIARYQLGIEKLLDPEDVDTTYPDKKSILMYITSLFQVLPQQVSIEAIQEVEMLPRPPKVTKEEHFQLHHQMHYSQQITVSLAQGYERTSSPKPRFKSYAYTQAAYVTTSDPTRSPFPSQHLEAPEDKSFGSSLMESEVNLDRYQTALEEVLSWLLSAEDTLQAQGEISNDVEVVKDQFHTHEGYMMDLTAHQGRVGNILQLGSKLIGTGKLSEDEETEVQEQMNLLNSRWECLRVASMEKQSNLHRVLMDLQNQKLKELNDWLTKTEERTRKMEEEPLGPDLEDLKRQVQQHKVLQEDLEQEQVRVNSLTHMVVVVDESSGDHATAALEEQLKVLGDRWANICRWTEDRWVLLQDILLKWQRLTEEQCLFSAWLSEKEDAVNKIHTTGFKDQNEMLSSLQKLAVLKADLEKKKQSMGKLYSLKQDLLSTLKNKSVTQKTEAWLDNFARCWDNLVQKLEKSTAQISQAVTTTQPSLTQTTVMETVTTVTTREQILVKHAQEELPPPPPQKKRQITVDSEIRKRLDVDITELHSWITRSEAVLQSPEFAIFRKEGNFSDLKEKVNAIEREKAEKFRKLQDASRSAQALVEQMVNEGVNADSIKQASEQLNSRWIEFCQLLSERLNWLEYQNNIIAFYNQLQQLEQMTTTAENWLKIQPTTPSEPTAIKSQLKICKDEVNRLSDLQPQIERLKIQSIALKEKGQGPMFLDADFVAFTNHFKQVFSDVQAREKELQTIFDTLPPMRYQETMSAIRTWVQQSETKLSIPQLSVTDYEIMEQRLGELQALQSSLQEQQSGLYYLSTTVKEMSKKAPSEISRKYQSEFEEIEGRWKKLSSQLVEHCQKLEEQMNKLRKIQNHIQTLKKWMAEVDVFLKEEWPALGDSEILKKQLKQCRLLVSDIQTIQPSLNSVNEGGQKIKNEAEPEFASRLETELKELNTQWDHMCQQVYARKEALKGGLEKTVSLQKDLSEMHEWMTQAEEEYLERDFEYKTPDELQKAVEEMKRAKEEAQQKEAKVKLLTESVNSVIAQAPPVAQEALKKELETLTTNYQWLCTRLNGKCKTLEEVWACWHELLSYLEKANKWLNEVEFKLKTTENIPGGAEEISEVLDSLENLMRHSEDNPNQIRILAQTLTDGGVMDELINEELETFNSRWRELHEEAVRRQKLLEQSIQSAQETEKSLHLIQESLTFIDKQLAAYIADKVDAAQMPQEAQKIQSDLTSHEISLEEMKKHNQGKEAAQRVLSQIDVAQKKLQDVSMKFRLFQKPANFEQRLQESKMILDEVKMHLPALETKSVEQEVVQSQLNHCVNLYKSLSEVKSEVEMVIKTGRQIVQKKQTENPKELDERVTALKLHYNELGAKVTERKQQLEKCLKLSRKMRKEMNVLTEWLAATDMELTKRSAVEGMPSNLDSEVAWGKATQKEIEKQKVHLKSITEVGEALKTVLGKKETLVEDKLSLLNSNWIAVTSRAEEWLNLLLEYQKHMETFDQNVDHITKWIIQADTLLDESEKKKPQQKEDVLKRLKAELNDIRPKVDSTRDQAANLMANRGDHCRKLVEPQISELNHRFAAISHRIKTGKASIPLKELEQFNSDIQKLLEPLEAEIQQGVNLKEEDFNKDMNEDNEGTVKELLQRGDNLQQRITDERKREEIKIKQQLLQTKHNALKDLRSQRRKKALEISHQWYQYKRQADDLLKCLDDIEKKLASLPEPRDERKIKEIDRELQKKKEELNAVRRQAEGLSEDGAAMAVEPTQIQLSKRWREIESKFAQFRRLNFAQIHTVREETMMVMTEDMPLEISYVPSTYLTEITHVSQALLEVEQLLNAPDLCAKDFEDLFKQEESLKNIKDSLQQSSGRIDIIHSKKTAALQSATPVERVKLQEALSQLDFQWEKVNKMYKDRQGRFDRSVEKWRRFHYDIKIFNQWLTEAEQFLRKTQIPENWEHAKYKWYLKELQDGIGQRQTVVRTLNATGEEIIQQSSKTDASILQEKLGSLNLRWQEVCKQLSDRKKRLEEQKNILSEFQRDLNEFVLWLEEADNIASIPLEPGKEQQLKEKLEQVKLLVEELPLRQGILKQLNETGGPVLVSAPISPEEQDKLENKLKQTNLQWIKVSRALPEKQGEIEAQIKDLGQLEKKLEDLEEQLNHLLLWLSPIRNQLEIYNQPNQEGPFDVKETEIAVQAKQPDVEEILSKGQHLYKEKPATQPVKRKLEDLSSEWKAVNRLLQELRAKQPDLAPGLTTIGASPTQTVTLVTQPVVTKETAISKLEMPSSLMLEVPALADFNRAWTELTDWLSLLDQVIKSQRVMVGDLEDINEMIIKQKATMQDLEQRRPQLEELITAAQNLKNKTSNQEARTIITDRIERIQNQWDEVQEHLQNRRQQLNEMLKDSTQWLEAKEEAEQVLGQARAKLESWKEGPYTVDAIQKKITETKQLAKDLRQWQTNVDVANDLALKLLRDYSADDTRKVHMITENINASWRSIHKRVSEREAALEETHRLLQQFPLDLEKFLAWLTEAETTANVLQDATRKERLLEDSKGVKELMKQWQDLQGEIEAHTDVYHNLDENSQKILRSLEGSDDAVLLQRRLDNMNFKWSELRKKSLNIRSHLEASSDQWKRLHLSLQELLVWLQLKDDELSRQAPIGGDFPAVQKQNDVHRAFKRELKTKEPVIMSTLETVRIFLTEQPLEGLEKLYQEPRELPPEERAQNVTRLLRKQAEEVNTEWEKLNLHSADWQRKIDETLERLRELQEATDELDLKLRQAEVIKGSWQPVGDLLIDSLQDHLEKVKALRGEIAPLKENVSHVNDLARQLTTLGIQLSPYNLSTLEDLNTRWKLLQVAVEDRVRQLHEAHRDFGPASQHFLSTSVQGPWERAISPNKVPYYINHETQTTCWDHPKMTELYQSLADLNNVRFSAYRTAMKLRRLQKALCLDLLSLSAACDALDQHNLKQNDQPMDILQIINCLTTIYDRLEQEHNNLVNVPLCVDMCLNWLLNVYDTGRTGRIRVLSFKTGIISLCKAHLEDKYRYLFKQVASSTGFCDQRRLGLLLHDSIQIPRQLGEVASFGGSNIEPSVRSCFQFANNKPEIEAALFLDWMRLEPQSMVWLPVLHRVAAAETAKHQAKCNICKECPIIGFRYRSLKHFNYDICQSCFFSGRVAKGHKMHYPMVEYCTPTTSGEDVRDFAKVLKNKFRTKRYFAKHPRMGYLPVQTVLEGDNMETPVTLINFWPVDSAPASSPQLSHDDTHSRIEHYASRLAEMENSNGSYLNDSISPNESIDDEHLLIQHYCQSLNQDSPLSQPRSPAQILISLESEERGELERILADLEEENRNLQAEYDRLKQQHEHKGLSPLPSPPEMMPTSPQSPRDAELIAEAKLLRQHKGRLEARMQILEDHNKQLESQLHRLRQLLEQPQAEAKVNGTTVSSPSTSLQRSDSSQPMLLRVVGSQTSDSMGEEDLLSPPQDTSTGLEEVMEQLNNSFPSSRGRNTPGKPMREDTM

SEQ ID NO: 51120 - protein, 300 aa, Homo sapiens
MGFSVKEDLSWPGLAVGNLFHRPRATVMVMVKGVNKLALPPGSVISYPLENAVPFSLDSVANSIHSLFSEETPVVLQLAPSEERVYMVGKANSVFEDLSVTLRQLRNRLFQENSVLSSLPLNSLSRNNEVDLLFLSELQVLHDISSLLSRHKHLAKDHSPDLYSLELAGLDEIGKRYGEDSEQFRDASKILVDALQKFADDMYSLYGGNAVVELVTVKSFDTSLIRKTRTILEAKQANPASPYNLAYKYNFEYSVVFNMVLWIMIALALAVIITSYNIWNMDPGYDSIIYRMTNQKIRMD

SEQ ID NO: 51121 - protein, 268 aa, Homo sapiens
MGFSVKEDLSWPGLAVGNLFHRPRATVMVMVKGVNKLALPPGSVISYPLENRVYMVGKANSVFEDLSVTLRQLRNRLFQENSVLSSLPLNSLSRNNEVDLLFLSELQVLHDISSLLSRHKHLAKDHSPDLYSLELAGLDEIGKRYGEDSEQFRDASKILVDALQKFADDMYSLYGGNAVVELVTVKSFDTSLIRKTRTILEAKQANPASPYNLAYKYNFEYSVVFNMVLWIMIALALAVIITSYNIWNMDPGYDSIIYRMTNQKIRMD

SEQ ID NO: 51122 - protein, 269 aa, Homo sapiens
MGFSVKEDLSWPGLAVGNLFHRPRATVMVMVKGVNKLALPPGSVISYPLENRVYMVGKANSVFEDLSVTLRQLRNRLFQENSVLSSLPLNSLSRNNEVDLLFLSELQVLHDISSLLSRHKHLAKDHSPDLYSLELAGLDEIGKRYGEDSEQFRDASKILVDALQKFADDMYSLYGGNAVVELVTVKSFDTSLIRKTRTILEAKQAKNPASPYNLAYKYNFEYSVVFNMVLWIMIALALAVIITSYNIWNMDPGYDSIIYRMTNQKIRMD

SEQ ID NO: 51123 - protein, 1218 aa, Homo sapiens
MGDDPDVPWRLLKLEILVEDKETGDGRALVHSMQISFIHQLVQSRLFADEKPLQDMYNCLHSFCLSLQLEVLHSQTLMLIRERWGDLVQVERYHAGKCLSLSVWNQQVLGRKTGTASVHKVTIKIDENDVSKPLQIFHDPPLPASDSKLVERAMKIDHLSIEKLLIDSVHARAHQKLQELKAILRGFNANENSSIETALPALVVPILEPCGNSECLHIFVDLHSGMFQLMLYGLDQATLDDMEKSVNDDMKRIIPWIQQLKFWLGQQRCKQSIKHLPTISSETLQLSNYSTHPIGNLSKNKLFIKLTRLPQYYIVVEMLEVPNKPTQLSYKYYFMSVNAADREDSPAMALLLQQFKENIQDLVFRTKTGKQTRTNAKRKLSDDPCPVESKKTKRAGEMCAFNKVLAHFVAMCDTNMPFVGLRLELSNLEIPHQGVQVEGDGFSHAIRLLKIPPCKGITEETQKALDRSLLDCTFRLQGRNNRTWVAELVFANCPLNGTSTREQGPSRHVYLTYENLLSEPVGGRKVVEMFLNDWNSIARLYECVLEFARSLPDIPAHLNIFSEVRVYNYRKLILCYGTTKGSSISIQWNSIHQKFHISLGTVGPNSGCSNCHNTILHQLQEMFNKTPNVVQLLQVLFDTQAPLNAINKLPTVPMLGLTQRTNTAYQCFSILPQSSTHIRLAFRNMYCIDIYCRSRGVVAIRDGAYSLFDNSKLVEGFYPAPGLKTFLNMFVDSNQDARRRSVNEDDNPPSPIGGDMMDSLISQLQPPPQQQPFPKQPGTSGAYPLTSPPTSYHSTVNQSPSMMHTQSPGNLHAASSPSGALRAPSPASFVPTPPPSSHGISIGPGASFASPHGTLDPSSPYTMVSPSGRAGNWPGSPQVSGPSPAARMPGMSPANPSLHSPVPDASHSPRAGTSSQTMPTNMPPPRKLPQRSWAASIPTILTHSALNILLLPSPTPGLVPGLAGSYLCSPLERFLGSVIMRRHLQRIIQQETLQLINSNEPGVIMFKTDALKCRVALSPKTNQTLQLKVTPENAGQWKPDELQVLEKFFETRVAGPPFKANTLIAFTKLLGAPTHILRDCVHIMKLELFPDQATQLKWNVQFCLTIPPSAPPIAPPGTPAVVLKSKMLFFLQLTQKTSVPPQEPVSIIVPIIYDMASGTTQQADIPRQQNSSVAAPMMVSNILKRFAEMNPPRQGECTIFAAVRDLMANLTLPPGGRP

SEQ ID NO: 51124 - protein, 471 aa, Homo sapiens [sequence omitted]

SEQ ID NO: 51125 - protein, 470 aa, Homo sapiens
MGNIELTRYTRPTPVQKHAIPIIKEKRDLMACAQTGSGKTAAFLLPILSQIYSDGPGEALRAMKENGRYGRRKQYPISLVLAPTRELAVQIYEEARKFSYRSRVRPCVVYGGADIGQQIRDLERGCHLLVATPGRLVDMMERGKIGLDFCKYLVLDEADRMLDMGFEPQIRRIVEQDTMPPKGVRHTMMFSATFPKEIQMLARDFLDEYIFLAVGRVGSTSENITQKVVWVEESDKRSFLLDLLNATGKDSLTLVFVETKKGADSLEDFLYHEGYACTSIHGDRSQRDREEALHQFRSGKSPILVATAVAARGLDISNVKHVINFDLPSDIEEYVHRIGRTGRVGNLGLATSFFNERNINITKDLLDLLVEAKQEVPSWLENMAYEHHYKGSSRGRSKSRFSGGFGARDYRQSSGASSSSFSSSRASSSRSGGGGHGSSRGFGGGGYGGFYNSDGYGGNYNSQGVDWWGN

SEQ ID NO: 51126 - protein, 820 aa, Homo sapiens
MVFEFMDGADLCFEIVKRADAGFVYSEAVASHYMRQILEALRYCHDNNIIHRDVKPHCVLLASKENSAPVKLGGFGVAIQLGESGLVAGGRVGTPHFMAPEVVKREPYGKPVDVWGCGVILFILLSGCLPFYGTKERLFEGIIKGKYKMNPRQWSHISESAKDLVRRMLMLDPAERITVYEALNHPWLKERDRYAYKIHLPETVEQLRKFNARRKLKGAVLAAVSSHKFNSFYGDPPEELPDFSEDPTSSGAVSQVLDSLEEIHALTDCSEKDLDFLHSVFQDQHLHTLLDLYDKINTKSSPQIRNPPSDAVQRAKEVLEEISCYPENNDAKELKRILTQPHFMALLQTHDVVAHEVYSDEALRVTPPPTSPYLNGDSPESANGDMDMENVTRVRLVQFQKNTDEPMGITLKMNELNHCIVARIMHGGMIHRQGTLHVGDEIREINGISVANQTVEQLQKMLREMRGSITFKIVPSYRTQSSSCERDSPSTSRQSPANGHSSTNNSVSIYVRAQFEYDPAKDDLIPCKEAGIRFRVGDIIQIISKDDHNWWQGKLENSKNGTAGLIPSPELQEWRVACIAMEKTKQEQQASCTWFGKKKKQYKDKYLAKHNAVFDQLDLVTYEEVVKLPAFKRKTLVLLGAHGVGRRHIKNTLITKHPDRFAYPIPHTTRPPKKDEENGKNYYFVSHDQMMQDISNNEYLEYGSHEDAMYGTKLETIRKIHEQGLIAILDVEPQALKVLRTAEFAPFVVFIAAPTITPGLNEDESLQRLQKESDILQRTYAHYFDLTIINNEIDETIRHLEEAVELVCTAPQWVPVSWVY

SEQ ID NO: 51127 - protein, 832 aa, Homo sapiens
MVFEFMDGADLCFEIVKRADAGFVYSEAVASHYMRQILEALRYCHDNNIIHRDVKPHCVLLASKENSAPVKLGGFGVAIQLGESGLVAGGRVGTPHFMAPEVVKREPYGKPVDVWGCGVILFILLSGCLPFYGTKERLFEGIIKGKYKMNPRQWSHISESAKDLVRRMLMLDPAERITVYEALNHPWLKERDRYAYKIHLPETVEQLRKFNARRKLKGAVLAAVSSHKFNSFYGDPPEELPDFSEDPTSSGAVSQVLDSLEEIHALTDCSEKDLDFLHSVFQDQHLHTLLDLYDKINTKSSPQIRNPPSDAVQRAKEVLEEISCYPENNDAKELKRILTQPHFMALLQTHDVVAHEVYSDEALRVTPPPTSPYLNGDSPESANGDMDMENVTRVRLVQFQKNTDEPMGITLKMNELNHCIVARIMHGGMIHRQGTLHVGDEIREINGISVANQTVEQLQKMLREMRGSITFKIVPSYRTQSSSCERDSPSTSRQSPANGHSSTNNSVSDLPSTTQPKGRQIYVRAQFEYDPAKDDLIPCKEAGIRFRVGDIIQIISKDDHNWWQGKLENSKNGTAGLIPSPELQEWRVACIAMEKTKQEQQASCTWFGKKKKQYKDKYLAKHNAVFDQLDLVTYEEVVKLPAFKRKTLVLLGAHGVGRRHIKNTLITKHPDRFAYPIPHTTRPPKKDEENGKNYYFVSHDQMMQDISNNEYLEYGSHEDAMYGTKLETIRKIHEQGLIAILDVEPQALKVLRTAEFAPFVVFIAAPTITPGLNEDESLQRLQKESDILQRTYAHYFDLTIINNEIDETIRHLEEAVELVCTAPQWVPVSWVY

SEQ ID NO: 51128 - protein, 809 aa, Homo sapiens
MVFEFMDGADLCFEIVKRADAGFVYSEAVASHYMRQILEALRYCHDNNIIHRDVKPHCVLLASKENSAPVKLGGFGVAIQLGESGLVAGGRVGTPHFMAPEVVKREPYGKPVDVWGCGVILFILLSGCLPFYGTKERLFEGIIKGKYKMNPRQWSHISESAKDLVRRMLMLDPAERITVYEALNHPWLKERDRYAYKIHLPETVEQLRKFNARRKLKGAVLAAVSSHKFNSFYGDPPEELPDFSEDPTSSGAVSQVLDSLEEIHALTDCSEKDLDFLHSVFQDQHLHTLLDLYDKINTKSSPQIRNPPSDAVQRAKEVLEEISCYPENNDAKELKRILTQPHFMALLQTHDVVAHEVYSDEALRVTPPPTSPYLNGDSPESANGDMDMENVTRVRLVQFQKNTDEPMGITLKMNELNHCIVARIMHGGMIHRQGTLHVGDEIREINGISVANQTVEQLQKMLREMRGSITFKIVPSYRTQSSSCEDLPSTTQPKGRQIYVRAQFEYDPAKDDLIPCKEAGIRFRVGDIIQIISKDDHNWWQGKLENSKNGTAGLIPSPELQEWRVACIAMEKTKQEQQASCTWFGKKKKQYKDKYLAKHNAVFDQLDLVTYEEVVKLPAFKRKTLVLLGAHGVGRRHIKNTLITKHPDRFAYPIPHTTRPPKKDEENGKNYYFVSHDQMMQDISNNEYLEYGSHEDAMYGTKLETIRKIHEQGLIAILDVEPQALKVLRTAEFAPFVVFIAAPTITPGLNEDESLQRLQKESDILQRTYAHYFDLTIINNEIDETIRHLEEAVELVCTAPQWVPVSWVY

SEQ ID NO: 51129 - protein, 164 aa, Homo sapiens [sequence omitted]

SEQ ID NO: 51130 - protein, 343 aa, Homo sapiens
MVDTVTWHKMRGAQMIVAMKAVSLGFDLDRGEVGTVPSPVEFMGYLYFVGTIVFGPWISFHSYLQAVQGRPLSCRWLQKVARSLALALLCLVLSTCVGPYLFPYFIPLNGDRLLRNKKRKARWLRAYESAVSFHFSNYFVGFLSEATATLAGAGFTEEKDHLEWDLTVSKPLNVELPRSMVEVVTSWNLPMSYWLNNYVFKNALRLGTFSAVLVTYAASALLHGFSFHLAAVLLSLAFITYVEHVLRKRLARILSACVLSKRCPPDCSHQHRLGLGVRALNLLFGALAIFHLAYLGSLFDVDVDDTTEEQGYGMAYTVHKWSELSWASHWVTFGCWIFYRLIG

SEQ ID NO: 51131 - protein, 337 aa, Homo sapiens
MVDTVTWHKMRGAQMIVAMKAVSLGFDLDRGEVGTVPSPVEFMGYLYFVGTIVFGPWISFHSYLQAVQGRPLSCRWLQKVARSLALALLCLVLSTCVGPYLFPYFIPLNGDRLLRKWLRAYESAVSFHFSNYFVGFLSEATATLAGAGFTEEKDHLEWDLTVSKPLNVELPRSMVEVVTSWNLPMSYWLNNYVFKNALRLGTFSAVLVTYAASALLHGFSFHLAAVLLSLAFITYVEHVLRKRLARILSACVLSKRCPPDCSHQHRLGLGVRALNLLFGALAIFHLAYLGSLFDVDVDDTTEEQGYGMAYTVHKWSELSWASHWVTFGCWIFYRLIG

SEQ ID NO: 51132 - protein, 393 aa, Homo sapiens
MEDFEDDPRALGARGHRRSVSRGSYQLQAQMNRAVYEDRPPGSVVPTSAAEASRAMAGDTSLSENYAFAGMYHVFDQHVDEAVPRVRFANDDRHRLACCSLDGSISLCQLVPAPPTVLRVLRGHTRGVSDFAWSLSNDILVSTSLDATMRIWASEDGRCIREIPDPDSAELLCCTFQPVNNNLTVVGNAKHNVHVMNISTGKKVKGGSSKLTGRVLALSFDAPGRLLWAGDDRGSVFSFLFDMATGKLTKAKRLVVHEGSPVTSISARSWVSREARDPSLLINACLNKLLLYRVVDNEGTLQLKRSFPIEQSSHPVRSIFCPLMSFRQGACVVTGSEDMCVHFFDVERAAKAAVNKLQGHSAPVLDVSFNCDESLLASSDASGMVIVWRREQK

SEQ ID NO: 51133 - protein, 1142 aa, Homo sapiens
MDLNLEAEALAGTGLVLDEQLNEFHCLWDDSFPEGPERLHAIKEQLIQEGLLDRCVSFQARFAEKEELMLVHSLEYIDLMETTQYMNEGELRVLADTYDSVYLHPNSYSCACLASGSVLRLVDAVLGAEIRNGMAIIRPPGHHAQHSLMDGYCMFNHVAVAARYAQQKHRIRRVLIVDWDVHHGQGTQFTFDQDPSVLYFSIHRYEQGRFWPHLKASNWSTTGFGQGQGYTINVPWNQVGMRDADYIAAFLHVLLPVALEFQPQLVLVAAGFDALQGDPKGEMAATPAGFAQLTHLLMGLAGGKLILSLEGGYNLRALAEGVSASLHTLLGDPCPMLESPGAPCRSAQASVSCALEALEPFWEVLVRSTETVERDNMEEDNVEESEEEGPWEPPVLPILTWPVLQSRTGLVYDQNMMNHCNLWDSHHPEVPQRILRIMCRLEELGLAGRCLTLTPRPATEAELLTCHSAEYVGHLRATEKMKTRELHRESSNFDSIYICPSTFACAQLATGAACRLVEAVLSGEVLNGAAVVRPPGHHAEQDAACGFCFFNSVAVAARHAQTISGHALRILIVDWDVHHGNGTQHMFEDDPSVLYVSLHRYDHGTFFPMGDEGASSQIGRAAGTGFTVNVAWNGPRMGDADYLAAWHRLVLPIAYEFNPELVLVSAGFDAARGDPLGGCQVSPEGYAHLTHLLMGLASGRIILILEGGYNLTSISESMAACTRSLLGDPPPLLTLPRPPLSGALASITETIQVHRRYWRSLRVMKVEDREGPSSSKLVTKKAPQPAKPRLAERMTTREKKVLEAGMGKVTSASFGEESTPGQTNSETAVVALTQDQPSEAATGGATLAQTISEAAIGGAMLGQTTSEEAVGGATPDQTTSEETVGGAILDQTTSEDAVGGATLGQTTSEEAVGGATLAQTTSEAAMEGATLDQTTSEEAPGGTELIQTPLASSTDHQTPPTSPVQGTTPQISPSTLIGSLRTLELGSESQGASESQAPGEENLLGEAAGGQDMADSMLMQGSRGLTDQAIFYAVTPLPWCPHLVAVCPIPAAGLDVTQPCGDCGTIQENWVCLSCYQVYCGRYINGHMLQHHGNSGHPLVLSYIDLSAWCYYCQAYVHHQALLDVKNIAHQNKFGEDMPHPH

SEQ ID NO: 51134 - protein, 704 aa, Homo sapiens
MEQLEQENQQLKEGAAGAGVAQAGPLVDGELLRLQAENTALQKNVAALQERYGKEAGKFSAVSEGQGDPPGGLAPTVLAPMPLAEVELKWEMEKEEKRLLWEQLQGLESSKQAETSRLQEELAKLSEKLKKKQESFCRLQTEKETLFNDSRNKIEELQQRKEADHKAQLARTQKLQQELEAANQSLAELRDQRQGERLEHAAALRALQDQIQTAKTQELNMLREQTTGLAAELQQQQAEYEDLMGQKDDLNSQLQESLRANSRLLEQLQEIGQEKEQLTQELQEARKSAEKRKAMLDELAMETLQEKSQHKEELGAVRLRHEKEVLGVRARYERELRELHEDKKRQEEELRGQIREEKARTRELETLQQTVEELQAQVHSMDGAKGWFERRLKEAEESLQQQQQEQEEALKQCREQHAAELKGKEEELQDVRDQLEQAQEERDCHLKTISSLKQEVKDTVDGQRILEKKGSAALKDLKRQLHLERKRADKLQERLQDILTNSKSRSGLEELVLSEMNSPSRTQTGDSSSISSFSYREILREKESSAVPARSLSSSPQAQPPRPAELSDEEVAELFQRLAETQQEKWMLEEKVKHLEVSSASMAEDLCRKSAIIETYVMDSRIDVSVAAGHTDRSGLGSVLRDLVKPGDENLREMNKKLQNMLEEQLTKNMHLHKDMEVLSQEIVRLSKECVGPPDPDLEPGETS

SEQ ID NO: 51135 - protein, 665 aa, Homo sapiens
MVELEALLPPPGAVPGGAGVWVPGGRPPVLRGLVRVLNRSFEKAVHVRASHDGWASFCDHPARYVPRSPPWAGAGGTGAGDPILDPGLGLGPGQASASSPDDGGRTDRFAFQLPFAEGAGDGARLDFVVRYETPEGTFWANNHGRNYTVLLRIAPAPTPTDAEGLPQQQQLPQLEPQPECQGPVEAEARQLKSCMKPVRRRPAEEELKTKNMDDNTFAMAEHPDVQESVGPLVAPTPLRPWPQMTLQVSDVPMTGNPAEEGDVPRSSPPVAFTEVLQAPAIRIPPSSPLCGLGGSPRDQASGPDASEGATGPFLEPSQQQAEATWGVSSENGGGLEAVSGSEELLGEDTIDQELEQLYLSHLSRLRAAVAAGGAGGGGEGSTDGGMSPSHPLGILTDRDLILKWPGPERALNSALAEEITLHYARLGRGVELIKDTEDPDDEGEGEEGLSVTPSSPEGDSPKESPPEILSGARSVVATMGDVWLPWAEGSGCDGPVVLGTEGQFIGDPEKGMGKDTSSLHMNRVIAGVTESLGEAGTEAQIEVTSEWAGSLDPISGKEPASPVLLQGQNPTLLSPLGAEVCLSSVARPHVSSQDEKDAGPSLEPPKKSPTLAVPAECVCALPPQLRGPLTQTLGVLAGLVVVPVALNSGVSLLVLALCLSLAWFS

SEQ ID NO: 51136 - protein, 1442 aa, Homo sapiens
MRTGDELVNINGTPLYGSRQEALILIKGSFRILKLIVRRRNAPVSRPHSWHVAKLLEGCPEAATTMHFPSEAFSLSWHSGCNTSDVCVQWCPLSRHCSTEKSSSIGSMESLEQPGQATYESHLLPIDQNMYPNQRDSAYSSFSASSNASDCALSLRPEEPASTDCIMQGPGPTKAPSGRPNVAETSGGSRRTNGGHLTPSSQMSSRPQEGYQSGPAKAVRGPPQPPVRRDSLQASRAQLLNGEQRRASEPVVPLPQKEKLSLEPVLPARNPNRFCCLSGHDQVTSEGHQNCEFSQPPESSQQGSEHLLMQASTKAVGSPKACDRASSVDSNPLNEASAELAKASFGRPPHLIGPTGHRHSAPEQLLASHLQHVHLDTRGSKGMELPPVQDGHQWTLSPLHSSHKGKKSPCPPTGGTHDQSSKERKTRQVDDRSLVLGHQSQSSPPHGEADGHPSEKGFLDPNRTSRAASELANQQPSASGSLVQQATDCSSTTKAASGTEAGEEGDSEPKECSRMGGRRSGGTRGRSIQNRRKSERFATNLRNEIQRRKAQLQKSKGPLSQLCDTKEPVEETQEPPESPPLTASNTSLLSSCKKPPSPRDKLFNKSMMLRARSSECLSQAPESHESRTGLEGRISPGQRPGQSSLGLNTWWKAPDPSSSDPEKAHAHCGVRGGHWRWSPEHNSQPLVAAAMEGPSNPGDNKELKASTAQAGEDAILLPFADRRKFFEESSKSLSTSHLPGLTTHSNKTFTQRPKPIDQNFQPMSSSCRELRRHPMDQSYHSADQPYHATDQSYHSMSPLQSETPTYSECFASKGLENSMCCKPLHCGDFDYHRTCSYSCSVQGALVHDPCIYCSGEICPALLKRNMMPNCYNCRCHHHQCIRCSVCYHNPQHSALEDSSLAPGNTWKPRKLTVQEFPGDKWNPITGNRKTSQSGREMAHSKTSFSWATPFHPCLENPALDLSSYRAISSLDLLGDFKHALKKSEETSVYEEGSSLASMPHPLRSRAFSESHISLAPQSTRAWGQHRRELFSKGDETQSDLLGARKKAFPPPRPPPPNWEKYRLFRAAQQQKQQQQQQKQQEEEEEEEEEEEEEEEEEEEEAEEEEEELPPQYFSSETSGSCALNPEEVLEQPQPLSFGHLEGSRQGSQSVPAEQESFALHSSDFLPPIRGHLGSQPEQAQPPCYYGIGGLWRTSGQEATESAKQEFQHFSPPSGAPGIPTSYSAYYNISVAKAELLNKLKDQPEMAEIGLGEEEVDHELAQKKIQLIESISRKLSVLREAQRGLLEDINANSALGEEVEANLKAVCKSNEFEKYHLFVGDLDKVVNLLLSLSGRLARVENALNSIDSEANQEKLVLIEKKQQLTGQLADAKELKEHVDRREKLVFGMVSRYLPQDQLQDYQHFVKMKSALIIEQRELEEKIKLGEEQLKCLRESLLLGPSNF

SEQ ID NO: 51137 - protein, 227 aa, Homo sapiens
MRGVGLGPALPPPPPYVILEEGGIRAYFTLGAECPGWDSTIESGYGEAPPPTESLEALPTPEASGGSLEIDFQVVQSSSFGGEGALETCSAVGWAPQRLVDPKSKEEAIIIVEDEDEDERESMRSSRRRRRRRRRKQRKVKRESRERNAERMESILQALEDIQLDLEAVNIKAGKAFLRLKRKFIQMRRPFLERRDLIIQHIPGFWVKALHSSVPQPPQNFNFDQPT

SEQ ID NO: 51138 - protein, 149 aa, Homo sapiens
MGKSGSGKTSMRSIIFANYIARDTRRLGATIDVEHSHVRFLGNLVLNLWDCGGQDTFMENYFTSQRDNIFRNVEVLIYVFDVESRELEKDMHYYQSCLEAILQNSPDAKIFCLVHKMDLVQEDQRDLVRNRRSAAPNARHALQTYFVEV

SEQ ID NO: 51139 - protein, 1028 aa, Homo sapiens
MNSQSSRSHAIFTISLEQRKKSDKNSSFRSKLHLVDLAGSERQKKTKAEGDRLKEGININRGLLCLGNVISALGDDKKGGFVPYRDSKLTRLLQDSLGGNSHTLMIACVSPADSNLEETLNTLRYADRARKIKNKPIVNIDPQTAELNHLKQQVQQLQVLLLQAHGGTLPGSITVEPSENLQSLMEKNQSLVEENEKLSRGLSEAAGQTAQMLERIILTEQANEKMNAKLEELRQHAACKLDLQKLVETLEDQELKENVEIICNLQQLITQLSDETVACMAAAIDTAVEQEAQVETSPETSRSSDAFTTQHALRQAQMSKELVELNKALALKEALARKMTQNDSQLQPIQYQYQDNIKELELEVINLQKEKEELVLELQTAKKDANQAKLSERRRKRLQELEGQIADLKKKLNEQSKLLKLKESTERTVSKLNQEIRMMKNQRVQLMRQMKEDAEKFRQWKQKKDKEVIQLKERDRKRQYELLKLERNFQKQSNVLRRKTEEAAAANKRLKDALQKQREVADKRKETQSRGMEGTAARVKNWLGNEIEVMVSTEEAKRHLNDLLEDRKILAQDVAQLKEKKESGENPPPKLRRRTFSLTEVRGQVSESEDSITKQIESLETEMEFRSAQIADLQQKLLDAESEDRPKQRWENIATILEAKCALKYLIGELVSSKIQVSKLESSLKQSKTSCADMQKMLFEERNHFAEIETELQAELVRMEQQHQEKVLYLLSQLQQSQMAEKQLEESVSEKEQQLLSTLKCQDEELEKMREVCEQNQQLLRENEIIKQKLTLLQVASRQKHLPKDTLLSPDSSFEYVPPKPKPSRVKEKFLEQSMDIEDLKYCSEHSVNEHEDGDGDDDEGDDEEWKPTKLVKVSRKNIQGCSCKGWCGNKQCGCRKQKSDCGVDCCCDPTKCRNRQQGKDSLGTVERTQDSEGSFKLEDPTEVTPGLSFFNPVCATPNSKILKEMCDVEQVLSKKTPPAPSPFDLPELKHVATEYQENKAPGKKKKRALASNTSFFSGCSPIEEEAH

SEQ ID NO: 51140 - protein, 1875 aa, Homo sapiens
MEDIVDLAKKAANDSLLIGGLLRIGYKIENKILAMEEALNWIKYAGDVTILTKLGSIDNCWPMLSIFFTEYKYHITKIVMEDCNLLEELKTQSCMDCIEQGELMKMKGNEEFSKERFDIAIIYYTRAIEYRPENHLLYGNRALCFLRTGQFRNALGDGKRATILKNTWPKGHYRYCDALSMLGEYNWALQANITAQKLCKNDPEGIKDLIQQHVKLQKQIEDLQGRTANKNPIKAFYENRAYTPRSLSAPVFSTSLNFVEKERDFRKINHEMANGGNQNLKVMDEALMVDDCDCHPEFSPPSSQPPKHKGKQKSRNNESEKFSSSSQLTLPADLKNILEKQFSKSSRGAHQDFANIMTMLRSLIQDGYTALLEQRCRSAAHAFTELLNGLDPQKIKQLNLAMINYVLVVYGLAISLLGIGQPEELSEAENQFKRIIEHYHNEGLDCLAYCGIGKVYLKKNRFLEALNHFEKARTLIYRLPGVLTWPTSNVIIEESQPEKIKMLLEKFVEECKFPPVPDAICCYQKCCGYSKIQIYITDPDFKGFIRISCCQYCKIEFHMNCWKKLKTTTFNDKIDKDFLQGICLTPDCEGVISKIIIFSSGGQVKCEFEHKVIKEKVPPRPILKQKCSSLEKLRLKEDKKLKRKIQKKEAKKLAQERMEEDLRESNPPKNEEQKETVDNVQHCQFLDDRILQCIKQYADKIKSGIWNTATLLKELLSWKVLSTEDYTTCFSSRNFLNEAVDYVIRHLIQEKNRVKTRIFLHVLSELKEVEPKLAAWIRKLNSFGLDATGPFFSRYEASLKQLDFSIMTFLWNEKYGHKLDSIEGKQLDYFFEPTSSKEARCLIWLLEEHRDKFPALHSALDEFFDIMDSRCTVLRKQDSGEAPFSSTKVKNKGKKKKPKDSKPMLVGSGTTSVTPNNEIITSSEDHSNQNSDTAGPFAVPDHLRQDVEEFEALYDQHSNEYVVRNKKLWDMNPKQKCSTLYDYFSQLLEEHGPLDMSHKMFSEEYEFFPEETRPILEKAGGLKSFLLGCPRFVVIDNCIALKKVASRLKKKRKKKNIKTKVEDISKAGEYLQVKLPLNSAAREFKPDVKSKPVSGSSSAPASEDVKPKPLSANSPKPACEDVKAKPVSDNSSRQVSEDGKPKGFSSNSPKPGSEDANYKRVSSNSPKPVLEDVKPTYWAQSHLVTGYCTYLPFQRFDNTRTSPAYINVLPGLPQYTSIYTPLVSLSPEYQLPRSVPVVPSFVANDRADKNATAYFEGHHLNAENAAGHQIASETQILEDSSLISVKSQCSTGDAHTVLSESNRKDGHCGNSNNKCEVIPESTSAVTNIPQVQMVAIQVSWNITHQEVNTEPYNPFEKQQGEISRIEKEYQVLQDQLKEAYENYEQIKLKGLEETRDLEEKLKRHLEENKISKTELDWLLQDLEREIKKWQEEKKEIQKTLKSLKKKIKKVSNANEMYTQKNDGNDKEHELHLDQSLEISNTLTNEKMKIEECIKKGKKDYEESHQRAVAAEVSVLENWKESEVYKLQIMQSQAEAYLKKLELISHDPAAYPDMESDICSWELFLSNVTKETEKAKYQFEEQIKAIKNGSRLSELSKVQISELSFPACNTVHPELLPESSGHDDQGFMTSASDVTGNQAALHRDPSVFSAGDSPGEAPSALLPGPPPSQPEATQLPGPKGAGQAALSEQSPAADQKQPVPPGCAACSSQSPKKPFNSIIEHLSVVFPCYNSTELAGFIKKVRSKNKNSLSGLSIDEIVQRVTEHILDEQKKKKPNPGKDKRTYEPSSAAHVTRSSQGPPLAVVAPSPKTKGQKAEDVPVRVALGASSCEICHEVFKSKNVRVLKCGHKYHKGCFKQWLKGQSACPACQTCDLLSEE

SEQ ID NO: 51141 - protein, 193 aa, Homo sapiens [sequence omitted]

SEQ ID NO: 51142 - protein, 69 aa, Homo sapiens
MAVNYENTLIAAGSCDKVVRVWCLRTCAPVAVLQGHSASITSIQVRKVIKFSLNICKKGENSLISCYIV

SEQ ID NO: 51143 - protein, 708 aa, Homo sapiens
MEEGEADSCHDEGVVKEIPITHHVKEGYEKADPAQFELLKVLGQGSFGKVFLVRKKTGPDAGQLYAMKVLKKASLKVRDRVRTKMERDILVEVNHPFIVKLHYAFQTEGKLYLILDFLRGGDVFTRLSKEVLFTEEDVKFYLAELALALDHLHQLGIVYRDLKPENILLDEIGHIKLTDFGLSKESVDQEKKAYSFCGTVEYMAPEVVNRRGHSQSADWWSYGVLMFEMLTGTLPFQGKDRNETMNMILKAKLGMPQFLSAEAQSLLRMLFKRNPANRLGSEGVEEIKRHLFFANIDWDKLYKREVQPPFKPASGKPDDTFCFDPEFTAKTPKDSPGLPASANAHQLFKGFSFVATSIAEEYKITPITSANVLPIVQINGNAAQFGEVYELKEDIGVGSYSVCKRCIHATTNMEFAVKIIDKSKRDPSEEIEILMRYGQHPNIITLKDVFDDGRYVYLVTDLMKGGELLDRILKQKCFSEREASDILYVISKTVDYLHCQGVVHRDLKPSNILYMDESASADSIRICDFGFAKQLRGENGLLLTPCYTANFVAPEVLMQQGYDAACDIWSLGVLFYTMLAGYTPFANGPNDTPEEILLRIGNGKFSLSGGNWDNISDGAKDLLSHMLHMDPHQRYTAEQILKHSWITHRDQLPNDQPKRNDVSHVVKGAMVATYSALTHKTFQPVLEPVAASSLAQRRSMKKRTSTGL

SEQ ID NO: 51144 - protein, 149 aa, Homo sapiens
MDSTEPPCSQKRYEEIVKEVSTYIKKIGYNPNTVAFVPISGWNDDNMLEATANVPSFKGWKVTCKDGNASGTTLLEALDYILPPSGPTDKPLRLPLQDVHKIGGIGTVLGGQVKTGVLKPGMVVSFAAVDVTTEIKSVEMHQEALSEIK

SEQ ID NO: 51145 - protein, 346 aa, Homo sapiens [sequence omitted]

SEQ ID NO: 51146 - protein, 388 aa, Homo sapiens [sequence omitted]

SEQ ID NO: 51147 - protein, 248 aa, Homo sapiens [sequence omitted]

SEQ ID NO: 51148 - protein, 1349 aa, Homo sapiens
MPGARPKNKSKVMPGASTKVETSAVGGARPKSKAKAIPVSRFKEEAQMWAQPRFGAERLSKTERNSQTNIIASPLVSTDSVLVAKTKYLSEDRELVNTDTESFPRRKAHYQAGFQPSFRSKEETNMGSWCCPRPTSKQEASPNSDFKWVDKSVSSLFWSGDEVTAKFHPGNRVKDSNRSMHMANQEANTMSRSQTNQELYIASSSGSEDESVKTPWFWARDKTNTWSGPREDPNSRSRFRSKKEVYVESSSGSEHEDHLESWFGAGKEAKFRSKMRAGKEANNRARHRAKREACIDFMPGSIDVIKKESCFWPEENANTFSRPMIKKEARARAMTKEEAKTKARARAKQEARSEEEALIGTWFWATDESSMADEASIESSLQVEDESIIGSWFWTEEEASMGTGASSKSRPRTDGERIGDSLFGAREKTSMKTGAEATSESILAADDEQVIIGSWFWAGEEVNQEAEEETIFGSWFWVIDAASVESGVGVSCESRTRSEEEEVIGPWFWSGEQVDIEAGIGEEARPGAEEETIFGSWFWAENQTYMDCRAETSCDTMQGAEEEEPIIGSWFWTRVEACVEGDVNSKSSLEDKEEAMIPCFGAKEEVSMKHGTGVRCRFMAGAEETNNKSCFWAEKEPCMYPAGGGSWKSRPEEEEDIVNSWFWSRKYTKPEAIIGSWLWATEESNIDGTGEKAKLLTEEETIINSWFWKEDEAISEATDREESRPEAEEGDIIGSWFWAGEEDRLEPAAETREEDRLAAEKEGIVGSWFGAREETIRREAGSCSKSSPKAEEEEVIIGSWFWEEEASPEAVAGVGFESKPGTEEEEITVGSWFWPEEEASIQAGSQAVEEMESETEEETIFGSWFWDGKEVSEEAGPCCVSKPEDDEEMIVESWFWSRDKAIKETGTVATCESKPENEEGAIVGSWFEAEDEVDNRTDNGSNCGSRTLADEDEAIVGSWFWAGDEAHFESNPSPVFRAICRSTCSVEQEPDPSRRPQSWEEVTVQFKPGPWGRVGFPSISPFRFPKEAASLFCEMFGGKPRNMVLSPEGEDQESLLQPDQPSPEFPFQYDPSYRSVQEIREHLRAKESTEPESSSCNCIQCELKIGSEEFEELLLLMEKIRDPFIHEISKIAMGMRSASQFTRDFIRDSGVVSLIETLLNYPSSRVRTSFLENMIRMAPPYPNLNIIQTYICKVCEETLAYSVDSPEQLSGIRMIRHLTTTTDYHTLVANYMSGFLSLLATGNAKTRFHVLKMLLNLSENLFMTKELLSAEAVSEFIGLFNREETNDNIQIVLAIFENIGNNIKKETVFSDDDFNIEPLISAFHKVEKFAKELQGKTDNQNDPEGDQEN

SEQ ID NO: 51149 - protein, 98 aa, Homo sapiens [sequence omitted]

SEQ ID NO: 51150 - protein, 226 aa, Homo sapiens
MDNTVVIEDIKKMCRVLPLSADTAGDRPPDSLTASNQSKGTSAYCSAWKPLLLIVPLRLGINQINPVYVDAFKECFKMPQSLGALGGKPNNAYYFIGFLGDELIFLDPHTTQTFVDTEENGTVNDQTFHCLQSPQRMNILNLDPSVALGFFCKEEKDFDNWCSLVQKEILKENLRMFELVQKHPSHWPPFVPPAKPEVTTTGAEFIDSTEQLEEFDLEEDFEILSV

SEQ ID NO: 51151 - protein, 238 aa, Homo sapiens
MDCVYYNWQYLLCSWKPGIGVLLDTNYNLFYWYEGLDHALQCVDYIKADGQNIGCRFPYLEASDYKDFYICVNGSSENKPIRSSYFTFQLQNIVKPLPPVYLTFTRESSCEIKLKWSIPLGPIPARCFDYEIEIREDDTTLVTATVENETYTLKTTNETRQLCFVVRSKVNIYCSDDGIWSEWSDKQCWEGEDLSKKTLLRFWLPFGFILILVIFVTGLLLRKPNTYPKMIPEFFCDT

SEQ ID NO: 51152 - protein, 224 aa, Homo sapiens
MVSTIVTYPTDLIKTRLIMQNILEPSYRGLLHAFSTIYQQEGFLALYRGVSLTVVGALPFSAGSLLVYMNLEKIWNGPRDQFSLPQNFANVCLAAAVTQTLSFPFETVKRKMQAQSPYLPHSGGVDVHFSGAVDCFRQIVKAQGVLGLWNGLTANLLKIVPYFGIMFSTFEFCKRICLYQNGYILSPLSYKLTPGVDQSLQPQELRELKKFFKTRKPKPKKPTL

SEQ ID NO: 51153 - protein, 509 aa, Homo sapiens
MPIITESFSLSAEDYEMKKIIVTDSDDDDDDVIFCSEILPTKETLPSNNTVAQVQSNPGPVAISDVAPSASNNSPPLTNITPTQKLPTPVNQATLSQTQGSEKLLVSSAPTHLTPNIILLNQTPLSTPPNVSSSLPNHMPSSINLLVQNQQTPNSAILTGNKANEEEEEEIIDDDDDTISSSPDSAVSNTSLVPQADTSQNTSFDGSLIQKMQIPTLLQEPLSNSLKISDIITRNTNDPGVGSKHLMEGQKIITLDTATEIEGLSTGCKVYANIGEDTYDIVIPVKDDPDEGEARLENEIPKTSGSEMANKRMKVKHDDHYELIVDGRVYYICIVCKRSYVCLTSLRRHFNIHSWEKKYPCRYCEKVFPLAEYRTKHEIHHTGERRYQCLACGKSFINYQFMSSHIKSVHSQDPSGDSKLYRLHPCRSLQIRQYAYLSDRSSTIPAMKDDGIGYKVDTGKEPPVGTTTSTQNKPMTWEDIFIQQENDSIFKQNVTDGSTEFEFIIPESY

SEQ ID NO: 51154 - protein, 54 aa, Homo sapiens
MMSSEGRIEDLNEGMDFDTMDIDLPPSKNRRERTELKPDFFDPASIMDESVGLI

SEQ ID NO: 51155 - protein, 251 aa, Homo sapiens
MKDRETNKSRGFAFVTFESPADAKDAARDMNGKSLDGKAIKVEQATKPSFESGRRGPPPPPRSRGPPRGLRGGRGGSGGTRGPPSRGGHMDDGGYSMNFNMSSSRGPLPVKRGPPPRSGGPPPKRSAPSGPVRSSSGMGGRAPVSRGRDSYGGPPRREPLPSRRDVYLSPRDDGYSTKDSYSSRDYPSSRDTRDYAPPPRDYTYRDYGHSSSRDDYPSRGYSDRDGYGRDRDYSDHPSGGSYRDSYESYGW

SEQ ID NO: 51156 - protein, 352 aa, Homo sapiens
MKDRETNKSRGFAFVTFESPADAKDAARDMNGKSLDGKAIKVEQATKPSFESGRRGPPPPPRSRGPPRGLRGGRGGSGGTRGPPSRGGHMDDGGYSMNFNMSSSRGPLPVKRGPPPRSGGPPPKRSAPSGPVRSSSGMGGRAPVSRGRDSYGGPPRREPLPSRRDVYLSPRDDGYSTKDSYSSRDYPSSRDTRDYAPPPRDYTYRDYGHSSSRDDYPSRGYSDRDGYGRDRDYSDHPSGGSYRDSYESYGNSRSAPPTRGPPPSYGGSSRYDDYSSSRDGYGGSRDSYSSSRSDLYSSGRDRVGRQERGLPPSMERGYPPPRDSYSSSSRGAPRGGGRGGSRSDRGGGRSRY

SEQ ID NO: 51157 - protein, 847 aa, Homo sapiens
MALNYQGKSQKRSAVEKSINAFLIVYLFILLTKAAVCTTLKYVWQSTPYNDEPWYNQKTQKERETLKVLKMFTDFLSFMVLFNFIIPVSMYVTVEMQKFLGSFFISWDKDFYDEEINEGALVNTSDLNEELGQVDYVFTDKTGTLTENSMEFIECCIDGHKYKGVTQEVDGLSQTDGTLTYFDKVDKNREELFLRALCLCHTVEIKTNDAVDGATESAELTYISSSPDEIALVKGAKRYGFTFLGNRNGYMRVENQRKEIEEYELLHTLNFDAVRRRMSVIVKTQEGDILLFCKGADSAVFPRVQNHEIELTKVHVERNAMDGYRTLCVAFKEIAPDDYERINRQLIEAKMALQDREEKMEKVFDDIETNMNLIGATAVEDKLQDQAAETIEALHAAGLKVWVLTGDKMETAKSTCYACRLFQTNTELLELTTKTIEESERKEDRLHELLIEYRKKLLHEFPKSTRSFKKAWTEHQEYGLIIDGSTLSLILNSSQDSSSNNYKSIFLQICMKCTAVLCCRMAPLQKAQIVRMVKNLKGSPITLSIGDGANDVSMILESHVGIGIKGKEGRQAARNSDYSVPKFKHLKKLLLAHGHLYYVRIAHLVQYFFYKNLCFILPQFLYQFFCGFSQQPLYDAAYLTMYNICFTSLPILAYSLLEQHINIDTLTSDPRLYMKISGNAMLQLGPFLYWTFLAAFEGTVFFFGTYFLFQTASLEENGKVYGNWTFGTIVFTVLVFTVTLKLALDTRFWTWINHFVIWGSLAFYVFFSFFWGGIIWPFLKQQRMYFVFAQMLSSVSTWLAIILLIFISLFPEILLIVLKNVRRRSARNPNLELPMLLSYKHTDSGYS

SEQ ID NO: 51158 - protein, 497 aa, Homo sapiens
MIKGEFYVIEYAACDATYNEIVTIERLRSVNPNKPATKDTFHKIKLDVPEDLRQMCAKEAAHKDFKKAVGAFSVTYDPENYQLVILSINEVTSKRAHMLIDMHFRSLRTKLSLIMRNEEASKQLESSRQLASRFHEQFIVREDLMGLAIGTHGANIQQARKVPGVTAIDLDEDTCTFHIYGEDQDAVKKARSFLEFAEDVIQVPRNLVGKVIGKNGKLIQEIVDKSGVVRVRIEAENEKNVPQEEEIMPPNSLPSNNSRVGPNAPEEKKHLDIKENSTHFSQPNSTKVQRGMVPFVFVGTKDSIANATVLLDYHLNYLKEVDQLRLERLQIDEQLRQIGASSRPPPNRTDKEKSYVTDDGQGMGRGSRPYRNRGHGRRGPGYTSESDHRDELSDWSLAPTEEERESFLRRGDGRRRGGGGRGQGGRGRGGGFKGNDDHSRTDNRPRNPREAKGRTTDGSLQNTSSEGSRLRTGKDRNQKKEKPDSVDGQQPLVNGVP

SEQ ID NO: 51159 - protein, 552 aa, Homo sapiens
MYICPFMGAVSGTLTVTDFKLYFKNVERDPHFILDVPLGVISRVEKIGAQSHGDNSCGIEIVCKDMRNLRLAYKQEEQSKLGIFENLNKHAFPLSNGQALFAFSYKEKFPINGWKVYDPVSEYKRQGLPNESWKISKINSNYEFCDTYPAIIVVPTSVKDDDLSKVAAFRAKGRVPVLSWIHPESQATITRCSQPLVGPNDKRCKEDEKYLQTIMDANAQSHKLIIFDARQNSVADTNKTKGGGYESESAYPNAELVFLEIHNIHVMRESLRKLKEIVYPSIDEARWLSNVDGTHWLEYIRMLLAGAVRIADKIESGKTSVVVHCSDGWDRTAQLTSLAMLMLDSYYRTIKGFETLVEKEWISFGHRFALRVGHGNDNHADADRSPIFLQFVDCVWQMTRQFPSAFEFNELFLITILDHLYSCLFGTFLCNCEQQRFKEDVYTKTISLWSYINSQLDEFSNPFFVNYENHVLYPVASLSHLELWVNYYVRWNPRMRPQMPIHQNLKELLAVRAELQKRVEGLQREVATRAVSSSSERGSSPSHSATSVHTSV

SEQ ID NO: 51160 - protein, 67 aa, Homo sapiens
MALIGAVSSYISYQQKKFCFSIQQGLNADYVKGENLEAVVCEEPQVKYSTLHTQSAEPPPPPEPARI

SEQ ID NO: 51161 - protein, 101 aa, Homo sapiens
MLRVLRFQVSFQHPHKYLLHYLVSLQNWLNRHSWQRTPVAVTAWALLRDSYHGALCLRFQAQHIAVAVLYLALQVYGVEVPAEVEAEKPWWQIYTMDTEIP

SEQ ID NO: 51162 - protein, 91 aa, Homo sapiens
MKYYFYHGLSWPQLSYIAEDENGKIVGYVLAKMEEDPDDVPHGHITSLAVKRSHRRLGLAQKLMDQASRAMIENFNAKYVSLHVRKRWKPG

SEQ ID NO: 51163 - protein, 101 aa, Homo sapiens [sequence omitted]

SEQ ID NO: 51164 - protein, 268 aa, Homo sapiens
MGLVGTYSCFWTKYMNHLTVHNREVLYELIEKRGPATPLITVSNHQSCMDDPHLWGILKLRHIWNLKLMRWTPAAADICFTKELHSHFFSLGKCVPVCRGAEFFQAENEGKGVLDTGRHMPGAGKRREKGDGVYQKGMDFILEKLNHGDWVHIFPEGKVNMSSEFLRFKWGIGRLIAECHLNPIILPLWHVGMNDVLPNSPPYFPRFGQKITVLIGKPFSALPVLERLRAENKSAVEMRKALTDFIQEEFQHLKTQAEQLHNHLQPGR

SEQ ID NO: 51165 - protein, 238 aa, Homo sapiens
MGLVGTYSCFWTKYMNHLTVHNREVLYELIEKRGPATPLITVSNHQSCMDDPHLWGILKLRHIWNLKLMRWTPAAADICFTKELHSHFFSLGKCVPVCRGDGVYQKGMDFILEKLNHGDWVHIFPEGKVNMSSEFLRFKWGIGRLIAECHLNPIILPLWHVGMNDVLPNSPPYFPRFGQKITVLIGKPFSALPVLERLRAENKSAVEMRKALTDFIQEEFQHLKTQAEQLHNHLQPGR

SEQ ID NO: 51166 - protein, 92 aa, Homo sapiens
MRWTPAAADICFTKELHSHFFSLGKCVPVCRGAEFFQAENEGKGVLDTGRHMPGAGKRREKGDGVYQKGMDFILEKLNHGDWVHIFPEGQQG

SEQ ID NO: 51167 - protein, 479 aa, Homo sapiens [sequence omitted]

SEQ ID NO: 51168 - protein, 257 aa, Homo sapiens [sequence omitted]

SEQ ID NO: 51169 - protein, 55 aa, Homo sapiens
VAFCTLPTREVFLEAMNVGPPEQAVQMLGEALPFIQRVYNVSQKLYAEHSLLDLP

SEQ ID NO: 51170 - protein, 66 aa, Homo sapiens
LGATQLDTDGALWLGGLPELPVGPALPKAYGTGFVGCLRDVVVGRHPLHLLEDAVTKPELRPCPTP

SEQ ID NO: 51171 - protein, 25 aa, Homo sapiens
LSSSIIHEIDSILGNKPYSKKDYRS

SEQ ID NO: 51172 - protein, 109 aa, Homo sapiens
IKTEGKRTIVRQGKQVVFRDEDSTGNDEDIMVDSDDDSWDLVTCFCMKPFAGRPMIECNECHTWIHLSCAKIRKSNVPEVFVCQKCRDSKFDIRRSNRSRTGSRKLFLD

SEQ ID NO: 51173 - protein, 67 aa, Homo sapiens
KQPSDHSYALLDLDSLKKKLFLTLKENEKLRKRLQAQRLVMRRMSSRLRACKGHQGLQARLGPEQQS

SEQ ID NO: 51174 - protein, 67 aa, Homo sapiens
KYSAQIEDLQVKLQHAEADREQLRADLLREREAREHLEKVVKELQEQLWPRARPEAAGSEGAAELEP

SEQ ID NO: 51175 - protein, 190 aa, Homo sapiens
VGESVHGKPSVVYRFFTRLGQIYQSWLDKSTPYTAVRWVVTLGLSFVYMIRVYLLQGWYIVTYALGIYHLNLFIAFLSPKVDPSLMEDSDDGPSLPTKQNEEFRPFIRRLPEFKFWHAATKGILVAMVCTFFDAFNVPVFWPILVMYFIMLFCITMKRQIKHMIKYRYIPFTHGKRRYRGKEDAGKAFAS

SEQ ID NO: 51176 - protein, 160 aa, Homo sapiens
TEQSLLICKYDFISLQCQQVVRIALNAVDTISYGEFQFPPKSLNKREGFGIRIQWDKQSRPSFINRWNPWSTNVPYATFTEHPMAGADEKTASLCQLESFKALLIQAVKKAQKESPLPGQANGVLILERPLLIETYVGLMSFINNEAKLGYSMTRGKIGF

SEQ ID NO: 51177 - protein, 149 aa, Homo sapiens
ILLGHWLLTTWGCIVFSGSYAWANFTILALGVWAVAQRDSIDAISMFLGGLLATIFLDIVHISIFYPRVSLTDTGRFGVGMAILSLLLKPLSCCFVYHMYRERGGELLVHTGFLGSSQDRSAYQTIDSAEAPADPFAVPEGRSQDARGY

SEQ ID NO: 51178 - protein, 290 aa, Homo sapiens
IDEFALGVGKKVKPGANMGQKVTGGIKTVDMRDPTYRPLKQELQGLDYCKPTRLDLLLDMPPVSYDVQLLHSWNNNDRSLNVFVKEDDKLIFHRHPVAQSTDAIRGKVGYTRGLHVWQITWAMRQRGTHAVVGVATADAPLHSVGYTTLVGNNHESWGWDLGRNRLYHDGKNQPSKTYPAFLEPDETFIVPDSFLVALDMDDGTLSFIVDGQYMGVAFRGLKGKKLYPVVSAVWGHCEIRMRYLNGLDPEPLPLMDLCRRSVRLALGRERLGEIHTLPLPASLKAYLLYQ

SEQ ID NO: 51179 - protein, 12 aa, Homo sapiens
MRPGVACSVSQA

SEQ ID NO: 51180 - protein, 14 aa, Homo sapiens
IYVSEKGTVQQADE

SEQ ID NO: 51181 - protein, 153 aa, Homo sapiens
RKWTETQDSSQKKSLEPKTKAVPKVKLLCGADLLESFAVPNLWKSEDITQIVANYGLICVTRAGNDAQKFIYESDVLWKHRSNIHVVNEWIANDISSTKIRRALRRGQSIRYLVPDLVQEYIEKHNLYSSESEDRNAGVILAPLQRNTAEAKT

SEQ ID NO: 51182 - protein, 159 aa, Homo sapiens
VSALLFVLGSASLWVLAEGASTGQPEDDTETTGLEGGVAMPGAEDDVVTPGTSEDRYKSGLTTLVATSVNSVTGIRIEDLPTSESTVHAQEQSPSATASNVATSHSTEKVDGDTQTTVEKDGLSTVTLVGIIVGVLLAIGFIGAIIVVVMRKMSGRYSP

SEQ ID NO: 51183 - protein, 18 aa, Homo sapiens
LEGPGQRCHLSFFSFCTV

SEQ ID NO: 51184 - protein, 140 aa, Homo sapiens [sequence omitted]

SEQ ID NO: 51185 - protein, 208 aa, Homo sapiens
LPPPPAEPVEKGASTDICAFCHKTVSPRELAVEAMKRQYHAQCFTCRTCRRQLAGQSFYQKDGRPLCEPCYQDTLERCGKCGEVVRDHIIRALGQAFHPSCFTCVTCARCIGDESFALGSQNEVYCLDDFYRKFAPVCSICENPIIPRDGKDAFKIECMGRNFHENCYRCEDCRILLSVEPTDQGCYPLNNHLFCKPCHVKRSAAGCC

SEQ ID NO: 51186 - protein, 36 aa, Homo sapiens
IGSISSVLYLLSRLPQIRTNSCTPPVCQAPSWTLEP

SEQ ID NO: 51187 - protein, 186 aa, Homo sapiens
LEATGMMLRVLVGAVLPAMLLAAPPPINKLALFPDKSAWCEAKNITQIVGHSGCEAKSIQNRACLGQCFSYSVPNTFPQSTESLVHCDSCMPAQSMWEIVTLECPGHEEVPRVDKLVEKILHCSCQACGKEPSHEGLSVYVQGEDGPGSQPGTHPHPHPHPHPGGQTPEPEDPPGAPHTEEEGAED

SEQ ID NO: 51188 - protein, 563 aa, Homo sapiens
LRFTGKPGRAYGLGRPGPAAGCVRGERPGWAAGPGAEPRRVGLGLPNRLRFFRQSVAGLAARLQRQFVVRAWGCAGPCGRAVFLAFGLGLGLIEEKQAESRRAVSACQEIQAIFTQKSKPGPDPLDTRRLQGFRLEEYLIGQSIGKGCSAAVYEATMPTLPQNLEVTKSTGLLPGRGPGTSAPGEGQERAPGAPAFPLAIKMMWNISAGSSSEAILNTMSQELVPASRVALAGEYGAVTYRKSKRGPKQLAPHPNIIRVLRAFTSSVPLLPGALVDYPDVLPSRLHPEGLGHGRTLFLVMKNYPCTLRQYLCVNTPSPRLAAMMLLQLLEGVDHLVQQGIAHRDLKSDNILVELDPDGCPWLVIADFGCCLADESIGLQLPFSSWYVDRGGNGCLMAPEVSTARPGPRAVIDYSKADAWAVGAIAYEIFGLVNPFYGQGKAHLESRSYQEAQLPALPESVPPDVRQLVRALLQREASKRPSARVAANVLHLSLWGEHILALKNLKLDKMVGWLLQQSAATLLANRLTEKCCVETKMKMLFLANLECETLCQAALLLCSWRAAL

SEQ ID NO: 51189 - protein, 734 aa, Homo sapiens
IVPHTSAMRPLLLLALLGWLLLAEAKGDAKPEDNLLVLTVATKETEGFRRFKRSAQFFNYKIQALGLGEDWNVEKGTSAGGGQKVRLLKKALEKHADKEDLVILFADSYDVLFASGPRELLKKFRQARSQVVFSAEELIYPDRRLETKYPVVSDGKRFLGSGGFIGYAPNLSKLVAEWEGQDSDSDQLFYTKIFLDPEKREQINITLDHRCRIFQNLDGALDEVVLKFEMGHVRARNLAYDTLPVLIHGNGPTKLQLNYLGNYIPRFWTFETGCTVCDEGLRSLKGIGDEALPTVLVGVFIEQPTPFVSLFFQRLLRLHYPQKHMRLFIHNHEQHHKAQVEEFLAQHGSEYQSVKLVGPEVRMANADARNMGADLCRQDRSCTYYFSVDADVALTEPNSLRLLIQQNKNVIAPLMTRHGRLWSNFWGALSADGYYARSEDYVDIVQGRRVGVWNVPYISNIYLIKGSALRGELQSSDLFHHSKLDPDMAFCANIRQQDVFMFLTNRHTLGHLLSLDSYRTTHLHNDLWEVFSNPEDWKEKYIHQNYTKALAGKLVETPCPDVYWFPIFTEVACDELVEEMEHFGQWSLGNNKDNRIQGGYENVPTIDIHMNQIGFEREWHKFLLEYIAPMTEKLYPGYYTRAQFDLAFVVRYKPDEQPSLMPHHDASTFTINIALNRVGVDYEGGGCRFLRYNCSIRAPRKGWTLMHPGRLTHYHEGLPTTRGTRYIAVSFVDP

SEQ ID NO: 51190 - protein, 350 aa, Homo sapiens
LELLAQDYKLRIKQITEEVERQVSTAMAEEIRRLSVLVDDYQMDFHPSPVVLKVYKNELHRHIEEGLGRNMSDRCSTAITNSLQTMQQDMIDGLKPLLPVSVRSQIDMLVPRQCFSLNYDLNCDKLCADFQEDIEFHFSLGWTMLVNRFLGPKNSRRALMGYNDQVQRPIPLTPANPSMPPLPQGSLTQEEFMVSMVTGLASLTSRTSMGILVVGGVVWKAVGWRLIALSFGLYGLLYVYERLTWTTKAKERAFKRQFVEHASEKLQLVISYTGSNCSHQVQQELSGTFAHLCQQVDVTRENLEQEIAAMNKKIEVLDSLQSKAKLLRNKAGWLDSELNMFTHQYLQPSR

SEQ ID NO: 51191 - protein, 172 aa, Homo sapiens
LQCLNESREGSGRGVFKPWEERTDRSKFVESDADEELLFNIPFTGNVKLKGIIIMGEDDDSHPSEMRLYKNIPQMSFDDTEREPDQTFSLNRDLTGELEYATKISRFSNVYHLSIHISKNFGADTTKVFYIGLRGEWTELRRHEVTICNYEASANPADHRVHQVTPQTHFIS

SEQ ID NO: 51192 - protein, 29 aa, Homo sapiens
KTYPGVMHSSCPQEMAAVKEFLEKLLPPV

SEQ ID NO: 51193 - protein, 528 aa, Homo sapiens
LGCTMISPFLVLAIGTCLTNSLVPEKEKDPKYWRDQAQETLKYALELQKLNTNVAKNVIMFLGDGMGVSTVTAARILKGQLHHNPGEETRLEMDKFPFVALSKTYNTNAQVPDSAGTATAYLCGVKANEGTVGVSAATERSRCNTTQGNEVTSILRWAKDAGKSVGIVTTTRVNHATPSAAYAHSADRDWYSDNEMPPEALSQGCKDIAYQLMHNIRDIDVIMGGGRKYMYPKNKTDVEYESDEKARGTRLDGLDLVDTWKSFKPRYKHSHFIWNRTELLTLDPHNVDYLLGLFEPGDMQYELNRNNVTDPSLSEMVVVAIQILRKNPKGFFLLVEGGRIDHGHHEGKAKQALHEAVEMDRAIGQAGSLTSSEDTLTVVTADHSHVFTFGGYTPRGNSIFGLAPMLSDTDKKPFTAILYGNGPGYKVVGGERENVSMVDYAHNNYQAQSAVPLRHETHGGEDVAVFSKGPMAHLLHGVHEQNYVPHVMAYAACIGANLGHCAPASSAGSLAAGPLLLALALYPLSVLF

SEQ ID NO: 51194 - protein, 6 aa, Homo sapiens
IYSWTF

SEQ ID NO: 51195 - protein, 683 aa, Homo sapiens
VEGAAFQSRLPHDRMTSQEAACFPDIISGPQQTQKVFLFIRNRTLQLWLDNPKIQLTFEATLQQLEAPYNSDTVLVHRVHSYLERHGLINFGIYKRIKPLPTKKTGKVIIIGSGVSGLAAARQLQSFGMDVTLLEARDRVGGRVATFRKGNYVADLGAMVVTGLGGNPMAVVSKQVNMELAKIKQKCPLYEANGQADTVKVPKEKDEMVEQEFNRLLEATSYLSHQLDFNVLNNKPVSLGQALEVVIQLQEKHVKDEQIEHWKKIVKTQEELKELLNKMVNLKEKIKELHQQYKEASEVKPPRDITAEFLVKSKHRDLTALCKEYDELAETQGKLEEKLQELEANPPSDVYLSSRDRQILDWHFANLEFANATPLSTLSLKHWDQDDDFEFTGSHLTVRNGYSCVPVALAEGLDIKLNTAVRQVRYTASGCEVIAVNTRSTSQTFIYKCDAVLCTLPLGVLKQQPPAVQFVPPLPEWKTSAVQRMGFGNLNKVVLCFDRVFWDPSVNLFGHVGSTTASRGELFLFWNLYKAPILLALVAGEAAGIMENISDDVIVGRCLAILKGIFGSSAVPQPKETVVSRWRADPWARGSYSYVAAGSSGNDYDLMAQPITPGPSIPGAPQPIPRLFFAGEHTIRNYPATVHGALLSGLREAGRIADQFLGAMYTLPRQATPGVPAQQSPSM

SEQ ID NO: 51196 - protein, 53 aa, Homo sapiens
KQQSFFLAETLKYLYLLFSEDDLLSLEDWVFNTEAHPLPVNHSDSSGRAWGRH

SEQ ID NO: 51197 - protein, 83 aa, Homo sapiens
LDEDGSMIDSHLPSGEPLQFVFEEIKWQQELSWEEAARRLEVAMYPFKKVSYLPFTEAFDRAKAENKLVHSILLWGALDDQSC

SEQ ID NO: 51198 - protein, 47 aa, Homo sapiens
LDITSVKPEEIESNLFSFSSTFEDPSTATYMQFLKEGLRRGLPLLQP

SEQ ID NO: 51199 - protein, 88 aa, Homo sapiens
LLCSASPECCKPEHKAACSSSEEDDCVSLSKASSFADMMGILKDFHRMKQSQDLNRSLLKEEDPAVLISEVLRRKFALKEEDISRKGN

SEQ ID NO: 51200 - protein, 16 aa, Homo sapiens
RYNSKRRHRRRTKLGL

SEQ ID NO: 51201 - protein, 104 aa, Homo sapiens
IHRELRPQGSARPQPDPNAEFDPDLPGGGLHRCLACARYFIDSTNLKTHFRSKDHKKRLKQLSVEPYSQEEAERAAGMGSYVPPRRLAVPTEVSTEVPEMDTST

SEQ ID NO: 51202 - protein, 329 aa, Homo sapiens
KEGELSLWERFCANIIKAGPMPKHIAFIMDGNRRYAKKCQVERQEGHSQGFNKLAETLRWCLNLGILEVTVYAFSIENFKRSKSEVDGLMDLARQKFSRLMEEKEKLQKHGVCIRVLGDLHLLPLDLQELIAQAVQATKNYNKCFLNVCFAYTSRHEISNAVREMAWGVEQGLLDPSDISESLLDKCLYTNRSPHPDILIRTSGEVRLSDFLLWQTSHSCLVFQPVLWPEYTFWNLFEAILQFQMNHSVLQKARDMYAEERKRQQLERDQATVTEQLLREGLQASGDAQLRRTRLHKLSARREERVQGFLQALELKRADWLARLGTASA

SEQ ID NO: 51203 - protein, 25 aa, Homo sapiens
ISVSPLMNSLVSQVICDVLFLIGQS

SEQ ID NO: 51204 - protein, 40 aa, Homo sapiens
IMGLLYHWKTCSPVTRYILGYFLTYWLLGLLLHCNFLPWT

SEQ ID NO: 51205 - protein, 303 aa, Homo sapiens
VNTFFSFLRRKTDFFIGGEEGMAEKLITQTFSHHNQLAQKTRREKRARQEAERREKAERAARLAKEAKSETSGPQIKELTDEEAERLQLEIDQKKDAENHEAQLKNGSLDSPGKQDTEEDEEEDEKDKGKLKPNLGNGADLPNYRWTQTLSELDLAVPFCVNFRLKGKDMVVDIQRRHLRVGLKGQPAIIDGELYNEVKVEESSWLIEDGKVVTVHLEKINKMEWWSRLVSSDPEINTKKINPENSKLSDLDSETRSMVEKMMYDQRQKSMGLPTSDEQKKQEILKKFMDQHPEMDFSKAKFN

SEQ ID NO: 51206 - protein, 243 aa, Homo sapiens
ILPAHLQPQTAGGGRGMPGCRISACGPGAQEGTAEQRSPPPPWDPMPSSQPPPPTPTLTPTPTPGQSPPLPDAAGASAGAAEDQELQRWRQGASGIAGLAGPGGGSGAAAGAGGRALELAEARRRLLEVEGRRRLVSELESRVLQLHRVFLAAELRLAHRAESLSRLSGGVAQAELYLAAHGSRLKKGPRRGRRGRPPALLASALGLGGCVPWGAGRLRRGHGPEPDSPFRRSPPRGPASPQR

SEQ ID NO: 51207 - protein, 82 aa, Homo sapiens
VHISGQHLVAVEEDAESEDEEEEDVKLLSISGKRSAPGGGSKVPQKKVKLAVDEDDDDDDDDDDDDFDDEEAEEKVPVKKSI

SEQ ID NO: 51208 - protein, 883 aa, Homo sapiens
KKLLKQLKFAECLEKKVDMSKVNLEVIKPWITKRVTEILGFEDDVVIEFIFNQLEVKNPDSKMMQINLTGFLNGKNAREFMGELWPLLLSAQENIAGIPSAFLELKKEEIKQRQIEQEKLASMKKQDEDKDKRDKEEKESSREKRERSRSPRRRKSRSPSPRRRSSPVRRERKRSHSRSPRHRTKSRSPSPAPEKKEKTPELPEPSVKVKEPSVQEATSTSDILKVPKPEPIPEPKEPSPEKNSKKEKEKEKTRPRSRSRSKSRSRTRSRSPSHTRPRRRHRSRSRSYSPRRRPSPRRRPSPRRRTPPRRMPPPPRHRRSRSPVRRRRRSSASLSGSSSSSSSSRSRSPPKKPPKRTSSPPRKTRRLSPSASPPRRRHRPSPPATPPPKTRHSPTPQQSNRTRKSRVSVSPGRTSGKVTKHKGTEKRESPSPAPKPRKVELSESEEDKGGKMAAADSVQQRRQYRRQNQQSSSDSGSSSSSEDERPKRSHVKNGEVGRRRRHSPSRSASPSPRKRQKETSPRGRRRRSPSPPPTRRRRSPSPAPPPRRRRTPTPPPRRRTPSPPPRRRSPSPRRYSPPIQRRYSPSPPPKRRTASPPPPPKRRASPSPPPKRRVSHSPPPKQRSSPVTKRRSPSLSSKHRKGSSPSRSTREARSPQPNKRHSPSPRPRAPQTSSSPPPVRRGASSSPQRRQSPSPSTRPIRRVSRTPEPKKIKKAASPSPQSVRRVSSSRSVSGSPEPAAKKPPAPPSPVQSQSPSTNWSPAVPVKKAKSPTPSPSPPRNSDQEGGGKKKKKKKDKKHKKDKKHKKHKKHKKEKAVAAAAAAAVTPAAIAAATTTLAQEEPVAAPEPKKETESEAEDNLDDLEKHLREKALRSMRKAQVSPQS

SEQ ID NO: 51209 - protein, 892 aa, Homo sapiens
KKLLKQLKFAECLEKKVDMSKVNLEVIKPWITKRVTEILGFEDDVVIEFIFNQLEVKNPDSKMMQINLTGFLNGKNAREFMGELWPLLLSAQENIAGIPSAFLELKKEEIKQRQIEQEKLASMKKQDEDKDKRDKEEKESSREKRERSRSPRRRKSRSPSPRRRSSPVRRERKRSHSRSPRHRTKSRSPSPAPEKKEKTPELPEPSVKVKEPSVQEATSTSDILKVPKPEPIPEPKEPSPEKNSKKEKEKEKTRPRSRSRSKSRSRTRSRSPSHTRPRRRHRSRSRRRPSPRRRPSPRRRTPPRRMPPPPRHRRSRSPVRRRRRSSASLSGSSSSSSSSRSRSPPKKPPKRTSSPPRKTRRLSPSASPPRRRHRPSPPATPPPKTRHSPTPQQSNRTRKSRVSVSPGRTSGKVTKHKGTEKRESPSPAPKPRKVELSESEEDKGGKMAAADSVQQRRQYRRQNQQSSSDSGSSSSSEDERPKRSHVKNGEVGRRRRHSPSRSASPSPRKRQKETSPRMQMGKRWQSPVTKSGRRRRSPSPPPTRRRRSPSPAPPPRRRRTPTPPPRRRTPSPPPRRRSPSPRRYSPPIQRRYSPSPPPKRRTASPPPPPKRRASPSPPPKRRVSHSPPPKQRSSPVTKRRSPSLSSKHRKGSSPSRSTREARSPQPNKRHSPSPRPRAPQTSSSPPPVRRGASSSPQRRQSPSPSTRPIRRVSRTPEPKKIKKAASPSPQSVRRVSSSRSVSGSPEPAAKKPPAPPSPVQSQSPSTNWSPAVPVKKAKSPTPSPSPPRNSDQEGGGKKKKKKKDKKHKKDKKHKKHKKHKKEKAVAAAAAAAVTPAAIAAATTTLAQEEPVAAPEPKKETESEAEDNLDDLEKHLREKALRSMRKAQVSPQS

SEQ ID NO: 51210 - protein, 36 aa, Homo sapiens
RLSGSNRCSHLAFRWFHVGLWISDCIYVDSFWRLCC

SEQ ID NO: 51211 - protein, 139 aa, Homo sapiens
VKEDQIRELELKVQELRKYKENEKDTEVLMSALSAMQDKTQHLENSLSAETRIKLDLFSALGDAKRQLEIAQGQILQKDQEIKDLKQKIAEVMAVMPSITYSAATSPLSPVSPHYSSKFVETSPSGLDPNASVYQPLKK

SEQ ID NO: 51212 - protein, 174 aa, Homo sapiens
KQYQGSGGVAMDVERSRFPYCVVWTPIPVLTWFFPIIGHMGICTSTGVIRDFAGPYFVSEDNMAFGKPAKYWKLDPAQVYASGPNAWDTAVHDASEEYKHRMHNLCCDNCHSHVALALNLMRYNNSTNWNMVTLCFFCLLYGKYVSVGAFVKTWLPFILLLGIILTVSLVFNLR

SEQ ID NO: 51213 - protein, 143 aa, Homo sapiens
MDVERSRFPYCVVWTPIPVLTWFFPIIGHMGICTSTGVIRDFAGPYFVSEDNMAFGKPAKYWKLDPAQVYASGPNAWDTAVHDASEEYKHRMHNLCCDNCHSHVALALNLMRYNNSTNWNMVTLCFFCLLYGKYVRSLPRQRD

SEQ ID NO: 51214 - protein, 90 aa, Homo sapiens
IAQLKEEVATLKKMLHQKDQMILEKEKKITELKADFQYQESQMRAKMNQMEKTHKEVTEQLQAKNRELLKQAAALSKSKKSEKSGAITSP

SEQ ID NO: 51215 - protein, 219 aa, Homo sapiens
KLQENLQQLQHSTNQLAKETNELLKELGSLPLPLSTSEQRQQRLQKERLMNDFSAALNNFQAVQRRVSEKEKESIARARAGSRLSAEERQREEQLVSFDSHEEWNQMQSQEDEVAITEQDLELIKERETAIRQLEADILDVNQIFKDLAMMIHDQGDLIDSIEANVESSEVHVERATEQLQRAAYYQKKSRKKMCILVLVLSVIILILGLIIWLVYKTK

SEQ ID NO: 51216 - protein, 330 aa, Homo sapiens
KPPPGLHLDVVKGDKLIEKLIIDEKKYYLFGRNPDLCDFTIDHQSCSRVHAALVYHKHLKRVFLIDLNSTHGTFLGHIRLEPHKPQQIPIDSTVSFGASTRAYTLREKPQTLPSAVKGDEKMGGEDDELKGLLGLPEEETELDNLTEFNTAHNKRISTLTIEEGNLDIQRPKRKRKNSRVTFSEDDEIINPEDVDPSVGRFRNMVQTAVVPVKKKRVEGPGSLGLEESGSRRMQNFAFSGGLYGGLPPTHSEAGSQPHGIHGTALIGGLPMPYPNLAPDVDLTPVVPSAVNMNPAPNPAVYNPEAVNEPKKKKYAKEAWPGKKPTPSLLI

SEQ ID NO: 51217 - protein, 89 aa, Homo sapiens
RTMQARGFGSDQSENVDRGAGSIREAGGAFGKREQAEEERYFRAQSREQLAALKKHHEEEIVHHKKEIERLQKEIERHKQKIKMLKHDD

SEQ ID NO: 51218 - protein, 173 aa, Homo sapiens
IHRLRGLCDNMEPETFLDHEMVFLLKGQQASPFVLRARRSMDRAGAPWHLRYLGQPEMGDKNRHALVRNCVDIATSENLTDFLMEMGFRMDHEFVAKGHLFRKGIMKIMVYKIFRILVPGNTDSTEALSLSYLVELSVVAPAGQDMVSDDMKNFAEQLKPLVHLEKIDPKRLM

SEQ ID NO: 51219 - protein, 24 aa, Homo sapiens
RTVSGWFWIYSFRTPPSVGEASVH

SEQ ID NO: 51220 - protein, 60 aa, Homo sapiens
IVYQLYSLMSSEKWHQTISLALILFSNYYAFFKLLRDRLVLGKAYSYSASPQRDLDHRFS

SEQ ID NO: 51221 - protein, 52 aa, Homo sapiens
MQHSKWQHPSDLTTRNYARRQKHLQRYSLTQWVDRNMRSHHRFQRLPDFSYS

SEQ ID NO: 51222 - protein, 79 aa, Homo sapiens
KCPNCYRAYSDSASLQIHLSAHAIKHAKAYCCSMCGRAYTSETYLMKHMSKHTVVEHLVSHHSPQRTESPGIPVRISLI

SEQ ID NO: 51223 - protein, 572 aa, Homo sapiens
KNFEVWKIATVFVSKGSSPDPASLITMKNQDKKNGAAKQSNPKSSPGQPEAGPEGAQERPSQAAPAVEAEGPGSSQAPRKPEGAQARTAQSGALRDVSEELSRQLEDILSTYCVDNNQGGPGEDGAQGEPAEPEDAEKSRTYVARNGEPEPTPVVNGEKEPSKGDPNTEEIRQSDEVGDRDHRRPQEKKKAKGLGKEITLLMQTLNTLSTPEEKLAALCKKYAELLEEHRNSQKQMKLLQKKQSQLVQEKDHLRGEHSKAVLARSKLESLCRELQRHNRSLKEEGVQRAREEEEKRKEVTSHFQVTLNDIQLQMEQHNERNSKLRQENMELAERLKKLIEQYELREEHIDKVFKHKDLQQQLVDAKLQQAQEMLKEAEERHQREKDFLLKEAVESQRMCELMKQQETHLKQQLALYTEKFEEFQNTLSKSSEVFTTFKQEMEKMTKKIKKLEKETTMYRSRWESSNKALLEMAEEKTVRDKELEGLQVKIQRLEKLCRALQTERNDLNKRVQDLSAGGQGSLTDSGPERRPEGPGAQAPSSPRVTEAPCYPGAPSTEASGQTGPQEPTSARA

SEQ ID NO: 51224 - protein, 39 aa, Homo sapiens
MSYYFDHNDVALKNFAKYFLHQSHEEREHAKKLMKLQNQ

SEQ ID NO: 51225 - protein, 56 aa, Homo sapiens
LDTIAACEEMLRQLGRRRPEPAGGGNVSAKPGAPPQPAVSARGGFPKDAGDGAAEP

SEQ ID NO: 51226 - protein, 30 aa, Homo sapiens
LCREAMRLQAGEETASHYRMAALEQCLSEP

SEQ ID NO: 51227 - protein, 12 aa, Homo sapiens
IHQDTLRTMYFA

SEQ ID NO: 51228 - protein, 43 aa, Homo sapiens
MAGAIAGAYYGMDQVPESWQQSCEGYEETDILAQSLHRVFQKS

SEQ ID NO: 51229 - protein, 620 aa, Homo sapiens
TWAEIRQQRWSWAGALHHSSPGHKTSGSRCSVSAVNLPKHVDSIINKRLSKSSATLWNSPSRNRSLQLSAWESSIVDRLMTPTLSFLARSRSAVTLPRNGRDQGRGCDPGRGPTWGRAGASLARGPQPDRTHPSAAVPVCPRSASASPLTPCSVTRSVHRCAPAGERGERRKPNAGGSPAPVRRRPEASPVQKKEKKDKERENEKEKSALARERSLKKRQSLPASPRARLSASTASELSPKSKARPSSPSTSWHRPASPCPSPGPGHTLPPKPPSPRGTTASPKGRVRRKEEAKESPSAAGPEDKSQSKRRASNEKESAAPASPAPSPAPSPTPAPPQKEQPPAETPTDAAVLTSPPAPAPPVTPSKPMAGTTDREEATRLLAEKRRQAREQREREEQERRLQAERDKRMREEQLAREAEARAEREAEARRREEQEAREKAQAEQEEQERLQKQKEEAEARSREEAERQRLEREKHFQQQEQERQERRKRLEEIMKRTRKSEVSETKQKQDSKEANANGSSPEPVKAVEARSPGLQKEAVQKEEPIPQEPQWSLPSKELPASLVNGLQPLPAHQENGFSTNGPSGDKSLSRTPETLLPFAEAEAFLKKAVVQSPQVTEVL

SEQ ID NO: 51230 - protein, 29 aa, Homo sapiens
TCTYADICEWRKGSGVLSSTLAPQVKKAK

SEQ ID NO: 51231 - protein, 65 aa, Homo sapiens
LKETLQITQTEVQQGQQQFSQFTDGQQLYQIQQVTMPAGQDLAQPMFIQSANQPSDGQAPQVTGD

SEQ ID NO: 51232 - protein, 35 aa, Homo sapiens
IQQVTMPAGQDLAQPMFIQSANQPSDGQAPQVTGD

SEQ ID NO: 51233 - protein, 244 aa, Homo sapiens
KSRQREHRERSQPGFRKHLGLLEKKKDYKLRADDYRKKQEYLKALRKKALEKNPDEFYYKMTRVKLQDGVHIIKETKEEVTPEQLKLMRTQDVKYIEMKRVAEAKKIERLKSELHLLDFQGKQQNKHVFFFDTKKEVEQFDVATHLQTAPELVDRVFNRPRIETLQKEKVKGVTNQTGLKRIAKERQKQYNCLTQRIEREKKLFVIAQKIQTRKDLMDKTQKVKVKKETVNSPAIYKFQSRRKR

SEQ ID NO: 51234 - protein, 473 aa, Homo sapiens [sequence omitted]

SEQ ID NO: 51235 - protein, 21 aa, Homo sapiens
VFFFICCINWSKGAFCCIWFL

SEQ ID NO: 51236 - protein, 271 aa, Homo sapiens
TSGGTKVPLEARPVRFLDNFSSGRRGATSAEAFLAAGYGVLFLYRARSAFPYAHRFPPQTWLSALRPSGPALSGLLSLEAEENALPGFAEALRSYQEAAAAGTFLAVEFTTLADYLHLLQAAAQALNPLGPSAMFYLAAAVSDFYVPVSEMPEHKIQSSGGPLQITMKMVPKLLSPLVKDWAPKAFIISFKLETDPAIVINRARKALEIYQHQVVVANILESRQSFVFIVTKDSETKLLLSEEEIEKGVEIEEKIVDNLQSRHTAFIGDRN

SEQ ID NO: 51237 - protein, 165 aa, Homo sapiens
VFFDVSIGGQEVGRMKIELFADVVPKTAENFRQFCTGEFRKDGVPIGYKGSTFHRVIKDFMIQGGDFVNGDGTGVASIYRGPFADENFKLRHSAPGLLSMANSGPSTNGCQFFITCSKCDWLDGKHVVFGKIIDGLLVMRKIENVPTGPNNKPKLPVVISQCGEM

SEQ ID NO: 51238 - protein, 328 aa, Homo sapiens
ITATMSSEAETQQPPAAPPAAPALSAADTKPGTTGSGAGSGGPGGLTSAAPAGGDKKVIATKVLGTVKWFNVRNGYGFINRNDTKEDVFVHQTAIKKNNPRKYLRSVGDGETVEFDVVEGEKGAEAANVTGPGGVPVQGSKYAADRNHYRRYPRRRGPPRNYQQNYQNSESGEKNEGSESAPEGQAQQRRPYRRRRFPPYYMRRPYGRRPQYSNPPVQGEVMEGADNQGAGEQGRPVRQNMYRGYRPRFRRGPPRQRQPREDGNEEDKENQGDETQGQQPPQRRYRRNFNYRRRRPENPKPQDGKETKAADPPAENSSAPEAEQGGAE

SEQ ID NO: 51239 - protein, 20 aa, Homo sapiens
INSRYREDYIEPALYRAIME

SEQ ID NO: 51240 - protein, 24 aa, Homo sapiens
VSRQPLFTNITVDIGRPPSWPPRG

SEQ ID NO: 51241 - protein, 55 aa, Homo sapiens
VEHCLSKREGSCMAEDDAVDIEHENNNRFEEYEWCGQKRIRATTLLEGGFRGTSS

SEQ ID NO: 51242 - protein, 96 aa, Homo sapiens
MQKTCKNSDIEKITEDSAVTTFEALKARVRELERQLSRGDRYKCLICMDSYSMPLTSIQCWHVHCEECWLRTLGAKKLCPQCNTITAPGDLRRIYL

SEQ ID NO: 51243 - protein, 35 aa, Homo sapiens
RIIDVVYNASNNELVRTKTLVKNCIVLIDSTPYRQ

SEQ ID NO: 51244 - protein, 7 aa, Homo sapiens
IKARKGK

SEQ ID NO: 51245 - protein, 46 aa, Homo sapiens
LVRHLRGTMAMESTATAAVAAELVSADKIEDVPAPSTSADKVESNH

SEQ ID NO: 51246 - protein, 296 aa, Homo sapiens
MPNDSVLENKSLQENEEEEIGNLELAWDMLDLAKIIFKRQETKEAQLYAAQAHLKLGEVSVESENYVQAVEEFQSCLNLQEQYLEAHDRLLAETHYQLGLAYGYNSQYDEAVAQFSKSIEVIENRMAVLNEQVKEAEGSSAEYKKEIEELKELLPEIREKIEDAKESQRSGNVAELALKATLVESSTSGFTPGGGGSSVSMIASRKPTDGASSSNCVTDISHLVRKKRKPEEESPRKDDAKKAKQEPEVNGGSGDAVPSGNEVSENMEEEAENQAESRAAVEGTVEAGATVESTAC

SEQ ID NO: 51247 - protein, 20 aa, Homo sapiens
LLSCNMLIRTTWHLPEQDFQ

SEQ ID NO: 51248 - protein, 213 aa, Homo sapiens
KMSLQQNFSPCPRPWLSSSFPAYMSKTQCYHTSPCSFKKQQKQALLARPSSTITYLTDSPKPALCVTLAGLIPFVAPPLVMLMTKTYIPILAFTQMAYGASFLSFLGGIRWGFALPEGSPAKPDYLNLASSAAPLFFSWFAFLISERLSEAIVTVIMGMGVAFHLELFLLPHYPNWFKALRIVVTLLATFSFIITLVVKSSFPEKGHKRPGQV

SEQ ID NO: 51249 - protein, 142 aa, Homo sapiens
ISLLHESQSDRASFGEGTEPDQEPPPPYQEQVPVPVYHPTPSQTRLATQLTEEEQIRIAQRIGLIQHLPKGVYDPGRDGSEKKIRECVICMMDFVYGDPIRFLPCMHIYHLDCIDDWLMRSFTCPSCMEPVDAALLSSYETN

SEQ ID NO: 51250 - protein, 154 aa, Homo sapiens
RGDLEQLTSLLQNNVNVNAQNGFGRTALQVMKLGNPEIARRLLLRGANPDLKDRTGFAVIHDAARAGFLDTLQTLLEFQADVNIEDNEGNLPLHLAAKEGHLRVVEFLVKHTASNVGHRNHKGDTACDLARLYGRNEVVSLMQANGAGGATNLQ

SEQ ID NO: 51251 - protein, 196 aa, Homo sapiens [sequence omitted]

SEQ ID NO: 51252 - protein, 294 aa, Homo sapiens
LYVGGLAEEVDDKVLHAAFIPFGDITDIQIPLDYETEKHRGFAFVEFELAEDAAAAIDNMNESELFGRTIRVNLAKPMRIKEGSSRPVWSDDDWLKKFSGKTLEENKEEEGSEPPKAETQEGEPIAKKARSNPQVYMDIKIGNKPAGRIQMLLRSDVVPMTAENFRCLCTHEKGFGFKGSSFHRIIPQFMCQGGDFTNHNGTGGKSIYGKKFDDENFILKHTGPGLLSMANSGPNTNGSQFFLTCDKTDWLDGKHVVFGEVTEGLDVLRQIEAQGSKDGKPKQKVIIADCGEYV

SEQ ID NO: 51253 - protein, 40 aa, Homo sapiens
KTYSYLTPDLWKETVFTKSPDQEFTDHLIKTHQAPAVATT

SEQ ID NO: 51254 - protein, 5 aa, Homo sapiens
MRRLT

SEQ ID NO: 51255 - protein, 518 aa, Homo sapiens
VAGTATMVPSFLSLSFSSLGLWASGLILVLGFLKLIHLLLRRQTLAKAMDKFPGPPTHWLFGHALEIQETGSLDKVVSWAHQFPYAHPLWFGQFIGFLNIYEPDYAKAVYSRGDPKAPDVYDFFLQWIGRGLLVLEGPKWLQHRKLLTPGFHYDVLKPYVAVFTESTRIMLDKWEEKAREGKSFDIFCDVGHMALNTLMKCTFGRGDTGLGHSRDSSYYLAVSDLTLLMQQRLVSFQYHNDFIYWLTPHGRRFLRACQVAHDHTDQVIRERKAALQDEKVRKKIQNRRHLDFLDILLGARDEDDIKLSDADLRAEVDTFMFEGHDTTTSGISWFLYCMALYPEHQHRCREEVREILGDQDFFQWDDLGKMTYLTMCIKESFRLYPPVPQVYRQLSKPVTFVDGRSLPAGSLISMHIYALHRNSAVWPDPEVFDSLRFSTENASKRHPFAFMPFSAGPRNCIGQQFAMSEMKVVTAMCLLRFEFSLDPSRLPIKMPQLVLRSKNGFHLHLKPLGPGSGK

SEQ ID NO: 51256 - protein, 117 aa, Homo sapiens
IFQNIKQEYSRYQRWRHLEVVLNQSEACASESQPHSSALTAPSSPGSSWMKKDQPTFTLRQVGIICERLLKDYEDKIREEYEQILNTKLAEQYESFVKFTHDQIMRRYGTRPTSYVS

SEQ ID NO: 51257 - protein, 62 aa, Homo sapiens
IQSKSSVASLVGRSKTIVQLKPRSPDHVLKNTISVKAVCDYRQIEGRTILSEGYGPLASAAC

SEQ ID NO: 51258 - protein, 8 aa, Homo sapiens
RYKVRTKV

SEQ ID NO: 51259 - protein, 97 aa, Homo sapiens
ISAFHEDSRFIDHLMVMFGETPSWDLEQKYCPDNLEVYFEDEDRAELYRVPAKSTLLQVLQHQRYFVKALTPAFLVCVGSSPFCKNFLRGRKVYQIR

SEQ ID NO: 51260 - protein, 71 aa, Homo sapiens
VTVACEEGWTLTGCSALPGTSHVLGAYAVDNTCVVRSRDVSTTGSTSEGAVTAVAICCRSRHLAQASQELQ

SEQ ID NO: 51261 - protein, 418 aa, Homo sapiens
LDPGPIYMRENGQLHMVNLALDGVRSSLQKPRPFRLFPKGFSVELCMNREDDTARKEKTDHFIFTYTREGNLRYSAKSLFSLVLGFISDNVDHIDSLIGFPEQIAEKLFSAAEARQKFTEPGAGLRALQKFTEAYGSLVLCSLCLRNRYLVISEKLEEIKSFRELTCLDLSCCKLGDEHELLEHLTNEALSSVTQLHLKDNCLSDAGVRKMTAPVRVMKRGLENLTLLDLSCNPEITDAGIGYLFSFRKLNCLDISGTGLKDIKTVKHKLQTHIGLVHSKVPLKEFDHSNCKTEGWADQIVLQWERVTAEAVKPRETSEPRAAAQRFYGKRSRAEAPLKCPLADTHMNSSEKLQFYKEKAPDCHGPVLKHEAISSQESKKSKKRPFEESETEQNNSSQPSKQKYVCLAVEDWDLLNSY

SEQ ID NO: 51262 - protein, 463 aa, Homo sapiens
IPIINVNNNCATGSTALFMARQLIQGGVAECVLALGFEKMSKGSLGIKFSDRTIPTDKHVDLLINKYGLSAHPVAPQMFGYAGKEHMEKYGTKIEHFAKIGWKNHKHSVNNPYSQFQDEYSLDEVMASKEVFDFLTILQCCPTSDGAAAAILASEAFVQKYGLQSKAVEILAQEMMTDLPSSFEEKSIIKMVGFDMSKEAARKCYEKSGLTPNDIDVIELHDCFSTNELLTYEALGLCPEGQGATLVDRGDNTYGGKWVINPSGGLISKGHPLGATGLAQCAELCWQLRGEAGKRQVPGAKVALQHNLGIGGAVVVTLYKMGFPEAASSFRTHQIEAVPTSSASDGFKANLVFKEIEKKLEEEGEQFVKKIGGIFAFKVKDGPGGKEATWVVDVKNGKGSVLPNSDKKADCTITMADSDFLALMTGKMNPQSAFFQGKLKITGNMGLAMKLQNLQLQPGNAKL

SEQ ID NO: 51263 - protein, 54 aa, Homo sapiens
VVSDGFGVGYAVHDNWIGCNVSSYPGRNAREFLQCVEKALEDMFDALEGKSIKS

SEQ ID NO: 51264 - protein, 70 aa, Homo sapiens
KESSDQTGINISGFENKISYVVQSLKEYEGKWLLFDDSEVKVTEEKDFLNSLSPSTSPTSTPYLLFYKKL

SEQ ID NO: 51265 - protein, 63 aa, Homo sapiens
ISVITMVLLTLMTVTLDPPQKLPDLFSVLVCFVSCLNFLFFLVYFNIIIMWDSKSGRNQKKIS

SEQ ID NO: 51266 - protein, 131 aa, Homo sapiens
TITVGVYEAAKLLNVDPDNVVLCLLAADEDDDRDVALQIHFTLIQAFCCENDINILRVSNPGRLAELLLLETDAGPAASEGAEQPPDLHCVLVTNPHSSQWKDPALSQLICFCRESRYMDQWVPVINLPER

SEQ ID NO: 51267 - protein, 924 aa, Homo sapiens
LALLAALLLAARGAAAQETELSVSAELVPTSSWNISSELNKDSYLTLDEPMNNITTSLGQTAELHCKVSGNPPPTIRWFKNDAPVVQEPRRLSFRSTIYGSRLRIRNLDTTDTGYFQCVATNGKEVVSSTGVLFVKFGPPPTASPGYSDEYEEDGFCQPYRGIACARFIGNRTVYMESLHMQGEIENQITAAFTMIGTSSHLSDKCSQFAIPSLCHYAFPYCDETSSVPKPRDLCRDECEILENVLCQTEYIFARSNPMILMRLKLPNCEDLPQPESPEAANCIRIGIPMADPINKNHKCYNSTGVDYRGTVSVTKSGRQCQPWNSQYPHTHTFTALRFPELNGGHSYCRNPGNQKEAPWCFTLDENFKSDLCDIPACDSKDSKEKNKMEILYILVPSVAIPLAIALLFFFICVCRNNQKSSSAPVQRQPKHVRGQNVEMSMLNAYKPKSKAKELPLSAVRFMEELGECAFGKIYKGHLYLPGMDHAQLVAIKTLKDYNNPQQWTEFQQEASLMAELHHPNIVCLLGAVTQEQPVCMLFEYINQGDLHEFLIMRSPHSDVGCSSDEDGTVKSSLDHGDFLHIAIQIAAGMEYLSSHFFVHKDLAARNILIGEQLHVKISDLGLSREIYSADYYRVQSKSLLPIRWMPPEAIMYGKFSSDSDIWSFGVVLWEIFSFGLQPYYGFSNQEVIEMVRKRQLLPCSEDCPPRMYSLMTECWNEIPSRRPRFKDIHVRLRSWEGLSSHTSSTTPSGGNATTQTTSLSASPVSNLSNPRYPNYMFPSQGITPQGQIAGFIGPPIPQNQRFIPINGYPIPPGYAAFPAAHYQPTGPPRVIQHCPPPKSRSPSSASGSTSTGHVTSLPSSGSNQEANIPLLPHMSIPNHPGGMGITVFGNKSQKPYKIDSKQASLLGDANIHGHTESMISAEL

SEQ ID NO: 51268 - protein, 61 aa, Homo sapiens
LSDSVITSLKMLNAVKNKSAFSLNSYKLLSIEEMLIYKDVEDMITYREQIFLEISLKSSLM

SEQ ID NO: 51269 - protein, 137 aa, Homo sapiens
IDSGFRNSGITVGKRGKTMLAVRSTHGLEVPLSHKGKLMVTEEYIDFLLNVANQKMEENKKRIERFYNCLQHALERETMTNLHPKIKEKNNSSYIHKKKRNPEKTRAQCITKESDEELENDDDDDLGINVTIFPEDY

SEQ ID NO: 51270 - protein, 199 aa, Homo sapiens
IAQNFGLQHLSSGHFLRENIKASTEVGEMAKQYIEKSLLVPDHVITRLMMSELENRRGQHWLLDGFPRTLGQAEALDKICEVDLVISLNIPFETLKDRLSRRWIHPPSGRVYNLDFNPPHVHGIDDVTGEPLVQQEDDKPEAVAARLRQYKDVAKPVIELYKSRGVLHQFSGTETNKIWPYVYTLFSNKITPIQSKEAY

SEQ ID NO: 51271 - protein, 124 aa, Homo sapiens
VALSFSGAIGLTFLMLGCALEDYGVYWPLFVLIFHAISPIPHFIAKRVTYDSDATSSACRELAYFFTTGIVVSAFGFPVILARVAVIKWGACGLVLAGNAVIFLTIQGFFLIFGRGDDFSWEQW

SEQ ID NO: 51272 - protein, 7 aa, Homo sapiens
IKPYCTL

SEQ ID NO: 51273 - protein, 103 aa, Homo sapiens
KYYIHDHFIPIEKYQFSLYPIFMEGVGKPKIINSFTQDDIEKHQSDAGLYVIVPVIISSSILLLGTLLISHQRMKKLFWEDVPNPKNCSWAQGLNFQKRTDIL

SEQ ID NO: 51274 - protein, 28 aa, Homo sapiens
IYNVIVTAHAFVIIFFIVIPIIIGGFGN

SEQ ID NO: 51275 - protein, 4 aa, Homo sapiens
KYKN

SEQ ID NO: 51276 - protein, 140 aa, Homo sapiens
KDVIIKSDAPDTLLLEKHADYIASYGSKKDDYEYCMSEYLRMSGIYWGLTVMDLMGQLHRMNREEILAFIKSCQHECGGISASIGHDPHLLYTLSAVQILTLYDSINVIDVNKVVEYVKGLQKEDGSFAGDIWGPTKQLV

SEQ ID NO: 51277 - protein, 97 aa, Homo sapiens
KLPDVCYSWWVLASLKIIGRLHWIDREKLRNFILACQDEETGGFADRPGDMVDPFHTLFGIAGLSLLGEEQIKPVNPVFCMPEEVLQRVNVQPELVS

SEQ ID NO: 51278 - protein, 221 aa, Homo sapiens
LNAAKVPADTEVVCTPPTAYIDFARQKLDPKIAVAAQNCYKVTNGAFTGEISPGMIKDCRATWVVLGHSERRHVFGESDELIGQKVAHALAEGLGVIACTGEKLDEREAGITEKVVFEQTKVIADNVKDWSKVVLAYEPVWAIGTGKTATPQQDQEVHDKLRGWLKSNVSDAVAQSTRIIYGGSVTGATCKELASQPGVDGFLVGGASLKPEFVDIINAKQ

SEQ ID NO: 51279 - protein, 173 aa, Homo sapiens
TKSCKSRGSNLRVHFKNTRETAQAIKGMHIQKATKYLKDVTLQKQCVPFRRYNGGVGRCAQAKQWGWTQGRWPKKSAEFLLHMLKNTESNAELKGLDVDSLVIEHIQVNKAPKMRRRTYRAHGRINPYMSSPCHIEMILTEKEQIVPKPEEEVAQKKKISQKKLKKQKLMARE

SEQ ID NO: 51280 - protein, 41 aa, Homo sapiens
IRRMWNDTVRKQSESSFISGDINSTSTLNQGGINLNILLQD

SEQ ID NO: 51281 - protein, 26 aa, Homo sapiens
IIPINKEGCIPEGDVREGQMQLVTSL

SEQ ID NO: 51282 - protein, 28 aa, Homo sapiens
KTAADYKILGGSVLHLVLALRGGGGLRQ

SEQ ID NO: 51283 - protein, 337 aa, Homo sapiens
KKSLKRKAAAEELQEAAGAGDGATENGVQPPKAAAFPPGFSISEIKNKQRRHLMFTRWKQQQRKEKLAAKKKLKKEREALGDKAPPKPVPKTIDNQRVYDETTVDPNDEEVAYDEATDEFASYFNKQTSPKILITTSDRPHGRTVRLCEQLSTVIPNSHVYYRRGLALKKIIPQCIARDFTDLIVINEDRKTPNGLILSHLPNGPTAHFKMSSVRLRKEIKRRGKDPTEHIPEIILNNFTTRLGHSIGRMFASLFPHNPQFIGRQVATFHNQRDYIFFRFHRYIFRSEKKVGIQELGPRFTLKLRSLQKGTFDSKYGEYEWVHKPREMDTSRRKFHL

SEQ ID NO: 51284 - protein, 269 aa, Homo sapiens
RHPFLVNLFACFQTKEHVCFVMEYAAGGDLMMHIHTDVFSEPRAVFYAACVVLGLQYLHEHKIVYRDLKLDNLLLDTEGFVKIADFGLCKEGMGYGDRTSTFCGTPEFLAPEVLTETSYTRAVDWWGLGVLIYEMLVGESPFPGDDEEEVFDSIVNDEVRYPRFLSTEAISIMRRLLRRNPERRLGASEKDAEDVKKHPFFRLIDWSALMDKKVKPPFIPTIRGREDVSNFDDEFTSEAPILTPPREPRILSEEEQEMFRDFDYIADWC

SEQ ID NO: 51285 - protein, 100 aa, Homo sapiens
ITGNKVDILPKQLFKCIKLRTLNLGQNCITSLPEKVGQLSQLTQLELKGNCLDRLPAQLGQCRMLKKSGLVVEDHLFDTLPLEVKEALNQDINIPFANGI

SEQ ID NO: 51286 - protein, 66 aa, Homo sapiens
ICTPDLVVFLACANQRLKERLLKRAEQQGRPDDNVKATQRRLMNFKQNAAPLVKYFQEKGLIMTVS

SEQ ID NO: 51287 - protein, 341 aa, Homo sapiens
KAFEMGKDYYCILGIEKGASDEDIKKAYRKQALKFHPDKNKSPQAEEKFKEVAEAYEVLSDPKKREIYDQFGEEGLKGGAGGTDGQGGTFRYTFHGDPHATFAAFFGGSNPFEIFFGRRMGGGRDSEEMEIDGDPFSAFGFSMNGYPRDRNSVGPSRLKQDPPVIHELRVSLEEIYSGCTKRMKISRKRLNADGRSYRSEDKILTIEIKKGWKEGTKITFPREGDETPNSIPADIVFIIKDKDHPKFKRDGSNIIYTAKISLREALCGCSINVPTLDGRNIPMSVNDIVKPGMRRRIIGYGLPFPKNPDQRGDLLIEFEVSFPDTISSSSKEVLRKHLPAS

SEQ ID NO: 51288 - protein, 30 aa, Homo sapiens
VGEVEEVEELEEETAKEEPADFPVEQPEEN

SEQ ID NO: 51289 - protein, 23 aa, Homo sapiens
KEDEEEVSDKGSDSEEEETNRDS

SEQ ID NO: 51290 - protein, 328 aa, Homo sapiens [sequence omitted]

SEQ ID NO: 51291 - protein, 6 aa, Homo sapiens
KETIAK

SEQ ID NO: 51292 - protein, 15 aa, Homo sapiens
ISQKKLKKQKLMARK

SEQ ID NO: 51293 - protein, 323 aa, Homo sapiens
LEESRSKLERAIARHEVREIEQRHTMDGPRQDATLDEEEDMVIIYNRVPKTASTSFTNIAYDLCAKNKYHVLHINTTKNNPVMSLQDQVRFVKNITSWKEMKPGFYHGHVSYLDFAKFGVKKKPIYINVIRDPIERLVSYYYFLRFGDDYRPGLRRRKQGDKKTFDECVAEGGSDCAPEKLWLQIPFFCGHSSECWNVGSRWAMDQAKYNLINEYFLVGVTEELEDFIMLLEAALPRFFRGATELYRTGKKSHLRKTTEKKLPTKQTIAKLQQSDIWKMENEFYEFALEQFQFIRAHAVREKDGDLYILAQNFFYEKIYPKSN

SEQ ID NO: 51294 - protein, 284 aa, Homo sapiens
KRYQVKFRRRREGKTDYYARKRLVIQDKNKYNTPKYRMIVRVTNRDIICQIAYARIEGDMIVCAAYAHELPKYGVKVGLTNYAAAYCTGLLLARRLLNRFGMDKIYEGQVEVTGDEYNVESIDGQPGAFTCYLDAGLARTTTGNKVFGALKGAVDGGLSIPHSTKRFPGYDSESKEFNAEVHRKHIMGQNVADYMRYLMEEDEDAYKKQFSQYIKNSVTPDMMEEMYKKAHAAIRENPVYEKKPKKEVKKKRWNRPKMSLAQKKDRVAQKKASFLRAQERAAES

SEQ ID NO: 51295 - protein, 196 aa, Homo sapiens
ILWSRQLPNGELQPLSENATLTLISTKMEDSGVYLCEGINQAGRSRKEVELIIQVTPKDIKLTAFPSESVKEGDTVIISCTCGNVPETWIILKKKAETGDTVLKSIDGAYTIRKAQLKDAGVYECESKNKVGSQLRSLTLDVQGRENNKDYFSPELLVLYFASSLIIPAIGMIIYFARKANMKGSYSLVEAQKSKV

SEQ ID NO: 51296 - protein, 19 aa, Homo sapiens
ICCFALRERRCPNCGATFA

SEQ ID NO: 51297 - protein, 398 aa, Homo sapiens
KVSELLGGSQRLFFLPLWRRLCRCGLGPRVSPMAGPRVEVDGSIMEGGGQILRVSTALSCLLGLPLRVQKIRAGRSTPGLRPQHLSGLEMIRDLCDGQLEGAEIGSTEITFTPEKIKGGIHTADTKTAGSVCLLMQVSMPCVLFAASPSELHLKGGTNAEMAPQIDYTVMVFKPIVEKFGFIFNCDIKTRGYYPKGGGEVIVRMSPVKQLNPINLTERGCVTKIYGRAFVAGVLPFKVAKDMAAAAVRCIRKEIRDLYVNIQPVQEPKDQAFGNGNGIIIIAETSTGCLFAGSSLGKRGVNADKVGIEAAEMLLANLRHGGTVDEYLQDQLIVFMALANGVSRIKTGPVTLHTQTAIHFAEQIAKAKFIVKKSEDEEDAAKDTYIIECQGIGMTNPNL

SEQ ID NO: 51298 - protein, 373 aa, Homo sapiens
LSIKDDEYKPPKFNLFGKISGWFRSILSDKTSRNLFFFLCLNLSFAFVELLYGIWSNCLGLISDSFHMFFDSTAILAGLAASVISKWRDNDAFSYGYVRAEVLAGFVNGLFLIFTAFFIFSEGVERALAPPDVHHERLLLVSILGFVVNLIGIFVFKHGGHGHSHGSGHGHSHSLFNGALDQAHGHVDHCHSHEVKHGAAHSHDHAHGHGHFHSHDGPSLKETTGPSRQILQGVFLHILADTLGSIGVIASAIMMQNFGLMIADPICSILIAILIVVSVIPLLRESVGILMQRTPPLLENSLPQCYQRVQQLQGVYSLQEQHFWTLCSDVYVGTLKLIVAPDADARWILSQTHNIFTQAGVRQLYVQIDFAAM

SEQ ID NO: 51299 - protein, 55 aa, Homo sapiens
IVLVKNVLSRHYVHLERSPWKGLPELTNENAQYCPFSCETQAWSIATILETLYDL

SEQ ID NO: 51300 - protein, 242 aa, Homo sapiens
VVVAELLKIMACILLVYKDSKCSLRALNRVLHDEILNKPMETLKLAIPSGIYTLQNNLLYVALSNLDAATYQWPSDSQLDSKELSAGSQFVGLMAVLTACFSSGFAGVYFEKILKETKQSVWIRNIQLGFFGSIFGLMGVYIYDGELVSKNGFFQGYNRLTWIVVVLQALGGLVIAAVIKYADNILKGFATSLSIILSTLISYFWLQDFVPTSVFFLGAILVITATFLYGYDPKPAGNPTKA

SEQ ID NO: 51301 - protein, 611 aa, Homo sapiens
VALSNLDAATYQVTYQLKILTTALFSVSMLSKKLGVYQWLSLVILMTGVAFVQWPSDSQLDSKELSAGSQFVGLMAVLTACFSSGFAGVYFEKILKETKQSVWIRNIQLGFFGSIFGLMGVYIYDGELVSKNGFFQGYNRLTWIVVVLQPQGIGSPSVYHAVIVIFLEFFAWGLLTAPTLVVLHETFPKHTFLMNGLIQGVKGLLSFLSAPLIGALSDVWGRKSFLLLTVFFTCAPIPLMKISPWWYFAVISVSGVFAVTFSVVFAYVADITQEHERSMAYGLVSATFAASLVTSPAIGAYLGRVYGDSLVVVLATAIALLDICFILVAVPESLPEKMRPASWGAPISWEQADPFASLKKVGQDSIVLLICITVFLSYLPEAGQYSSFFLYLRQIMKFSPESVAAFIAVLGILSIIAQTIVLSLLMRSIGNKNTILLGLGFQILQLAWYGFGSEPWMMWAAGAVAAMSSITFPAVSALVSRTADADQQGVVQGMITGIRGLCNGLGPALYGFIFYIFHVELKELPITGTDLGTNTSPQHHFEQNSIIPGPPFLFGACSVLLALLVALFIPEHTNLSLRSSSWRKHCGSHSHPHNTQAPGEAKEPLLQDTNV

SEQ ID NO: 51302 - protein, 58 aa, Homo sapiens
KPAVSGKQGNVLPLWGNEKTMNLNPMILTNILSSPYFKVQLYELKTYHEVVDEIYFKD

SEQ ID NO: 51303 - protein, 146 aa, Homo sapiens
KKHKEDKDDRRHRDDKRDSKKEKKHSRSRSRERKHRSRSRSRNAGKRSRSRSKEKSSKHKNESKEKSNKRSRSGSQGRTDSVEKSKKREHSPSKEKSRKRSRSKERSHKRDHSDSKDQSDKHDRRRSQSIEQESQEKQHKNKDETV

SEQ ID NO: 51304 - protein, 97 aa, Homo sapiens
MLKTSSVPVVSPNTDEFLDLLASSQSRRLDDQRASFSNLPGLRLTQNSQSVLSHLMTNDNKEADEDFFDILVKCQVCLYIFFVLHTAQIPLKTLVVL

SEQ ID NO: 51305 - protein, 73 aa, Homo sapiens
TNVYSLDGILVFGLLFVCTCAYFKKVPRLKTWLLSEKKGVWGVFYKAAVIGTRLHAAVAIACVVMAFYVLFIK

SEQ ID NO: 51306 - protein, 95 aa, Homo sapiens
IACKFAELKEKIDRRSGKKLEDGPKFLKSGDAAIADMVPGKPMCVESFSDYPPLGRFTVHDMRQTLAVGVIKAVDKKAAGAGKVTKSAQKAQKAK

SEQ ID NO: 51307 - protein, 535 aa, Homo sapiens
VLDLDLFRVDKGGDPALIRETQEKRFKDPGLVDQLVKADSEWRRCRFRADNLNKLKNLCSKTIGEKMKKKEPVGDDESVPENVLSFDDLTADALANLKVSQIKKVRLLIDEAILKCDAERIKLEAERFENLREIGNLLHPSVPISNDEDVDNKVERIWGDCTVRKKYSHVDLVVMVDGFEGEKGAVVAGSRGYFLKGVLVFLEQALIQYALRTLGSRGYIPIYTPFFMRKEVMQEVAQLSQFDEELYKVIGKGSEKSDDNSYDEKYLIATSEQPIAALHRDEWLRPEDLPIKYAGLSTCFRQEVGSHGRDTRGIFRVHQFEKIEQFVYSSPHDNKSWEMFEEMITTAEEFYQSLGIPYHIVNIVSGSLNHAASKKLDLEAWFPGSGAFRELVSCSNCTDYQARRLRIRYGQTKKMMDKRKNNLHLSTQNKLEASLFSPKKVEFVHMLNATMCATTRTICAILENYQTEKGITVPEKLKEFMPPGLQELIPFVKPAPIEQEPSKKQKKQHEGSKKKAAARDVTLENRLQNMEVTDA

SEQ ID NO: 51308 - protein, 622 aa, Homo sapiens
KKSGKPPLQNNEKEGKKERAVVDKVFFSRLIQILKIMVPRTFCKETGYLVLIAVMLVSRTYCDVWMIQNGTLIESGIIGRSRKDFKRYLLNFIAAMPLISLVNNFLKYGLNELKLCFRVRLTKYLYEEYLQAFTYYKMGNLDNRIANPDQLLTQDVEKFCNSVVDLYSNLSKPFLDIVLYIFKLTSAIGAQGPASMMAYLVVSGLFLTRLRRPIGKMTITEQKYEGEYRYVNSRLITNSEEIAFYNGNKREKQTVHSVFRKLVEHLHNFILFRFSMGFIDSIIAKYLATVVGYLVVSRPFLDLSHPRHLKSTHSELLEDYYQSGRMLLRMSQALGRIVLAGREMTRLAGFTARITELMQVLKDLNHGKYERTMVSQQEKGIEGVQVIPLIPGAGEIIIADNIIKFDHVPLATPNGDVLIRDLNFEVRSGANVLICGPNGCGKSSLFRVLGELWPLFGGRLTKPERGKLFYVPQRPYMTLGTLRDQVIYPDGREDQKRKGISDLVLKEYLDNVQLGHILEREGGWDSVQDWMDVLSGGEKQRMAMARLFYHKPQFAILDECTSAVSVDVEGYIYSHCRKVGITLFTVSHRKSLWKHHEYYLHMDGRGNYEFKQITEDTVEFGS

SEQ ID NO: 51309 - protein, 258 aa, Homo sapiens
LTMLSRVVLSAAATAAPSLKNAAFLGPGVLQATRTFHTGQPHLVPVPPLPEYGGKVRYGLIPEEFFQFLYPKTGVTGPYVLGTGLILYALSKEIYVISAETFTALSVLGVMVYGIKKYGPFVADFADKLNEQKLAQLEEAKQASIQHIQNAIDTEKSQQALVQKRHYLFDVQRNNIAMALEVTYRERLYRVYKEVKNRLDYHISVQNMMRRKEQEHMINWVEKHVVQSISTQQEKETIAKCIADLKLLAKKAQAQPVM

SEQ ID NO: 51310 - protein, 149 aa, Homo sapiens
IEDSYRKQVEVDCQQCMLEILDTAGTEQFTAMRDLYMKNGQGFALVYSITAQSTFNDLQDLREQILRVKDTEDVPMILVGNKCDLEDERVVGKEQGQNLARQWCNCAFLESSAKSKINVNEIFYDLVRQINRKTPVEKKKPKKKSCLLL

SEQ ID NO: 51311 - protein, 285 aa, Homo sapiens
RQSEEQMKNSVQTPVENSTNSQHQVKEALPVSLPQIPCLSSFKIHQPYTLTFAELVEDYEHYIKEGLEKPVEIIRHYTGPGDQTVNPQNGFVRNKVIEQRVPVLASSSQSGDSESDSDSYSSRTSSQSKGNKSYLEGSSDNQLKDSESTPVDDRISLEQPPNGSDTPNPEKYQESPGIQMKTRLKEGASQRAKQSRRNLPRRSSFRLQTEAQEDDWYDCHREIRLSFSDTYQDYEEYWRAYYRAWQEYYAAASHSYYWNAQRHPSWMAAYHMNTIYLQEMMHSNQ

SEQ ID NO: 51312 - protein, 121 aa, Homo sapiens
IKPVSPNSSPFGTDYRNLANTANPRGDTSHSPTPGKVSSPLSPLSPGIKSPTIPRAERGNPPPIPPKKPGLTPSPSATTPLTKTHSQAASLTTAEDLASSCSSNTVVANGKDVELLLPTSS

SEQ ID NO: 51313 - protein, 287 aa, Homo sapiens
KMADFDDRVSDEEKVRIAAKFITHAPPGEFNEVFNDVRLLLNNDNLLREGAAHAFAQYNMDQFTPVKIEGYEDQVLITEHGDLGNSRFLDPRNKISFKFDHLRKEASDPQPEEADGGLKSWRESCDSALRAYVKDHYSNGFCTVYAKTIDGQQTIIACIESHQFQPKNFWNGRWRSEWKFTITPPTAQVVGVLKIQVHYYEDGNVQLVSHKDVQDSLTVSNEAQTAKEFIKIIENAENEYQTAISENYQTMSDTTFKALRRQLPVTRTKIDWNKILSYKIGKEMQNA

SEQ ID NO: 51314 - protein, 37 aa, Homo sapiens
KLSPSTSGPHSHDYLPQEREGEGGLSLQVEPEWRNEL

SEQ ID NO: 51315 - protein, 45 aa, Homo sapiens
VFVLKCLDFSLVVNVKKIPFIILSEEFIDPKSHKFVLRLQSETSV

SEQ ID NO: 51316 - protein, 220 aa, Homo sapiens
LYYTFANMAMLNHLRRQRGFHTFVLRPHCGEAGPIHHLVSAFMLAENISHGLLLRKAPVLQYLYYLAQIGIAMSPLSNNSLFLSYHRNPLPEYLSRGLMVSLSTDDPLQFHFTKEPLMEEYSIATQVWKLSSCDMCELARNSVLMSGFSHKVKSHWLGPNYTKEGPEGNDIRRTNVPDIRVGYRYETLCQELALITQAVQSEMLETIPEEAGITMSPGPQ

SEQ ID NO: 51317 - protein, 58 aa, Homo sapiens
KEGPEGNDIRRTNVPDIRVGYRYETLCQELALITQAVQSEMLETIPEEAGITMSPGPQ

SEQ ID NO: 51318 - protein, 214 aa, Homo sapiens
LGYWNIRGLAHSIRLLLEYTDSSYEEKKYTMGDAPDYDRSQWLNEKFKLGLDFPNLPYLIDGTHKITQSNAILRYIARKHNLCGESEKEQIREDILENQFMDSRMQLAKLCYDPDFEKLKPEYLQALPEMLKLYSQFLGKQPWFLGDKITFVDFIAYDVLERNQVFEPSCLDAFPNLKDFISRFEGLEKISAYMKSSRFLPRPVFTKMAVWGNK

SEQ ID NO: 51319 - protein, 172 aa, Homo sapiens
LNEKFKLGLDFPNLPYLIDGAHKITQSNAILRYIARKHNLCGETEEEKIRVDILENQVMDNHMELVRLCYDPDFEKLKPKYLEELPEKLKLYSEFLGKRPWFAGDKITFVDFLAYDVLDMKRIFEPKCLDAFLNLKDFISRFEGLKKISAYMKSSQFLRGLLFGKSATWNSK

SEQ ID NO: 51320 - protein, 509 aa, Homo sapiens
IEDAEKYSFMATVTKAPKKQIQFADDMQEFTKFPTKTGRRSLSRSISQSSTDSYSSAASYTDSSDDEVSPREKQQTNSKGSSNFCVKNIKQAEFGRREIEIAEQDMSALISLRKRAQGEKPLAGAKIVGCTHITAQTAVLIETLCALGAQCRWSACNIYSTQNEVAAALAEAGVAVFAWKGESEDDFWWCIDRCVNMDGWQANMILDDGGDLTHWVYKKYPNVFKKIRGIVEESVTGVHRLYQLSKAGKLCVPAMNVNDSVTKQKFDNLYCCRESILDGLKRTTDVMFGGKQVVVCGYGEVGKGCCAALKALGAIVYITEIDPICALQACMDGFRVVKLNEVIRQVDVVITCTGNKNVVTREHLDRMKNSCIVCNMGHSNTEIDVTSLRTPELTWERVRSQVDHVIWPDGKRVVLLAEGRLLNLSCSTVPTFVLSITATTQALALIELYNAPEGRYKQDVYLLPKKMDEYVASLHLPSFDAHLTELTDDQAKYLGLNKNGPFKPNYYRY

SEQ ID NO: 51321 - protein, 18 aa, Homo sapiens
ILKFFNQNIMSYITAKNR

SEQ ID NO: 51322 - protein, 31 aa, Homo sapiens
VDLPEDFQMNYDLWLEREVFSKPISWEELLQ

SEQ ID NO: 51323 - protein, 189 aa, Homo sapiens
LEKKMGHLACFAGGMFALGADGSRADKAGHYLELGAEIARTCHESYDRTALKLGPESFKFDGAVEAVAVRQAEKYYILRPEVIETYWYLWRFTHDPRYRQWGWEAALAIEKYCRVNGGFSGVKDVYSSTPTHDDVQQSFFLAETLKYLYLLFSGDDLLPLDHWVFNTEAHPLPVLHLANTTLSGNPAVR

SEQ ID NO: 51324 - protein, 23 aa, Homo sapiens
MTSPAKFKKDKEIIAEYDTQVKE

SEQ ID NO: 51325 - protein, 230 aa, Homo sapiens
MCVTYHSGTGYCKCPEGFLGEYCQHRDPCEKNRCQNGGTCVAQAMLGKATCRCASGFTGEDCQYSTPHPCFVSRPCLNGGTCHMLSRDTYECTCQVGFTGKECQWTDACLSHLCANGSTCTTVANQFSCKCLTGFTGQKCETDVNECDIPGHCQHGGTCLNLPGSYQCQCLQGFTGQYCDRLYVPCAHSPCVNGGTCRQTGDFTFECNCLPATWPIFPKLLSLQEKESYC

SEQ ID NO: 51326 - protein, 1028 aa, Homo sapiens
LSTATMGKGVGRDKYEPAAVSEQGDKKGKKGKKDRDMDELKKEVSMDDHKLSLDELHRKYGTDLSRGLTSARAAEILARDGPNALTPPPTTPEWIKFCRQLFGGFSMLLWIGAILCFLAYSIQAATEEEPQNDNLYLGVVLSAVVIITGCFSYYQEAKSSKIMESFKNMVPQQALVIRNGEKMSINAEEVVVGDLVEVKGGDRIPADLRIISANGCKVDNSSLTGESEPQTRSPDFTNENPLETRNIAFFSTNCVEGTARGIVVYTGDRTVMGRIATLASGLEGGQTPIAAEIEHFIHIITGVAVFLGVSFFILSLILEYTWLEAVIFLIGIIVANVPEGLLATVTVCLTLTAKRMARKNCLVKNLEAVETLGSTSTICSDKTGTLTQNRMTVAHMWFDNQIHEADTTENQSGVSFDKTSATWLALSRIAGLCNRAVFQANQENLPILKRAVAGDASESALLKCIELCCGSVKEMRERYAKIVEIPFNSTNKYQLSIHKNPNTSEPQHLLVMKGAPERILDRCSSILLHGKEQPLDEELKDAFQNAYLELGGLGERVLGFCHLFLPDEQFPEGFQFDTDDVNFPIDNLCFVGLISMIDPPRAAVPDAVGKCRSAGIKVIMVTGDHPITAKAIAKGVGIISEGNETVEDIAARLNIPVSQVNPRDAKACVVHGSDLKDMTSEQLDDILKYHTEIVFARTSPQQKLIIVEGCQRQGAIVAVTGDGVNDSPALKKADIGVAMGIAGSDVSKQAADMILLDDNFASIVTGVEEGRLIFDNLKKSIAYTLTSNIPEITPFLIFIIANIPLPLGTVTILCIDLGTDMVPAISLAYEQAESDIMKRQPRNPKTDKLVNERLISMAYGQIGMIQALGGFFTYFVILAENGFLPIHLLGLRVDWDDRWINDVEDSYGQQWTYEQRKIVEFTCHTAFFVSIVVVQWADLVICKTRRNSVFQQGMKNKILIFGLFEETALAAFLSYCPGMGVALRMYPLKPTWWFCAFPYSLLIFVYDEVRKLIIRRRPGGWVEKETYY

SEQ ID NO: 51327 - protein, 59 aa, Homo sapiens
IVTVEDFDVSDCFQYSNSMESVKSTVSETFMSKPSIAKRRANQQETEQFYFTVRECYGF

SEQ ID NO: 51328 - protein, 57 aa, Homo sapiens
IKLCSLLLQEHFGEIVEKIGVHLIRTGSQPLRVIAHDTGTSLDQVKKALCVLVQHNL

SEQ ID NO: 51329 - protein, 333 aa, Homo sapiens
RRSSDEDAAGEPKAKRPKYTTDNKEPIPDDGIYWQANLDRFHQHFRDQAIVSAVANRMDQTSSEIVRTMLRMSEITTSSSAPFTQPLSSNEIFRSLPVGYNISKQVLDQYLTLLADDPLEFVGKSGDSGGGMYVINLHKALASLATATLESVVQERFGSRCARIFRLVLQKKHIEQKQVEDFAMIPAKEAKDMLYKMLSENFMSLQEIPKTPDHAPSRTFYLYTVNILSAARMLLHRCYKSIANLIERRQFETKENKRLLEKSQRVEAIIASMQATGAEEAQLQEIEEMITAPERQQLETLKRNVNKLDASEIQVDETIFLLESYIECTMKRQ

SEQ ID NO: 51330 - protein, 12 aa, Homo sapiens
LASFCFDLNIPI

SEQ ID NO: 51331 - protein, 269 aa, Homo sapiens
LWALLALWLCCATPAHALQCRDGYEPCVNEGMCVTYHNGTGYCKCPEGFLGEYCQHRDPCEKNRCQNGGTCVAQAMLGKATCRCASGFTGEDCQYSTSHPCFVSRPCLNGGTCHMLSRDTYECTCQVGFTGKECQWTDACLSHPCANGSTCTTVANQFSCKCLTGFTGQKCETDVNECDIPGHCQHGGTCLNLPGSYQCQCLQGFTGQYCDSLYVPCAPSPCVNGGTCRQTGDFTFECNCLPDGYLARWPHSASLLSESELLAVLSALS

SEQ ID NO: 51332 - protein, 87 aa, Homo sapiens
KRHRKVLRDNIQGITKPAIRRLARRGGVKRISGLIYEETRGVLKVFLENVIRDAVTYTEHAKRKTVTAMDVVYALKRQGRTLYGFGG

SEQ ID NO: 51333 - protein, 132 aa, Homo sapiens
ISVMSGRGKQGGKARAKAKSRSSRAGLQFPVGRVHRLLRKGNYAERVGAGAPVYMAAVLEYLTAEILELAGNAARDNKKTRIIPRHLQLAIRNDEELNKLLGKVTIAQGGVLPNIQAVLLPKKTESHKAKSK

SEQ ID NO: 51334 - protein, 173 aa, Homo sapiens
TRTYDREGFKKRAACLCFRSEQEDEVLLVSSSRYPDQWIVPGGGMEPEEEPGGAAVREVYEEAGVKGKLGRLLGIFEQNQDRKHRTYVYVLTVTEILEDWEDSVNIGRKREWFKVEDAIKVLQCHKPVHAEYLEKLKLGCSPANGNSTVPSLPDNNALFVTAAQTSGLPSSVR

SEQ ID NO: 51335 - protein, 1091 aa, Homo sapiens
KLNLQVLLSHVLGKDVPRDGKAEFACSKCAFMLDRIYRFDTVIARIEALSIERLQKLLLEKDRLKFCIASMYRKNNDDSGAEIKAGNGTVDMSVLPDARYSALLQEDFAYSGFECWVENEDQIQEPHSCHGSEGPGNRPRRCRGCAALRVADSDYEAICKVPRKVARSISCGPSSRWSTSICTEEPALSEVGPPDLASTKVPPDGESMEEETPGSSVESLDASVQASPPQQKDEETERSAKELGKCDCCSDDQAPQHGCNHKLELALSMIKGLDYKPIQSPRGSRLPIPVKSSLPGAKPGPSMTDGVSSGFLNRSLKPLYKTPVSYPLELSDLQELWDDLCEDYLPLRVQPMTEELLKQQKLNSHETTITQQSVSDSHLAELQEKIQQTEATNKILQEKLNEMSYELKCAQESSQKQDGTIQNLKETLKSRERETEELYQVIEGQNDTMAKLREMLHQSQLGQLHSSEGTSPAQQQVALLDLQSALFCSQLEIQKLQRVVRQKERQLADAKQCVQFVEAAAHESEQQKEASWKHNQELRKALQQLQEELQNKSQQLRAWEAEKYNEIRTQEQNIQHLNHSLSHKEQLLQEFRELLQYRDNSDKTLEANEMLLEKLRQRIHDKAVALERAIDEKFSALEEKEKELRQLRLAVRERDHDLERLRDVLSSNEATMQSMESLLRAKGLEVEQLSTTCQNLQWLKEEMETKFSRWQKEQESIIQQLQTSLHDRNKEVEDLSATLLCKLGPGQSEIAEELCQRLQRKERMLQDLLSDRNKQVLEHEMEIQGLLQSVSTREQESQAAAEKLVQALMERNSELQALRQYLGGRDSLMSQAPISNQQAEVTPTGRLGKQTDQGSMQIPSRDDSTSLTAKEDVSIPRSTLGDLDTVAGLEKELSNAKEELELMAKKERESQMELSALQSMMAVQEEELQVQAADMESLTRNIQIKEDLIKDLQMQLVDPEDIPAMERLTQEVLLLREKVASVESQGQEISGNRRQQLLLMLEGLVDERSRLNEALQAERQLYSSLVKFHAHPESSERDRTLQVELEGAQVLRSRLEEVLGRSLERLNRLETLAAIGGGELESVRIHHKHAY

SEQ ID NO: 51336 - protein, 50 aa, Homo sapiens
LDSKANNLSSLSKKYRQDAKYLNMHSTYAKLAAVAVFFIMLIVYVRFWWL

SEQ ID NO: 51337 - protein, 475 aa, Homo sapiens
IYFSNVISKSDVKSLAEADEQEVVAEVQEFYGDYIAVNPHLFSLNILGCCQGRNWDPAQLSRTTQGLTALLLSLKKCPMIRYQLSSEAAKRLAECVKQVITKEYELFEFRRTEVPPLLLILDRCDDAITPLLNQWTYQAMVHELLGINNNRIDLSRVPGISKDLREVVLSAENDEFYANNMYLNFAEIGSNIKNLMEDFQKKKPKEQQKLESIADMKAFVENYPQFKKMSGTVSKHVTVVGELSRLVSERNLLEVSEVEQELACQNDHSSALQNIKRLLQNPKVTEFDAARLVMLYALHYERHSSNSLPGLMMDLRNKGVSEKYRKLVSAVVEYGGKRVRGSDLFSPKDAVAITKQFLKGLKGVENVYTQHQPFLHETLDHLIKGRLKENLYPYLGPSTLRDRPQDIIVFVIGGATYEEALTVYNLNRTTPGVRIVLGGTTVHNTKSFLEEVLASGLHSRSKESSQVTSRSASRR

SEQ ID NO: 51338 - protein, 396 aa, Homo sapiens
IRYQLSSEAAKRLAECVKQVITKEYELFEFRRTEVPPLLLILDRCDDAITPLLNQWTYQAMVHELLGINNNRIDLSRVPGISKDLREVVLSAENDEFYANNMYLNFAEIGSNIKNLMEDFQKKKPKEQQKLESIADMKAFVENYPQFKKMSGTVSKHVTVVGELSRLVSERNLLEVSEVEQELACQNDHSSALQNIKRLLQNPKVTEFDAARLVMLYALHYERHSSNSLPGLMMDLRNKGVSEKYRKLVSAVVEYGGKRVRGSDLFSPKDAVAITKQFLKGLKGVENVYTQHQPFLHETLDHLIKGRLKENLYPYLGPSTLRDRPQDIIVFVIGGATYEEALTVYNLNRTTPGVRIVLGGTTVHNTKSFLEEVLASGLHSRSKESSQVTSRSASRR

SEQ ID NO: 51339 - protein, 62 aa, Homo sapiens
ITEAIETTISLETARADHPKPVTVKPVTTEPSPDLNDAVSSLRSPIPLLLSCAFVQVGMYFM

SEQ ID NO: 51340 - protein, 36 aa, Homo sapiens
IRTRDNRRLGEWDLPEAVQRLVELQNTRVPNAEEIF

SEQ ID NO: 51341 - protein, 33 aa, Homo sapiens
KKYIPGTKMIFAGIKKKAEKADLTAYLKKATNE

SEQ ID NO: 51342 - protein, 18 aa, Homo sapiens
KCSQISLSQSTTASLSKK

SEQ ID NO: 51343 - protein, 33 aa, Homo sapiens
LAFWKRVRIGLEDIWNSLSSVFTEMQPIDRNQR

SEQ ID NO: 51344 - protein, 470 aa, Homo sapiens
ITHTVGSLSTKPERDVLMQDFYVVESIFFPSEGSNLTPAHHYNDFRFKTYAPVAFRYFRELFGIRPDDYLYSLCSEPLIELCSSGASGSLFYVSSDDEFIIKTVQHKEAEFLQKLLPGYYMNLNQNPRTLLPKFYGLYCVQAGGKNIRIVVMNNLLPRSVKMHIKYDLKGSTYKRRASQKEREKPLPTFKDLDFLQDIPDGLFLDADMYNALCKTLQRDCLVLQSFKIMDYSLLMSIHNIDHAQREPLSSETQYSVDTRRPAPQKALYSTAMESIQGEARRGGTMETDDHMGGIPARNSKGERLLLYIGIIDILQSYRFVKKLEHSWKALVHDGDTVSVHRPGFYAERFQRFMCNTVFKKIPLKPSPSKKFRSGSSFSRRAGSSGNSCITYQPSVSGEHKAQVTTKAEVEPGVHLGRPDVLPQTPPLEEISEGSPIPDPSFSPLVGETLQMLTTSTTLEKLEVAESEFTH

SEQ ID NO: 51345 - protein, 386 aa, Homo sapiens
REEGGKMVLESTMVCVDNSEYMRNGDFLPTRLQAQQDAVNIVCHSKTRSNPENNVGLITLANDCEVLTTLTPDTGRILSKLHTVQPKGKITFCTGIRVAHLALKHRQGKNHKMRIIAFVGSPVEDNEKDLVKLAKRLKKEKVNVDIINFGEEEVNTEKLTAFVNTLNGKDGTGSHLVTVPPGPSLADALISSPILAGEGGAMLGLGASDFEFGVDPSADPELALALRVSMEEQRQRQEEEARRAAAASAAEAGIATTGTEGERDSDDALLKMTISQQEFGRTGLPDLSSMTEEEQIAYAMQMSLQGAEFGQAESADIDASSAMDTSEPAKEEDDYDVMQDPEFLQSVLENLPGVDPNNEAIRNAMGSLASQATKDGKKDKKEEDKK

SEQ ID NO: 51346 - protein, 35 aa, Homo sapiens
KVCGKSCDSPLNLKTHFRTHGMAFIRARQGAVGDN

SEQ ID NO: 51347 - protein, 241 aa, Homo sapiens
IPSTPDSFMDPASALYRGPITRTQNPMVTGTSVLGVKFEGGVVIAADMLGSYGSLARFRNISRIMRVNNSTMLGASGDYADFQYLKQVLGQMVIDEELLGDGHSYSPRAIHSWLTRAMYSRRSKMNPLWNTMVIGGYADGESFLGYVDMLGVAYEAPSLATGYGAYLAQPLLREVLEKQPVLSQTEARDLVERCMRVLYYRDARSYNRFQIATVTEKGVEIEGPLSTETNWDIAHMISGFE

SEQ ID NO: 51348 - protein, 200 aa, Homo sapiens
MFSAGLSDLRHMRMTRSVDNVQFLPFLTTEVNNLGWLSYGALKGDGILIVVNTVGAALQTLYILAYLHYCPRKRVVLLQTATLLGVLLLGYGYFWLLVPNPEARLQQLGLFCSVFTISMYLSPLADLAKVIQTKSTQCLSYPLTIATLLTSASWCLYGFRLRDPYIMVSNFPGIVTSFIRFWLFWKYPQEQDRNYWLLQT

SEQ ID NO: 51349 - protein, 210 aa, Homo sapiens
LVHTFWIDTKNYVEVTRKWYAEAMPFPLNFFLPGRMQRQYMERLQLLTGEHRPEDEEELEKELYREARECLTLLSQRLGSQKFFFGDAPASLDAFVFSYLALLLQAKLPSGKLQVHLRGLHNLCAYCTHILSLYFPWDGAEVPPQRQTPAGPETEEEPYRRRNQILSVLAGLAAMVGYALLSGIVSIQRATPARAPGTRTLGMAEEDEEE

SEQ ID NO: 51350 - protein, 325 aa, Homo sapiens
VPLRTEEEFKKFISDKDASIVGFFDDSFSEAHSEFLKAASNLRDNYRFAHTNVESLVNEYDDNGDGIILFRPSHLTNKLEDKTVAYTVQKMTSGKIKKFIQENIFGICPHMTEDNKDLIQGKDLLIAYYDVDYEKNAKGSNYWRNRVMMVAKKFLDAGHKLNFAVASRKTFSHELSDFGLESTAGEIPVVAIRTAKGEKFVMQEDFSRDGNALERFLQDYFDGNLKRYLKSEPIPESNDGPVKVVVAENFDEIVNNENKDVLIEFYAPWCGHCKNLEPKYKELGEKLSKDLNIVIAKMDATANDVPSPYEVRVFLPYTSLQPTRS

SEQ ID NO: 51351 - protein, 82 aa, Homo sapiens
KMAALEEGLKKIFLAAKKKKASVHLPRIGHATKGFNWYGTERLIRKHLAARGIPTYIYYFPRSKSAVLHSQSSSSSSRQLVP

SEQ ID NO: 51352 - protein, 1083 aa, Homo sapiens
VGTNRARGNWEQPQNQNQTQHKQRPQATAEQIRLAQMISDHNDADFEEKVKQLIDITGKNQDECVIALHDCNGDVNRAINVLLEGNPDTHSWEMVGKKKGVSGQKDGGQTESNEEGKENRDRDRDYSRRRGGPPRRGRGASRGREFRGQENGLDGTKSGGPSGRGTERGRRGRGRGRGGSGRRGGRFSAQGMGTFNPADYAEPANTDDNYGNSSGNTWNNTGHFEPDDGTSAWRTATEEWGTEDWNEDLSETKIFTASNVSSVPLPAENVTITAGQRIDLAVLLGKTPSTMENDSSNLDPSQAPSLAQPLVFSNSKQTAISQPASGNTFSHHSMVSMLGKGFGDVGEAKGGSTTGSQFLEQFKTAQALAQLAAQHSQSGSTTTSSWDMGSTTQSPSLVQYDLKNPSDSAVHSPFTKRQAFTPSSTMMEVFLQEKSPAVATSTAAPPPPSSPLPSKSTSAPQMSPGSSDNQSSSPQPAQQKLKQQKKKASLTSKIPALAVEMPGSADISGLNLQFGALQFGSEPVLSDYESTPTTSASSSQAPSSLYTSTASESSSTISSNQSQESGYQSGPIQSTTYTSQNNAQGPLYEQRSTQTRRYPSSISSSPQKDLTQAKNGFSSVQATQLQTTQSVEGATGSAVKSDSPSTSSIPPLNETVSAASLLTTTNQHSSSLGGLSHSEEIPNTTTTQHSSTLSTQQNTLSSSTSSGRTSTSTLLHTSVESEANLHSSSSTFSTTSSTVSAPPPVVSVSSSLNSGSSLGLSLGSNSTVTASTRSSVATTSGKAPPNLPPGVPPLLPNPYIMAPGLLHAYPPQVYGYDDLQMLQTRFPLDYYSIPFPTPTTPLTGRDGSLASNPYSGDLTKFGRGDASSPAPATTLAQPQQNQTQTHHTTQQTFLNPALPPGYSYTSLPYYTGVPGLPSTFQYGPAVFPVAPTSSKQHGVNVSVNASATPFQQPSGYGSHGYNTGVSVTSSNTGVPDISGSVYSKTQQSFEKQGFHSGTPAASFNLPSALGSGGPINPATAAAYPPAPFMHILTPHQQPHSQILHHHLQQDGQTGSGQRSQTSSIPQKPQTNKSAYNSYSWGAN

SEQ ID NO: 51353 - protein, 378 aa, Homo sapiens
LAWHSARCWCQAWTEEPRALCSSLRMNGDQNSDVYAQEKQDFVQHFSQIVRVLTEDEMGHPEIGDAIARLKEVLEYNAIGGKYNRGLTVVVAFRELVEPRKQDADSLQRAWTVGWCVELLQAFFLVADDIMDSSLTRRGQICWYQKPGVGLDAINDANLLEACIYRLLKLYCREQPYYLNLIELFLQSSYQTEIGQTLDLLTAPQGNVDLVRFTEKRYKSIVKYKTAFYSFYLPIAAAMYMAGIDGEKEHANAKKILLEMGEFFQIQDDYLDLFGDPSVTGKIGTDIQDNKCSWLVVQCLQRATPEQYQILKENYGQKEAEKVARVKALYEELDLPAVFLQYEEDSYSHIMALIEQYAAPLPPAVFLGLARKIYKRRK

SEQ ID NO: 51354 - protein, 8 aa, Homo sapiens
VGYTSLVL

SEQ ID NO: 51355 - protein, 41 aa, Homo sapiens
VAAPGGALASVSFDSRDSKMAAQSAPKVVLKSTTKMSLNER

SEQ ID NO: 51356 - protein, 51 aa, Homo sapiens
MLKNKQPTPVNIRASMQQQQQLASARNRRLAQQMENRPSVQAALKLKQVGV

SEQ ID NO: 51357 - protein, 72 aa, Homo sapiens
IGGRGRGMIGRGRGGFGGRGRGRGRGRGALARPVLTKEQLDNQLDAYMSKTKGHLDAELDAYMAQTDPETND

SEQ ID NO: 51358 - protein, 107 aa, Homo sapiens
LEFLRPAVQQLDSHVHAVRESQVELREQIDNLATELCRINEDQKVALDLDPYVKKLLNARRRVVLVNNILQNAQERLRRLNHSVAKETARRRAMLDSGIYPPGSPGK

SEQ ID NO: 51359 - protein, 53 aa, Homo sapiens
LIHDRDSVGSQPPLPPGLPPGHYDSPKNSHIPGHYDLPPVRHPPSPPLRRQDR

SEQ ID NO: 51360 - protein, 150 aa, Homo sapiens
IKRNIQKCISRGELQVSLSYQPVAQRMTVVVLKARHLPKMDITGLSGNPYVKVNVYYGRKRIAKKKTHVKKCTLNPIFNESFIYDIPTDLLPDISIEFLVIDFDRTTKNEVVGRLILGAHSVTASGAEHWREVCESPRKPVAKWHSLSEY

SEQ ID NO: 51361 - protein, 110 aa, Homo sapiens
LAESVLDILTEQREWVLKSSILIAMAVYTYLRLIVDHHGTAQLQALRQKEVDFCISLLRERFMECLMIGRDLVRLLQNVARIPEFELLWKDIIHNPQALSPQFTGWCAMA

SEQ ID NO: 51362 - protein, 92 aa, Homo sapiens
LQHVQASCDEAHKMKFSDLFSLAEEYEDSSTKPPKSRRKAALSSPRSRKNATQPPNAEEESGSSSASEEEDTKPKPTKRKRKGSSAVGSDSD

SEQ ID NO: 51363 - protein, 127 aa, Homo sapiens
LEPDLPALRAMGLHLWAAGPGTHPAGISDLLAEVSAEVDGPVPGYLSSPQSITDTCLYIFTSGTTGLPKAARISHLKILQCQGFYQLCGVHQEDVIYLALPLYHMSGSLLGIVGCMGIGQSPQPHLH

SEQ ID NO: 51364 - protein, 284 aa, Homo sapiens
VGSGLRPDTWERFVRRFGPLQVLETYGLTEGNVATINYTGQRGAVGRASWLYKHIFPFSLIRYDVTTGEPIRDPQGHCMATSPGEPGLLVAPVSQQSPFLGYAGGPELAQGKLLKDVFRPGDVFFNTGDLLVCDDQGFLRFHDRTGDTFRWKGENVATTEVAEVFEALDFLQEVNVYGVTVPGHEGRAGMAALVLRPPHALDLMQLYTHVSENLPPYARPRFLRLQESLATTETFKQQKVRMANEGFDPSTLSDPLYVLDQAVGAYLPLTTARYSALLAGNLRI

SEQ ID NO: 51365 - protein, 31 aa, Homo sapiens
IHQAKERELELKNTWSENKLSRRQTQAKYGF

SEQ ID NO: 51366 - protein, 103 aa, Homo sapiens
KEDIPSEKSEEITTGSAWFSFLESHNKLDKDNLSYIEHIFEISRRPDLLTMVVDYRTRVLKISEEDELDTKLTRIPSAKKYKDIIRQPSEEEIIKLAPPPKKA

SEQ ID NO: 51367 - protein, 719 aa, Homo sapiens
VLPCVLLNYSGIVQWTKDGLALGMGQGLKAWPRYRVVGSADAGQYNLEITDAELSDDASYECQATEAALRSRRAKLTVLIPPEDTRIDGGPVILLQAGTPHNLTCRAFNAKPAATIIWFRDGTQQEGAVASTELLKDGKRETTVSQLLINPTDLDIGRVFTCRSMNEAIPSGKETSIELDVHHPPTVTLSIEPQTVQEGERVVFTCQATANPEILGYRWAKGGFLIEDAHESRYETNVDYSFFTEPVSCEVHNKVGSTNVSTLVNVHFAPRIVVDPKPTTTDIGSDVTLTCVWVGNPPLTLTWTKKDSNMVLSNSNQLLLKSVTQADAGTYTCRAIVPRIGVAEREVPLYVNGPPIISSEAVQYAVRGDGGKVECFIGSTPPPDRIAWAWKENFLEVGTLERYTVERTNSGSGVLSTLTINNVMEADFQTHYNCTAWNSFGPGTAIIQLEEREVLPVGIIAGATIGASILLIFFFIALVFFLYRRRKGSRKDVTLRKLDIKVETVNREPLTMHSDREDDTASVSTATRVMKAIYSSFKDDVDLKQDLRCDTIDTREEYEMKDPTNGYYNVRAHEDRPSSRAVLYADYRAPGPARFDGRPSSRLSHSSGYAQLNTYSRGPASDYGPEPTPPGPAAPAGTDTTSQLSYENYEKFNSHPFPGAAGYPTYRLGYPQAPPSGLERTPYEAYDPIGKYATATRFSYTSQHSDYGQRFQQRMQTHV

SEQ ID NO: 51368 - protein, 575 aa, Homo sapiens
LPAMETPSQRRATRSGAQASSTPLSPTRITRLQEKEDLQELNDRLAVYIDRVRSLETENAGLRLRITESEEVVSREVSGIKAAYEAELGDARKTLDSVAKERARLQLELSKVREEFKELKARNTKKEGDLIAAQARLKDLEALLNSKEAALSTALSEKRTLEGELHDLRGQVAKLEAALGEAKKQLQDEMLRRVDAENRLQTMKEELDFQKNIYSEELRETKRRHETRLVEIDNGKQREFESRLADALQELRAQHEDQVEQYKKELEKTYSAKLDNARQSAERNSNLVGAAHEELQQSRIRIDSLSAQLSQLQKQLAAKEAKLRDLEDSLARERDTSRRLLAEKEREMAEMRARMQQQLDEYQELLDIKLALDMEIHAYRKLLEGEEERLRLSPSPTSQRSRGRASSHSSQTQGGGSVTKKRKLESTESRSSFSQHARTSGRVAVEEVDEEGKFVRLRNKSNEDQSMGNWQIKRQNGDDPLLTYRFPPKFTLKAGQVVTIWAAGAGATHSPPTDLVWKAQNTWGCGNSLRTALINSTGEEVAMRKLVRSVTVVEDDEDEDGDDLLHHHHVSGSRR

SEQ ID NO: 51369 - protein, 667 aa, Homo sapiens
LPAMETPSQRRATRSGAQASSTPLSPTRITRLQEKEDLQELNDRLAVYIDRVRSLETENAGLRLRITESEEVVSREVSGIKAAYEAELGDARKTLDSVAKERARLQLELSKVREEFKELKARNTKKEGDLIAAQARLKDLEALLNSKEAALSTALSEKRTLEGELHDLRGQVAKLEAALGEAKKQLQDEMLRRVDAENRLQTMKEELDFQKNIYSEELRETKRRHETRLVEIDNGKQREFESRLADALQELRAQHEDQVEQYKKELEKTYSAKLDNARQSAERNSNLVGAAHEELQQSRIRIDSLSAQLSQLQKQLAAKEAKLRDLEDSLARERDTSRRLLAEKEREMAEMRARMQQQLDEYQELLDIKLALDMEIHAYRKLLEGEEERLRLSPSPTSQRSRGRASSHSSQTQGGGSVTKKRKLESTESRSSFSQHARTSGRVAVEEVDEEGKFVRLRNKSNEDQSMGNWQIKRQNGDDPLLTYRFPPKFTLKAGQVVTIWAAGAGATHSPPTDLVWKAQNTWGCGNSLRTALINSTGEEVAMRKLVRSVTVVEDDEDEDGDDLLHHHHGSHCSSSGDPAEYNLRSRTVLCGTCGQPADKASASGSGAQVGGPISSGSSASSVTVTRSYRSVGGSGGGSFGDNLVTRSYLLGNSSPRTQSPQNCSIM

SEQ ID NO: 51370 - protein, 25 aa, Homo sapiens
IVIVVGYESLKKLSLRPELVDSRHW

SEQ ID NO: 51371 - protein, 7 aa, Homo sapiens
MTAVTVI

SEQ ID NO: 51372 - protein, 12 aa, Homo sapiens
IPRNAMKGKTKS

SEQ ID NO: 51373 - protein, 56 aa, Homo sapiens
LLLIMLIFLGHYLIRHKGTYLTHEAKGSDDAPDADTAIINAEGGQSGGDDKKEYFI

SEQ ID NO: 51374 - protein, 108 aa, Homo sapiens
TERGPPHSDSCPGLTLHRLRIPDFCPPAPDQIDRFVQIVDEANARGEAVGVHCALGFGRTGTMLACYLVKERGLAAGDAIAEIRRLRPGSIETYEQEKAVFQFYQRTK

SEQ ID NO: 51375 - protein, 707 aa, Homo sapiens
TAGGGSGADPGSRGLLRLLSFCVLLAGLCRGNSVERKIYIPLNKTAPCVRLLNATHQIGCQSSISGDTGVIHVVEKEEDLQWVLTDGPNPPYMVLLESKHFTRDLMEKLKGRTSRIAGLAVSLTKPSPASGFSPSVQCPNDGFGVYSNSYGPEFAHCREIQWNSLGNGLAYEDFSFPIFLLEDENETKVIKQCYQDHNLSQNGSAPTFPLCAMQLFSHMHAVISTATCMRRSSIQSTFSINPEIVCDPLSDYNVWSMLKPINTTGTLKPDDRVVVAATRLDSRSFFWNVAPGAESAVASFVTQLAAAEALQKAPDVTTLPRNVMFVFFQGETFDYIGSSRMVYDMEKGKFPVQLENVDSFVELGQVALRTSLELWMHTDPVSQKNESVRNQVEDLLATLEKSGAGVPAVILRRPNQSQPLPPSSLQRFLRARNISGVVLADHSGAFHNKYYQSIYDTAENINVSYPEWLSPEEDLNFVTDTAKALADVATVLGRALYELAGGTNFSDTVQADPQTVTRLLYGFLIKANNSWFQSILRQDLRSYLGDGPLQHYIAVSSPTNTTYVVQYALANLTGTVVNLTREQCQDPSKVPSENKDLYEYSWVQGPLHSNETDRLPRCVRSTARLARALSPAFELSQWSSTEYSTWTESRWKDIRARIFLIASKELELITLTVGFGILIFSLIVTYCINAKADVLFIAPREPGAVSY

SEQ ID NO: 51376 - protein, 23 aa, Homo sapiens
RQRDFFFLLVFFFPPSLFILKRI

SEQ ID NO: 51377 - protein, 153 aa, Homo sapiens
KMAVLSKEYGFVLLTGAASFIMVAHLAINVSKARKKYKVEYPIMYSTDPENGHIFNCIQRAHQNTLEVYPPFLFFLAVGGVYHPRIASGLGLAWIVGRVLYAYGYYTGEPSKRSRGALGSIALLGLVGTTVCSAFQHLGWVKSGLGSGPKCCH

SEQ ID NO: 51378 - protein, 239 aa, Homo sapiens
IGVSGGTASGKSSVCAKIVQLLGQNEVDYRQKQVVILSQDSFYRVLTSEQKAKALKGQFNFDHPDAFDNELILKTLKEITEGKTVQIPVYDFVSHSRKEETVTVYPADVVLFEGILAFYSQEVRDLFQMKLFVDTDADTRLSRRVLRDISERGRDLEQILSQYITFVKPAFEEFCLPTKKYADVIIPRGADNLVAINLIVQHIQDILNGGPSKRQTNGCLNGYTPSRKRQASESSSRPH

SEQ ID NO: 51379 - protein, 69 aa, Homo sapiens
KPPLGLFLEWVMVAWNSISSESIVQGFKKCHISSNLEEEDDVLWEIESELPGGGEPPKDCDTESMAESN

SEQ ID NO: 51380 - protein, 269 aa, Homo sapiens
ILLFYVIFYGCLAGIFIGTIQVMLLTISEFKPTYQDRVAPPGLTQIPQIQKTEISFRPNDPKSYEAYVLNIVRFLEKYKDSAQRDDMIFEDCGDVPSEPKERGDFNHERGERKVCRFKLEWLGNCSGLNDETYGYKEGKPCIIIKLNRVLGFKPKPPKNESLETYPVMKYNPNVLPVQCTGKRDEDKDKVGNVEYFGLGNSPGFPLQYYPYYGKLLQPKYLQPLLAVQFTNLTMDTEIRIECKAYGENIGYSEKDRFQGRFDVKIEVKS

SEQ ID NO: 51381 - protein, 139 aa, Homo sapiens
IATQKLLEELLVSLQWGREQTYSPSVQPHSTAELALTNHKLAKAVNSHLLGNVGINNQKKIPSTVEFCSTPAEKMAETVLRILDPVTCKESSPDNPFFESSPTTLLATKKNIGRFHPYTRYENITFNCCNHCRGELIAL

SEQ ID NO: 51382 - protein, 155 aa, Homo sapiens
RPLVKMVYKGHRNSRTMIKEANFWGANFVMSGSDCGHIFIWDRHTAEHLMLLEADNHVVNCLQPHPFDPILASSGIDYDIKIWSPLEESRIFNRKLADEVITRNELMLEETRNTITVPASFMLRMLASLNHIRADRLEGDRSEGSGQENENEDEE

SEQ ID NO: 51383 - protein, 157 aa, Homo sapiens
LKKVLSGQDTEDRSGLSEVVEASSLSWSTRIKGFIACFAIGILCSLLGTVLLWVPRKGLHLFAVFYTFGNIASIGSTIFLMGPVKQLKRMFEPTRLIATIMVLLCFALTLCSAFWWHNKGLALIFCILQSLALTWYSLSFIPFARDAVKKCFAVCLA

SEQ ID NO: 51384 - protein, 15 aa, Homo sapiens
LYSLQSLLCMPVCAF

SEQ ID NO: 51385 - protein, 263 aa, Homo sapiens
LVLIRAGRGGWVGSVGETMTSSYGHVLERQPALGGRLDSPGNLDTLQAKKNFSVSHLLDLEEAGDMVAAQADENVGEAGRSLLESPGLTSGSDTPQQDNDQLNSEEKKKRKQRRNRTTFNSSQLQALERVFERTHYPDAFVREDLARRVNLTEARVQVWFQNRRAKFRRNERAMLANKNASLLKSYSGDVTAVEQPIVPRPAPRPTDYLSWGTASPYSAMATYSATCANNSPAQGINMANSIANLRLKAKEYSLQRNQVPTVN

SEQ ID NO: 51386 - protein, 363 aa, Homo sapiens
LPPGTTGAAASAAEYGFRKERAALEQLQGHRNIVTLYGVFTIHFSPNVPSRCLLLELLDVSVSELLLYSSHQGCSMWMIQHCARDVLEALAFLHHEGYVHADLKPRNILWSAENECFKLIDFGLSFKEGNQDVKYIQTDGYRAPEAELQNCLAQAGLQSDTECTSAVDLWSLGIILLEMFSGMKLKHTVRSQEWKANSSAIIDHIFASKAVVNAAIPAYHLRDLIKSMLHDDPSRRIPAEMALCSPFFSIPFAPHIEDLVMLPTPVLRLLNVLDDDYLENEEEYEDVVEDVKEECQKYGPVVSLLVPKENPGRGQVFVEYANAGDSKAAQKLLTGRMFDGKFVVATFYPLSAYKRGYLYQTLL

SEQ ID NO: 51387 - protein, 523 aa, Homo sapiens
IMNINDLKLTLSKAGQEHLLRFWNELEEAQQVELYAELQAMNFEELNFFFQKAIEGFNQSSHQKNVDARMEPVPREVLGSATRDQDQLQAWESEGLFQISQNKVAVLLLAGGQGTRLGVAYPKGMYDVGLPSRKTLFQIQAERILKLQQVAEKYYGNKCIIPWYIMTSGRTMESTKEFFTKHKYFGLKKENVIFFQQGMLPAMSFDGKIILEEKNKVSMAPDGNGGLYRALAAQNIVEDMEQRGIWSIHVYCVDNILVKVADPRFIGFCIQKGADCGAKVVEKTNPTEPVGVVCRVDGVYQVVEYSEISLATAQKRSSDGRLLFNAGNIANHFFTVPFLRDVVNVYEPQLQHHVAQKKIPYVDTQGQLIKPDKPNGIKMEKFVFDIFQFAKKFVVYEVLREDEFSPLKNADSQNGKDNPTTARHALMSLHHCWVLNAGGHFIDENGSRLPAIPRSATNGKSETITADVNHNLKDANDVPIQCEISPLISYAGEGLESYVADKEFHAPLIIDENGVHELVKNGI

SEQ ID NO: 51388 - protein, 845 aa, Homo sapiens
LFLLLPILSSAKAQVNPAICRYPLGMSGGQIPDEDITASSQWSESTAAKYGRLDSEEGDGAWCPEIPVEPDDLKEFLQIDLHTLHFITLVGTQGRHAGGHGIEFAPMYKINYSRDGTRWISWRNRHGKQVLDGNSNPYDIFLKDLEPPIVARFVRFIPVTDHSMNVCMRVELYGCVWLDGLVSYNAPAGQQFVLPGGSIIYLNDSVYDGAVGYSMTEGLGQLTDGVSGLDDFTQTHEYHVWPGYDYVGWRNESATNGYIEIMFEFDRIRNFTTMKVHCNNMFAKGVKIFKEVQCYFRSEASEWEPNAISFPLVLDDVNPSARFVTVPLHHRMASAIKCQYHFADTWMMFSEITFQSDAAMYNNSEALPTSPMAPTTYDPMLKVDDSNTRILIGCLVAIIFILLAIIVIILWRQFWQKMLEKASRRMLDDEMTVSLSLPSDSSMFNNNRSSSPSEQGSNSTYDRIFPLRPDYQEPSRLIRKLPEFAPGEEESGCSGVVKPVQPSGPEGVPHYAEADIVNLQGVTGGNTYSVPAVTMDLLSGKDVAVEEFPRKLLTFKEKLGEGQFGEVHLCEVEGMEKFKDKDFALDVSANQPVLVAVKMLRADANKNARNDFLKEIKIMSRLKDPNIIHLLAVCITDDPLCMITEYMENGDLNQFLSRHEPPNSSSSDVRTVSYTNLKFMATQIASGMKYLSSLNFVHRDLATRNCLVGKNYTIKIADFGMSRNLYSGDYYRIQGRAVLPIRWMSWESILLGKFTTASDVWAFGVTLWETFTFCQEQPYSQLSDEQVIENTGEFFRDQGRQTYLPQPAICPDSVYKLMLSCWRRDTKNRPSFQEIHLLLLQQGDE

SEQ ID NO: 51389 - protein, 231 aa, Homo sapiens
KYAQSRSHSSSCRISFLLANSKLLNKMCKGLAGLPASCLRSAKDMKHRLGFLLQKSDSCEHNSSHNKKDKVVICQRVSQEEVKKWAESLENLISHECGLAAFKAFLKSEYSEENIDFWISCEEYKKIKSPSKLSPKAKKIYNEFISVQATKEVNLDSCTREETSRNMLEPTITCFDEAQKKIFNLMEKDSYRRFLKSRFYLDLVNPSSCGAEKQKGAKSSADCASLVPQCA

SEQ ID NO: 51390 - protein, 170 aa, Homo sapiens
MIATTGKMSEMELKAFGSGIDIKPGTPPIAGRSTTPTSSPFRATSTSPNSQSSKMNSIVYQKQFQSAPATVRMTQPFPTQFAPQAKQRAEVLQSTQRFFSEQQQSKQIGGGKAQKVDSDSSKPPETLTDPPGVCQEKVEEKPPPAPSIATKPVRTGPIKPQAIKTEETKS

SEQ ID NO: 51391 - protein, 100 aa, Homo sapiens
VRMTQPFPTQFAPQAKQRAEVLQSTQRFFSEQQQSKQIGGGKAQKVDSDSSKPPETLTDPPGVCQEKVEEKPPPAPSIATKPVRTGPIKPQAIKTEETKS

SEQ ID NO: 51392 - protein, 47 aa, Homo sapiens
LSCKGHSWGLEWGNKSMWLFFRGKNSHCSVPEPACGGQAPQMVSHRE

SEQ ID NO: 51393 - protein, 67 aa, Homo sapiens
VFPLLYVRRIEGEVNEILFCQLHPEQKLATPELLETAQALERTLRKPGRGWDDTYVLSDMLKTVKIV

SEQ ID NO: 51394 - protein, 228 aa, Homo sapiens
ITVAMPGGLLLGDVAPNFEANTTVGRIRFHDFLGDSWGILFSHPRDFTPVCTTELGRAAKLAPEFAKRNVKLIALSIDSVEDHLAWSKDINAYNCEEPTEKLPFPIIDDRNRELAILLGMLDPAEKDEKGMPVTARVVFVFGPDKKLKLSILYPATTGRNFDEILRVVISLQLTAEKRVATPVDWKDGDSVMVLPTIPEEEAKKLFPKGVFTKELPSGKKYLRYTPQP

SEQ ID NO: 51395 - protein, 186 aa, Homo sapiens
VSCLNIVERYDPKENKWTRVASMSTRRLGVAVAVLGGFLYAVGGSDGTSPLNTVERYNPQENRWHTIAPMGTRRKHLGCAVYQDMIYAVGGRDDTTELSSAERYNPRTNQWSPVVAMTSRRSGVGLAVVNGQLMAVGGFDGTTYLKTIEVFDPDANTWRLYGGMNYRRLGGGVGVIKMTHCESHIW

SEQ ID NO: 51396 - protein, 40 aa, Homo sapiens
KSFRGHDLMSNTPDSVPPEELKPYHIRVSKPTDSKAERAH

SEQ ID NO: 51397 - protein, 43 aa, Homo sapiens
MEQACNIKVPTKKLKKYEKEYQTMRESQLQQEDPMDRYKFVYL

SEQ ID NO: 51398 - protein, 36 aa, Homo sapiens
KFQAGNRMNAMLWFKHLSAACQSNKQQVPTNLMTFE

SEQ ID NO: 51399 - protein, 74 aa, Homo sapiens
VSTWNRLNYLKNGVLKSALKSAMAHDPISPVLSDPHLDAVDQRLLSVLATVKQCTDQFGMDTVLVEDRMPLSHL

SEQ ID NO: 51400 - protein, 128 aa, Homo sapiens
LFLSNLRGDIINEVVLKLLKAGWSREEITMEHLEPHLQAEIVETIDNGFGHSRLVKENLIDYFIPFLPLEYRHVRLCARDAFLSQELLYKEETLDEIAQMMVYVPKEEQLFSSQGCKSISQRINYFLS

SEQ ID NO: 51401 - protein, 343 aa, Homo sapiens
RTMGELMAFLLPLIIVLMVKHSDSRTHSLRYFRLGVSDPIHGVPEFISVGYVDSHPITTYDSVTRQKEPRAPWMAENLAPDHWERYTQLLRGWQQMFKVELKRLQRHYNHSGSHTYQRMIGCELLEDGSTTGFLQYAYDGQDFLIFNKDTLSWLAVDNVAHTIKQAWEANQHELLYQKNWLEEECIAWLKRFLEYGKDTLQRTEPPLVRVNRKETFPGVTALFCKAHGFYPPEIYMTWMKNGEEIVQEIDYGDILPSGDGTYQAWASIELDPQSSNLYSCHVEHCGVHMVLQVPQESETIPLVMKAVSGSIVLVIVLAGVGVLVWRRRPREQNGAIYLPTPDR

SEQ ID NO: 51402 - protein, 58 aa, Homo sapiens
ISIFGSSFSGLLRKSPGGGREEEEGEESGPEAAEPGQICCDKPVLRDMNPWSTAIVAF

SEQ ID NO: 51403 - protein, 19 aa, Homo sapiens
LMQVRVMTCFLLALRIISI

SEQ ID NO: 51404 - protein, 173 aa, Homo sapiens; identical to SEQ ID NO: 51334

SEQ ID NO: 51405 - protein, 597 aa, Homo sapiens
IKPSSRSTKATSTTMAGDGRRAEAVREGWGVYVTPRAPIREGRGRLAPQNGGSSDAPAYRTPPSRQGRREVRFSDEPPEVYGDFEPLVAKERSPVGKRTRLEEFRSDSAKEEVRESAYYLRSRQRRQPRPQETEEMKTRRTTRLQQQHSEQPPLQPSPVMTRRGLRDSHSSEEDEASSQTDLSQTISKKTVRSIQEAPVSEDLVIRLRRPPLRYPRYEATSVQQKVNFSEEGETEEDDQDSSHSSVTTVKARSRDSDESGDKTTRSSSQYIESFWQSSQSQNFTAHDKQPSVLSSGYQKTPQEWAPQTARIRTRMQNDSILKSELGNQSPSTSSRQVTGQPQNASFVKRNRWWLLPLIAALASGSFWFFSTPEVETTAVQEFQNQMNQLKNKYQGQDEKLWKRSQTFLEKHLNSSHPRSQPAILLLTAARDAEEALRCLSEQIADAYSSFRSVRAIRIDGTDKATQDSDTVKLEVDQELSNGFKNGQNAAVVHRFESFPAGSTLIFYKYCDHENAAFKDVALVLTVLLEEETLGTSLGLKEVEEKVRDFLKVKFTNSNTPNSYNHMDPDKLNGLWSRISHLVLPVQPENALKRGICL

SEQ ID NO: 51406 - protein, 754 aa, Homo sapiens
VVSAAPRMRRCNSGSGPPPSLLLLLLWLLAVPGANAAPRSALYSPSDPLTLLQADTVRGAVLGSRSAWAVEFFASWCGHCIAFAPTWKALAEDVKAWRPALYLAALDCAEETNSAVCRDFNIPGFPTVRFFKAFTKNGSGAVFPVAGADVQTLRERLIDALESHHDTWPPACPPLEPAKLEEIDGFFARNNEEYLALIFEKGGSYLGREVALDLSQHKGVAVRRVLNTEANVVRKFGVTDFPSCYLLFRNGSVSRVPVLMESRSFYTAYLQRLSGLTREAAQTTVAPTTANKIAPTVWKLADRSKIYMADLESALHYILRIEVGRFPVLEGQRLVALKKFVAVLAKYFPGRPLVQNFLHSVNEWLKRQKRNKIPYSFFKTALDDRKEGAVLAKKVNWIGCQGSEPHFRGFPCSLWVLFHFLTVQAARQNVDHSQEAAKAKEVLPAIRGYVHYFFGCRDCASHFEQMAAASMHRVGSPNAAVLWLWSSHNRVNARLAGAPSEDPQFPKVQWPPRELCSACHNERLDVPVWDVEATLNFLKAHFSPSNIILDFPAAGSAARRDVQNVAAAPELAMGALELESRNSTLDPGKPEMMKSPTNTTPHVPAEGPEASRPPKLHPGLRAAPGQEPPEHMAELQRNEQEQPLGQWHLSKRDTGAALLAESRAEKNRLWGPLEVRRVGRSSKQLVDIPEGQLEARAGRGRGQWLQVLGGGFSYLDISLCVGLYSLSFMGLLAMYTYFQAKIRALKGHAGHPAA

SEQ ID NO: 51407 - protein, 46 aa, Homo sapiens
RAEKNRLWGPLEVRRVGRSSKQLVDIPEGQLEARAGRGRGQWLQLI

SEQ ID NO: 51408 - protein, 49 aa, Homo sapiens
VDENGKISCLHRECPSDECGAGVFMASHFDRHYCGKCCLTYCFNKPEDK

SEQ ID NO: 51409 - protein, 50 aa, Homo sapiens
IQEATSGCFTTAQKRVYSLMENNSYPRFLESEFYQDLCKKPQITTEPHAT

SEQ ID NO: 51410 - protein, 17 aa, Homo sapiens
KQDLPQIRRKDLEHPLS

SEQ ID NO: 51411 - protein, 31 aa, Homo sapiens
TRTPGNRIVYLYTKKVGKASKSACGVCPGRL

SEQ ID NO: 51412 - protein, 56 aa, Homo sapiens
KEGVMVAKKDVHMPKHPELADKNAPNLRVMKAMQSLKSRGYVKEVCLETFLLVPYQ

SEQ ID NO: 51413 - protein, 39 aa, Homo sapiens
IAHLQRGECCGSACRHCPYGQVNVKDPSKKKQFNSYFYV

SEQ ID NO: 51414 - protein, 1234 aa, Homo sapiens
IQKMRLLAKIICLMLWAICVAEDCNELPPRRNTEILTGSWSDQTYPEGTQAIYKCRPGYRSLGNVIMVCRKGEWVALNPLRKCQKRPCGHPGDTPFGTFTLTGGNVFEYGVKAVYTCNEGYQLLGEINYRECDTDGWTNDIPICEVVKCLPVTAPENGKIVSSAMEPDREYHFGQAVRFVCNSGYKIEGDEEMHCSDDGFWSKEKPKCVEISCKSPDVINGSPISQKIIYKENERFQYKCNMGYEYSERGDAVCTESGWRPLPSCEEKSCDNPYIPNGDYSPLRIKHRTGDEITYQCRNGFYPATRGNTAKCTSTGWIPAPRCTLKPCDYPDIKHGGLYHENMRRPYFPVAVGKYYSYYCDEHFETPSGSYWDHIHCTQDGWSPAVPCLRKCYFPYLENGYNQNHGRKFVQGKSIDVACHPGYALPKAQTTVTCMENGWSPTPRCIRVKTCSKSSIDIENGFISESQYTYALKEKAKYQCKLGYVTADGETSGSITCGKDGWSAQPTCIKSCDIPVFMNARTKNDFTWFKLNDTLDYECHDGYESNTGSTTGSIVCGYNGWSDLPICYERECELPKIDVHLVPDRKKDQYKVGEVLKFSCKPGFTIVGPNSVQCYHFGLSPDLPICKEQVQSCGPPPELLNGNVKEKTKEEYGHSEVVEYYCNPRFLMKGPNKIQCVDGEWTTLPVCIVEESTCGDIPELEHGWAQLSSPPYYYGDSVEFNCSESFTMIGHRSITCIHGVWTQLPQCVAIDKLKKCKSSNLIILEEHLKNKKEFDHNSNIRYRCRGKEGWIHTVCINGRWDPEVNCSMAQIQLCPPPPQIPNSHNMTTTLNYRDGEKVSVLCQENYLIQEGEEITCKDGRWQSIPLCVEKIPCSQPPQIEHGTINSSRSSQESYAHGTKLSYTCEGGFRISEENETTCYMGKWSSPPQCEGLPCKSPPEISHGVVAHMSDSYQYGEEVTYKCFEGFGIDGPAIAKCLGEKWSHPPSCIKTDCLSLPSFENAIPMGEKKDVYKAGEQVTYTCATYYKMDGASNVTCINSRWTGRPTCRDTSCVNPPTVQNAYIVSRQMSKYPSGERVRYQCRSPYEMFGDEEVMCLNGNWTEPPQCKDSTGKCGPPPPIDNGDITSFPLSVYAPASSVEYQCQNLYQLEGNKRITCRNGQWSEPPKCLHPCVISREIMENYNIALRWTAKQKLYSRTGESVEFVCKRGYRLSSRSHTLRTTCWDGKLEYPTCAKR

SEQ ID NO: 51415 - protein, 80 aa, Homo sapiens
RMDTHSLHKWKMGSRSELLNGTNTIMPTSTSDSQFSQYDNHTELSGWRKSICSLPRKLSNSGRRRNYMQRWKMAVNTTLC

SEQ ID NO: 51416 - protein, 117 aa, Homo sapiens
IDNGDITSFPLSVYAPASSVEYQCQNLYQLEGNKRITCRNGQWSEPPKCLHPCVISREIMENYNIALRWTAKQKLYLRTGESAEFVCKRGYRLSSRSHTLRTTCWDGKLEYPTCAKR

SEQ ID NO: 51417 - protein, 26 aa, Homo sapiens
KENMTSPAKFKKDKEIIAEYDTQVKE

SEQ ID NO: 51418 - protein, 59 aa, Homo sapiens; identical to SEQ ID NO: 51327

SEQ ID NO: 51419 - protein, 57 aa, Homo sapiens
IAKFDYVGRTARELSFKKGASLLLYQRASDDWWEGRHNGIDGLIPHQYIVVQDTLIS

SEQ ID NO: 51420 - protein, 743 aa, Homo sapiens
KDTELLDLRETIDFLKKKNSEAQAVIQGALNASETTPKELRIKRQNSSDSISSLNSITSHSSIGSSKDADAKKKKKKSWVYELRSSFNKAFSIKKGPKSASSYSDIEEIATPDSSAPSSPKLQHGSTETASPSIKSSTSSSVGTDVTEGPAHPAPHTRLFHANEEEEPEKKEVSELRSELWEKEMKLTDIRLEALNSAHQLDQLRETMHNMQLEVDLLKAENDRLKVAPGPSSGSTPGQVPGSSALSSPRRSLGLALTHSFGPSLADTDLSPMDGISTCGPKEEVTLRVVVRMPPQHIIKGDLKQQEFFLGCSKVSGKVDWKMLDEAVFQVFKDYISKMDPASTLGLSTESIHGYSISHVKRVLDAEPPEMPPCRRGVNNISVSLKGLKEKCVDSLVFETLIPKPMMQHYISLLLKHRRLVLSGPSGTGKTYLTNRLAEYLVERSGREVTEGIVSTFNMHQQSCKDLQLYLSNLANQIDRETGIGDVPLVILLDDLSEAGSISELVNGALTCKYHKCPYIIGTTNQPVKMTPNHGLHLSFRMLTFSNNVEPANGFLVRYLRRKLVESDSDINANKEELLRVLDWVPKLWYHLHTFLEKHSTSDFLIGPCFFLSCPIGIEDFRTWFIDLWNNSIIPYLQEGAKDGIKVHGQKAAWEDPVEWVRDTLPWPSAQQDQSKLYHLPPPTVGPHSIASPPEDRTVKDSTPSSLDSDPLMAMLLKLQEAANYIESPDRETILDPNLQATL

SEQ ID NO: 51421 - protein, 674 aa, Homo sapiens
KDADAKKKKKKSWLRSSFNKAFSIKKGPKSASSYSDIEEIATPDSSAPSSPKLQHGSTETASPSIKSSTSSSVGTDVTEGPAHPAPHTRLFHANEEEEPEKKEVSELRSELWEKEMKLTDIRLEALNSAHQLDQLRETMHNMQLEVDLLKAENDRLKVAPGPSSGSTPGQVPGSSALSSPRRSLGLALTHSFGPSLADTDLSPMDGISTCGPKEEVTLRVVVRMPPQHIIKGDLKQQEFFLGCSKVSGKVDWKMLDEAVFQVFKDYISKMDPASTLGLSTESIHGYSISHVKRVLDAEPPEMPPCRRGVNNISVSLKGLKEKCVDSLVFETLIPKPMMQHYISLLLKHRRLVLSGPSGTGKTYLTNRLAEYLVERSGREVTEGIVSTFNMHQQSCKDLQLYLSNLANQIDRETGIGDVPLVILLDDLSEAGSISELVNGALTCKYHKCPYIIGTTNQPVKMTPNHGLHLSFRMLTFSNNVEPANGFLVRYLRRKLVESDSDINANKEELLRVLDWVPKLWYHLHTFLEKHSTSDFLIGPCFFLSCPIGIEDFRTWFIDLWNNSIIPYLQEGAKDGIKVHGQKAAWEDPVEWVRDTLPWPSAQQDQSKLYHLPPPTVGPHSIASPPEDRTVKDSTPSSLDSDPLMAMLLKLQEAANYIESPDRETILDPNLQATL

SEQ ID NO: 51422 - protein, 38 aa, Homo sapiens
LQAYLTDFLCQFAQQPCYIMFSGHLNDNERRVLQTIGI

SEQ ID NO: 51423 - protein, 183 aa, Homo sapiens
IALLVLGAPLVLAGEDCLWYLDRNGSWHPGFNCEFFTFCCGTCYHRYCCRDLTLLITERQQKHCLAFSPKTIAGIASAVILFVAVVATTICCFLCSCCYLYRRRQQLQSPFEGQEIPMTGIPVQPVYPYPQDPKAGPAPPQPGFIYPPSGPAPQYPLYPAGPPVYNPAAPPPYMPPQPSYPGA

SEQ ID NO: 51424 - protein, 628 aa, Homo sapiens
VDVASASNFRAFELLHLHLDLRAEFGPPGPGAGSRGLSGTAVLDLRCLEPEGAAELRLDSHPCLEVTAAALRRERPGSEEPPAEPVSFYTQPFSHYGQALCVSFPQPCRAAERLQVLLTYRVGEGPGVCWLAPEQTAGKKKPFVYTQGQAVLNRAFFPCFDTPAVKYKYSALIEVPDGFTAVMSASTWEKRGPNKFFFQMCQPIPSYLIALAIGDLVSAEVGPRSRVWAEPCLIDAAKEEYNGVIEEFLATGEKLFGPYVWGRYDLLFMPPSFPFGGMENPCLTFVTPCLLAGDRSLADVIIHEISHSWFGNLVTNANWGEFWLNEGFTMYAQRRISTILFGAAYTCLEAATGRALLRQHMDITGEENPLNKLRVKIEPGVDPDDTYNETPYEKGFCFVSYLAHLVGDQDQFDSFLKAYVHEFKFRSILADDFLDFYLEYFPELKKKRVDIIPGFEFDRWLNTPGWPPYLPDLSPGDSLMKPAEELAQLWAAEELDMKAIEAVAISPWKTYQLVYFLDKILQKSPLPPGNVKKLGDTYPSISNARNAELRLRWGQIVLKNDHQEDFWKVKEFLHNQGKQKYTLPLYHAMMGGSEVAQTLAKETFASTASQLHSNVVNYVQQIVAPKGS

SEQ ID NO: 51425 - protein, 24 aa, Homo sapiens
RQNSLLKRKERRVCELRGKGVEKN

SEQ ID NO: 51426 - protein, 78 aa, Homo sapiens
LYPRAAGMPLAQPLVEHYVPRSLDPNMPVIVNTCSLREEGEGTDDRHSVADGEMYRYSEDEDSEGEEKSDGELVVLTD

SEQ ID NO: 51427 - protein, 42 aa, Homo sapiens
RQETGLRLCEQVFNPQNDQPSTWWTCFVKRQFMNKSLSGPGQ

SEQ ID NO: 51428 - protein, 453 aa, Homo sapiens
RQKRSQGSSQFRSQGSQAELHPLPQLKDATSNEQQELFCQKLQQCCILFDFMDSVSDLKSKEIKRATLNELVEYVSTNRGVIVESAYSDIVKMISANIFRTLPPSDNPDFDPEEDEPTLEASWPHIQLVYEFFLRFLESPDFQPSIAKRYIDQKFVQQLLELFDSEDPRERDFLKTVLHRIYGKFLGLRAFIRKQINNIFLRFIYETEHFNGVAELLEILGSIINGFALPLKAEHKQFLMKVLIPMHTAKGLALFHAQLAYCVVQFLEKDTTLTEPVIRGLLKFWPKTCSQKEVMFLGEIEEILDVIEPTQFKKIEEPLFKQISKCVSSSHFQVAERALYFWNNEYILSLIEENIDKILPIMFASLYKISKEHWNPTIVALVYNVLKTLMEMNGKLFDDLTSSYKAERQREKKKELEREELWKKLEELKLKKALEKQNSAYNMHSILSNTSAE

SEQ ID NO: 51429 - protein, 160 aa, Homo sapiens
LAALALVLALAPGLPTARAGQTPRPAERGPPVRLFTEEELARYGGEEEDQPIYLAVKGVVFDVTSGKEFYGRGAPYNALTGKDSTRGVAKMSLDPADLTHDTTGLTAKELEALDEVFTKVYKAKYPIVGYTARRILNEDGSPNLDFKPEDQPHFDIKDEF

SEQ ID NO: 51430 - protein, 21 aa, Homo sapiens
RTPEDERNLFIQQIKEGTLQS

SEQ ID NO: 51431 - protein, 30 aa, Homo sapiens
VKGISVEEVIEVTTQNALKLFPKLRHLLQK

SEQ ID NO: 51432 - protein, 23 aa, Homo sapiens
IMEVAHGKDHPYISEIKQEIESH

SEQ ID NO: 51433 - protein, 433 aa, Homo sapiens
LPLLGELPRLLLLVLLCLPAVWGDCGLPPDVPNAQPALEGRTSFPEDTVITYKCEESFVKIPGEKDSVICLKGSQWSDIEEFCNRSCEVPTRLNSASLKQPYITQNYFPVGTVVEYECRPGYRREPSLSPKLTCLQNLKWSTAVEFCKKKSCPNPGEIRNGQIDVPGGILFGATISFSCNTGYKLFGSTSSFCLISGSSVQWSDPLPECREIYCPAPPQIDNGIIQGERDHYGYRQSVTYACNKGFTMIGEHSIYCTVNNDEGEWSGPPPECRGKSLTSKVPPTVQKPTTVNVPTTEVSPTSQKTTTKTTTPNAQATRSTPVSRTTKHFHETTPNKGSGTTSGTTRLLSGSRPVTQAGMRWCDRSSLQSRTPGFKRSFHFSLPSSWYYRCVPRHPAKFLKFIFCRDRIFLCCPGWFQTPGRKRFFRPPKTLRL

SEQ ID NO: 51434 - protein, 391 aa, Homo sapiens
LLSSGEITASSAPRMEPPGRRECPFPSWRFPGLLLAAMVLLLYSFSDACEEPPTFEAMELIGKPKPYYEIGERVDYKCKKGYFYIPPLATHTICDRNHTWLPVSDDACYRETCPYIRDPLNGQAVPANGTYEFGYQMHFICNEGYYLIGEEILYCELKGSVAIWSGKPPICEKVLCTPPPKIKNGKHTFSEVEVFEYLDAVTYSCDPAPGPDPFSLIGESTIYCGDNSVWSRAAPECKVVKCRFPVVENGKQISGFGKKFYYKATVMFECDKGFYLDGSDTIVCDSNSTWDPPVPKCLKVSTSSTTKSPASSASGPRPTYKPPVSNYPGYPKPEEGILDSLDVWVIAVIVIAIVVGVAVICVVPYRYLQRRKKKGTYLTDETHREVKFTSL

SEQ ID NO: 51435 - protein, 99 aa, Homo sapiens
VSTSSTTKSPASSASGPRPTYKPPVSNYPGYPKPEEGILDSLDVWVIAVIVIAIVVGVAVICVVPYRYLQRRKKKGKADGGAEYATYQTKSTTPAEQRG

SEQ ID NO: 51436 - protein, 150 aa, Homo sapiens
MLPEIAAAVGFLSSLLRTRGCVSEQRLKVFSGALQEALTEHYKHHWFPEKPSKGSGYRCIRINHKMDPIISRVASQIGLSQPQLHQLLPSELTLWVDPYEVSYRIGEDGSICVLYEEAPLAASCGLLTCKNQVLLGRSSPSKNYVMAVSS

SEQ ID NO: 51437 - protein, 383 aa, Homo sapiens
IMRSPLCWLLPLLILASVAQGQPTRRPRPGTGPGRRPRPRPRPTPSFPQPDEPAEPTDLPPPLPPGPPSIFPDCPRECYCPPDFPSALYCDSRNLRKVPVIPPRIHYLYLQNNFITELPVESFQNATGLRWINLDNNRIRKIDQRVLEKLPGLVFLYMEKNQLEEVPSALPRNLEQLRLSQNHISRIPPGVFSKLENLLLLDLQHNRLSDGVFKPDTFHGLKNLMQLNLAHNILRKMPPRVPTAIHQLYLDSNKIETIPNGYFKSFPNLAFIRLNYNKLTDRGLPKNSFNISNLLVLHLSHNRISSVPAINNRLEHLYLNNNSIEKINGTQICPNDLVAFHDFSSDLENVPHLRYLRLDGNYLKPPIPLDLMMCFRLLQSVVI

SEQ ID NO: 51438 - protein, 33 aa, Homo sapiens
ISRTTSSLSSRWSPSRMPQACDGLTWTTTESAR

SEQ ID NO: 51439 - protein, 1204 aa, Homo sapiens
TNPSDRVLPANSMAESREGDFGCTVMELRKLMELRSRDALTQINVHYGGVQNLCSRLKTSPVEGLSGNPADLEKRRQVFGHNVIPPKKPKTFLELVWEALQDVTLIILEIAAIISLVLSFYRPAGEENELCGQVATTPEDENEAQAGWIEGAAILFSVIIVVLVTAFNDWSKEKQFRGLQCRIEQEQKFSIIRNGQLIQLPVAEIVVGDIAQVKYGDLLPADGILIQGNDLKIDESSLTGESDHVKKSLDKDPMLLSGTHVMEGSGRMVVTAVGVNSQTGIILTLLGVNEDDEGEKKKKGKKQGVPENRNKAKTQDGVALEIQPLNSQEGIDNEEKDKKAVKVPKKEKSVLQGKLTRLAVQIGKAGLLMSALTVFILILYFVIDNFVINRRPWLPECTPIYIQYFVKFFIIGITVLVVAVPEGLPLAVTISLAYSVKKMMKDNNLVRHLDACETMGNATAICSDKTGTLTMNRMTVVQAYIGGIHYRQIPSPDVFLPKVLDLIVNGISINSAYTSKILPPEKEGGLPRQVGNKTECALLGFVTDLKQDYQAVRNEVPEEKLYKVYTFNSVRKSMSTVIRNPNGGFRMYSKGASEIILRKCNRILDRKGEAVPFKNKDRDDMVRTVIEPMACDGLRTICIAYRDFDDTEPSWDNENEILTELTCIAVVGIEDPVRPEVPDAIAKCKQAGITVRMVTGDNINTARAIATKCGILTPGDDFLCLEGKEFNRLIRNEKGEVEQEKLDKIWPKLRVLARSSPTDKHTLVKGIIDSTVGEHRQVVAVTGDGTNDGPALKKADVGFAMGIAGTDVAKEASDIILTDDNFTSIVKAVMWGRNVYDSISKFLQFQLTVNVVAVIVAFTGACITQDSPLKAVQMLWVNLIMDTFASLALATEPPTESLLKRRPYGRNKPLISRTMMKNILGHAFYQLIVIFILVFAGEKFFDIDSGRKAPLHSPPSQHYTIVFNTFVLMQLFNEINSRKIHGEKNVFSGIYRNIIFCSVVLGTFICQIFIVEFGGKPFSCTSLSLSQWLWCLFIGIGELLWGQFISAIPTRSLKFLKEAGHGTTKEEITKDAEGLDEIDHAEMELRRGQILWFRGLNRIQTQIKVVKAFHSSLHESIQKPYNQKSIHSFMTHPEFAIEEELPRTPLLDEEEEENPDKASKFGTRVLLLDGEVTPYANTNNNAVDCNQVQLPQSDSSLQSLETSV

SEQ ID NO: 51440 - protein, 34 aa, Homo sapiens
MGRWLVSTSDSVLEITDKKPWRKNGIKDQKHDDS

SEQ ID NO: 51441 - protein, 742 aa, Homo sapiens
ILNFLRTKELDLRGVSINVLRHEAEFYGITPLVRRLLLCEELERSSCGSVLFHGYLPPPGIPSRKINNTVRSADSRNGLNSTEGEARGNGTQPVLSGTGEETVRLGFPVDPRKVLIVAGHHNWIVAAYAHFAVCYRIKESSGWQQVFTSPYLDWTIERVALNAKVVGGPHGDKDKMVAVASESSIILWSVQDGGSGSEIGVFSLGVPVDALFFIGNQLVATSHTGKVGVWNAVTQHWQVQDVVPITSYDTAGSFLLLGCNNGSIYYIDMQKFPLRMKDNDLLVTELYHDPSNDAITALSVYLTPKTSVSGNWIEIAYGTSSGAVRVIVQHPETVGSGPQLFQTFTVHRSPVTKIMLSEKHLVSVCADNNHVRTWTVTRFRGMISTQPGSTPLASFKILSLEETESHGSYSSGNDIGPFGERDDQQVFIQKVVPITNKLFVRLSSTGKRICEIQAVDCTTISSFTVRECEGSSRMGSRPRRYLFTGHTNGSIQMWDLTTAMDMVNKSEDKDVGGPTEEELLKLLDQCDLSTSRCATPNISPATSVVQHSHLRESNSSLQLQHHDTTHEAATYGSMRPYRESPLLARARRTESFHSYRDFQTINLNRNVERAVPENGNLGPIQAEVKGATGECNISERKSPGVEIKSLRELDSGLEVHKIAEGFSESKKRSSEDENENKIEFRKKGGFEGGGFLGRKKVPYLASSPSTSDGGTDSPGTASPSPTKTTPSPRHKKSDSSGQEYSL

SEQ ID NO: 51442 - protein, 432 aa, Homo sapiens
KAFVSGLLIGQCSSQKDYVILATRTPPKEEQSENLKHPKAKLDNLDEEWATEHACQVSRMLPGGLLVLGVFIITTLELANDFQNALRRLMFAVEKSINRKRLWNFTEEEVSERVTLHICASTKKIFCRTYDIHDPKSSARPADWKYQSGLSSSWLSLECTVHINIHIPLSATSVSYTLEKNTKNGLTRWAKEIENGVYLINGQVKDEDCDLLEGQKKSSRGNTQATSHSFDVRVLTQLLLNSDHRSTATVQICSGSVNLKGAVKCRAYIHSSKPKVKDAVQAVKRDILNTVADRCEMLFEDLLLNEIPEKKDSEKEFHVLPYRVFVPLPGSTVMLCDYKFDDESAEEIRDHFMEMLDHTIQIEDLEIAEETNTACMSSSMNSQASLDNTDDEQPKQPIKTTMLLKIQQNIGVIAAFTVAVLAAGISFHYFSD

SEQ ID NO: 51443 - protein, 99 aa, Homo sapiens
RAPGVPRETEEEKEIADFDIFDDPESPFSTFNFQYPNQAFKRLHDLMHFNTLNNIDVIKEAMVESIEYRRQNPSRCSVSLSNVEARRFFNKEFLSKPKA

SEQ ID NO: 51444 - protein, 181 aa, Homo sapiens
KKTPESKPTILVKNKKLEKEKEKLKQERLEKIKQRDKRLEWEMMCRVKPDVVQDKETERNLQRIATRGVVQLFNAVQKHQKNVDEKVKEAGSSMRKRAKLISTVSKKDFISVLRGMDGSTNETASSRKKPKAKQTEVKSEEGPGWTILRDDFMMGASMKDWDKESDGPDDSRPESASDSDT

SEQ ID NO: 51445 - protein, 43 aa, Homo sapiens
KGLALEAESELERQDEALDGVAAAVDRATLTIDKHNRRMKRLT

SEQ ID NO: 51446 - protein, 51 aa, Homo sapiens
KRLAAAQADMESSKEPGLFDVVIINDSLDQAYAELKEALSEEIKKAQRTGA

SEQ ID NO: 51447 - protein, 222 aa, Homo sapiens
LCQRAPREPVRADCGHRFCRACVVRFWAEEDGPFPCPECADDCWQRAVEPGRPPLSRRLLALEEAAAAPARDGPASEAALQLLCRADAGPLCAACRMAAGPEPPEWEPRWRKALRGKENKGSVEIMRKDLNDARDLHGQAESAAAVWKGHVMDRRKKALTDYKKLRAFFVEEEEHFLQEAEKEEGLPEDELADPTERFRSLLQAVSELEKKHRNLGLSMLLQ

SEQ ID NO: 51448 - protein, 6 aa, Homo sapiens
VYLLGQ

SEQ ID NO: 51449 - protein, 88 aa, Homo sapiens
KTSGNATVDHLSKYLAVRLALEELRSKGESNQMNLDTASEKQYTIYIATASGQFTVLNGSFSLELVSEKYWKVNKPMELYYAPTKEHK

SEQ ID NO: 51450 - protein, 229 aa, Homo sapiens
LQRCIVSPAGRHSASLIFLHGSGDSGQGLRMWIKQVLNQDLTFQHIKIIYPTAPPRSYTPMKGGISNVWFDRFKITNDCPEHLESIDVMCQVLTDLIDEEVKSGIKKNRILIGGFSMGGCMAIHLAYRNHQDVAGVFALSSFLNKASAVYQALQKSNGVLPELFQCHGTADELVLHSWAEETNSMLKSLGVTTKFHSFPNVYHELSKTELDILKLWILTKLPGEMEKQK

SEQ ID NO: 51451 - protein, 992 aa, Homo sapiens
LWGTPRLPCSPGWQGATKRLLVRSVSGASNHQPNSNSGRYRDTVLLPQTSFPMKLLGRQQPDTELEIQQKCGFSELYSWQRERKVKTEFCLHDGPPYANGDPHVGHALNKILKDIANRFHMMNGSKIHFVPGWDCHGLPIEIKVLSELGREAQNLSAMEIRKKARSFAKAAIEKQKSAFIRWGIMADWNNCYYTFDGKYEAKQLRTFYQMYDKGLVYRSYKPVFWSPSSRTALAEAELEYNPEHVSRSIYVKFPLLKPSPKLASLIDGSSPVSILVWTTQPWTIPANEAVCYMPESKYAVVKCSKSGDLYVLAADKVASVASTLETTFETISTLSGVDLENGTCSHPLIPDKASPLLPANHVTMAKGTGLVHTAPAHGMEDYGVASQHNLPMDCLVDEDGVFTDVAGPELQNKAVLEEGTDVVIKMLQTAKNLLKEEKLVHSYPYDWRTKKPVVIRASKQWFINITDIKTAAKELLKKVKFIPGSALNGMVEMMDRRPYWCISRQRVWGVPIPVFHHKTKDEYLINSQTTEHIVKLVEQHGSDIWWTLPPEQLLPKEVLSEVGGPDALEYVPGQDILDIWFDSGTSWSYVLPGPDQRADLYLEGKDQLGGWFQSSLLTSVAARKRAPYKTVIVHGFTLGEKGEKMSKSLGNVIHPDVVVNGGQDQSKEPPYGADVLRWWVADSNVFTEVAIGPSVLNAARDDISKLRNTLRFLLGNVADFNPETDSIPVNDMYVIDQYMLHLLQDLANKITELYKQYDFGKVVRLLRTFYTRELSNFYFSIIKDRLYCEKENDPKRRSCQTALVEILDVIVRSFAPILPHLAEEVFQHIPYIKEPKSVFRTGWISTSSIWKKPGLEEAVESACAMRDSFLGSIPGKNAAEYKVITVIEPGLLFEIIEMLQSEETSSTSQLNELMMASESTLLAQEPREMTADVIELKGKFLINLEGGDIREESSYKVIVMPTTKEKCPRCWKYTAESSDTLCPRCAEVVSGK

SEQ ID NO: 51452 - protein, 145 aa, Homo sapiens
LCFHGPLLYEAKCVKVAIKDKQVKYFIHYSGWNKNWDEWVPESRVLKYVDTNLQKQRELQKANQEQYAEGKMRGAAPGKKTSGLQQKNVEVKTKKNKQKTPGNGDGGSTSETPQPPWKKRARVDPTVENEETFMNRVEVKVKIPE

SEQ ID NO: 51453 - protein, 103 aa, Homo sapiens
IILVGTQSDLREDVKVLIELDKCKEKPVPEEAAKLCAEEIKAASYIECSALTQKNLKEVFDAAIVAGIQYSDTQQQPKKSKSRTPDKMKNLSKSWWKKYCCFV

SEQ ID NO: 51454 - protein, 213 aa, Homo sapiens [sequence omitted]

SEQ ID NO: 51455 - protein, 20 aa, Homo sapiens
IPQCGECKFCLNPKTNLARI

SEQ ID NO: 51456 - protein, 61 aa, Homo sapiens
LSHGNKPFSQHVRKLRASITPGTILILLTGGHRGKRVVFLKQLASGLLLVTGPLALNRVPL

SEQ ID NO: 51457 - protein, 9 aa, Homo sapiens
LDPDKPSLG

SEQ ID NO: 51458 - protein, 59 aa, Homo sapiens
KCLDENLEDASQCKKLRSSFESSCPQQWIKYFDKRRDYLKFKEKFEAGQFEPSETTAKS

SEQ ID NO: 51459 - protein, 30 aa, Homo sapiens
MEKTQETVQRILLEPYKYLLQLPGWKAGEQ

SEQ ID NO: 51460 - protein, 212 aa, Homo sapiens
INSANYVYFLGLEKVLTLDHPDAVKLFTRQLLELHQGQGLDIYWRDNYTCPTEEEYKAMVLQKTGGLFGLAVGLMQLFSDYKEDLKPLLNTLGLFFQIRDDYANLHSKEYSENKSFCEDLTEGKFSFPTIHAIWSRPESTQVQNILRQRTENIDIKKYCVHYLEDVGSFEYTRNTLKELEAKAYKQIDARGGNPELVALVKHLSKMFKEENE

SEQ ID NO: 51461 - protein, 8 aa, Homo sapiens
IFWILDIL

SEQ ID NO: 51462 - protein, 53 aa, Homo sapiens
KGLLSRLLKVPVSDLLLSYESPKKPGREIELENDLKSLQFYSVENGDCLLVRW

SEQ ID NO: 51463 - protein, 30 aa, Homo sapiens
IFKFIIPNVVKYSPNCKLLIVSNPVDIFDL

SEQ ID NO: 51464 - protein, 19 aa, Homo sapiens
IAHCILDLLGSSGPLASAS

SEQ ID NO: 51465 - protein, 17 aa, Homo sapiens
MFDYVEKTKKKQRKKYF

SEQ ID NO: 51466 - protein, 697 aa, Homo sapiens
IAAKLAKDREAAEGLGSHDRAIKYLNQDYEALRNECLEAGTLFQDPSFPAIPSALGFKELGPYSSKTRGIEWKRPTEICADPQFIIGGATRTDICQGALGDCWLLAAIASLTLNEEILARVVPLNQSFQENYAGIFHFQFWQYGEWVEVVVDDRLPTKDGELLFVHSAEGSEFWSALLEKAYAKINGCYEALSGGATTEGFEDFTGGIAEWYELKKPPPNLFKIIQKALQKGSLLGCSIDITSAADSEAITFQKLVKGHAYSVTGAEEVESNGSLQKLIRIRNPWGEVEWTGRWNDNCPSWNTIDPEERERLTRRHEDGEFWMSFSDFLRHYSRLEICNLTPDTLTSDTYKKWKLTKMDGNWRRGSTAGGCRNYPNTFWMNPQYLIKLEEEDEDEEDGESGCTFLVGLIQKHRRRQRKMGEDMHTIGFGIYEVPEELSGQTNIHLSKNFFLTNRARERSDTFINLREVLNRFKLPPGEYILVPSTFEPNKDGDFCIRVFSEKKADYQAVDDEIEANLEEFDISEDDIDDGFRRLFAQLAGEDAEISAFELQTILRRVLAKRQDIKSDGFSIETCKIMVDMLDSDGSGKLGLKEFYILWTKIQKYQKIYREIDVDRSGTMNSYEMRKALEEAGFKMPCQLHQVIVARFADDQLIIDFDNFVRCLVRLETLFKIFKQLDPENTGTIELDLISWLCFSVL

SEQ ID NO: 51467 - protein, 304 aa, Homo sapiens
VALPIVAIENILSFMSYDEISQLRLVCKRMDLVCQRMLNQGFLKVERYHNLCQKQVKAQLPRRESERRNHSLARHADILAAVETRLSLLNMTFMKYVDSNLCCFIPGKVIDEIYRVLRYVNSTRAPQRAHEVLQELRDISSMAMEYFDEKIVPILKRKLPGSDVSGRLMGSPPVPGPSAALTTMQLFSKQNPSRQEVTKLQQQVKTNGAGVTVLRREISELRTKVQEQQKQLQDQDQKLLEQTQIIGEQNARLAELERKLREVMESAVGNSSGSGQNEESPRKRKKATEAIDSLRKSKRLRNRK

SEQ ID NO: 51468 - protein, 183 aa, Homo sapiens
TGPPGVGKTTLIHKASEVLKSSGVPVDGFYTEEVRQGGRRIGFDVVTLSGTRGPLSRVGLEPPPGKRECRVGQYVVDLTSFEQLALPVLRNADCSSGPGQRVCVIDEIGKMELFSQLFIQAVRQTLSTPGTIILGTIPVPKGKPLALVEEIRNRKDVKVFNVTKENRNHLLPDIVTCVQSSRK

SEQ ID NO: 51469 - protein, 34 aa, Homo sapiens
TESPGTCQQKHSPTDMCPERRRCHYWRRCTKSFF

SEQ ID NO: 51470 - protein, 187 aa, Homo sapiens
VLNVYDMYWMNEYTSSIGIGVFHSGIEVYGREFAYGGHPYPFSGIFEISPGNASELGETFKFKEAVVLGSTDFLEDDIEKIVEELGKEYKGNAYHLMHKNCNHFSSALSEILCGKEIPRWINRLAYFSSCIPFLQSCLPKEWLTPAALQSSVSQELQDELEEAEDAAASASVASTAAGSRPGRHTKL

SEQ ID NO: 51471 - protein, 48 aa, Homo sapiens
LGCWFHCRYNYAKQRIQERIAREEIKKKILYEGTHLDPERKHNGSSSN

SEQ ID NO: 51472 - protein, 99 aa, Homo sapiens
VMPSQDVSGSEDTFPNKRPRLEDKTVFDNFFIKKEQIKSSGNDPKYSTTTAQNSSSSSSQSKMVNCPVCQNEVLESQINEHLDWCLEGDSIKVKSEESL

SEQ ID NO: 51473 - protein, 1892 aa, Homo sapiens
LPWRVPGQLDPSTGRRFSEHKLCADDECSMLMYRGEALEDFTGPDCRFVNFKKGDPVYVYYKLARGWPEVWAGSVGRTFGYFPKDLIQVVHEYTKEELQVPTDETDFVCFDGGRDDFHNYNVEELLGFLELYNSAATDSEKAVEKTLQDMEKNPELSKEREPEPEPVEANSEESDSVFSENTEDLQEQFTTQKHHSHANSQANHAQGEQASFESFEEMLQDKLKVPESENNKTSNSSQVSNEQDKIDAYKLLKKEMTLDLKTKFGSTADALVSDDETTRLVTSLEDDFDEELDTEYYAVGKEDEENQEDFDELPLLTFTDGEDMKTPAKSGVEKYPTDKEQNSNEEDKVQLTVPPGIKNDDKNILTTWGDTIFSIVTGGEETRDTMDLESSSSEEEKEDDDDALVPDSKQGKPQSATDYSDPDNVDDGLFIVDIPKTNNDKEVNAEHHIKGKGRGVQESKRGLVQDKTELEDENQEGMTVHSSVHSNNLNSMPAAEKGKDTLKSAYDDTENDLKGAAIHISKGMLHEEKPGEQILEGGSESESAQKAAGNQMNDRKIQQESLGSAPLMGDDHPNASRDSVEGDALVNGAKLHTLSVEHQREELKEELVLKTQNQPRFSSPDEIDLPRELEDEVPILGRNLPWQQERDVAATASKQMSEKIRLSEGEAKEDSLDEEFFHHKAMQGTEVGQTDQTDSTGGPAFLSKVEEDDYPSEELLEDENAINAKRSKEKNPGNQGRQFDVNLQVPDRAVLGTIHPDPEIEESKQETSMILDSEKTSETAAKGVNTGGREPNTMVEKERPLADKKAQRPFERSDFSDSIKIQTPELGEVFQNKDSDYLKNDNPEEHLKTSGLAGEPEGELSKEDHENTEKYMGTESQGSAAAEPEDDSFHWTPHTSVEPGHSDKREDLLIISSFFKEQQSLQRFQKYFNVHELEALLQEMSSKLKSAQQESLPYNMEKVLDKVFRASESQILSIAEKMLDTRVAENRDLGMNENNIFEEAAVLDDIQDLIYFVRYKHSTAEETATLVMAPPLEEGLGGAMEEMQPLHEDNFSREKTAELNVQVPEEPTHLDQRVIGDTHASEVSQKPNTEKDLDPGPVTTEDTPMDAIDANKQPETAAEEPASVTPLENAILLIYSFMFYLTKSLVATLPDDVQPGPDFYGLPWKPVFITAFLGIASFAIFLWRTVLVVKDRVYQVTEQQISEKLKTIMKENTELVQKLSNYEQKIKESKKHVQETRKQNMILSDEAIKYKDKIKTLEKNQEILDDTAKNLRVMLESEREQNVKNQDLISENKKSIEKLKDVISMNASEFSEVQIALNEAKLSEEKVKSECHRVQEENARLKKKKEQLQQEIEDWSKLHAELSEQIKSFEKSQKDLEVALTHKDDNINALTNCITQLNLLECESESEGQNKGGNDSDELANGEVGGDRNEKMKNQIKQMMDVSRTQTAISVVEEDLKLLQLKLRASVSTKCNLEDQVKKLEDDRNSLQAAKAGLEDECKTLRQKVEILNELYQQKEMALQKKLSQEEYERQEREHRLSAADEKAVSAAEEVKTYKRRIEEMEDELQKTERSFKNQIATHEKKAHENWLKARAAERAIAEEKREAANLRHKLLELTQKMAMLQEEPVIVKPMPGKPNTQNPPRRGPLSQNGSFGPSPVSGGECSPPLTVEPPVRPLSATLNRRDMPRSEFGSVDGPLPHPRWSAEASGKPSPSDPGSGTATMMNSSSRGSSPTRVLDEGKVNMAPKGPPPFPGVPLMSTPMGGPVPPPIRYGPPPQLCGPFGPRPLPPPFGPGMRPPLGLREFAPGVPPGRRDLPLHPRGFLPGHAPFRPLGSLGPREYFIPGTRLPPPTHGPQEYPPPPAVRDLLPSGSRDEPPPASQSTSQDCSQALKQSP

SEQ ID NO: 51474 - protein, 765 aa, Homo sapiens
VGPLSVLYAAFIAKLLELVATLPDDVQPGPDFYGLPWKPVFITAFLGIASFAIFLWRTVLVVKDRVYQVTEQQISEKLKTIMKENTELVQKLSNYEQKIKESKKHVQETRKQNMILSDEAIKYKDKIKTLEKNQEILDDTAKNLRVMLESEREQNVKNQDLISENKKSIEKLKDVISMNASEFSEVQIALNEAKLSEEKVKSECHRVQEENARLKKKKEQLQQEIEDWSKLHAELSEQIKSFEKSQKDLEVALTHKDDNINALTNCITQLNLLECESESEGQNKGGNDSDELANGEVGGDRNEKMKNQIKQMMDVSRTQTAISVVEEDLKLLQLKLRASVSTKCNLEDQVKKLEDDRNSLQAAKAGLEDECKTLRQKVEILNELYQQKEMALQKKLSQEEYERQEREHRLSAADEKAVSAAEEVKTYKRRIEEMEDELQKTERSFKNQIATHEKKAHENWLKARAAERAIAEEKREAANLRHKLLELTQKMAMLQEEPVIVKPMPGKPNTQNPPRRGPLSQNGSFGPSPVSGGECSPPLTVEPPVRPLSATLNRRDMPRSEFGSVDGPLPHPRWSAEASGKPSPSDPGSGTATMMNSSSRGSSPTRVLDEGKVNMAPKGPPPFPGVPLMSTPMGGPVPPPIRYGPPPQLCGPFGPRPLPPPFGPGMRPPLGLREFAPGVPPGRRDLPLHPRGFLPGHAPFRPLGSLGPREYFIPGTRLPPPTHGPQEYPPPPAVRDLLPSGSRDEPPPASQSTSQDCSQALKQSP

SEQ ID NO: 51475 - protein, 22 aa, Homo sapiens
MLVRMTVACSWLKQRPARMWPE

SEQ ID NO: 51476 - protein, 34 aa, Homo sapiens
MESPVCTDFADNMDFYYTKLLQGVAELKHWIYLS

SEQ ID NO: 51477 - protein, 424 aa, Homo sapiens
RPFHLVVFGASGFTGQFVTEEVAREQVDPERSSRLPWAVAGRSREKLQRVLEKAALKLGRPTLSSEVGIIICDIANPASLDEMAKQATVVLNCVGPYRFYGEPVIKACIENGASCIDISGEPQFLELMQLKYHEKAADKGVYIIGSSGFDSIPADLGVIYTRNKMNGTLTAVESFLTIHSGPEGLSIHDGTWKSAIYGFGDQSNLRKLRNVSNLKPVPLIGPKLKRRWPISYCRELKGYSIPFMGSDVSVVRRTQRYLYENLEESPVQYAAYVTVGGITSVIKLMFAGLFFLFFVRFGIGRQLLIKFPWFFSFGYFSKQGPTQKQIDAASFTLTFFGQGYSQGTGTDKNKPNIKICTQVKGPEAGYVATPIAMVQAAMTLLSDASHLPKAGGVFTPGAAFSKTKLIDRLNKHGIEFSVISSSEV

SEQ ID NO: 51478 - protein, 28 aa, Homo sapiens
KFSKCGVMASSGLCQSVAASCARSCGSC

SEQ ID NO: 51479 - protein, 370 aa, Homo sapiens
KRLQSTRSWKRMMLSLNNLQNIIYNPVIPFVGTIPDQLDPGTLIVIRGHVPSDADRFQVDLQNGSSMKPRADVAFHFNPRFKRAGCIVCNTLINEKWGREEITYDTPFKREKSFEIVIMVLKDKFQVAVNGKHTLLYGHRIGPEKIDTLGIYGKVNIHSIGFSFSSDLQSTQASSLELTEISRENVPKSGTPQLPSNRGGDISKIAPRTVYTKSKDSTVNHTLTCTKIPPMNYVSKRLPFAARLNTPMGPGRTVVVKGEVNANAKSFNVDLLAGKSKDIALHLNPRLNIKAFVRNSFLQESWGEEERNITSFPFSPGMYFEMIIYCDVREFKVAVNGVHSLEYKHRFKELSSIDTLEINGDIHLLEVRSW

SEQ ID NO: 51480 - protein, 419 aa, Homo sapiens
MERLAIRIPLLIGGATTSKTHTAVKIAPRYSAPVIHVLDASKSVVVCSQLLDENLKDEYFEEIMEEYEDIRQDHYESLKERRYLPLSQARKSGFQMDWLSEPHPVKPTFIGTQVFEDYDLQKLVDYIDWKPFFDVWQLRGKYPNRGFPKIFNDKTVGGEARKVYDDAHNMLNTLISQKKLRARGVVGFWPAQSIQDDIHLYAEAAVPQAAEPIATFYGLRQQAEKDSASTEPYYCLSDFIAPLHSGIRDYLGLFAVACFGVEELSKAYEDDGDDYSSIMVKALGDRLAEAFAEELHERVRRELWAYCGSEQLDVADLRRLRYKGIRPAPGYPSQPDHTEKLTMWRLADIEQSTGIRLTESLAMAPASAVSGLYFSNLKSKYFAVGKISKDQVEDYALRKNISVAEVEKWLGPILGYDTD

SEQ ID NO: 51481 - protein, 41 aa, Homo sapiens
IIANDQGNRTTPSYVAFTDTERLIGDATKNQVAMNPTNMVF

SEQ ID NO: 51482 - protein, 18 aa, Homo sapiens
IRDNLPPGCYNTQALEQQ

SEQ ID NO: 51483 - protein, 75 aa, Homo sapiens
IEGEGLQTVVPTPITASLSHNRIREILKASRKLQGDPDLPMSFTLAIVESDSTIVYYKLTDGFMLPDPQNISLRR

SEQ ID NO: 51484 - protein, 115 aa, Homo sapiens
KHVATVQNEEEAQKGKNYQNGDVFGDEYRIKPVEEVKYMKNGAEEEQKIAARNQENLEKSASSNVRLKTNKEVPGLVHQPRANMHISESQQEFFRMLDEKIEKGRDYCSEEEDIT

SEQ ID NO: 51485 - protein, 1559 aa, Homo sapiens
MPEFVNAAFNVTVVATNTCGTPPEEYCVQTGVTGVTKSCHLCDAGQPHLQHGAAFLTDYNNQADTTWWQSQTMLAGVQYPSSINLTLHLGKAFDITYVRLKFHTSRPESFAIYKRTREDGPWIPYQYYSGSCENTYSKANRGFIRTGGDEQQALCTDEFSDISPLTGGNVAFSTLEGRPSAYNFDNSPVLQEWVTATDIRVTLNRLNTFGDEVFNDPKVLKSYYYAISDFAVGGRCKCNGHASECMKNEFDKLVCNCKHNTYGVDCEKCLPFFNDRPWRRATAESASECLPCDCNGRSQECYFDPELYRSTGHGGHCTNCQDNTDGAHCERCRENFFRLGNNEACSSCHCSPVGSLSTQCDSYGRCSCKPGVMGDKCDRCQPGFHSLTEAGCRPCSCDPSGSIDECNIETGRCVCKDNVEGFNCERCKPGFFNLESSNPRGCTPCFCFGHSSVCTNAVGYSVYSISSTFQIDEDGWRAEQRDGSEASLEWSSERQDIAVISDSYFPRYFIAPAKFLGKQVLSYGQNLSFSFRVDRRDTRLSAEDLVLEGAGLRVSVPLIAQGNSYPSETTVKYVFRLHEATDYPWRPALTPFEFQKLLNNLTSIKIRGTYSERSAGYLDDVTLASARPGPGVPATWVESCTCPVGYGGQFCEMCLSGYRRETPNLGPYSPCVLCACNGHSETCDPETGVCNCRDNTAGPHCEKCSDGYYGDSTAGTSSDCQPCPCPGGSSCAVVPKTKEVVCTNCPTGTTGKRCELCDDGYFGDPLGRNGPVRLCRLCQCSDNIDPNAVGNCNRLTGECLKCIYNTAGFYCDRCKDGFFGNPLAPNPADKCKACNCNLYGTMKQQSSCNPVTGQCECLPHVTGQDCGACDPGFYNLQSGQGCERCDCHALGSTNGQCDIRTGQCECQPGITGQHCERCEVNHFGFGPEGCKPCDCHPEGSLSLQCKDDGRCECREGFVGNRCDQCEENYFYNRSWPGCQECPACYRLVKDKVADHRVKLQELESLIANLGTGDEMVTDQAFEDRLKEAEREVMDLLREAQDVKDVDQNLMDRLQRVNNTLSSQISRLQNIRNTIEETGNLAEQARAHVENTERLIEIASRELEKAKVAAANVSVTQPESTGDPNNMTLLAEEARKLAERHKQEADDIVRVAKTANDTSTEAYNLLLRTLAGENQTAFEIEELNRKYEQAKNISQDLEKQAARVHEEAKRAGDKAVEIYASVAQLSPLDSETLENEANNIKMEAENLEQLIDQKLKDYEDLREDMRGKELEVKNLLEKGKTEQQTADQLLARADAAKALAEEAAKKGRDTLQEANDILNNLKDFDRRVNDNKTAAEEALRKIPAINQTITEANEKTREAQQALGSAAADATEAKNKAHEAERIASAVQKNATSTKAEAERTFAEVTDLDNEVNNMLKQLQEAEKELKRKQDDADQDMMMAGMASQAAQEAEINARKAKNSVTSLLSIINDLLEQLGQLDTVDLNKLNEIEGTLNKAKDEMKVSDLDRKVSDLENEAKKQEAAIMDYNRDIEEIMKDIRNLEDIRKTLPSGCFNTPSIEKP

SEQ ID NO: 51486 - protein, 48 aa, Homo sapiens
LVTFCIRDLIGCLQKLLFGKVAKDSSSKCGPKETSLRQLVVPGRPQRC

SEQ ID NO: 51487 - protein, 430 aa, Homo sapiens
KDTFLGPVLKQMYITYVRNCKFTSPGALPFISFMQWTLTELLALEPGVAYQHAFLYIRQLAIHLRNAMTTRKKETYQSVYNWQYVHCLFLWCRVLSTAGPSEALQPLVYPLAQVIIGCIKLIPTARFYPLRMHCIRALTLLSGSSGAFIPVLPFILEMFQQVDFNRKPGRMSSKPINFSVILKLSNVNLQEKAYRDGLVEQLYDLTLEYLHSQAHCIGFPELVLPVVLQLKSFLRECKVANYCRQVQQLLGKVQENSAYICSRRQRVSFGVSEQQAVEAWEKLTREEGTPLTLYYSHWRKLRDREIQLEISGKERLEDLNFPEIKRRKMADRKDEDRKQFKDLFDLNSSEEDDTEGFSERGILRPLSTRHGVEDDEEDEEEGEEDSSNSEGEWSWDGDPDAEAGLAPGELQQLAQGPEDELEDLQLSEDD

SEQ ID NO: 51488 - protein, 268 aa, Homo sapiens
MFQQVDFNRKPGRMSSKPINFSVILKLSNVNLQEKAYRDGLVEQLYDLTLEYLHSQAHCIGFPELVLPVVLQLKSFLRECKVANYCRQVQQLLGKVQENSAYICSRRQRVSFGVSEQQAVEAWEKLTREEGTPLTLYYSHWRKLRDREIQLEISGKERLEDLNFPEIKRRKMADRKDEDRKQFKDLFDLNSSEEDDTEGFSERGILRPLSTRHGVEDDEEDEEEGEEDSSNSEDGDPDAEAGLAPGELQQLAQGPEDELEDLQLSEDD

SEQ ID NO: 51489 - protein, 173 aa, Homo sapiens
LPDDKLRFTPSMSSGLDTDTETDLRVVGCELIQAAGILLRLPQVAMATGQVLFQRFFYTKSFVKHSMEHVSMACVHLASKIEEAPRRIRDVINVFHRLRQLRDKKKPVPLLLDQDYVNLKNQIIKAERRVLKELGFCVHVKHPHKIIVMYLQVLECERNQHLVQTSWVASEGK

SEQ ID NO: 51490 - protein, 7 aa, Homo sapiens
IYLRHYR

SEQ ID NO: 51491 - protein, 153 aa, Homo sapiens
VKLPGPAPDKPNVYDFKTTYDQMYNDLLRKDKELYTQNGILHMLDRNKRIKPRPERFQNCKDLFDLILTCEERVYDQVVEDLNSREQETCQPVHVVNVDIQDNHEEATLGAFLICELCQCIQHTEDMENEIDELLQEFEEKSGRTFLHTVCFY

SEQ ID NO: 51492 - protein, 36 aa, Homo sapiens
LGYSQLGDDDLKETGFHLTTTNQGASAAGPGFSLKF

SEQ ID NO: 51493 - protein, 36 aa, Homo sapiens; identical to SEQ ID NO: 51492

SEQ ID NO: 51494 - protein, 99 aa, Homo sapiens
ICPHSLSFRPIVVPAGVELKIMLSPEARNTAWVSFDGRKRQEIRHGDSISITTSCYPLPSICVRDPVSDWFESLAQCLHWNVRKKQAHFEEEEEEEEEG

SEQ ID NO: 51495 - protein, 12 aa, Homo sapiens
IYMYWRPDQKPF

SEQ ID NO: 51496 - protein, 10 aa, Homo sapiens
LETRPEALLN

SEQ ID NO: 51497 - protein, 247 aa, Homo sapiens
VGAVVRGMDLQPGNALKRFLTSQTKLHEDLCEKRTAATLATHELRAVKGPLLYCARPPQDLKIVPLGRKEAKAKELVRQLQLEAEEQRKQKKRQSVSGLHRYLHLLDGNENYPCLVDADGDVISFPPITNSEKTKVKKTTSDLFLEVTSATSLQICKDVMDALILKMAEMKKYTLENKEEGSLSDTEADAVSGQLPDPTTNPSAGKDGPSLLVVEQVRVVDLEGSLKVVYPSKADLATAPPHVTVVR

SEQ ID NO: 51498 - protein, 59 aa, Homo sapiens
IGLEPGPHFLLCPCPCPSQHLAHTLQPAPWSGPGWRWRPGGVPSLAWLRAASGSWGQSF

SEQ ID NO: 51499 - protein, 252 aa, Homo sapiens
RAPTTATQRLKQDYLRIKKDPVPYICAEPLPSNILEWHYVVRGPEMTPYEGGYYHGKLIFPREFPFKPPSIYMITPNGRFKCNTRLCLSITDFHPDTWNPAWSVSTILTGLLSFMVEKGPTLGSIETSDFTKRQLAVQSLAFNLKDKVFCELFPEVVEEIKQKQKAQDELSSRPQTLPLPDVVPDGETHLVQNGIQLLNGHAPGAVPNLAGLQQANRHHGLLGGALANLFVIVGFAAFAYTVKYVLRSIAQE

SEQ ID NO: 51500 - protein, 4 aa, Homo sapiens
VDIM

SEQ ID NO: 51501 - protein, 440 aa, Homo sapiens
LPSRILLWKLVLLQSSAVLLHSGSSVPAAAGSSVVSESAVSWEAGARAVLRCQSPRMVWTQDRLHDRQRVLHWDLRGPGGGPARRLLDLYSAGEQRVYEARDRGRLELSASAFDDGNFSLLIRAVEETDAGLYTCNLHHHYCHLYESLAVRLEVTDGPPATPAYWDGEKEVLAVARGAPALLTCVNRGHVWTDRHVEEAQQVVHWDRQPPGVPHDRADRLLDLYASGERRAYGPLFLRDRVAVGADAFERGDFSLRIEPLEVADEGTYSCHLHHHYCGLHERRVFHLTVAEPHAEPPPRGSPGNGSSHSGAPGPDPTLARGHNVINVIVPESRAHFFQQLGYVLATLLLFILLLVTVLLAARRRRGGYEYSDQKSGKSKGKDVNLAEFAVAAGDQMLYRSEDIQLDYKNNILKERAELAHSPLPAKYIDLDKGFRKENCK

SEQ ID NO: 51502 - protein, 68 aa, Homo sapiens
LCSSGHLLMLRGSPPFQRLVPLSWNLAWAYAEAASTPLSQGLGGSIAPTPAAFAHGWPCPPLAQPKSH

SEQ ID NO: 51503 - protein, 82 aa, Homo sapiens
IKVNGKAGNLGGGVVTIERSKSKITVTSEVPFSKRYLKYLTKKYLKKNNLRDWLRVVANSKESYELRYFQINQDEEEEEDED

SEQ ID NO: 51504 - protein, 6 aa, Homo sapiens
LVARSC

SEQ ID NO: 51505 - protein, 262 aa, Homo sapiens
LGASVLALPLLTRAGLQGRTGLALYVAGLNALLLLLYRPPRYQIAIRACFLGFVFGCGTLLSFSQSSWSHFGWYMCSLSLFHYSEYLVTAVNNPKSLSLDSFLLNHSLEYTVAALSSWLEFTLENIFWPELKQITWLSVTGLLMVVFGECLRKAAMFTAGSNFNHVVQNEKSDTHTLVTSGVYAWFRHPSYVGWFYWSIGTQVMLCNPICGVSYALTVWRFFRDRTEEEEISLIHFFGEEYLEYKKRVPTGLPFIKGVKVDL

SEQ ID NO: 51506 - protein, 510 aa, Homo sapiens
REARNLLKSHLNLDDRRWSMQNFSPQCSIVLLEHLKTATVNFITSYPGSSYIFVQESPTPQIKPEYLALRSVGIRREKKRKGLQLTESTLSALEELVNVSCEEVDGCPVILVCGSQDVGKSTFNRYLINHLLNSLPCVDYLECDLGQTEFTPPGCISLLNITEPVLGPPFTHLRTPQKMVYYGKPSCKNNYENYIDIVKYVFSAYKRESPLIVNTMGWVSDQGLLLLIDLIRLLSPSHVVQFRSDHSKYMPDLTPQYVDDMDGLYTKSKTKMRNRRFRLAAFADALEFADEEKESPVEFTGHKLIGVYTDFAFRITPRNRESHNKILRDLSILSYLSQLQPPMPKPLSPLHSLTPYQVPFNAVALRITHSDVAPTHILYAVNASWVGLCKIQDDVRGYTNGPILLAQTPICDCLGFGICRGIDMEKRLYHILTPVPPEELRTVNCLLVGAIAIPHCVLKCQRGIEGTVPYVTTDYNFKLPGASEKIGAREPEEAHKEKPYRRPKFCRKMK

SEQ ID NO: 51507 - protein, 16 aa, Homo sapiens
LESQLQRRELQQKLNH

SEQ ID NO: 51508 - protein, 5 aa, Homo sapiens
TRYFG

SEQ ID NO: 51509 - protein, 73 aa, Homo sapiens
IFPFIQEGLGPYSFIVFAVICLLTTIYIFLIVPETKAKTFIEINQIFTKMNKVSEVYPEKEELKELPPVTSEQ

SEQ ID NO: 51510 - protein, 365 aa, Homo sapiens
VNRLQVAPKTQLDETVLWVVHVSGPINPQVLKSKAAKELKALQDLARKEMLELLDMPAAELLQDHQLLWAQLFSPGVEMKKITDTHTPSGLTVNLTLYYMLSCSPAPLLSPSLSHRERDQMESTLNYEDHCFSGHATMHAENLWPGRLSSVQQILQLSDLWRLTLQKRGCKGLVKVGAPGILQGMVLSFGGLQFTENHLQFQADPDVLHNSYALHGIRYKNDHINLAVLADAEGKPYLHVSVESRGQPVKIYACKAGCLDEPVELTSAPTGHTFSVMVTQPITPLLYISTDLTHLQDLRHTLHLKAILAHDEHMAQQDPGLPFLFWFSVASLITLFHLFLFKLIYNEYCGPGAKPLFRSKEDPSV

SEQ ID NO: 51511 - protein, 328 aa, Homo sapiens
LFGVFFNSCIARPGEFRPLPGSAARRMVWKRLGALVMFPLQMIYLVVKAAVGLVLPAKLRDLSRENVLITGGGRGIGRQLAREFAERGARKIVLWGRTEKCLKETTEEIRQMGTECHYFICDVGNREEVYQTAKAVREKVGDITILVNNAAVVHGKSLMDSDDDALLKSQHINTLGQFWTTKAFLPRMLELQNGHIVCLNSVLALSAIPGAIDYCTSKASAFAFMESLTLGLLDCPGVSATTVLPFHTSTEMFQGMRVRFPNLFPPLKPETVARRTVEAVQLNQALLLLPWTMHALVILKSILPQAALEEIHKFSGTYTCMNTFKGRT

SEQ ID NO: 51512 - protein, 965 aa, Homo sapiens
LAGLLCGGGVWAARVNKHKPWLEPTYHGIVTENDNTVLLDPPLIALDKDAPLRFAESFEVTVTKEGEICGFKIHGQNVPFDAVVVDKSTGEGVIRSKEKLDCELQKDYSFTIQAYDCGKGPDGTNVKKSHKATVHIQVNDVNEYAPVFKEKSYKATVIEGKQYDSILRVEAVDADCSPQFSQICSYEIITPDVPFTVDKDGYIKNTEKLNYGKEHQYKLTVTAYDCGKKRATEDVLVKISIKPTCTPGWQGWNNRIEYEPGTGALAVFPNIHLETCDEPVASVQATVELETSHIGKGCDRDTYSEKSLHRLCGAAAGTAELLPSPSGSLNWTMGLPTDNGHDSDQVFEFNGTQAVRIPDGVVSVSPKEPFTISVWMRHGPFGRKKETILCSSDKTDMNRHHYSLYVHGCRLIFLFRQDPSEEKKYRPAEFHWKLNQVCDEEWHHYVLNVEFPSVTLYVDGTSHEPFSVTEDYPLHPSKIETQLVVGACWQEFSGVENDNETEPVTVASAGGDLHMTQFFRGNLAGLTLRSGKLADKKVIDCLYTCKEGLDLQVLEDSGRGVQIQAHPSQLVLTLEGEDLGELDKAMQHISYLNSRQFPTPGIRRLKITSTIKCFNEATCISVPPVDGYVMVLQPEEPKISLSGVHHFARAASEFESSEGVFLFPELRIISTITREVEPEGDGAEDPTVQESLVSEEIVHDLDTCEVTVEGEELNHEQESLEVDMARLQQKGIEVSSSELGMTFTGVDTMASYEEVLHLLRYRNWHARSLLDRKFKLICSELNGRYISNEFKVEVNVIHTANPMEHANHMAAQPQFVHPEHRSFVDLSGHNLANPHPFAVVPSTATVVIVVCVSFLVFMIILGVFRIRAAHRRTMRDQDTGKENEMDWDDSALTITVNPMETYEDQHSSEEEEEEEEEEESEDGEEEDDITSAESESSEEEEGEQGDPQNATRQQQLEWDDSTLSY

SEQ ID NO: 51513 - protein, 91 aa, Homo sapiens
VLDQREEVRQSKQLLQLYLQALEKEGSLLSKQEESKAAFGEEVDAVDTGISRETSSDVALASHILTALREKQAPELSLSSQDLEVGGNQGH

SEQ ID NO: 51514 - protein, 62 aa, Homo sapiens
RDPKSGSWYVETLDDIFEQWAHSEDLQSLLLRVANAVSVKGIYKQMPGCFNFLRKKLFFKTS

SEQ ID NO: 51515 - protein, 183 aa, Homo sapiens
VVQCEIDEDVIQVSKKFLPGMAIGYSSSKLTLHVGDGFEFMKQNQDAFDVIITDSSDPMGPAESLFKESYYQLMKTALKEDGVLCCQGECQWLHLDLIKEMRQFCQSLFPVVAYAYCTIPTYPSGQIGFMLCSKNPSTNFQEPVQPLTQQQVAQMQLKYYNSDVHRAAFVLPEFARKALNDVS

SEQ ID NO: 51516 - protein, 6 aa, Homo sapiens
ILINMN

SEQ ID NO: 51517 - protein, 233 aa, Homo sapiens
IATAVITLFNEPSAEDSKKGPLTVAQKKAQNIMESFENPFRMFLPSLGHRAPVSQAAKFDPSTKIYEISNRWKLAQVQVQKDSKEAVKKKAAEQTAAREQAKEACKAAAEQAISVRQQVVLENAAKKRERATSDPRTTEQKQEKKRLKISKKPKDPEPPEKEFTPYDYSQSDFKAFAGNSKSKVSSQFDPNKQTPSGKKCIAAKKIKQSVGNKSMSFPTGKSDRGFRYNWPQR

SEQ ID NO: 51518 - protein, 49 aa, Homo sapiens
IQVIKDFPWILADEQDVHMHDPRLIPLKTMTSDILKMQLYVEERAHKGS

SEQ ID NO: 51519 - protein, 49 aa, Homo sapiens
IIQYIHDNYFLVNLVDNDFPLDNCLWQVVEDTLELLNRPTQNARETEAP

SEQ ID NO: 51520 - protein, 297 aa, Homo sapiens
LVTVDCYNPQTGQWRYLAEFPDHLGGGYSIVALGNDIYVTGGSDGSRLYDCVWRYNSSVNEWAEVAPMLKAREYHSSSVLDGLLYVVAADSTERYDHTTDSWEALQPMTYPMDNCSTTACRGRLYAIGSLAGKETMVMQCYDPDTDLWSLVDCGQLPPWSFAPKTATLNGLMYFVRDDSAEVDVYNPTRNEWDKIPSMNQVHVGGSLAVLGGKLYVSGGYDNTFELSDVVEAYDPETRAWSVVGRLPEPTFWHGSVSIFRQFMPQTFSGGRGFELDSGSDDMDPGRPRPPRDPDELH

SEQ ID NO: 51521 - protein, 60 aa, Homo sapiens
KLILTEASKAGLPGFYDPCVGEEKNLKVLYQFRGVLHQVMVLDSEALRIPKQSHRIDTDG

SEQ ID NO: 51522 - protein, 32 aa, Homo sapiens
KKSCCSCCPVGCAKCAQGCICKGTSDNCSCCA

SEQ ID NO: 51523 - protein, 61 aa, Homo sapiens
KGRVKWKVFNSSSVVGPPETSLHTVVQGRGELIIFGGLMDKKQNVKYYPKTNALYFVRAKR

SEQ ID NO: 51524 - protein, 176 aa, Homo sapiens
LLFLPAGLLAQGQYDLDPLPPFPDHVQYTHYSDQIDNPDYYDYQEVTPRPSEEQFQFQSQQQVQQEVIPAPTPEPGNAELEPTEPGPLDCREEQYPCTRLYSIHRPCKQCLNEVCFYSLRRVYVINKEICVRTVCAHEELLRADLCRDKFSKCGVMASSGLCQSVAASCARSCGSC

SEQ ID NO: 51525 - protein, 18 aa, Homo sapiens
KCLGLTGLEMSQNKAQCQ

SEQ ID NO: 51526 - protein, 460 aa, Homo sapiens
IAGVAAQEIRVPLKTGFLHNGRAMGNMRKTYWSSRSEFKNNFLNIDPITMAYSLNSSAQERLIPLGHASKSAPMNGHCFAENGPSQKSSLPPLLIPPSENLGPHEEDQVVCGFKKLTVNGVCASTPPLTPIKNSPSLFPCAPLCERGSRPLPPLPISEALSLDDTDCEVEFLTSSDTDFLLEDSTLSDFKYDVPGRRSFRGCGQINYAYFDTPAVSAADLSYVSDQNGGVPDPNPPPPQTHRRLRRSHSGPAGSFNKPAIRISNCCIHRASPNSDEDKPEVPPRVPIPPRPVKPDYRRWSAEVTSSTYSDEDRPPKVPPREPLSPSNSRTPSPKSLPSYLNGVMPPTQSFAPDPKYVSSKALQRQNSEGSASKVPCILPIIENGKKVSSTHYYLLPERPPYLDKYEKFFREAEETNGGAQIQPLPADCGISSATEKPDSKTKMDLGGHVKRKHLSYVVSP

SEQ ID NO: 51527 - protein, 5 aa, Homo sapiens
TEIKI

SEQ ID NO: 51528 - protein, 242 aa, Homo sapiens
IKKFAIYRWDPDKAGDKPHMQTYEVDLNKCGPMVLDALIKIKNEVDSTLTFRRSCREGICGSCAMNINGGNTLACTRRIDTNLNKVSKIYPLPHMYVIKDLVPDLSNFYAQYKSIEPYLKKKDESQEGKQQYLQSIEEREKLDGLYECILCACCSTSCPSYWWNGDKYLGPAVLMQAYRWMIDSRDDFTEERLAKLQDPFSLYRCHTIMNCTRTCPKGLNPGKAIAEIKKMMATYKEKKASV

SEQ ID NO: 51529 - protein, 440 aa, Homo sapiens
VVITEPEHTKERVKLEGSKCKGQLLIFGATNWDLIGRKEVPKQQAAYRNLGQNLWGPHRYGCLAGVRVRTVVSGSCAAHSLLITTEGKLWSWGRNEKGQLGHGDTKRVEAPRLIEGLSHEVIVSAACGRNHTLALTETGSVFAFGENKMGQLGLGNQTDAVPSPAQIMYNGQPITKMACGAEFSMIMDCKGNLYSFGCPEYGQLGHNSDGKFIARAQRIEYDCELVPRRVAIFIEKTKDGQILPVPNVVVRDVACGANHTLVLDSQKRVFSWGFGGYGRLGHAEQKDEMVPRLVKLFDFPGRGASQIYAGYTCSFAVSEVGGLFFWGATNTSRESTMYPKAVQDLCGWRIRSLACGKSSIIVAADESTISWGPSPTFGELGYGDHKPKSSTAAQEVKTLDGIFSEQVAMGYSHSLVIARDESETEKEKIKKLPEYNPRTL

SEQ ID NO: 51530 - protein, 99 aa, Homo sapiens
KDYSAYRSSLLFWALVDLIYNMFKKVPTSNTEGGWSCSLAEYIRHNDMPIYEAADKALKTFQEEFMPVETFSEFLDVAGLLSEITDPESFLKDLLNSVP

SEQ ID NO: 51531 - protein, 37 aa, Homo sapiens
MPAFPSARLPLSNSLILAGERESCESSRSEELQLNAA

SEQ ID NO: 51532 - protein, 50 aa, Homo sapiens
VQCGKGFTQSSNLITHQRVHTGEKPYECTECEKSFSRSSALIKHKRVHTD

SEQ ID NO: 51533 - protein, 34 aa, Homo sapiens
RQPLPRRNVPVGITEGDGSRTGSLPASSVQLLQD

SEQ ID NO: 51534 - protein, 125 aa, Homo sapiens
LDSLPSMKALSPVRGCYEAVCCLSERSLAIARGRGKGPAAEEPLSLLDDMNHCYSRLRELVPGVPRGTQLSQVEILQRVIDYILDLQVVLAEPAPGPPDGPHLPIQTAELTPELVISNDKRSFCH

SEQ ID NO: 51535 - protein, 44 aa, Homo sapiens [sequence omitted]

SEQ ID NO: 51536 - protein, 258 aa, Homo sapiens
LRPPNTSLFVRNVADDTRSEDLRREFGRYGPIVDVYVPLDFYTRRPRGFAYVQFEDVRDAEDALHNLDRKWICGRQIEIQFAQGDRKTPNQMKAKEGRNVYSSSRYDDYDRYRRSRSRSYERRRSRSRSFDYNYRRSYSPRNSRPTGRPRRSRSHSDNDRFKHRNRSFSRSKSNSRSRSKSQPKKEMKAKSRSRSASHTKTRGTSKTDSKTHYKSGSRYEKESRKKEPPRSKSQSRSQSRSRSKSRSRSWTSPKSSGH

SEQ ID NO: 51537 - protein, 178 aa, Homo sapiens
LRPPNTSLFVRNVADDTRSEDLRREFGRYGPIVDVYVPLDFYTRRPRGFAYVQFEDVRDAEDALHNLDRKWICGRQIEIQFAQGDRKTPNQMKAKEGRNVYSSSRYDDYDRYRRSRSRSYERRRSRSRSFDYNYRRSYSPRNRPTGRPRRSRSHSDNDRPNCSWNTQYSSAYYTSRKI

SEQ ID NO: 51538 - protein, 289 aa, Homo sapiens
LDTAFMYSDGQSETILGGLGLGLGGGDCRVKIATKANPWDGKSLKPDSVRSQLETSLKRLQCPQVDLFYLHAPDHGTPVEETLHACQRLHQEGKFVELGLSNYASWEVAEICTLCKSNGWILPTVYQGMYNATTRQVETELFPCLRHFGLRFYAYNPLAGGLLTGKYKYEDKDGKQPVGRFFGNSWAETYRNRFWKEHHFEAIALVEKALQAAYGASAPSVTSAALRWMYHHSQLQGAHGDAVILGMSSLEQLEQNLAATEEGPLEPAVVDAFNQAWHLVAHECPNYFR

SEQ ID NO: 51539 - protein, 225 aa, Homo sapiens
LDLMRRLPPQQIEKNLSDLIDLVPSLCEDLLSSVDQPLKIARDKVVGKDYLLCDYNRDGDSYRSPWSNKYDPPLEDGAMPSARLRKLEVEANNAFDQYRDLYFEGGVSSVYLWDLDHGFAGVILIKKAGDGSKKIKGCWDSIHVVEVQEKSSGRTAHYKLTSTVMLWLQTNKSGSGTMNLGGSLTRQMEKDETVSDCSPHIANIGRLVEVCADFCRQIKTRSSEE

SEQ ID NO: 51540 - protein, 259 aa, Homo sapiens
RRLPPQQIEKNLSDLIDLVPSLCEDLLSSVDQPLKIARDKVVGKDYLLCDYNRDGDSYRSPWSNKYDPPLEDGAMPSARLRKLEVEANNAFDQYRDLYFEGGVSSVYLWDLDHGFAGVILIKKAGDGSKKIKGCWDSIHVVEVQEKSSGRTAHYKLTSTVMLWLQTNKSGSGTMNLGGSLTRQMEKDETVSDCSPHIANIGRLVEDMENKIRSTLNEIYFGKTKDIVNGLRSVQTFADKSKQEALKNDLVEALKRKQQC

SEQ ID NO: 51541 - protein, 20 aa, Homo sapiens
LESSERATKEEQGSDGRGRS

SEQ ID NO: 51542 - protein, 50 aa, Homo sapiens
LQDTNNFFGAGQNKRPPKLGQIGRSKRVVIEDDRIDDVLKNMTDKAPPGV

SEQ ID NO: 51543 - protein, 9 aa, Homo sapiens
TESLNYLHD

SEQ ID NO: 51544 - protein, 157 aa, Homo sapiens
VRNAWKSRRDLKSLEDPPTRIGKNVESTNSNAYTQRSSTDFSELEQPRSCLFEQGTRRVGPSSGDAPEPSSRRTQSSLTVSEVLTRRNRVGDTITVAAWNHSASMEEEGEDCTLSVYRQLHNSLDPSELPGKQGLPESGRVRAEERLRPTRPCAEEN

SEQ ID NO: 51545 - protein, 629 aa, Homo sapiens
VNGNAVQLKEEEEPMDTSSVTHTEHYKTLIEAGLPQKVAERLDEIFQTGLVAYVDLDERAIDALREFNEEGALSVLQQFKESDLSHVQNKSAFLCGVMKTYRQREKQGSKVQESTKGPDEAKIKALLERTGYTLDVTTGQRKYGGPPPDSVYSGVQPGIGTEVFVGKIPRDLYEDELVPLFEKAGPIWDLRLMMDPLSGQNRGYAFITFCGKEAAQEAVKLCDSYEIRPGKHLGVCISVANNRLFVGSIPKNKTKENILEEFSKVTEGLVDVILYHQPDDKKKNRGFCFLEYEDHKSAAQARRRLMSGKVKVWGNVVTVEWADPVEEPDPEVMAKVKVLFVRNLATTVTEEILEKSFSEFGKLERVKKLKDYAFVHFEDRGAAVKAMDEMNGKEIEGEEIEIVLAKPPDKKRKERQAARQASRSTAYEDYYYHPPPRMPPPIRGRGRGGGRGGYGYPPDYYGYEDYYDDYYGYDYHDYRGGYEDPYYGYDDGYAVRGRGGGRGGRGAPPPPRGRGAPPPRGRAGYSQRGAPLGPPRGSRGGRGGPAQQQRGRGSRGSRGNRGGNVGGKRKADGYNQPDSKRRQTNNQQNWGSQPIAQQPLQQGGDYSGNYGYNNDNQEFYQDTYGQQWK

SEQ ID NO: 51546 - protein, 43 aa, Homo sapiens
ILMKEQLMLSGNLMKKELCLYYSSSRKVTYHMFRTKVHFYVEL

SEQ ID NO: 51547 - protein, 4 aa, Homo sapiens
LPCN

SEQ ID NO: 51548 - protein, 135 aa, Homo sapiens
VVRPAHISAFLQDRPIPEWCGVQHIHLSPSHHSGSKAASLHWTSERVVSVLLPGLLPAAYLNPCSATDYSLAAALTLHGHWGLGQVVTDYVHGDASQKAAKAGLLAFSALTFAGLCYFNYHDVGICKAVAMLWKL

SEQ ID NO: 51549 - protein, 158 aa, Homo sapiens
IARGQRYYGFGRTVYPEEHSRWRDRSRTRSRSRTPFRLSEKDRMELLEIAKTNAAKALGTTNIDLPASLRTVPSAKETSRGIGVSSNGAKPELSEKVTEDGTRNPNEKPTQQRSIAFSSNNSVAKPIQKSAKAATEEASSRSPKIDQKKSPYGLWIPI

SEQ ID NO: 51550 - protein, 52 aa, Homo sapiens
LDYEARRPIYEPLHTHWPHNFSGLFLLTVGSSILTAFLLSQLVQRKLDQKTK

SEQ ID NO: 51551 - protein, 163 aa, Homo sapiens
IVQNTLPVACLLFTMASSDIQVKELEKRASGQAFELILSPRSKESVPEFPLSPPKKKDLSLEEIQKKLEAAEERRKSHEAEVLKQLAEKREHEKEVLQKAIEENNNFSKMAEEKLTHKMEANKENREAQMAAKLERLREKDKHIEEVRKNKESKDPADETEAD

SEQ ID NO: 51552 - protein, 14 aa, Homo sapiens
ISMSCCGAFTAFGL

SEQ ID NO: 51553 - protein, 191 aa, Homo sapiens
LDKWKIDDKPVKIDKWDGSAVKNSLDDSAKKVLLEKYKYVENFGLIDGRLTICTISCFFAIVALIWDYMHPFPESKPVLALCVISYFVMMGILTIYTSYKEKSIFLVAHRKDPTGMDPDDIWQLSSSLKGFDDKYTLKLTFISGRTKQQREAEFTKSIAKFFDHSGTLVMDAYEPEISRLHDSLAIERKIK

SEQ ID NO: 51554 - protein, 222 aa, Homo sapiens
KRDSVLTSKNQIERLTRPGSSYFNLNPFEVLQIDPEVTDEEIKKRFRQLSILVHPDKNQDDADRAQKAFEAVDKAYKLLLDQEQKKRALDVIQAGKEYVEHTVKERKKQLKKEGKPTIVEEDDPELFKQAVYKQTMKLFAELEIKRKEREAKEMHERKRQREEEIEAQEKAKREREWQKNFEESRDGRVDSWRNFQANTKGKKEKKNRTFLRPPKVKMEQRE

SEQ ID NO: 51555 - protein, 16 aa, Homo sapiens
IAMGSPTACKSNLERL

SEQ ID NO: 51556 - protein, 5 aa, Homo sapiens
ISSMS

SEQ ID NO: 51557 - protein, 4 aa, Homo sapiens
MDIQ

SEQ ID NO: 51558 - protein, 277 aa, Homo sapiens
LRRIVTKMWNSGFESYGSSSYGGAGGYTQSPGGFGSPAPSQAEKKSRARAQHIVPCTISQLLSATLVDEVFRIGNVEISQVTIVGIIRHAEKAPTNIVYKIDDMTAAPMDVRQWVDTDDTSSENTVVPPETYVKVAGHLRSFQNKKSLVAFKIMPLEDMNEFTTHILEVINAHMVLSKANSQPSAGRAPISNPGMSEAGNFGGNSFMPANGLTVAQNQVLNLIKACPRPEGLNFQDLKNQLKHMSVSSIKQAVDFLSNEGHIYSTVDDDHFKSTDAE

SEQ ID NO: 51559 - protein, 19 aa, Homo sapiens
IGILVVFLMFSAVKHFKIY

SEQ ID NO: 51560 - protein, 168 aa, Homo sapiens
IMNRPAPVEISYENMRFLITHNPTNATLNKFTEELKKYGVTTLVRVCDATYDKAPVEKEGIHVLDWPFDDGAPPPNQIVDDWLNLLKTKFREEPGCCVAVHCVAGLGRAPVLVALALIECGMKYEDAVQFIRQKRRGAFNSKQLLYLEKYRPKMRLRFRDTNGHCCVQ

SEQ ID NO: 51561 - protein, 99 aa, Homo sapiens
IHSKPLTPAGHTGGPEPRPPARVETLREEAPTDLRVFELNSDSGKSTPSNNGKKGSSTDISEDWEKDFDLDMTEEEVQMALSKVDASGELEDVEWEDWE

SEQ ID NO: 51562 - protein, 64 aa, Homo sapiens
VIITVQPSGSCIEHSKSLDLGLGELLLGAPAARDCAHRSWPRLDRLSLGGYAKLGGGGDLGARV

SEQ ID NO: 51563 - protein, 84 aa, Homo sapiens
KQPVVASVSLLIFKDLKLRGFWLSQWKKDHSPDQFKELILTLCDLIRRGQLTAPACSQVPLQDYQSALEASMKPFISSKQILTM

SEQ ID NO: 51564 - protein, 441 aa, Homo sapiens
KPGPPHRAGAAHGAGAGAGAAAGPGARGLLLPPLLLLLLAGRAAGAQRWRSENFERPVDLEGSGDDDSFPDDELDDLYSGSGSGYFEQESGIETAMRFSPDVALAVSTTPAVLPTTNIQPVGTPFEELPSERPTLEPATSPLVVTEVPEEPSQRATTVSTTMATTAATSTGDPTVATVPATVATATPSTPAAPPFTATTAVIRTTGVRRLLPLPLTTVATARATTPEAPSPPTTAAVLDTEAPTPRLVSTATSRPRALPRPATTQEPDIPERSTLPLGTTAPGPTEVAQTPTPETFLTTIRDEPEVPVSGGPSGDFELPEEETTQPDTANEVVAVGGAAAKASSPPGTLPKGARPGPGLLDNAIDSGSSAAQLPQKSILERKEVLVAVIVGGVVGALFAAFLVTLLIYRMKKKDEGSYTLEEPKQASVTYQKPDKQEEFYA

SEQ ID NO: 51565 - protein, 1097 aa, Homo sapiens
VKGVGGMSVACVLKRKAVLWQDSFSPHLKHHPQEPANPNMPVVLTSGTGSQAQPQPAANQALAAGTHSSPVPGSIGVAGRSQDDAMVDYFFQRQHGEQLGGGGSGGGGYNNSKHRWPTGDNIHAEHQVRSMDELNHDFQALALEGRAMGEGPRDADSDENDKGEKKNKGTFDGDKLGDLKEEGDVMDKTNGLPVQNGIDADVKDFSRTPGNCQNSANEVDLLGPNQNGSEGLAQLTSTNGAKPVEDFSNMESQSVPLDPMEHVGMEPLQFDYSGTQVPVDSAAATVGLFDYNSQQQLFQRPNALAVQQLTAAQQQQYALAAAHQPHIAGLAPAAFVPNPYIISAAPPGTDPYTAGLAAAATLGPAVVPHQYYGVTPWGVYPASLFQQQAAAAAAATNSANQQTTPQAQQGQQQVLRGGASQRPLTPNQNQQGQQTDPLVAAAAVNSALAFGQGLAAGMPGYPVLAPAAYYDQTGALVVNAGARNGLGAPVRLVAPAPVIISSSAAQAAVAAAAASANGAAGGLAGTTNGPFRPLGTQQPQPQPQQQPNNNLASSSFYGNNSLNSNSQSSSLFSQGSAQPANTSLGFGSSSSLGATLGSALGGFGTAVANSNTGSGSRRDSLTGSSDLYKRTSSSLTPIGHSFYNGLSFSSSPGPVGMPLPSQGPGHSQTPPPSLSSHGSSSSLNLGGLTNGSGRYISAAPGAEAKYRSASSASSLFSPSSTLFSSSRLRYGMSDVMPSGRSRLLEDFRNNRYPNLQLREIAGHIMEFSQDQHGSRFIQLKLERATPAERQLVFNEILQAAYQLMVDVFGNYVIQKFFEFGSLEQKLALAERIRGHVLSLALQMYGCRVIQKALEFIPSDQQNEMVRELDGHVLKCVKDQNGNHVVQKCIECVQPQSLQFIIDAFKGQVFALSTHPYGCRVIQRILEHCLPDQTLPILEELHQHTEQLVQDQYGNYVIQHVLEHGRPEDKSKIVAEIRGNVLVLSQHKFASNVVEKCVTHASRTERAVLIDEVCTMNDGPHSALYTMMKDQYANYVVQKMIDVAEPGQRKIVMHKIRPHIATLRKYTYGKHILAKLEKYYMKNGVDLGPICGPPNGII

SEQ ID NO: 51566 - protein, 1141 aa, Homo sapiens
LKHHPQEPANPNMPVVLTSGTGSQAQPQPAANQALAAGTHSSPVPGSIGVAGRSQDDAMVDYFFQRQHGEQLGGGGSGGGGYNNSKHRWPTGDNIHAEHQVRSMDELNHDFQALALEGRAMGEQLLPGKKFWETDESSKDGPKGIFLGDQWRDSAWGTSDHSVSQPIMVQRRPGQSFHVNSEVNSVLSPRSESGGLGVSMVEYVLSSSPGDSCLRKGGFGPRDADSDENDKGEKKNKGTFDGDKLGDLKEEGDVMDKTNGLPVQNGIDADVKDFSRTPGNCQNSANEVDLLGPNQNGSEGLAQLTSTNGAKPVEDFSNMESQSVPLDPMEHVGMEPLQFDYSGTQVPVDSAAATVGLFDYNSQQQLFQRPNALAVQQLTAAQQQQYALAAAHQPHIAGLAPAAFVPNPYIISAAPPGTDPYTAGLAAAATLGPAVVPHQYYGVTPWGVYPASLFQQQAAAAAAATNSANQQTTPQAQQGQQQVLRGGASQRPLTPNQNQQGQQTDPLVAAAAVNSALAFGQGLAAGMPGYPVLAPAAYYDQTGALVVNAGARNGLGAPVRLVAPAPVIISSSAAQAGTQQPQPQPQQQPNNNLASSSFYGNNSLNSNSQSSSLFSQGSAQPANTSLGFGSSSSLGATLGSALGGFGTAVANSNTGSGSRRDSLTGSSDLYKRTSSSLTPIGHSFYNGLSFSSSPGPVGMPLPSQGPGHSQTPPPSLSSHGSSSSLNLGGLTNGSGRYISAAPGAEAKYRSASSASSLFSPSSTLFSSSRLRYGMSDVMPSGRSRLLEDFRNNRYPNLQLREIAGHIMEFSQDQHGSRFIQLKLERATPAERQLVFNEILQAAYQLMVDVFGNYVIQKFFEFGSLEQKLALAERIRGHVLSLALQMYGCRVIQKALEFIPSDQQVINEMVRELDGHVLKCVKDQNGNHVVQKCIECVQPQSLQFIIDAFKGQVFALSTHPYGCRVIQRILEHCLPDQTLPILEELHQHTEQLVQDQYGNYVIQHVLEHGRPEDKSKIVAEIRGNVLVLSQHKFASNVVEKCVTHASRTERAVLIDEVCTMNDGPHSALYTMMKDQYANYVVQKMIDVAEPGQRKIVMHKIRPHIATLRKYTYGKHILAKLEKYYMKNGVDLGPICGPPNGII

SEQ ID NO: 51567 - protein, 1047 aa, Homo sapiens
MGEQLLPGKKFWETDESSKDGPKGIFLGDQWRDSAWGTSDHSVSQPIMVQRRPGQSFHVNSEVNSVLSPRSESGGLGVSMVEYVLSSSPGDSCLRKGGFGPRDADSDENDKGEKKNKGTFDGDKLGDLKEEGDVMDKTNGLPVQNGIDADVKDFSRTPGNCQNSANEVDLLGPNQNGSEGLAQLTSTNGAKPVEDFSNMESQSVPLDPMEHVGMEPLQFDYSGTQVPVDSAAATVGLFDYNSQQQLFQRPNALAVQQLTAAQQQQYALAAAHQPHIGLAPAAFVPNPYIISAAPPGTDPYTAGLAAAATLGPAVVPHQYYGVTPWGVYPASLFQQQAAAAAAATNSANQQTTPQAQQGQQQVLRGGASQRPLTPNQNQQGQQTDPLVAAAAVNSALAFGQGLAAGMPGYPVLAPAAYYDQTGALVVNAGARNGLGAPVRLVAPAPVIISSSAAQAAVAAAAASANGAAGGLAGTTNGPFRPLGTQQPQPQPQQQPNNNLASSSFYGNNSLNSNSQSSSLFSQGSAQPANTSLGFGSSSSLGATLGSALGGFGTAVANSNTGSGSRRDSLTGSSDLYKRTSSSLTPIGHSFYNGLSFSSSPGPVGMPLPSQGPGHSQTPPPSLSSHGSSSSLNLGGLTNGSGRYISAAPGAEAKYRSASSASSLFSPSSTLFSSSRLRYGMSDVMPSGRSRLLEDFRNNRYPNLQLREIAGHIMEFSQDQHGSRFIQLKLERATPAERQLVFNEILQAAYQLMVDVFGNYVIQKFFEFGSLEQKLALAERIRGHVLSLALQMYGCRVIQKALEFIPSDQQVINEMVRELDGHVLKCVKDQNGNHVVQKCIECVQPQSLQFIIDAFKGQVFALSTHPYGCRVIQRILEHCLPDQTLPILEELHQHTEQLVQDQYGNYVIQHVLEHGRPEDKSKIVAEIRGNVLVLSQHKFASNVVEKCVTHASRTERAVLIDEVCTMNDGPHSALYTMMKDQYANYVVQKMIDVAEPGQRKIVMHKIRPHIATLRKYTYGKHILAKLEKYYMKNGVDLGPICGPPNGII

SEQ ID NO: 51568 - protein, 356 aa, Homo sapiens
IEQQKRKGPELPLVPVKRQRHELLLGAGSGPGAGQQQATPGALLQAGPPRCSSLQAPIMLLSGHEGEVYCCKFHPNGSTLASAGFDRLILLWNVYGDCDNYATLKGHSGAVMELHYNTDGSMLFSASTDKTVAVWDSETGERVKRLKGHTSFVNSCYPARRGPQLVCTGSDDGTVKLWDIRKKAAIQTFQNTYQVLAVTFNDTSDQIISGGIDNDIKVWDLRQNKLTYTMRGHADSVTGLSLSSEGSYLLSNAMDNTVRVWDVRPFAPKERCVKIFQGNVHNFEKNLLRCSWSPDGSKIAAGSADRFVYVWDTTSRRILYKLPGHAGSINEVAFHPDEPIIISASSDKRLYMGEIQ

SEQ ID NO: 51569 - protein, 93 aa, Homo sapiens
LEPEDDDEDEEDTVTRLGPDDTLPGPELSAEPDGPLNVNVFTSAEELERAQRLEERERILREIWRTGQPDLLGTGTLGPSPTATGTLGRMHYY

SEQ ID NO: 51570 - protein, 86 aa, Homo sapiens
VEYTRADGTVGRRVKPYIIDLGSGNGTFLNNKRIEPQRYYELKEKDVLKFGFSSREYVLLHESSDTSEIDRKDDEDEEEEEEVSDS

SEQ ID NO: 51571 - protein, 86 aa, Homo sapiens
LPSVAQAVQHLQVQERYKEQEKEKHHVHLVMYRRLALLQWIRGLQHQLIDQQARLQESFDTILDNRKELIRCLQQRAAPSRPQDQA

SEQ ID NO: 51572 - protein, 256 aa, Homo sapiens [sequence omitted]

SEQ ID NO: 51573 - protein, 107 aa, Homo sapiens
VTYRDQPWHRECLVCTGCQTPLAGQQFTSRDEDPYCVACFGELFAPKCSSCKRPIVGLGGGKYVSFEDRHWHHNCFSCARCSTSLVGQGFVPDGDQVLCQGCSQAGP

SEQ ID NO: 51574 - protein, 84 aa, Homo sapiens
KSGVLDTLTKVLVALYEEPEKPNSALDFLKHHLGAATPENPEIELLRLELAEMKEKYEAIVEENKKLKAKLAQYEPPQEEKRAE

SEQ ID NO: 51575 - protein, 397 aa, Homo sapiens
LQYGAEETPLAGSYGAADSFPKDFGYGVEEEEEEAAAAGGGVGAGAGGGCGPGGADSSKPRILLMGLRRSGKSSIQKVVFHKMSPNETLFLESTNKIYKDDISNSSFVNFQIWDFPGQMDFFDPTFDYEMIFRGTGALIYVIDAQDDYMEALTRLHITVSKAYKVNPDMNFEVFIHKVDGLSDDHKIETQRDIHQRANDDLADAGLEKLHLSFYLTSIYDHSIFEAFSKVVQKLIPQLPTLENLLNIFISNSGIEKAFLFDVVSKIYIATDSSPVDMQSYELCCDMIDVVIDVSCIYGLKEDGSGSAYDKESMAIIKLNNTTVLYLKEVTKFLALVCILREESFERKGLIDYNFHCFRKAIHEVFEVGVTSHRSCGHQTSASSLKALTHNGTPRNAI

SEQ ID NO: 51576 - protein, 40 aa, Homo sapiens
VVDLSVPGKFGIIRPGCALESTTAILQQKYGLLPSHASYL

SEQ ID NO: 51577 - protein, 177 aa, Homo sapiens
IVQMKDDHDKMFKMSEKILLLCVGEAGDTVQFAEYIQKNVQLYKMRNGYELSPTAAANFTRRNLADCLRSRTPYHVNLLLAGYDEHEGPALYYMDYLAALAKAPFAAHGYGAFLTLSILDRYYTPTISRERAVELLRKCLEELQKRFILNLPTFSVRIIDKNGIHDLDNISFPKQGS

SEQ ID NO: 51578 - protein, 243 aa, Homo sapiens
LGSFICKLENEYGRLTWPSVLDSFALLSGQLNTLNKVLKHEKTPLFRNQVIIPLVLSPDRDEDLMRQTEGRVPVFSHEVVPDHLRTKPDPEVEEQEKQLTTDAARIGADAAQKQIQSLNKMCSNLLEKISKEERESESGGLRPNKQTFNPTDTNALVAAVAFGKGLSNWRPSGSSGPGQAGQPGAGTILAGTSGLQQVQMAGAPSQQQPMLSGVQMAQAGQPGKMPSGIKTNIKSASMHPYQR

SEQ ID NO: 51579 - protein, 24 aa, Homo sapiens
IPLRRKVKKLLGQEGKKNAHLQLW

SEQ ID NO: 51580 - protein, 20 aa, Homo sapiens
KAQIPIVGSNGSSRLQDSRI

SEQ ID NO: 51581 - protein, 44 aa, Homo sapiens
LDTLLVDVEPKVKSKKREAVAGRGRGRGRGRGRGRGRGRGGPRR

SEQ ID NO: 51582 - protein, 72 aa, Homo sapiens
LYIDSRQNLPPSVMPPPGYPHIPQALSTPGTTMAGHHRAMNQQHMMPSQAFQMRRSLPPDDIQDDFDWDSIV

SEQ ID NO: 51583 - protein, 72 aa, Homo sapiens
KGPSAKRRYKNQKFGFGGKKKGSKWNTRESYDDVSSFRAKTAHGRGLKRPGKKGSNKRPGKRTREKMKNRTH

SEQ ID NO: 51584 - protein, 43 aa, Homo sapiens
KLTYQEIWTSLGSAMPEPESLRAFDSDGDGRYSFLELRVALGI

SEQ ID NO: 51585 - protein, 13 aa, Homo sapiens
IAVCFLLHSLGPS

SEQ ID NO: 51586 - protein, 28 aa, Homo sapiens
LGPYEFKKETDKPPFVIRHVCVLLSISI

SEQ ID NO: 51587 - protein, 41 aa, Homo sapiens
RLSLAEELSTYKAMLLPKSLEQADAPTSQAGGMETQSQGAV

SEQ ID NO: 51588 - protein, 35 aa, Homo sapiens
MEKFDKSKLKKTETQEKNPLPSKETIEQEKQAGES

SEQ ID NO: 51589 - protein, 689 aa, Homo sapiens
LTTLLAVVAAASQAEVESEAGWGMVTPDLLFAEGTAAYARGDWPGVVLSMERALRSRAALRALRLRCRTQCAADFPWELDPDWSPSPAQASGAAALRDLSFFGGLLRRAACLRRCLGPPAAHSLSEEMELEFRKRSPYNYLQVAYFKINKLEKAVAAAHTFFVGNPEHMEMQQNLDYYQTMSGVKEADFKDLETQPHMQEFRLGVRLYSEEQPQEAVPHLEAALQEYFVAYEECRALCEGPYDYDGYNYLEYNADLFQAITDHYIQVLNCKQNCVTELASHPSREKPFEDFLPSHYNYLQFAYYNIGNYTQAVECAKTYLLFFPNDEVMNQNLAYYAAMLGEEHTRSIGPRESAKEYRQRSLLEKELLFFAYDVFGIPFVDPDSWTPEEVIPKRLQEKQKSERETAVRISQEIGNLMKEIETLVEEKTKESLDVSRLTREGGPLLYEGISLTMNSKLLNGSQRVVMDGVISDHECQELQRLTNVAATSGDGYRGQTSPHTPNEKFYGVTVFKALKLGQEGKVPLQSAHLYYNVTEKVRRIMESYFRLDTPLYFSYSHLVCRTAIEEVQAERKDDSHPVHVDNCILNAETLVCVKEPPAYTFRDYSAILYLNGDFDGGNFYFTELDAKTVTAEVQPQCGRAVGFSSGTENPHGVKAVTRGQRCAIALWFTLDPRHSERVRAARAGQGAGR

SEQ ID NO: 51590 - protein, 728 aa, Homo sapiens
LTTLLAVVAAASQAEVESEAGWGMVTPDLLFAEGTAAYARGDWPGVVLSMERALRSRAALRALRLRCRTQCAADFPWELDPDWSPSPAQASGAAALRDLSFFGGLLRRAACLRRCLGPPAAHSLSEEMELEFRKRSPYNYLQVAYFKINKLEKAVAAAHTFFVGNPEHMEMQQNLDYYQTMSGVKEADFKDLETQPHMQEFRLGVRLYSEEQPQEAVPHLEAALQEYFVAYEECRALCEGPYDYDGYNYLEYNADLFQAITDHYIQVLNCKQNCVTELASHPSREKPFEDFLPSHYNYLQFAYYNIGNYTQAVECAKTYLLFFPNDEVMNQNLAYYAAMLGEEHTRSIGPRESAKEYRQRSLLEKELLFFAYDVFGIPFVDPDSWTPEEVIPKRLQEKQKSERETAVRISQEIGNLMKEIETLVEEKTKESLDVSRLTREGGPLLYEGISLTMNSKLLNGSQRVVMDGVISDHECQELQRLTNVAATSGDGYRGQTSPHTPNEKFYGVTVFKALKLGQEGKVPLQSAHLYYNVTEKVRRIMESYFRLDTPLYFSYSHLVCRTAIEEVQAERKDDSHPVHVDNCILNAETLVCVKEPPAYTFRDYSAILYLNGDFDGGNFYFTELDAKTVTAEVQPQCGRAVGFSSGTENPHGVKAVTRGQRCAIALWFTLDPRHSERDRVQADDLVKMLFSPEEMDLSQEQPLDAQQGPPEPAQESLSGSESKPKDEL

SEQ ID NO: 51591 - protein, 35 aa, Homo sapiens
KQRQRAEIYALNRVMTELEQQQFDEFCKQMQPPGE

SEQ ID NO: 51592 - protein, 302 aa, Homo sapiens
MGPSWGQHPGHWGFPALTEPSASPAAGLGIFEVRRVLDASGCSMLAPLQTGAARFSSYLLSRARKVLGSHLFSPCGVPEFCSISTRKLAAHGFGASMAAMVSFPPQRYHYFLVLDFEATCDKPQIHPQEIIEFPILKLNGRTMEIESTFHMYVQPVVHPQLTPFCTELTGIIQAMVDGQPSLQQVLERVDEWMAKEGLLDPNVKSIFVTCGDWDLKVMLPGQCQYLGLPVADYFKQWINLKKAYSFAMGCWPKNGLLDMNKGLSLQHIGRPHSGIDDCKNIANIMKTLAYRGFIFKQTSKPF

SEQ ID NO: 51593 - protein, 474 aa, Homo sapiens
LSYSCDFCPARPHTSWLTRFVKMEFQAVVMAVGGGSRMTDLTSSIPKPLLPVGNKPLIWYPLNLLERVGFEEVIVVTTRDVQKALCAEFKMKMKPDIVCIPDDADMGTADSLRYIYPKLKTDVLVLSCDLITDVALHEVVDLFRAYDASLAMLMRKGQDSIEPVPGQKGKKKAVEQRDFIGVDSTGKRLLFMANEADLDEELVIKGSILQKHPRIRFHTGLVDAHLYCLKKYIVDFLMENGSITSIRSELIPYLVRKQFSSASSQQGQEEKEEDLKKKELKSLDIYSFIKEANTLNLAPYDACWNACRGDRWEDLSRSQVRCYVHIMKEGLCSRVSTLGLYMEANRQVPKLLSALCPEEPPVHSSAQIVSKHLVGVDSLIGPETQIGEKSSIKRSVIGSSCLIKDRVTITNCLLMNSVTVEEGSNIQGSVICNNAVIEKGADIKDCLIGSGQRIEAKAKRVNEVIVGNDQLMEI

SEQ ID NO: 51594 - protein, 787 aa, Homo sapiens
TSREAAPAKSSASGPNAPPALFELCGRAVSAHMGVLESGVWALPGPILQSILPLLNIYYLERIEETALKKGLSTQAIWRRLWDELMKTRPSSLESVTCWRAKFMEAFFSHVLRGTIDVSSDRRLCDQRFSPLLHSSRHVRQLTICNMLQGATELVAEPNRRVLETLASSLHTLKFRHLLFSDVAAQQSLRQLLHQLIHHGAVSQVSLYSWPVPESALFILILTMSAGFWQPGPGGPPCRLCGEASRGRAPSRDEGSLLLGSRRPRRDAAERCAAALMASRRKSEAKQMPRAAPATRVTRRSTQESLTAGGTDLKRELHPPATSHEAPGTKRSPSAPAATSSASSSTSSYKRAPASSAPQPKPLKRFKRAAGKKGARTRQGPGAESEDLYDFVFIVAGEKEDGEEMEIGEVACGALDGSDPSCLGLPALEASQRFRSISTLELFTVPLSTEAALTLCHLLSSWVSLESLTLSYNGLGSNIFRLLDSLRALSGQAGCRLRALHLSDLFSPLPILELTRAIVRALPLLRVLSIRVDHPSQRDNPGVPGNAGPPSHIIGDEEIPENCLEQLEMGFPRGAQPAPLLCSVLKASGSLQQLSLDSATFASPQDFGLVLQTLKEYNLALKRLSFHDMNLADCQSEVLFLLQNLTLQEITFSFCRLFEKRPAQFLPEMVAAMKGNSTLKGLRLPGNRLGNAGLLALADVFSEDSSSSLCQLDISSNCIKPDGLLEFAKRLERWGRGAFGHLRLFQNWLDQDAVTAREAIRRLRATCHVVSDSWDSSQAFADYVSTM

SEQ ID NO: 51595 - protein, 26 aa, Homo sapiens
IPGVPIMYISNHRYNIEWMSDDYGAP

SEQ ID NO: 51596 - protein, 30 aa, Homo sapiens
RRDVTQLDPNKSLLEVKLFPQETLFLEAKE

SEQ ID NO: 51597 - protein, 53 aa, Homo sapiens
LGYETTDALPESSTCSSTLFLPHYASAKVCEEKLRYAAYNCVAIDTDMSPWEE

SEQ ID NO: 51598 - skipped

SEQ ID NO: 51599 - protein, 52 aa, Homo sapiens
KNVESVPKLVSEYMSKKIKVDEFVTHNLSFEEINKAFELMHSGKSIRTVVKI

SEQ ID NO: 51600 - protein, 97 aa, Homo sapiens
RDYYTRACDGGYTSSCFNLSAMFLQGAPGFPKDMDLACKYSMKACDLGHIWACANASRMYKLGDGVDKDEAKAEVLKNRAQQLHKEQQKGVQPLTFG

SEQ ID NO: 51601 - protein, 88 aa, Homo sapiens
KLTSDDVKEQIYKLAKKGLTPSQIGVIVRESHGVAQVRFVTGNKILRILKSKGLAPDLPEDLYHLIKKAVAVQSILRGTERIRMLNSI

SEQ ID NO: 51602 - protein, 27 aa, Homo sapiens
LAQYYKTKRVLPPSWKYESSTASALVA

SEQ ID NO: 51603 - protein, 155 aa, Homo sapiens
LQLKATLENITNLRPVGEDFRWYLKMKCGNCGEISDKWQYIRLMDSVALKGGRGSASMVQKCKLCARENSIEILSSTIKPYNAEDNENFKTIVEFECRGLEPVDFQPQAGFAAEGVESGTAFSDINLQEKDWTDYDEKAQESVGIYEVTHQFVKC

SEQ ID NO: 51604 - protein, 116 aa, Homo sapiens
KLRYANNSNYKNDVMIRKEAYVHKSVMEELKRIIDDSEITKEDDALWPPPDRVGRQELEIVIGDEHISFTTSKIGSLIDVNQSKDPEGLRVFYYLVQDLKCLVFSLIGLHFKIKPI

SEQ ID NO: 51605 - protein, 80 aa, Homo sapiens
LLTLQEAVDKYFKLPHASSKPPRISGSLVDTSYKTLRFAFRASLKTAIYRITTTFGEHLNAVQASAEHQKRLQQFLEFKE

SEQ ID NO: 51606 - protein, 12 aa, Homo sapiens
METPWLRRPSSL

SEQ ID NO: 51607 - protein, 888 aa, Homo sapiens
LTQLSSGNPVYEKYYRQVDTGNTGRVLASDAAAFLKKSGLPDLILGKIWDLADTDGKGILNKQEFFVALRLVACAQNGLEVSLSSLNLAVPPPRFHDTSSPLLISGTSAAELPWAVKPEDKAKYDAIFDSLSPVNGFLSGDKVKPVLLNSKLPVDILGRVWELSDIDHDGMLDRDEFAVAMFLVYCALEKEPVPMSLPPALVPPSKRKTWVVSPAEKAKYDEIFLKTDKDMDGFVSGLEVREIFLKTGLPSTLLAHIWSLCDTKDCGKLSKDQFALAFHLISQKLIKGIDPPHVLTPEMIPPSDRASLQKNIIGSSPVADFSAIKELDTLNNEIVDLQREKNNVEQDLKEKEDTIKQRTSEVQDLQDEVQRENTNLQKLQAQKQQVQELLDELDEQKAQLEEQLKEVRKKCAEEAQLISSLKAELTSQESQISTYEEELAKAREELSRLQQETAELEESVESGKAQLEPLQQHLQDSQQEISSMQMKLMEMKDLENHNSQLNWCSSPHSILVNGATDYCSLSTSSSETANLNEHVEGQSNLESEPIHQESPARSSPELLPSGVTDENEVTTAVTEKVCSELDNNRHSKEEDPFNVDSSSLTGPVADTNLDFFQSDPFVGSDPFKDDPFGKIDPFGGDPFKGSDPFASDCFFRQSTDPFATSSTDPFSAANNSSITSVETLKHNDPFAPGGTVVAASDSATDPFASVFGNESFGGGFADFSTLSKVNNEDPFRSATSSSVSNVVITKNVFEETSVKSEDEPPALPPKIGTPTRPCPLPPGKRSINKLDSPDPFKLNDPFQPFPGNDSPKEKDPEIFCDPFTSATTTTNKEADPSNFANFSAYPSEEDMIEWAKRESEREEEQRLARLNQQEQEDLELAIALSKSEISEA

SEQ ID NO: 51608 - protein, 310 aa, Homo sapiens
LGLPPLLLLTMALAGGSGTASAEAFDSVLGDTASCHRACQLTYPLHTYPKEEELYACQRGCRLFSICQFVDDGIDLNRTKLECESACTEAYSQSDEQYACHLGCQNQLPFAELRQEQLMSLMPKMHLLFPLTLVRSFWSDMMDSAQSFITSSWTFYLQADDGKIVIFQSKPEIQYAPHLEQEPTNLRESSLSKMSYLQMRNSQAHRNFLEDGESDGFLRCLSLNSGWILTTTLVLSVMVLLWICCATVATAVEQYVPSEKLSIYGDLEFMNEQKLNRYPASSLVVVRSKTEDHEEAGPLPTKVNLAHSEI

SEQ ID NO: 51609 - protein, 26 aa, Homo sapiens
MSPRYAGGPRPPIRMGNQGTNLDKRN

SEQ ID NO: 51610 - protein, 108 aa, Homo sapiens
MPSPADSTNSSDNIYTMINPVPPGGSRSNFPMGPGSDGPMGGMGGMEPHHMNGSLGSGDIDGLPKNSPNNISGISNPPGTPRDDGELGGNFLHSFQNDNYSPSMTMSV

SEQ ID NO: 51611 - protein, 336 aa, Homo sapiens
VTDCSMTAKMETTFYDDALNASFLPSESGPYGYSNPKILKQSMTLNLADPVGSLKPHLRAKNSDLLTSPDVGLLKLASPELERLIIQSSNGHITTTPTPTQFLCPKNVTDEQEGFAEGFVRALAELHSQNTLPSVTSAAQPVNGAGMVAPAVASVAGGSGSGGFSASLHSEPPVYANLSNFNPGALSSGGGAPSYGAAGLAFPAQPQQQQQPPHHLPQQMPVQHPRLQALKEEPQTVPEMPGETPPLSPIDMESQERIKAERKRMRNRIAASKCRKRKLERIARLEEKVKTLKAQNSELASTANMLREQVAQLKQKVMNHVNSGCQLMLTQQLQTF

SEQ ID NO: 51612 - protein, 1170 aa, Homo sapiens
MPGRNKAKSTCSCPDLQPNGQDLGENSRVARLGADESEEEGRRGSLSNAGDPEIVKSPSDPKQYRYIKLQNGLQALLISDLSNMEGKTGNTTDDEEEEEVEEEEEDDDEDSGAEIEDDDEEGFDDEDEFDDEHDDDLDTEDNELEELEERAEARKKTTEKQQLQSLFLLWSKLTDRLWFKSTYSKMSSTLLVETRNLYGVVGAESRSAPVQHLAGWQAEEQQGETDTVLSAAALCVGVGSFADPDDLPGLAHFLEHMVFMGSLKYPDENGFDAFLKKHGGSDNASTDCERTVFQFDVQRKYFKEALDRWAQFFIHPLMIRDAIDREVEAVDSEYQLARPSDANRKEMLFGSLARPGHPMGKFFWGNAETLKHEPRKNNIDTHARLREFWMRYYSSHYMTLVVQSKETLDTLEKWVTEIFSQIPNNGLPRPNFGHLTDPFDTPAFNKLYRVVPIRKIHALTITWALPPQQQHYRVKPLHYISWLVGHEGKGSILSFLRKKCWALALFGGNGETGFEQNSTYSVFSISITLTDEGYEHFYEVAYTVFQYLKMLQKLGPEKRIFEEIRKIEDNEFHYQEQTDPVEYVENMCENMQLYPLQDILTGDQLLFEYKPEVIGEALNQLVPQKANLVLLSGANEGKCDLKEKWFGTQYSIEDIENSWAELWNSNFELNPDLHLPAENKYIATDFTLKAFDCPETEYPVKIVNTPQGCLWYKKDNKFKIPKAYIRFHLISPLIQKSAANVVLFDIFVNILTHNLAEPAYEADVAQLEYKLVAGEHGLIIRVKGFNHKLPLLFQLIIDYLAEFNSTPAVFTMITEQLKKTYFNILIKPETLAKDVRLLILEYARWSMIDKYQALMDGLSLESLLSFVKEFKSQLFVEGLVQGNVTSTESMDFLKYVVDKLNFKPLEQEMPVQFQVVELPSGHHLCKVKALNKGDANSEVTVYYQSGTRSLREYTLMELLVMHMEEPCFDFLRTKQTLGYHVYPTCRNTSGILGFSVTVGTQATKYNSEVVDKKIEEFLSSFEEKIENLTEEAFNTQVTALIKLKECEDTHLGEEVDRNWNEVVTQQYLFDRLAHEIEALKSFSKSDLVNWFKAHRGPGSKMLSVHVVGYGKYELEEDGTPSSEDSNSSCEVMQLTYLPTSPLLADCIIPITDIRAFTTTLNLLPYHKIVK

SEQ ID NO: 51613 - protein, 84 aa, Homo sapiens
LHQLDQVTSQVLAGLMEAQKSAVPGDLLTLPGTTEHLRFTRPLTMAELSRLRRQFISYTKMHPNNENLPQLANMFLQYLSQSLH

SEQ ID NO: 51614 - protein, 22 aa, Homo sapiens
VWSLQSSKAQICRIYGNFRTLP

SEQ ID NO: 51615 - protein, 116 aa, Homo sapiens [sequence omitted]

SEQ ID NO: 51616 - protein, 192 aa, Homo sapiens
TARLVGVLWFVSVTTGPWGAVATSAGGEESLKCEDLKVGQYICKDPKINDATQEPVNCTNYTAHVSCFPAPNITCKDSSGNETHFTGNEVGFFKPISCRNVNGYSYKVAVALSLFLGWLGADRFYLGYPALGLLKFCTVGFCGIGSLIDFILISMQIVGPSDGSSYIIDYYGTRLTRLSITNETFRKTQLYP

SEQ ID NO: 51617 - protein, 88 aa, Homo sapiens
MMLKMIFNQTSVEHCKTHTEKQKECNFFLIAVRLASLNQILDPWVYLLLRKILLRKFCQVANAVSSCSNDGQKGQPISLSNEIIQTEA

SEQ ID NO: 51618 - protein, 307 aa, Homo sapiens
ICPDKKCGNVNFARRTSCNRCGREKTTEAKMMKAGGTEIGKTLAEKSRGLFSANDWQCKTCSNVNWARRSECNMCNTPKYAKLEERTGYGGGFNERENVEYIEREESDGEYDEFGRKKKKYRGKAVGPASILKEVEDKESEGEEEDEDEDLSKYKLDEDEDEDDADLSKYNLDASEEEDSNKKKSNRRSRSKSRSSHSRSSSRSSSPSSSRSRSRSRSRSSSSSQSRSRSSSRERSRSRGSKSRSSSRSHRGSSSPRKRSYSSSSSSPERNRKRSRSRSSSSGDRKKRRTRSRSPESQVIGENTKQP

SEQ ID NO: 51619 - protein, 317 aa, Homo sapiens
ICPDKKCGNVNFARRTSCNRCGREKTTEAKMMKAGGTEIGKTLAEKSRGLFSANDWQCKTCSNVNWARRSECNMCNTPKYAKLEERTGYGGGFNERENVEYIEREESDGEYDEFGRKKKKYRGKAVGPASILKEVEDKESEGEEEDEDEDLSKYKLDEDEDEDDADLSKYNLDASEEEDSNKKKSNRRSRSKSRSSHSRSSSRSSSPSSSRSRSRSRSRSSSSSQSRSRSSSRERSRSRGSKSRSSSRSHRGSSSPRKRSYSSSSSSPERNRKRSRSRSSSSGDRKKRRTRSRSPERRHRSSSGSSHSGSRSSSKKK

SEQ ID NO: 51620 - protein, 73 aa, Homo sapiens
KLELGLALRSCWAQRSSHSLRNQLRRKVAERPRCPLARSRTQTRATTARPKLRSSAKVSARDLALFPLDFRTI

SEQ ID NO: 51621 - protein, 128 aa, Homo sapiens
LAENFCVCHLATGDMLRAMVASGSELGKKLKATMDAGKLVSDEMVVELIEKNLETPLCKNGFLLDGFPRTVRQAEMLDDLMEKRKEKLDSVIEFSIPDSLLIRRITGRLITPRVAVPTTRSSTLQKSP

SEQ ID NO: 51622 - protein, 48 aa, Homo sapiens
ICRQAYHTQTTPLIEYYRKRGIHSAINASQTPDVVFASILAAFSKATS

SEQ ID NO: 51623 - protein, 24 aa, Homo sapiens
LPVDPSQRSDGALPGPGAHGSALL

SEQ ID NO: 51624 - protein, 6 aa, Homo sapiens
KLHSRS

SEQ ID NO: 51625 - protein, 314 aa, Homo sapiens
KLLAAGFYGVSSFLIVVVNKSVLTNYRFPSSLCVGLGQMVATVAVLWVGKALRVVKFPDLDRNVPRKTFPLPLLYFGNQITGLFSTKKLNLPMFTVLRRFSILFTMFAEGVLLKKTFSWGIKMTVFAMIIGAFVAASSDLAFDLEGYAFILINDVLTAANGAYVKQKLDSKELGKYGLLYYNALFMILPTLAIAYFTGDAQKAVEFEGWADTLFLLQFTLSCVMGFILMYATVLCTQYNSALTTTIVGCIKNILITYIGMVFGGDYIFTWTNFIGLNISIAGSLVYSYITFTEEQLSKQSEANNKLDIKGKGAV

SEQ ID NO: 51626 - protein, 73 aa, Homo sapiens
KMSSKTASTNNIAQARRTVQQLRLEASIERIKVSKASADLMSYCEEHARSDPLLIGIPTSENPFKDKKTCIIL

SEQ ID NO: 51627 - protein, 15 aa, Homo sapiens
MPNTTEKLLDKCIIM

SEQ ID NO: 51628 - protein, 537 aa, Homo sapiens
IIENMSTKKLCIVGGILLVFQIIAFLVGGLIAPGPTTAVSYMSVKCVDARKNHHKTKWFVPWGPNHCDKIRDIEEAIPREIEANDIVFSVHIPLPHMEMSPWFQFMLFILQLDIAFKLNNQIRENAEVSMDVSLAYRDDAFAEWTEMAHERVPRKLKCTFTSPKTPEHEGRYYECDVLPFMEIGSVAHKFYLLNIRLPVNEKKKINVGIGEIKDIRLVGIHQNGGFTKVWFAMKTFLTPSIFIIMVWYWRRITMMSRPPVLLEKVIFALGISMTFINIPVEWFSIGFDWTWMLLFGDIRQGIFYAMLLSFWIIFCGEHMMDQHERNHIAGYWKQVGPIAVGSFCLFIFDMCERGVQLTNPFYSIWTTDIGTELAMAFIIVAGICLCLYFLFLCFMVFQVFRNISGKQSSLPAMSKVRRLHYEGLIFRFKFLMLITLACAAMTVIFFIVSQVTEGHWKWGGVTVQVNSAFFTGIYGMWNLYVFALMFLYAPSHKNYGEDQSNGDLGVHSGEELQLTTTITHVDGPTEIYKLTRKEAQE

SEQ ID NO: 51629 - protein, 539 aa, Homo sapiens
IIENMSTKKLCIVGGILLVFQIIAFLVGGLIGPTTAVSYMSVKCVDARKNHHKTKWFVPWGPNHCDKIRDIEEAIPREIEANDIVFSVHIPLPHMEMSPWFQFMLFILQLDIAFKLNNQIRENAEVSMDVSLAYRDDAFAEWTEMAHERVPRKLKCTFTSPKTPEHEGRYYECDVLPFMEIGSVAHKFYLLNIRLPVNEKKKINVGIGEIKDIRLVGIHQNGGFTKVWFAMKTFLTPSIFIIMVWYWRRITMMSRPPVLLEKVIFALGISMTFINIPVEWFSIGFDWTWMLLFGDIRQGIFYAMLLSFWIIFCGEHMMDQHERNHIAGYWKQVGPIAVGSFCLFIFDMCERGVQLTNPFYSIWTTDIGTELAMAFIIVAGICLCLYFLFLCFMVFQVFRNISGKQSSLPAMSKVRRLHYEGLIFRFKFLMLITLACAAMTVIFFIVSQVTEGHWKWGGVTVQVNSAFFTGIYGMWNLYVFALMFLYAPSHKNYGEDQSNGMQLPCKSREDCALFVSELYQELFSASKYSFINDNAASGI

SEQ ID NO: 51630 - protein, 236 aa, Homo sapiens
IHQRTNTVPFDLVPHEDGVDVAVRVLKPLDSVDLGLETVYEKFHPSIQSFTDVIGHYISGERPKGIQETEEMLKVGATLTGVGELVLDNNSVRLQPPKQGMQYYLSSQDFDSLLQRQESSVRLWKVLALVFGFATCATLFFILRKQYLQRQERLRLKQMQEEFQEHEAQLLSRAKPEDRESLKSACVVCLSSFKSCVFLECGHVCSCTECYRALPEPKKCPICRQAITRVIPLYNS

SEQ ID NO: 51631 - protein, 442 aa, Homo sapiens
RRKMEPSTAARAWALFWLLLPLLGAVCASGPRTLVLLDNLNVRETHSLFFRSLKDRGFELTFKTADDPSLSLIKYGEFLYDNLIIFSPSVEDFGGNINVETISAFIDGGGSVLVAASSDIGDPLRELGSECGIEFDEEKTAVIDHHNYDISDLGQHTLIVADTENLLKAPTIVGKSSLNPILFRGVGMVADPDNPLVLDILTGSSTSYSFFPDKPITQYPHAVGKNTLLIAGLQARNNARVIFSGSLDFFSDSFFNSAVQKAAPGSQRYSQTGNYELAVALSRWVFKEEGVLRVGPVSHHRVGETAPPNAYTVTDLVEYSIVIQQLSNGKWVPFDGDDIQLEFVRIDPFVRTFLKKKGGKYSVQFKLPDVYGVFQFKVDYNRLGYTHLYSSTQVSVRPLQHTQYERFIPSAYPYYASAFSMMLGLFIFSIVFLHMKEKEKSD

SEQ ID NO: 51632 - protein, 445 aa, Homo sapiens
KSSEETKKDEKDQSKEKEKKVKKTIPSWATLSASQLARAQKQTPMASSPRPKMDAILTEAIKACFQKSGASVVAIRKYIIHKYPSLELERRGYLLKQALKRELNRGVIKQVKGKGASGSFVVVQKSRKTPQKSRNRKNRSSAVDPEPQVKLEDVLPLAFTRLCEPKEASYSLIRKYVSQYYPKLRVDIRPQLLKNALQRAVERGQLEQITGKGASGTFQLKKSGEKPLLGGSLMEYAILSAIAAMNEPKTCSTTALKKYVLENHPGTNSNYQMHLLKKTLQKCEKNGWMEQISGKGFSGTFQLCFPYYPSPGVLFPKKEPDDSRDEDEDEDESSEEDSEDEEPPPKRRLQKKTPAKSPGKAASVKQRGSKPAPKVSAAQRGKARPLPKKAPPKAKTPAKKTRPSSTVIKKPSGGSSKKPATSARKEVKLPGKGKSTMKKSFRVKK

SEQ ID NO: 51633 - protein, 24 aa, Homo sapiens
RCFWKFCCGSEIKKNTSEIQKQKE

SEQ ID NO: 51634 - protein, 259 aa, Homo sapiens
MLKEGGISMRELTIEFSKPLLPVGRAGVLLSEILHLLCKQMSHKKVGALWREADLSWKDFLPEGEDVHNFLLEQKLDFIESDSPCSSEALSKKELSAEELYKRLEKLIIEDKANDEQIFDWVEANLDEIQMSSPTFLRALMTAVCKAAIIADSSTFRVDTAVIKQRVPILLKYLDSDTEKELQALYALQASIVKLDQPANLLRMFFDCLYDEEVISEDAFYKWESSKDPAEQNGKGVALKSVTAFFTWLREAEEESEDN

SEQ ID NO: 51635 - protein, 724 aa, Homo sapiens
VNFHSPRSGQRCWAARTQVEKRLVVLVVLLAAGLVACLAALGIQYQTRSPSVCLSEACVSVTSSILSSMDPTVDPCHDFFSYACGGWIKANPVPDGHSRWGTFSNLWEHNQAIIKHLLENSTASVSEAERKAQVYYRACMNETRIEELRAKPLMELIERLGGWNITGPWAKDNFQDTLQVVTAHYRTSPFFSVYVSADSKNSNSNVIQVDQSGLGLPSRDYYLNKTENEKVLTGYLNYMVQLGKLLGGGDEEAIRPQMQQILDFETALANITIPQEKRRDEELIYHKVTAAELQTLAPAINWLPFLNTIFYPVEINESEPIVVYDKEYLEQISTLINTTDRCLLNNYMIWNLVRKTSSFLDQRFQDADEKFMEVMYGTKKTCLPRWKFCVSDTENNLGFALGPMFVKATFAEDSKSIATEIILEIKKAFEESLSTLKWMDEETRKSAKEKADAIYNMIGYPNFIMDPKELDKVFNDYTAVPDLYFENAMRFFNFSWRVTADQLRKAPNRDQWSMTPPMVNAYYSPTKNEIVFPAGILQAPFYTRSSPKALNFGGIGVVVGHELTHAFDDQGREYDKDGNLRPWWKNSSVEAFKRQTECMVEQYSNYSVNGEPVNGRHTLGENIADNGGLKAAYRAYQNWVKKNGAEHSLPTLGLTNNQLFFLGFAQVWCSVRTPESSHEGLITDPHSPSRFRVIGSLSNSKEFSEHFRCPPGSPMNPPHKCEVW

SEQ ID NO: 51636 - protein, 46 aa, Homo sapiens
KHLQRHIVNANLPRTGAGMVEVTSLLKKPASITETSFSLLMAEAAS

SEQ ID NO: 51637 - protein, 186 aa, Homo sapiens
KEVDMMKEALEKLQLNIVEMKDENATLDGGDVLFTGREFFVGLSKRTNQRGAEILADTFKDYAVSTVPVADGLHLKSFCSMAGPNLIAIGSSESAQKALKIMQQMSDHRYDKLTVPDDIAANCIYLNIPNKGHVLLHRTPEEYPESAKVYEKLKDHMLIPVSMSELEKVDGLLTCCSVLINKKVDS

SEQ ID NO: 51638 - protein, 281 aa, Homo sapiens
KKEIVDDTKVKEEPPINHPVGCKRKLAMSRCETCGTEEAKYRCPRCMRYSCSLPCVKKHKAELTCNGVRDKTAYISIQQFTEMNLLSDYRFLEDVARTADHISRDAFLKRPISNKYMYFMKNRARRQGINLKLLPNGFTKRKENSTFFDKKKQQFCWHVKLQFPQSQAEYIEKRVPDDKTINEILKPYIDPEKSDPVIRQRLKAYIRSQTGVQILMKIEYMQQNLVRYYELDPYKSLLDNLRNKVIIEYPTLHVVLKGSNNDMKVLHQVKSESTKNVGNEN

SEQ ID NO: 51639 - protein, 14 aa, Homo sapiens
KRKVEPGEPAKKKK

SEQ ID NO: 51640 - protein, 814 aa, Homo sapiens
VLPHFESLGKQEKIPNKMSAFRNHCPHLDSVGEITKEDLIQKSLGTCQDCKVQGPNLWACLENRCSYVGCGESQVDHSTIHSQETKHYLTVNLTTLRVWCYACSKEVFLDRKLGTQPSLPHVRQPHQIQENSVQDFKIPSNTTLKTPLVAVFDDLDIEADEEDELRARGLTGLKNIGNTCYMNAALQALSNCPPLTQFFLDCGGLARTDKKPAICKSYLKLMTELWHKSRPGSVVPTTLFQGIKTVNPTFRGYSQQDAQEFLRCLMDLLHEELKEQVMEVEEDPQTITTEETMEEDKSQSDVDFQSCESCSNSDRAENENGSRCFSEDNNETTMLIQDDENNSEMSKDWQKEKMCNKINKVNSEGEFDKDRDSISETVDLNNQETVKVQIHSRASEYITDVHSNDLSTPQILPSNEGVNPRLSASPPKSGNLWPGLAPPHKKAQSASPKRKKQHKKYRSVISDIFDGTIISSVQCLTCDRVSVTLETFQDLSLPIPGKEDLAKLHSSSHPTSIVKAGSCGEAYAPQGWIAFFMEYVKSWFWGPVVTLQDCLAAFFARDELKGDNMYSCEKCKKLRNGVKFCKVQNFPEILCIHLKRFRHELMFSTKISTHVSFPLEGLDLQPFLAKDSPAQIVTYDLLSVICHHGTASSGHYIAYCRNNLNNLWYEFDDQSVTEVSESTVQNAEAYVLFYRKSSEEAQKERRRISNLLNIMEPSLLQFYISRQWLNKFKTFAEPGPISNNDFLCIHGGVPPRKAGYIEDLVLMLPQNIWDNLYSRYGGGPAVNHLYICHTCQIEAEKIEKRRKTELEIFIRVKK

SEQ ID NO: 51641 - protein, 928 aa, Homo sapiens
VLPHFESLGKQEKIPNKMSAFRNHCPHLDSVGEITKEDLIQKSLGTCQDCKVQGPNLWACLENRCSYVGCGESQVDHSTIHSQETKHYLTVNLTTLRVWCYACSKEVFLDRKLGTQPSLPHVRQPHQIQENSVQDFKIPSNTTLKTPLVAVFDDLDIEADEEDELRARGLTGLKNIGNTCYMNAALQALSNCPPLTQFFLDCGGLARTDKKPAICKSYLKLMTELWHKSRPGSVVPTTLFQGIKTVNPTFRGYSQQDAQEFLRCLMDLLHEELKEQVMEVEEDPQTITTEETMEEDKSQSDVDFQSCESCSNSDRAENENGSRCFSEDNNETTMLIQDDENNSEMSKDWQKEKMCNKINKVNSEGEFDKDRDSISETVDLNNQETVKVQIHSRASEYITDVHSNDLSTPQILPSNEGVNPRLSASPPKSGNLWPGLAPPHKKAQSASPKRKKQHKKYRSVISDIFDGTIISSVQCLTCDRVSVTLETFQDLSLPIPGKEDLAKLHSSSHPTSIVKAGSCGEAYAPQGWIAFFMEYVKRFVVSCVPSWFWGPVVTLQDCLAAFFARDELKGDNMYSCEKCKKLRNGVKFCKVQNFPEILCIHLKRFRHELMFSTKISTHVSFPLEGLDLQPFLAKDSPAQIVTYDLLSVICHHGTASSGHYIAYCRNNLNNLWYEFDDQSVTEVSESTVQNAEAYVLFYRKSSEEAQKERRRISNLLNIMEPSLLQFYISRQWLNKFKTFAEPGPISNNDFLCIHGGVPPRKAGYIEDLVLMLPQNIWDNLYSRYGGGPAVNHLYICHTCQIEAEKIEKRRKTELEIFIRLNRAFQKEDSPATFYCISMQWFREWESFVKGKDGDPPGPIDNTKIAVTKCGNVMLRQGADSGQISEETWNFLQSIYGGGPEVILRPPVVHVDPDILQAEEKIEVETRSL

SEQ ID NO: 51642 - protein, 51 aa, Homo sapiens
RVGRQERGLPPSVERGYPSSRDSYSSSSRGAPRGAGPGGSRSDRGGGRSRY

SEQ ID NO: 51643 - protein, 104 aa, Homo sapiens
IEVERVKAESAQASAKMLQEMQRKNEQMMEQKERSYQEHLKQLTEKMENDRVQLLKEQERTLALKLQEQEQLLKEGFQKESRIMKNEIQDLQTKMRRRKACTIS

SEQ ID NO: 51644 - protein, 144 aa, Homo sapiens
IEFCVEDSKDVNVNFEKSKLTFSCLGGSDNFKHLNEIDLFHCIDTNDSKHKRTDRSILCCLRKGESGQSWPRLTKERAKLNWLSVDFNNWKDWEDDSDEDMSNFDRFSEMMNNMGGDEDVDLPEVDGADDDSQDSDDEKMPDLQ

SEQ ID NO: 51645 - protein, 134 aa, Homo sapiens
VLKKYLESKEDVADALLQTDQSLSEKEKAIEVERIKAESAEAAKKMLEEIQKKNEEMMEQKEKSYQEHVKQLTEKMERDRAQLMAEQEKTLALKLQEQERLLKEGFENESKRLQKDIWDIQMRSKSLEPICNIL

SEQ ID NO: 51646 - protein, 48 aa, Homo sapiens
KETLLPPGSLLICADEISFLFLVSGFCWKLDYICAVFYLYRIMQRKGL

SEQ ID NO: 51647 - protein, 223 aa, Homo sapiens
LPFPVLLLAALPPVLLPGAAGFTPSLDSDFTFTLPAGQKECFYQPMPLKASLEIEYQVLDGAGLDIDFHLASPEGKTLVFEQRKSDGVHTVETEVGDYMFCFDNTFSTISEKVIFFELILDNMGEQAQEQEDWKKYITGTDILDMKLEDILESINSIKSRLSKSGHIQTLLRAFEARDRNIQESNFDRVNFWSMVNLVVMVVVSAIQVYMLKSLFEDKRKSRT

SEQ ID NO: 51648 - protein, 16 aa, Homo sapiens
LEAYTSVLTVGKEALG

SEQ ID NO: 51649 - protein, 212 aa, Homo sapiens
ISDVAFLVVGDPFGATTHSDLVLRATKLGIPYRVIHNASIMNAVGCCGLQLYKFGETVSIVFWTDTWRPESFFDKVKKNRQNGMHTLCLLDIKVKEQSLENLIKGRKIYEPPRYMSVNQAAQQLLEIVQNQRIRGEEPAVTEETLCVGLARVGADDQKIAAGTLRQMCTVDLGEPLHSLIITGGSIHPMEMEMLSLFSIPENSSESQSINGL

SEQ ID NO: 51650 - protein, 201 aa, Homo sapiens
IDLTELVKLREELKPIAFARGIKLSFMPFFLKAASLGLLQFPILNASVDENCQNITYKASHNIGIAMDTEQGLIVPNVKNVQICSIFDIATELNRLQKLGSVSQLSTTDLTGGTFTLSNIGSIGGTFAKPVIMPPEVAIGALGSIKAIPRFNQKGEVYKAQIMNVSWSADHRVIDGATMSRFSNLWKSYLENPAFMLLDLK

SEQ ID NO: 51651 - protein, 46 aa, Homo sapiens
KLRKHIQDLNWQRKNMQLTAGSKLREMESNWISVVRIMRLNGLFFN

SEQ ID NO: 51652 - protein, 4 aa, Homo sapiens
LLEK

SEQ ID NO: 51653 - protein, 230 aa, Homo sapiens
KKKRRNFAELKIKRLRKKFAQKMLRKARRKLIYEKAKHYHKEYRQMYRTEIRMARMARKAGNFYVPAEPKLAFVIRIRGINGVSPKVRKVLQLLRLRQIFNGTFVKLNKASINMLRIVEPYIAWRYPNLKSVNELIYKRGYGKINKKRIALTDNALIARSLGKYGIICMEDLIHEIYTVGKRFKEANNFLWPFKLSSPRGGMKKKTTHFVEGGDAGNREDQINRLIRRMN

SEQ ID NO: 51654 - protein, 5 aa, Homo sapiens
VSKCH

SEQ ID NO: 51655 - protein, 447 aa, Homo sapiens
LDRNGDGVVDIGELQEGLRNLGIPLGQDAEEKIFTTGDVNKDGKLDFEEFMKYLKDHEKKMKLAFKSLDKNNDGKIEASEIVQSLQTLGLTISEQQAELILQSIDVDGTMTVDWNEWRDYFLFNPVTDIEEIIRFWKHSTGIDIGDSLTIPDEFTEDEKKSGQWWRQLLAGGIAGAVSRTSTAPLDRLKIMMQVHGSKSDKMNIFGGFRQMVKEGGIRSLWRGNGTNVIKIAPETAVKFWAYEQYKKLLTEEGQKIGTFERFISGSMAGATAQTFIYPMEVMKTRLAVGKTGQYSGIYDCAKKILKHEGLGAFYKGYVPNLLGIIPYAGIDLAVYELLKSYWLDNFAKDSVNPGVMVLLGCGALSSTCGQLASYPLALVRTRMQAQAMLEGSPQLNMVGLFRRIISKEGIPGLYRGITPNFMKVLPAVGISYVVYENMKQTLGVTQK

SEQ ID NO: 51656 - protein, 550 aa, Homo sapiens
LCSLLLCECLLLVAGYAHDDDWIDPTDMLNYDAASGTMRKSQAKYGISGEKDVSPDLSCADEISECYHKLDSLTYKIDECEKKKREDYESQSNPVFRRYLNKILIEAGKLGLPDENKGDMHYDAEIILKRETLLEIQKFLNGEDWKPGALDDALSDILINFKFHDFETWKWRFEDSFGVDPYNVLMVLLCLLCIVVLVATELWTYVRWYTQLRRVLIISFLFSLGWNWMYLYKLAFAQHQAEVAKMEPLNNVCAKKMDWTGSIWEWFRSSWTYKDDPCQKYYELLLVNPIWLVPPTKALAVTFTTFVTEPLKHIGKGTGEFIKALMKEIPALLHLPVLIIMALAILSFCYGAGKSVHVLRHIGGPESEPPQALRPRDRRRQEEIDYRPDGGAGDADFHYRGQMGPTEQGPYAKTYEGRREILRERDVDLRFQTGNKSPEVLRAFDVPDAEAREHPTVVPSHKSPVLDTKPKETGGILGEGTPKESSTESSQSAKPVSGQDTSGNTEGSPAAEKAQLKSEAAGSPDQGSTYSPARGVAGPRGQDPVSSPCG

SEQ ID NO: 51657 - protein, 82 aa, Homo sapiens
LATARFMAEAADSYRMNAERILAGFQPDEEMNEICKTEFQMRLLWGSKGAQVNQTERYEKFNQILTALSRKLEPPPVKQAEL

SEQ ID NO: 51658 - protein, 148 aa, Homo sapiens
ITPDFEKNHCVPPYSESKYQLQKKRRKERQKTAGDGWFGMKAPEMTNELKNDLKALKMRASMDPKRFYKKNDRDGFPKYFQIGTIVDNPADFYHSRIPKKQRKRTIVEELLADSEFRRYNRRKYSEIMAEKAANAAGKKFRKKKKFRN

SEQ ID NO: 51659 - protein, 237 aa, Homo sapiens
THSEELHDCIQKTLNEWSSQINPDLVREFPDVLECTVSHAVEKINPDEREEMKVSAKLFIVESNSSSSTRSAVDMACSVLGVAQLDSVIIASPPIEDGVNLSLEHLQPYWEELENLVQSKKIVAIGTSDLDKTQLEQLYQWAQVKPNSNQVNLASCCVMPPDLTAFAKQFDIQLLTHNDPKELLSEASFQEALQESIPDIQAHEWVPLWLLRYSVIVKSRGIIKSKGYILQAKRRGS

SEQ ID NO: 51660 - protein, 470 aa, Homo sapiens
MCIEINRILLKSKDLLRQLPASNFNSLHFLIVHLKRVVDHAEENKMNSKNLGVIFGPSLIRPRPTTAPITISSLAEYSNQARLVEFLITYSQKIFDGSLQPQDVMCSIGVVDQGCFPKPLLSPEERDIERSMKSLFFSSKEDIHTSESESKIFERATSFEESERKQNALGKCDACLSDKAQLLLDQEAESASQKIEDGKTPKPLSLKSDRSTNNVERHTPRTKIRPVSLPVDRLLLASPPNERNGRNMGNVNLDKFCKNPAFEGVNRKDAATTVCSKFNGFDQQTLQKIQDKQYEQNSLTAKTTMIMPSALQEKGVTTSLQISGDHSINATQPSKPYAEPVRSVREASERRSSDSYPLAPVRAPRTLQPQHWTTFYKPHAPIISIRGNEEKPASPSAAVPPGTDHDPHGLVVKSMPDPDKASACPGQATGQPKEDSEELGLPDVNPMCQRPRLKRMQQFEDLEGEIPQFV

SEQ ID NO: 51661 - protein, 310 aa, Homo sapiens
TGATEPARSRRQLVDMETPAWPRVPRPETAVARTLLLGWVFAQVAGASGTTNTVAAYNLTWKSTNFKTILEWEPKPVNQVYTVQISTKSGDWKSKCFYTTDTECDLTDEIVKDVKQTYLARVFSYPAGNVESTGSAGEPLYENSPEFTPYLETNLGQPTIQSFEQVGTKVNVTVEDERTLVRRNNTFLSLRDVFGKDLIYTLYYWKSSSSGKKTAKTNTNEFLIDVDKGENYCFSVQAVIPSRTVNRKSTDSPVECMGQEKGEFREIFYIIGAVVFVVIILVIILAISLHKCRKAGVGQSWKENSPLNVS

SEQ ID NO: 51662 - protein, 23 aa, Homo sapiens
LGSEPEWSVGGMEATLEQHLEDT

SEQ ID NO: 51663 - protein, 85 aa, Homo sapiens
KARLLKGPIEKELDVDADFVETSELWSLPPHSETATASSTWKKFAANTGKAKDIPIPNLPPLDFPSPELPLMELSEDILKGFMNN

SEQ ID NO: 51664 - protein, 62 aa, Homo sapiens
LNSNAAYEQSHFFNKNYTEDIFPVTPPELEETIRDEKIRRLKQVLREKEAALEEMRKKMHQK

SEQ ID NO: 51665 - protein, 96 aa, Homo sapiens
KRLFSKELRCMMYGFGDDQNPYTESVDILEDLVIEFITEMTHKAMSIGRQGRVQVEDIVFLIRKDPRKFARVKDLLTMNEELKRARKAFDEANYGS

SEQ ID NO: 51666 - protein, 43 aa, Homo sapiens
KGSGHFPFPGTGEHRRGENPPTSCPKALEHSPSGFDINTAVWV

SEQ ID NO: 51667 - protein, 182 aa, Homo sapiens
KYEHDDIVSTVSVLSSGTQAVSGSKDICIKVWDLAQQVVLSSYRAHAAQVTCVAASPHKDSVFLSCSEDNRILLWDTRCPKPASQIGCSAPGYLPTSLAWHPQQSEVFVFGDENGTVSLVDTKSTSCVLSSAVHSQCVTGLVFSPHSVPFLASLSEDCSLAVLDSSLSEFISSSMKIEDWIG

SEQ ID NO: 51668 - protein, 231 aa, Homo sapiens
LHCFGFISCFSQQIYGVVYGNVTFHVPSNVPLKEVLWKKQKDKVAELENSEFRAFSSFKNRVYLDTVSGSLTIYNLTSSDEDEYEMESPNITDTMKFFLYVLESLPSPTLTCALTNGSIEVQCMIPEHYNSHRGLIMYSWDCPMEQCKRNSTSIYFKMENDLPQKIQCTLSNPLFNTTSSIILTTCIPSSGHSRHRYALIPIPLAVITTCIVLYMNGILKCDRKPDRTNSN

SEQ ID NO: 51669 - protein, 76 aa, Homo sapiens
KNKNFPNNQSWNSSLSGPSLLFKSQAKQNYAGAKFSEPPSPSVLPKPPSHWVPVSFNPSDKEIMTFQLKTLLKVQV

SEQ ID NO: 51670 - protein, 8 aa, Homo sapiens
MKFSGHSL

SEQ ID NO: 51671 - protein, 462 aa, Homo sapiens
RMFPAMRVKITGLDPHQQYYIAMDIVPVDNKRYRYVYHSSKWMVAGNADSPVPPRVYIHPDSLASGDTWMRQVVSFDKLKLTNNELDDQGHIILHSMHKYQPRVHVIRKDFSSDLSPTKPVPVGDGVKTFNFPETVFTTVTAYQNQQITRLKIDRNPFAKGFRDSGRNRTGLEAIMETYAFWRPPVRTLTFEDFTTMQKQQGGSTGTSPTTSSTGTPSPSASSHLLSPSCSPPTFHLAPNTFNVGCRESQLCNLNLSDYPPCARSNMAALQSYPGLSDSGYNRLQSGTTSATQPSETFMPQRTPSLISGIPTPPSLPGNSKMEAYGGQLGSFPTSQFQYVMQAGNAASSSSSPHMFGGSHMQQSSYNAFSLHNPYNLYGYNFPTSPRLAASPEKLSASQSTLLCSSPSNGAFGERQYLPSGMEHSMHMISPSPNNQQATNTCDGRQYGAVPGSSSQMSVHMV

SEQ ID NO: 51672 - protein, 74 aa, Homo sapiens
ISSKAMGIMNSFVNDIFERIAGEASRLAHYNKRSTITSREIQTAVRLLLPGKLAKHAVSEGTKAVTKYTSSNIF

SEQ ID NO: 51673 - protein, 9 aa, Homo sapiens
TSSALPLLP

SEQ ID NO: 51674 - protein, 219 aa, Homo sapiens
VAGEVVVDALPYFDQGYEAPGVREAAAALVEEETRRYRPTKNYLSYLTAPDYSAFETDIMRNEFERLAARQPIELLSMKRYELPAPSSGQKNDITAWQECVNNSMAQLEHQAVRIENLELMSQHGCNAWKVYNENLVHMIEHAQKELQKLRKHIQDLNWQRKNMQLTAGSKLREMESNWVSLVSKNYEIERTIVQLENEIYQIKQQHGEANKENIRQDF

SEQ ID NO: 51675 - protein, 9 aa, Homo sapiens
KNTIFHIYL

SEQ ID NO: 51676 - protein, 806 aa, Homo sapiens
LLPPSTLSQDRLDAPPPPAAPLPRWSGPIGVSWGLRAAAAGGAFPRGGRWRRSAPGEDEECGRVRDFVAKLANNTHQHVFDDLRGSVSLSWVGDSTGVILVLTTFHVPLVIMTFGQSKLYRSEDYGKNFKDITDLINNTFIRTEFGMAIGPENSGKVVLTAEVSGGSRGGRIFRSSDFAKNFVQTDLPFHPLTQMMYSPQNSDYLLALSTENGLWVSKNFGGKWEEIHKAVCLAKWGSDNTIFFTTYANGSCKADLGALELWRTSDLGKSFKTIGVKIYSFGLGGRFLFASVMADKDTTRRIHVSTDQGDTWSMAQLPSVGQEQFYSILAANDDMVFMHVDEPGDTGFGTIFTSDDRGIVYSKSLDRHLYTTTGGETDFTNVTSLRGVYITSVLSEDNSIQTMITFDQGGRWTHLRKPENSECDATAKNKNECSLHIHASYSISQKLNVPMAPLSEPNAVGIVIAHGSVGDAISVMVPDVYISDDGGYSWTKMLEGPHYYTILDSGGIIVAIEHSSRPINVIKFSTDEGQCWQTYTFTRDPIYFTGLASEPGARSMNISIWGFTESFLTSQWVSYTIDFKDILERNCEEKDYTIWLAHSTDPEDYEDGCILGYKEQFLRLRKSSVCQNGRDYVVTKQPSICLCSLEDFLCDFGYYRPENDSKCVEQPELKGHDLEFCLYGREEHLTTNGYRKIPGDKCQGGVNPVREVKDLKKKCTSNFLSPEKQNSKSNSVPIILAIVGLMLVTVVAGVLIVKKYVCGGRFLVHRYSVLQQHAEANGVDGVDALDTASHTNKSGYHDDSDEDLLE

SEQ ID NO: 51677 - protein, 21 aa, Homo sapiens
KPLGAHSTLSLLVEAPHLPSF

SEQ ID NO: 51678 - protein, 30 aa, Homo sapiens
ISRWNFPRRLFNTIYSKTKKRNSVFPFIYI

SEQ ID NO: 51679 - protein, 12 aa, Homo sapiens
LGMKCNRTDFTT

SEQ ID NO: 51680 - protein, 805 aa, Homo sapiens
IFEYHCEMSFDPNLLHNNGHNGYPNGTSAALRETGVIEKLLTSYGFIQCSERQARLFFHCSQYNGNLQDLKVGDDVEFEVSSDRRTGKPIAVKLVKIKQEILPEERMNGQVVCAVPHNLESKSPAAPGQSPTGSVCYERNGEVFYLTYTPEDVEGNVQLETGDKINFVIDNNKHTGAVSARNIMLLKKKQARCQGVVCAMKEAFGFIERGDVVKEIFFHYSEFKGDLETLQPGDDVEFTIKDRNGKEVATDVRLLPQGTVIFEDISIEHFEGTVTKVIPKVPSKNQNDPLPGRIKVDFVIPKELPFGDKDTKSKVTLLEGDHVRFNISTDRRDKLERATNIEVLSNTFQFTNEAREMGVIAAMRDGFGFIKCVDRDVRMFFHFSEILDGNQLHIADEVEFTVVPDMLSAQRNHAIRIKKLPKGTVSFHSHSDHRFLGTVEKEATFSNPKTTSPNKGKEKEAEDGIIAYDDCGVKLTIAFQAKDVEGSTSPQIGDKVEFSISDKQRPGQQVATCVRLLGRNSNSKRLLGYVATLKDNFGFIETANHDKEIFFHYSEFSGDVDSLELGDMVEYSLSKGKGNKVSAEKVNKTHSVNGITEEADPTIYSGKVIRPLRSVDPTQTEYQGMIEIVEEGDMKGEVYPFGIVGMANKGDCLQKGESVKFQLCVLGQNAQTMAYNITPLRRATVECVKDQFGFINYEVGDSKKLFFHVKEVQDGIELQAGDEVEFSVILNQRTGKCSACNVWRVCEGPKAVAAPRPDRLVNRLKNITLDDASAPRLMVLRQPRGPDNSMGFGAERKIRQAGVID

SEQ ID NO: 51681 - protein, 72 aa, Homo sapiens
ISSKTMGIMNSFVNDIFERIAGEASRLAHYNKRSTITSREIQTAVRLLLPGELAKHAVSEGTKAVTKYTSSK

SEQ ID NO: 51682 - protein, 15 aa, Homo sapiens
MAASSTKSWWETGEV

SEQ ID NO: 51683 - protein, 18 aa, Homo sapiens
KTLWQLHWVLAEFWKTGM

SEQ ID NO: 51684 - protein, 458 aa, Homo sapiens
IETAYRIWLEPCIRGVCRRNCKGNPNCLVGIGEHIWLGEIDENSFHNIDDPNCERRKKNSFVGLTNLGATCYVNTFLQVWFLNLELRQALYLCPSTCSDYMLGDGIQEEKDYEPQTICEHLQYLFALLQNSNRRYIDPSGFVKALGLDTGQQQDAQEFSKLFMSLLEDTLSKQKNPDVRNIVQQQFCGEYAYVTVCNQCGRESKLLSKFYELELNIQGHKQLTDCISEFLKEEKLEGDNRYFCENCQSKQNATRKIRLLSLPCTLNLQLMRFVFDRQTGHKKKLNTYIGFSEILDMEPYVEHKGGSYVYELSAVLIHRGVSAYSGHYIAHVKDPQSGEWYKFNDEDIEKMEGKKLQLGIEEDLAEPSKSQTRKPKCGKGTHCSRNAYMLVYRLQTQEKPNTTVQVPAFLQELVDRDNSKFEEWCIEMAEMRKQSVDKGKAKHEEVKELYQRLPAGAGL

SEQ ID NO: 51685 - protein, 159 aa, Homo sapiens
KDSAPELNVSSSETEEDKEEAKPDGEKDPDFNQSNGGTKRQKISHQNYIAYQKQVIRRSMRHRKVRGEKALLVSANQTLKELKIQIMHAFSVAPFDQNLSIDGKILSDDCATLGTLGVIPESVILLKADEPIADYAAMDDVMQVCMPEEGFKGTGLLGH

SEQ ID NO: 51686 - protein, 4383 aa, Homo sapiens
LLLALLLHGRLLAVTHGLRAYDGLSLPEDIETVTASQMRWTHSYLSDDEDMLADSISGDDLGSGDLGSGDFQMVYFRALVNFTRSIEYSPQLEDAGSREFREVSEAVVDTLESEYLKIPGDQVVSVVFIKELDGWVFVELDVGSEGNADGAQIQEMLLRVISSGSVASYVTSPQGFQFRRLGTVPQFPRACTEAEFACHSYNECVALEYRCDRRPDCRDMSDELNCEEPVLGISPTFSLLVETTSLPPRPETTIMRQPPVTHAPQPLLPGSVRPLPCGPQEAACRNGHCIPRDYLCDGQEDCEDGSDELDCGPPPPCEPNEFPCGNGHCALKLWRCDGDFDCEDRTDEANCPTKRPEEVCGPTQFRCVSTNMCIPASFHCDEESDCPDRSDEFGCMPPQVVTPPRESIQASRGQTVTFTCVAIGVPTPIINWRLNWGHIPSHPRVTVTSEGGRGTLIIRDVKESDQGAYTCEAMNARGMVFGIPDGVLELVPQRGPCPDGHFYLEHSAACLPCFCFGITSVCQSTRRFRDQIRLRFDQPDDFKGVNVTMPAQPGTPPLSSTQLQIDPSLHEFQLVDLSRRFLVHDSFWALPEQFLGNKVDSYGGSLRYNVRYELARGMLEPVQRPDVVLMGAGYRLLSRGHTPTQPGALNQRQVQFSEEHWVHESGRPVQRAELLQVLQSLEAVLIQTVYNTKMASVGLSDIAMDTTVTHATSHGRAHSVEECRCPIGYSGLSCESCDAHFTRVPGGPYLGTCSGCNCNGHASSCDPVYGHCLNCQHNTEGPQCNKCKAGFFGDAMKATATSCRPCPCPYIDASRRFSDTCFLDTDGQATCDACAPGYTGRRCESCAPGYEGNPIQPGGKCRPVNQEIVRCDERGSMGTSGEACRCKNNVVGRLCNECADGSFHLSTRNPDGCLKCFCMGVSRHCTSSSWSRAQLHGASEEPGHFSLTNAASTHTTNEGIFSPTPGELGFSSFHRLLSGPYFWSLPSRFLGDKVTSYGGELRFTVTQRSQPGSTPLHGQPLVVLQGNNIILEHHVAQEPSPGQPSTFIVPFREQAWQRPDGQPATREHLLMALAGIDTLLIRASYAQQPAESRVSGISMDVAVPEETGQDPALEVEQCSCPPGYRGPSCQDCDTGYTRTPSGLYLGTCERCSCHGHSEACEPETGACQGCQHHTEGPRCEQCQPGYYGDAQRGTPQDCQLCPCYGDPAAGQAAHTCFLDTDGHPTCDACSPGHSGRHCERCAPGYYGNPSQGQPCQRDSQVPGPIGCNCDPQGSVSSQCDAAGQCQCKAQVEGLTCSHCRPHHFHLSASNPDGCLPCFCMGITQQCASSAYTRHLISTHFAPGDFQGFALVNPQRNSRLTGEFTVEPVPEGAQLSFGNFAQLGHESFYWQLPETYQGDKVAAYGGKLRYTLSYTAGPQGSPLSDPDVQITGNNIMLVASQPALQGPERRSYEIMFREEFWRRPDGQPATREHLLMALADLDELLIRATFSSVPLAASISAVSLEVAQPGPSNRPRALEVEECRCPPGYIGLSCQDCAPGYTRTGSGLYLGHCELCECNGHSDLCHPETGACSQCQHNAAGEFCELCAPGYYGDATAGTPEDCQPCACPLTNPENMFSRTCESLGAGGYRCTACEPGYTGQYCEQCGPGYVGNPSVQGGQCLPETNQAPLVVEVHPARSIVPQGGSHSLRCQVSGSPPHYFYWSREDGRPVPSGTQQRHQGSELHFPSVQPSDAGVYICTCRNLHQSNTSRAELLVTEAPSKPITVTVEEQRSQSVRPGADVTFICTAKSKSPAYTLVWTRLHNGKLPTRAMDFNGILTIRNVQLSDAGTYVCTGSNMFAMDQGTATLHVQASGTLSAPVVSIHPPQLTVQPGQLAEFRCSATGSPTPTLEWTGGPGGQLPAKAQIHGGILRLPAVEPTDQAQYLCRAHSSAGQQVARAVLHVHGGGGPRVQVSPERTQVHAGRTVRLYCRAAGVPSATITWRKEGGSLPPQARSERTDIATLLIPAITTADAGFYLCVATSPAGTAQARIQVVVLSASDASPPPVKIESSSPSVTEGQTLDLNCVVAGSAHAQVTWYRRGGSLPPHTQVHGSRLRLPQVSPADSGEYVCRVENGSGPKEASITVSVLHGTHSGPSYTPVPGSTRPIRIEPSSSHVAEGQTLDLNCVVPGQAHAQVTWHKRGGSLPARHQTHGSLLRLHQVTPADSGEYVCHVVGTSGPLEASVLVTIEASVIPGPIPPVRIESSSSTVAEGQTLDLSCVVAGQAHAQVTWYKRGGSLPARHQVRGSRLYIFQASPADAGQYVCRASNGMEASITVTVTGTQGANLAYPAGSTQPIRIEPSSSQVAEGQTLDLNCVVPGQSHAQVTWHKRGGSLPVRHQTHGSLLRLYQASPADSGEYVCRVLGSSVPLEASVLVTIEPAGSVPALGVTPTVRIESSSSQVAEGQTLDLNCLVAGQAHAQVTWHKRGGSLPARHQVHGSRLRLLQVTPADSGEYVCRVVGSSGTQEASVLVTIQQRLSGSHSQGVAYPVRIESSSASLANGHTLDLNCLVASQAPHTITWYKRGGSLPSRHQIVGSRLRIPQVTPADSGEYVCHVSNGAGSRETSLIVTIQGSGSSHVPSVSPPIRIESSSPTVVEGQTLDLNCVVARQPQAIITWYKRGGSLPSRHQTHGSHLRLHQMSVADSGEYVCRANNNIDALEASIVISVSPSAGSPSAPGSSMPIRIESSSSHVAEGETLDLNCVVPGQAHAQVTWHKRGGSLPSHHQTRGSRLRLHHVSPADSGEYVCRVMGSSGPLEASVLVTIEASGSSAVHVPAPGGAPPIRIEPSSSRVAEGQTLDLKCVVPGQAHAQVTWHKRGGNLPARHQVHGPLLRLNQVSPADSGEYSCQVTGSSGTLEASVLVTIEPSSPGPIPAPGLAQPIYIEASSSHVTEGQTLDLNCVVPGQAHAQVTWYKRGGSLPARHQTHGSQLRLHLVSPADSGEYVCRAASGPGPEQEASFTVTVPPSEGSSYRLRSPVISIDPPSSTVQQGQDASFKCLIHDGAAPISLEWKTRNQELEDNVHISPNGSIITIVGTRPSNHGTYRCVASNAYGVAQSVVNLSVHGPPTVSVLPEGPVWVKVGKAVTLECVSAGEPRSSARWTRISSTPAKLEQRTYGLMDSHAVLQISSAKPSDAGTYVCLAQNALGTAQKQVEVIVDTGAMAPGAPQVQAEEAELTVEAGHTATLRCSATGSPAPTIHWSKLRSPLPWQHRLEGDTLIIPRVAQQDSGQYICNATSPAGHAEATIILHVESPPYATTVPEHASVQAGETVQLQCLAHGTPPLTFQWSRVGSSLPGRATARNELLHFERAAPEDSGRYRCRVTNKVGSAEAFAQLLVQGPPGSLPATSIPAGSTPTVQVTPQLETKSIGASVEFHCAVPSDRGTQLRWFKEGGQLPPGHSVQDGVLRIQNLDQSCQGTYICQAHGPWGKAQASAQLVIQALPSVLINIRTSVQTVVVGHAVEFECLALGDPKPQVTWSKVGGHLRPGIVQSGGVVRIAHVELADAGQYRCTATNAAGTTQSHVLLLVQALPQISMPQEVRVPAGSAAVFPCIASGYPTPDISWSKLDGSLPPDSRLENNMLMLPSVRPQDAGTYVCTATNRQGKVKAFAHLQVPERVVPYFTQTPYSFLPLPTIKDAYRKFEIKITFRPDSADGMLLYNGQKRVPGSPTNLANRQPDFISFGLVGGRPEFRFDAGSGMATIRHPTPLALGHFHTVTLLRSLTQGSLIVGDLAPVNGTSQGKFQGLDLNEELYLGGYPDYGAIPKAGLSSGFIGCVRELRIQGEEIVFHDLNLTAHGISHCPTCRDRPCQNGGQCHDSESSSYVCVCPAGFTGSRCEHSQALHCHPEACGPDATCVNRPDGRGYTCRCHLGRSGLRCEEGVTVTTPSLSGAGSYLALPALTNTHHELRLDVEFKPLAPDGVLLFSGGKSGPVEDFVSLAMVGGHLEFRYELGSGLAVLRSAEPLALGRWHRVSAERLNKDGSLRVNGGRPVLRSSPGKSQGLNLHTLLYLGGVEPSVPLSPATNMSAHFRGCVGEVSVNGKRLDLTYSFLGSQGIGQCYDSSPCERQPCQHGATCMPAGEYEFQCLCRDGFKGDLCEHEENPCQLREPCLHGGTCQGTRCLCLPGFSGPRCQQGSGHGIAESDWHLEGSGGNDAPGQYGAYFHDDGFLAFPGHVFSRSLPEVPETIELEVRTSTASGLLLWQGVEVGEAGQGKDFISLGLQDGHLVFRYQLGSGEARLVSEDPINDGEWHRVTALREGRRGSIQVDGEELVSGRSPGPNVAVNAKGSVYIGGAPDVATLTGGRFSSGITGCVKNLVLHSARPGAPPPQPLDLQHRAQAGANTRPCPS

SEQ ID NO: 51687 - protein, 29 aa, Homo sapiens
LPAVPLLRRPCCRPGCPHLFSGHRRPPHL

SEQ ID NO: 51688 - protein, 17 aa, Homo sapiens
VCTGPLQCPCSPRAPCG

SEQ ID NO: 51689 - protein, 334 aa, Homo sapiens
IRHHPDFEVFVFDVGQKTWKSYDWSQITTVATFGKYDSELMCYAHSKGARVVLKGDVSLKDIIDPAFRASWIAQKLNLAKTQYMDGINIDIEQEVNCLSPEYDALTALVKETTDSFHREIEGSQVTFDVAWSPKNIDRRCYNYTGIADACDFLFVMSYDEQSQIWSECIAAANAPYNQTLTGYNDYIKMSINPKKLVMGVPWYGYDYTCLNLSEDHVCTIAKVPFRGAPCSDAAGRQVPYKTIMKQINSSISGNLWDKDQRAPYYNYKDPAGHFHQVWYDNPQSISLKATYIQNYRLRGIGMWNANCLDYSGDAVAKQQTEEMWEVLKPKLLQR

SEQ ID NO: 51690 - protein, 279 aa, Homo sapiens
KGEVSPKLPEYICPRCESGFIEEVTDDSSFLGGGGSRIDNTTTTHFAELWGHLDHTMFFQDFRPFLSSSPLDQDNRANERGHQTHTDFWGARPPRLPLGRRYRSRGSSRPDRSPAIEGILQHIFAGFFANSAIPGSPHPFSWSGMLHSNPGDYAWGQTGLDAIVTQLLGQLENTGPPPADKEKITSLPTVTVTQEQVDMGLECPVCKEDYTVEEEVRQLPCNHFFHSSCIVPWLELHDTCPVCRKSLNGEDSTRQSQSTEASASNRFSNDSQLHDRWTF

SEQ ID NO: 51691 - protein, 104 aa, Homo sapiens
MRGRSEQFEKTAELLKEKMEHLIGACRDKEAKIKELLKKLEQLSEEVLAIRGENARLALQLQDSQKNHEEIISTYRNHLLNAARGYMEHEVYNILLQILSMEEE

SEQ ID NO: 51692 - protein, 226 aa, Homo sapiens
RHGASPELQKQIRQLESHLSLGRKLLRLGNSADALESAKRAVHLSDVVLRFCITVSHLNRALYFACDNVLWAGKSGLAPRVDQEKWAQRSFRYYLFSLIMNLSRDAYEIRLLMEQESSACSRRLKGSGGGVPGGSETGGLGGPGTPGGGLPQLALKLRLQVLLLARVLRGHPPLLLDVVRNACDLFIPLDKLGLWRCGPGIVGLCGLVSSILSILTLIYPWLRLKP

SEQ ID NO: 51693 - protein, 392 aa, Homo sapiens
IMVMFKKIKSFEVVFNDPEKVYGSGEKVAGRVIVEVCEVTRVKAVRILACGVAKVLWMQGSQQCKQTSEYLRYEDTLLLEDQPTGENEMVIMRPGNKYEYKFGFELPQGPLGTSFKGKYGCVDYWVKAFLDRPSQPTQETKKNFEVVDLVDVNTPDLMAPVSAKKEKKVSCMFIPDGRVSVSARIDRKGFCEGDEISIHADFENTCSRIVVPKAAIVARHTYLANGQTKVLTQKLSSVRGNHIISGTCASWRGKSLRVQKIRPSILGCNILRVEYSLLIYVSVPGSKKVILDLPLVIGSRSGLSSRTSSMASRTSSEMSWVDLNIPDTPEAPPCYMDVIPEDHRLESPTTPLLDDMDGSQDSPIFMYAPEFKFMPPPTYTEVDPCILNNNVQ

SEQ ID NO: 51694 - protein, 272 aa, Homo sapiens
LRPALLWALLALWLCCATPAHALQCRDGYEPCVNEGMCVTYHNGTGYCKCPEGFLGEYCQHRDPCEKNRCQNGGTCVAQAMLGKATCRCASGFTGEDCQYSTSHPCFVSRPCLNGGTCHMLSRDTYECTCQVGFTGKECQWTDACLSHPCANGSTCTTVANQFSCKCLTGFTGQKCETDVNECDIPGHCQHGGTCLNLPGSYQCQCLQGFTGQYCDSLYVPCAPSPCVNGGTCRQTGDFTFECNCLPETVRRGTELWERDREVWNGKEHDEN

SEQ ID NO: 51695 - protein, 50 aa, Homo sapiens
KLAFAYLEDLHSEFDEQHGKKVPTVSQPYSFIEFDTFIQKTKKLYIDSCA

SEQ ID NO: 51696 - protein, 12 aa, Homo sapiens
TRRSTLSIGFKG

SEQ ID NO: 51697 - protein, 98 aa, Homo sapiens
KGGKGLGKGGAKRHRKVLRDNIQGITKPAIRRLARRGGVKRISGLIYEETRGVLKVFLENVIRDAVTYTEHAKRKTVTAMDVVYALKRQGRTLYGFGG

SEQ ID NO: 51698 - protein, 99 aa, Homo sapiens
KKRKRSRKESYSIYVYKVLKQVHPDTGISSKAMGIMNSFVNDIFERIAGEASRLAHYNKRSTITSREIQTAVRLLLPGELAKHAVSEGTKAVTKYTSSK

SEQ ID NO: 51699 - protein, 419 aa, Homo sapiens
ISERNQDATVYVGGLDEKVSEPLLWELFLQAGPVVNTHMPKDRVTGQHQGYGFVEFLSEEDADYAIKIMNMIKLYGKPIRVNKASAHNKNLDVGANIFIGNLDPEIDEKLLYDTFSAFGVILQTPKIMRDPDTGNSKGYAFINFASFDASDAAIEAMNGQYLCNRPITVSYAFKKDSKGERHGSAAERLLAAQNPLSQADRPHQLFADAPPPPSAPNPVVSSLGSGLPPPGMPPPGSFPPPVPPPGALPPGIPPAMPPPPMPPGAAGHGPPSAGTPGAGHPGHGHSHPHPFPPGGMPHPGMSQMQLAHHGPHGLGHPHAGPPGSGGQPPPRPPPGMPHPGPPPMGMPPRGPPFGSPMGHPGPMPPHGMRGPPPLMPPHGYTGPPRPPPYGYQRGPLPPPRPTPRPPVPPRGPLRGPLPQ

SEQ ID NO: 51700 - protein, 71 aa, Homo sapiens
VTHRPALYRDPVTDIPYATARAFKIIREAYKKYITAHGLPPTASALGPGPPPPEPLPGSGPRALRQKIVIK

SEQ ID NO: 51701 - protein, 48 aa, Homo sapiens
IRNLKERFHMSMTEEQLQLLVEQMVDGSMRSITTKLYDGFQYLTNGIM

SEQ ID NO: 51702 - protein, 332 aa, Homo sapiens
ISRMWGLKVLLLPVVSFALYPEEILDTHWELWKKTHRKQYNNKVDEISRRLIWEKNLKYISIHNLEASLGVHTYELAMNHLGDMTSEEVVQKMTGLKVPLSHSRSNDTLYIPEWEGRAPDSVDYRKKGYVTPVKNQGQCGSCWAFSSVGALEGQLKKKTGKLLNLSPQNLVDCVSENDGCGGGYMTNAFQYVQKNRGIDSEDAYPYVGQEESCMYNPTGKAAKCRGYREIPEGNEKALKRAVARVGPVSVAIDASLTSFQFYSKGVYYDESCNSDNLNHAVLAVGYGIQKGNKHWIIKNSWGENWGNKGYILMARNKNNACGIANLASFPKM

SEQ ID NO: 51703 - protein, 773 aa, Homo sapiens
LGPAIASGNSGPGIQGGGAIVQRAIKRRPGLDFDDDGEGNSKFLRCDDDQMSNDKERFARSDDEQSSADKERLARENHSEIERRRRNKMTAYITELSDMVPTCSALARKPDKLTILRMAVSHMKSLRGTGNTSTDGSYKPSFLTDQELKHLILEAADGFLFIVSCETGRVVYVSDSVTPVLNQPQSEWFGSTLYDQVHPDDVDKLREQLSTSENALTGRILDLKTGTVKKEGQQSSMRMCMGSRRSFICRMRCGSSSVDPVSVNRLSFVRNRCRNGLGSVKDGEPHFVVVHCTGYIKAWPPAGVSLPDDDPEAGQGSKFCLVAIGRLQVTSSPNCTDMSNVCQPTEFISRHNIEGIFTFVDHRCVATVGYQPQELLGKNIVEFCHPEDQQLLRDSFQQVVKLKGQVLSVMFRFRSKNQEWLWMRTSSFTFQNPYSDEIEYIICTNTNVKNSSQEPRPTLSNTIQRPQLGPTANLPLEMGSGQLAPRQQQQQTELDMVPGRDGLASYNHSQVVQPVTTTGPEHSKPLEKSDGLFAQDRDPRFSEIYHNINADQSKGISSSTVPATQQLFSQGNTFPPTPRPAENFRNSGLAPPVTIVQPSASAGQMLAQISRHSNPTQGATPTWTPTTRSGFSAQQVATQATAKTRTSQFGVGSFQTPSSFSSMSLPGAPTASPGAAAYPSLTNRGSNFAPETGQTAGQFQTRTAEGVGVWPQWQGQQPHHRSSSSEQHVQQPPAQQPGQPEVFQEMLSMLGDQSNSYNNEEFPDLTMFPPFSE

SEQ ID NO: 51704 - protein, 2463 aa, Homo sapiens
LWALLALWLCCAAPAHALQCRDGYEPCVNEGMCVTYHNGTGYCKCPEGFLGEYCQHRDPCEKNRCQNGGTCVAQAMLGKATCRCASGFTGEDCQYSTSHPCFVSRPCLNGGTCHMLSRDTYECTCQVGFTGKECQWTDACLSHPCANGSTCTTVANQFSCKCLTGFTGQKCETDVNECDIPGHCQHGGTCLNLPGSYQCQCPQGFTGQYCDSLYVPCAPSPCVNGGTCRQTGDFTFECNCLPGFEGSTCERNIDDCPNHRCQNGGVCVDGVNTYNCRCPPQWTGQFCTEDVDECLLQPNACQNGGTCANRNGGYGCVCVNGWSGDDCSENIDDCAFASCTPGSTCIDRVASFSCMCPEGKAGLLCHLDDACISNPCHKGALCDTNPLNGQYICTCPQGYKGADCTEDVDECAMANSNPCEHAGKCVNTDGAFHCECLKGYAGPRCEMDINECHSDPCQNDATCLDKIGGFTCLCMPGFKGVHCELEINECQSNPCVNNGQCVDKVNRFQCLCPPGFTGPVCQIDIDDCSSTPCLNGAKCIDHPNGYECQCATGFTGVLCEENIDNCDPDPCHHGQCQDGIDSYTCICNPGYMGAICSDQIDECYSSPCLNDGRCIDLVNGYQCNCQPGTSGVNCEINFDDCASNPCIHGICMDGINRYSCVCSPGFTGQRCNIDIDECASNPCRKGATCINGVNGFRCICPEGPHHPSCYSQVNECLSNPCIHGNCTGGLSGYKCLCDAGWVGINCEVDKNECLSNPCQNGGTCDNLVNGYRCTCKKGFKGYNCQVNIDECASNPCLNQGTCFDDISGYTCHCVLPYTGKNCQTVLAPCSPNPCENAAVCKESPNFESYTCLCAPGWQGQRCTIDIDECISKPCMNHGLCHNTQGSYMCECPPGFSGMDCEEDIDDCLANPCQNGGSCMDGVNTFSCLCLPGFTGDKCQTDMNECLSEPCKNGGTCSDYVNSYTCKCQAGFDGVHCENNINECTESSCFNGGTCVDGINSFSCLCPVGFTGSFCLHEINECSSHPCLNEGTCVDGLGTYRCSCPLGYTGKNCQTLVNLCSRSPCKNKGTCVQKKAESQCLCPSGWAGAYCDVPNVSCDIAASRRGVLVEHLCQHSGVCINAGNTHYCQCPLGYTGSYCEEQLDECASNPCQHGATCSDFIGGYRCECVPGYQGVNCEYEVDECQNQPCQNGGTCIDLVNHFKCSCPPGTRGLLCEENIDDCARGPHCLNGGQCMDRIGGYSCRCLPGFAGERCEGDINECLSNPCSSEGSLDCIQLTNDYLCVCRSAFTGRHCETFVDVCPQMPCLNGGTCAVASNMPDGFICRCPPGFSGARCQSSCGQVKCRKGEQCVHTASGPRCFCPSPRDCESGCASSPCQHGGSCHPQRQPPYYSCQCAPPFSGSRCELYTAPPSTPPATCLSQYCADKARDGVCDEACNSHACQWDGGDCSLTMENPWANCSSPLPCWDYINNQCDELCNTVECLFDNFECQGNSKTCKYDKYCADHFKDNHCDQGCNSEECGWDGLDCAADQPENLAEGTLVIVVLMPPEQLLQDARSFLRALGTLLHTNLRIKRDSQGELMVYPYYGEKSAAMKKQRMTRRSLPGEQEQEVAGSKVFLEIDNRQCVQDSDHCFKNTDAAAALLASHAIQGTLSYPLVSVVSESLTPERTQLLYLLAVAVVIILFIILLGVIMAKRKRKHGSLWLPEGFTLRRDASNHKRREPVGQDAVGLKNLSVQVSEANLIGTGTSEHWVDDEGPQPKKVKAEDEALLSEEDDPIDRRPWTQQHLEAADIRRTPSLALTPPQAEQEVDVLDVNVRGPDGCTPLMLASLRGGSSDLSDEDEDAEDSSANIITDLVYQGASLQAQTDRTGEMALHLAARYSRADAAKRLLDAGADANAQDNMGRCPLHAAVAADAQGVFQILIRNRVTDLDARMNDGTTPLILAARLAVEGMVAELINCQADVNAVDDHGKSALHWAAAVNNVEATLLLLKNGANRDMQDNKEETPLFLAAREGSYEAAKILLDHFANRDITDHMDRLPRDVARDRMHHDIVRLLDEYNVTPSPPGTVLTSALSPVICGPNRSFLSLKHTPMGKKSRRPSAKSTMPTSLPNLAKEAKDAKGSRRKKSLSEKVQLSESSVTLSPVDSLESPHTYVSDTTSSPMITSPGILQASPNPMLATAAPPAPVHAQHALSFSNLHEMQPLAHGASTVLPSVSQLLSHHHIVSPGSGSAGSLSRLHPVPVPADWMNRMEVNETQYNEMFGMVLAPAEGTHPGIAPQSRPPEGKHITTPREPLPPIVTFQLIPKGSIAQPAGAPQPQSTCPPAVAGPLPTMYQIPEMARLPSVAFPTAMMPQQDGQVAQTILPAYHPFPASVGKYPTPPSQHSYASSNAAERTPSHSGHLQGEHPYLTPSPESPDQWSSSSPHSASDWSDVTTSPTPGGAGGGQRGPGTHMSEPPHNNMQVYA

SEQ ID NO: 51705 - protein, 24 aa, Homo sapiens
VGAAGALAVLRGPRACVEMAMNPV

SEQ ID NO: 51706 - protein, 250 aa, Homo sapiens
LQCRDGYEPCVNEGMCVTYHNGTGYCKCPEGFLGEYCQHRDPCEKNRCQNGGTCVAQAMLGKATCRCASGFTGEDCQYSTSHPCFVSRPCLNGGTCHMLSRDTYECTCQVGFTGKECQWTDACLSHPCANGSTCTTVANQFSCKCLTGFTGQKCETDVNECDIPGHCQHGGTCLNLPGSYQCQCPQGFTGQYCDSLYVPCAPSPCVNGGTCRQTGDFTFECNCLPETVRRGTELWERDRQVWNGKEHDEN

SEQ ID NO: 51707 - protein, 12 aa, Homo sapiens
TRRSTLSIGFKG

SEQ ID NO: 51708 - protein, 94 aa, Homo sapiens
TSHTAAFLSDTKDRGPPVQSQIWRSGEKVPFVQTYSLRAFEKPPQVQTQALRDFEKHLNDLKKENFSLKLLIYFLEERMQQKYEASREDIYKRG

SEQ ID NO: 51709 - protein, 424 aa, Homo sapiens
LLHLLEEPTSMEVQPMTEELLKQQKLNSHETTITQQSVSDSHLAELQEKIQQTEATNKILQEKLNEMSYELKCAQELSQKQDGTIQNLKETLKSRERETEELYQVIEGQNDTMAKLREMLHQSQLGQLHSSEGTSPAQQQVALLDLQSALFCSQLEIQKLQRVVRQKERQLADAKQCVQFVEAAAHESEQQKEASWKHNQELRKALQQLQEVLQNKSQQLRAWEAEKYNEIRTQEQNIQHLNHSLSHKEQLLQEFRELLQYRDNSDKTLEANEMLLEKLRQRIRDKAVALERAIDEKFSALEEKEKELRQLRLAVRERDHDLERLRDVLSSNEATMQTMESLLRAKGLEVEQLSTTCQNLQWLKEEMETKFSRWQKEQESIIQQLQTSLHDRNKEVEARLHATLLCKLGPGQSEIAEELCQRLQ

SEQ ID NO: 51710 - protein, 144 aa, Homo sapiens
MEIQGLLQSVSTREQESQAAAEKLVQALMERNSELQALHQYLGGRDSLMSQAPISNQQAEVTPTGRLGKQTDQGSMQIPSRDDSTSLTAKEDVSIPRSTLGDLDTVAGLEKELSNAKEELELMAKKERESQLYPSNMGEKVSAF

SEQ ID NO: 51711 - protein, 75 aa, Homo sapiens
INSPTRNADMQEELIASLEEQLKLSGEHSESSTPRPRSSPEETIEPESLHQLFEGESETESFYGFEEADLDLMEI

SEQ ID NO: 51712 - protein, 140 aa, Homo sapiens
LAVYASPENKKLFEEEKLLRQEGKLEKIQTKAGEATVKFLKSCRLEVGMKNNVKWELNPEIVARHFFKNLGVVVAPHTLKLPEEPITRWGEYWCEVTVNGLDTVRVPMSVVNFEKPKTKRYKYWLAQQAAKAMAPTSPQI

SEQ ID NO: 51713 - protein, 107 aa, Homo sapiens
LILTAVMACPLEKALDVMVSTFHKYSGKEGDKFKLNKSELKELLTRELPSFLGKRTDEAAFQKLMSNLDSNRDNEVDFQEYCVFLSCIAMMCNEFFEGFPDKQPRKK

SEQ ID NO: 51714 - protein, 367 aa, Homo sapiens
RPFVPHIPFDFYLCEMAFPRVKPAPDETSFSEALLKRNQDLAPNSAEQASILSLVTKINNVIDNLIVAPGTFEVQIEEVRQVGSYKKGTMTTGHNVADLVVILKILPTLEAVAALGNKVVESLRAQDPSEVLTMLTNETGFEISSSDATVKILITTVPPNLRKLDPELHLDIKVLQSALAAIRHARWFEENASQSTVKVLIRLLKDLRIRFPGFEPLTPWILDLLGHYAVMNNPTRQPLALNVAYRRCLQILAAGLFLPGSVGITDPCESGNFRVHTVMTLEQQDMVCYTAQTLVRILSHGGFRKILGQEGDASYLASEISTWDGVIVTPSEKAYEKPPEKKEGEEEEENTEEPPQGEEEESMETQE

SEQ ID NO: 51715 - protein, 21 aa, Homo sapiens
VTGAKDAVTTTVTGAKDSSQG

SEQ ID NO: 51716 - protein, 15 aa, Homo sapiens
VHSANQKIQDAQDKL

SEQ ID NO: 51717 - protein, 452 aa, Homo sapiens [sequence omitted]

SEQ ID NO: 51718 - protein, 16 aa, Homo sapiens
LPDPAVEESFRSDRLQ

SEQ ID NO: 51719 - protein, 179 aa, Homo sapiens
IIRFAEDNFNNTYISTIGIDFKIRTVDIEGKKIKLQVWDTAGQERFKTITTAYYRGAMGIILVYDITDEKSFENIQNWMKSIKENASAGVERLLLGNKCDMEAKRKVQKEQADKLAREHGIRFFETSAKSSMNVDEAFSSLARDILLKSGGRRSGNGNKPPSTDLKTCDKKNTNKCSLG

SEQ ID NO: 51720 - protein, 197 aa, Homo sapiens
LNRRIQLVEEELDRAQERLATALQKLEEAEKAADESERGMKVIENRALKDEEKMELQEIQLKEAKHIAEEADRKYEEVARKLVIIEGDLERTEERAELAESRCREMDEQIRLMDQNLKCLSAAEEKYSQKEDKYEEEIKILTDKLKEAETRAEFAERSVAKLEKTIDDLEDKLKCTKEEHLCTQRMLDQTLLDLNEM

SEQ ID NO: 51721 - protein, 228 aa, Homo sapiens
LLFIFVKRQIMRFAMKSRRGPHVPVGHNAPKDLKEEIDIRLSRVQDIKYEPQLLADDDARLLQLETQGNQSCYNYLYRMKALDAIRTSEIPFHSEGRHPRSLMGKNFRSYLLDLRNTSTPFKGVRKALIDTLLDGYETARYGTGVFGQNEYLRYQEALSELATAVKARIGSSQRHHQSAAKDLTQSPEVSPTTIQVTYLPSSQKSKRAKHFLELKSFKDNYNTLESTL

SEQ ID NO: 51722 - protein, 34 aa, Homo sapiens
RIEASKFLRQREREGQAVDASTSLSSDWNKNRVR

SEQ ID NO: 51723 - protein, 376 aa, Homo sapiens
LLESIFHRGHERFRIASACLDELSCEFLLAGAGGAGAGAAPGPHLPPRGSVPGDPVRIHCNITESYPAVPPIWSVESDDPNLAAVLERLVDIKKGNTLLLQHLKRIISDLCKLYNLPQHPDVEMLDQPLPAEQCTQEDVSSEDEDEEMPEDTEDLDHYEMKEEEPAEGKKSEDDGIGKENLAILEKIKKNQRQDYLNGAVSGSVQATDRLMKELRDIYRSQSFKGGNYAVELVNDSLYDWNVKLLKVDQDSALHNDLQILKEKEGADFILLNFSFKDNFPFDPPFVRVVSPVLSGGYVLGGGAICMELLTKQGWSSAYSIESVIMQISATLVKGKARVQFGANKSQYSLTRAQQSYKSLVQIHEKNGWYTPPKEDG

SEQ ID NO: 51724 - protein, 1187 aa, Homo sapiens
LLKQIEFLKGQLPEAPVIGKQTPSLPPSLPGLRPRFPVLLASSTRGRQVDIRGVPRGVHLRSQGLQRGFQHPSPRGRSLPQRGVDCLSSHFQELSIYQDQEQRILKFLEELGEGKATTAHDLSGKLGTPKKEINRVLYSLAKKGKLQKEAGTPPLWKIAVSTQAWNQHSGVVRPDGHSQGAPNSDPSLEPEDRNSTSVSEDLLEPFIAVSAQAWNQHSGVVRPDSHSQGSPNSDPGLEPEDSNSTSALEDPLEFLDMAEIKEKICDYLFNVSDSSALNLAKNIGLTKARDINAVLIDMERQGDVYRQGTTPPIWHLTDKKRERMQIKRNTNSVPETAPAAIPETKRNAEFLTCNIPTSNASNNMVTTEKVENGQEPVIKLENRQEARPEPARLKPPVHYNGPSKAGYVDFENGQWATDDIPDDLNSIRAAPGEFRAIMEMPSFYSHGLPRCSPYKKLTECQLKNPISGLLEYAQFASQTCEFNMIEQSGPPHEPRFKFQVVINGREFPPAEAGSKKVAKQDAAMKAMTILLEEAKAKDSGKSEESSHYSTEKESEKTAESQTPTPSATSFFSGKSPVTTLLECMHKLGNSCEFRLLSKEGPAHEPKFQYCVAVGAQTFPSVSAPSKKVAKQMAAEEAMKALHGEATNSMASDNQPEGMISESLDNLESMMPNKVRKIGELVRYLNTNPVGGLLEYARSHGFAAEFKLVDQSGPPHEPKFVYQAKVGGRWFPAVCAHSKKQGKQEAADAALRVLIGENEKAERMGFTEVTPVTGASLRRTMLLLSRSPEAQPKTLPLTGSTFHDQIAMLSHRCFNTLTNSFQPSLLGRKILAAIIMKKDSEDMGVVVSLGTGNRCVKGDSLSLKGETVNDCHAEIISRRGFIRFLYSELMKYNSQTAKDSIFEPAKGGEKLQIKKTVSFHLYISTAPCGDGALFDKSCSDRAMESTESRHYPVFENPKQGKLRTKVENGEGTIPVESSDIVPTWDGIRLGERLRTMSCSDKILRWNVLGLQGALLTHFLQPIYLKSVTLGYLFSQGHLTRAICCRVTRDGSAFEDGLRHPFIVNHPKVGRVSIYDSKRQSGKTKETSVNWCLADGYDLEILDGTRGTVDGPRNELSRVSKKNIFLLFKKLCSFRYRRDLLRLSYGEAKKAARDYETAKNYFKKGLKDMGYGNWISKPQEEKNFYLCPV

SEQ ID NO: 51725 - protein, 81 aa, Homo sapiens
VSDIQWFREAYGAVTQTVRVVALEQSRQQRGWVFTPGVDDAESECGLDNFGDFDWVIENHGVEQRLEEQLENLIEFIRSRL

SEQ ID NO: 51726 - protein, 491 aa, Homo sapiens
IVGAAMPDSGPLPLLQDMNKLSGGGGRRTRVEGGQLGGEEWTRHGSFVNKPTRGWLHPNDKVMGPGVSYLVRYMGCVEVLQSMRALDFNTRTQVTREAISLVCEAVPGAKGATRRRKPCSRPLSSILGRSNLKFAGMPITLTVSTSSLNLMAADCKQIIANHHMQSISFASGGDPDTAEYVAYVAKDPVNQRACHILECPEGLAQDVISTIGQAFELRFKQYLRNPPKLVTPHDRMAGFDGSAWDEEEEEPPDHQYYNDFPGKEPPLGGVVDMRLREGAAPGAARPTAPNAQTPSHLGATLPVGQPVGGDPEVRKQMPPPPPCPAGRELFDDPSYVNVQNLDKARQAVGGAGPPNPAINGSAPRDLFDMKPFEDALRVPPPPQSVSMAEQLRGEPWFHGKLSRREAEALLQLNGDFLVRESTTTPGQYVLTGLQSGQPKHLLLVDPEGVVRTKDHRFESVSHLISYHMDNHLPIISAGSELCLQQPVERKL

SEQ ID NO: 51727 - protein, 135 aa, Homo sapiens
VVGTGTSLALSSLLSLLLFAGMQMYSRQLASTEWLTIQGGLLGSGLFVFSLTAFNNLENLVFGKGFQAKIFPEILLCLLLALFASGLIHRVCVTTCFIFSMVGLYYINKISSTLYQAAAPVLTPAKVTGKSKKRN

SEQ ID NO: 51728 - protein, 49 aa, Homo sapiens
IDTSMRGGRLGVFCFSQENIIWSNLQYRCNDTVPEDFEPFRRQLLQGRV

SEQ ID NO: 51729 - protein, 169 aa, Homo sapiens
LDAYAEHKLQFWAVTAENEPSAGLLSGYPFQCLGFTPEHQRDFIARDLGPTLANGTHHNVRLLMLDDQRLLLPHWAKVVLTDPEAAKYVHGIAVHWYLDFLAPAKATLRETHHLFPNTMLFASEACVGSKFWEQSVRLGSWDRGMQYSHSIITNLLYHVVGWTDWNPSL

SEQ ID NO: 51730 - protein, 88 aa, Homo sapiens
TFYKQPMFYHLGHFSKFIPEGSQRVGLVASQKNDPDAVALMHPDGSAVVVVLNRSSKDVPLTIKDPAVGFLETISPGYSIHTYLWRRQ

SEQ ID NO: 51731 - protein, 559 aa, Homo sapiens
VDPLSFRDSGTPVVFSSSNDPEGMEFSSPSREECPKPLSRVSIMAGSLTGLLLLQAVSWASGARPCIPKSFGYSSVVCVCNATYCDSFDPPTFPALGTFSRYESTRSGRRMELSMGPIQANHTGTGLLLTLQPEQKFQKVKGFGGAMTDAAALNILALSPPAQNLLLKSYFSEEGIGYNIIRVPMASCDFSIRTYTYADTPDDFQLHNFSLPEEDTKLKIPLIHRALQLAQRPVSLLASPWTSPTWLKTNGAVNGKGSLKGQPGDIYHQTWARYFVKFLDAYAEHKLQFWAVTAENEPSAGLLSGYPFQCLGFTPEHQRDFIARDLGPTLANSTHHNVRLLMLDDQRLLLPHWAKVVLTDPEAAKYVHGIAVHWYLDFLAPAKATLGETHRLFPNTMLFASEACVGSKFWEQSVRLGSWDRGMQYSHSIITNLLYHVVGWTDWNLALNPEGGPNWVRNFVDSPIIVDITKDTFYKQPMFYHLGHFSKFIPEGSQRVGLVASQKNDLDAVALMHPDGSAVVVVLNRSSKDVPLTIKDPAVGFLETISPGYSIHTYLWRRQ

SEQ ID NO: 51732 - protein, 26 aa, Homo sapiens
LWSSLHLMTLRGWSFQVLPERNVPSL

SEQ ID NO: 51733 - protein, 45 aa, Homo sapiens
LIESMLEYEPAKRLTLGEALQHPFFARLRAEPPNKLWDSSRDISR

SEQ ID NO: 51734 - protein, 32 aa, Homo sapiens
IQESLNNSSPGDLEEVVKMEPEDATEEISGFL

SEQ ID NO: 51735 - protein, 39 aa, Homo sapiens
KEPLASDSRNSHELGPCPEDGSDAPLEDSTADAAASPGP

SEQ ID NO: 51736 - protein, 41 aa, Homo sapiens
IKPGGPYVGKRVQIRKAPQAVSDTVPERKRSTPMNPANPIR

SEQ ID NO: 51737 - protein, 45 aa, Homo sapiens
VRFQQQLEQLNSMGFINREANLQALIATGGDINAAIERLLGSQLS

SEQ ID NO: 51738 - protein, 324 aa, Homo sapiens
VATNTPHSTLSVNWSLLLSPEPDGGLMVLPKDSIQFSSALVFTRLLEFDSTNVSDTAAKPLGRPYPPYSLADFSWNNITDSLDPATLSATFQGHPMNDPTRTFANGSLAFRVQAFSRSSRPAQPPRLLHTADTCQLEVALIGASPRGNRSLFGLEVATLGQGPDCPSMQEQHSIDDEYAPAVFQLDQLLWGSLPSGFAQWRPVAYSQKPGGRESALPCQASPLHPALAYSLPQSPIVRAFFGSQNNFCAFNLTFGASTGPGYWDQHYLSWSMLLGVGFPPVDGLSPLVLGIMAVALGAPGLMLLGGGLVLLLHHKKYSEYQSIN

SEQ ID NO: 51739 - protein, 550 aa, Homo sapiens
LHRVAMMGHRPVLVLSQNTKRESGRKVQSGNINAAKTIADIIRTCLGPKSMMKMLLDPMGGIVMTNDGNAILREIQVQHPAAKSMIEISRTQDEEVGDGTTSVIILAGEMLSVAEHFLEQQMHPTVVISAYRKALDDMISTLKKISIPVDISDSDMMLNIINSSITTKAISRWSSLACNIALDAVKMVQFEENGRKEIDIKKYARVEKIPGGIIEDSCVLRGVMINKDVTHPRMRRYIKNPRIVLLDSSLEYKKGESQTDIEITREEDFTRILQMEEEYIQQLCEDIIQLKPDVVITEKGISDLAQHYLMRANITAIRRVRKTDNNRIARACGARIVSRPEELREDDVGTGAGLLEIKKIGDEYFTFITDCKDPKACTILLRGASKEILSEVERNLQDAMQVCRNVLLDPQLVPGGGASEMAVAHALTEKSKAMTGVEQWPYRAVAQALEVIPRTLIQNCGASTIRLLTSLRAKHTQENCETWGVNGETGTLVDMKELGIWEPLAVKLQTYKTAVETAVLLLRIDDIVSGHKKKGDDQSRQGGAPDAGQE

SEQ ID NO: 51740 - protein, 42 aa, Homo sapiens
TGDRDDGRGDFGPTLGLLRPAPEPEAEGSAVKRMRLDTWTLK

SEQ ID NO: 51741 - protein, 34 aa, Homo sapiens
VLRQQVEDLKNKNLLLRAQLRHHGLEVVIKNDSN

SEQ ID NO: 51742 - protein, 4 aa, Homo sapiens
VDEN

SEQ ID NO: 51743 - protein, 65 aa, Homo sapiens
VDSYNQRNANISYAFDTHTNTQIVPRLLFENEYSYTTQIDYNPKDRLLYAWDNGHQVTYHVIFAY

SEQ ID NO: 51744 - protein, 200 aa, Homo sapiens
LLALLVSPARGRGGRDHGDWDEASRLPPLPPREDAARVARFVTHVSDWGALATISTLEAVRGRPFADVLSLSDGPPGAGSGVPYFYLSPLQLSVSNLQENPYATLTMTLAQTNFCKKHGFDPQSPLCVHIMLSGTVTKVNETEMDIAKHSLFIRHPEMKTWPSSHNWFFAKLNITNIWVLDYFGGPKIVTPEEYYNVTVQ

SEQ ID NO: 51745 - protein, 80 aa, Homo sapiens
LNKQDEFGALESVKAASELYSPLSGEVTEINEALAENPGLVNKSCYEDGWLIKMTLSNPSELDELMSEEAYEKYIKSIEE

SEQ ID NO: 51746 - protein, 277 aa, Homo sapiens
RRPRRCPPCAPLCCGRCWRSGCAARPPRMCRDGYEPCVNEGMCVTYHNGTGYCKCPEGFLGEYCQHRDPCEKNRCQNGGTCVAQAMLGKATCRCASGFTGEDCQYSTSHPCFVSRPCLNGGTCHMLSRDTYECTCQVGFTGKECQWTDACLSHPCANGSTCTTVANQFSCKCLTGFTGQKCETDVNECDIPGHCQHGGICLNLPGSYQCQCLQGFTGQYCDSLYVPCAPSPCVNGGTCRQTGDFTFECNCLPETVRRGTELWERDREVWNGKEHDEN

SEQ ID NO: 51747 - protein, 12 aa, Homo sapiens
TRRSTLSIGFKG

SEQ ID NO: 51748 - protein, 50 aa, Homo sapiens; identical to SEQ ID NO: 51336

SEQ ID NO: 51749 - protein, 523 aa, Homo sapiens
LRPPLMFLRAGLAALSPLLRSLRPSPVAAMSTGTFVVSQPLNYRGGARVEPADASGTEKAFEPATGRVIATFTCSGEKEVNLAVQNAKAAFKIWSQKSGMERCRILLEAARIIREREDEIATMECINNGKSIFEARLDIDISWQCLEYYAGLAASMAGEHIQLPGGSFGYTRREPLGVCVGIGAWNYPFQIASWKSAPALACGNAMVFKPSPFTPVSALLLAEIYSEAGVPPGLFNVVQGGAATGQFLCQHPDVAKVSFTGSVPTGMKIMEMSAKGIKPVTLELGGKSPLIIFSDCDMNNAVKGALMANFLTQGQVCCNGTRVFVQKEILDKFTEEVVKQTQRIKIGDPLLEDTRMGPLINRPHLERVLGFVKVAKEQGAKVLCGGDIYVPEDPKLKDGYYMRPCVLTNCRDDMTCVKEEIFGPVMSILSFDTEAEVLERANDTTFGLAAGVFTRDIQRAHRVVAELQAGTCFINNYNVSPVELPFGGYKKSGFGRENGRVTIEYYSQLKTVCVEMGDVESAF

SEQ ID NO: 51750 - protein, 138 aa, Homo sapiens
KFKRHLNDDDVTGSVKSERRNLLEDDSDEEEDFFLRGPSGPRFGPRNDKIKHVQNQVDEVIDVMQENITKVIERGERLDELQDKSESLSDNATAFSNRSKQLRRQMWWRGCKIKAIMALVAAILLLVIIILIVMKYRT

SEQ ID NO: 51751 - protein, 19 aa, Homo sapiens
LVEHQHSMEFPGRSHFKTS

SEQ ID NO: 51752 - protein, 49 aa, Homo sapiens
VGAVLFALLLMSISCLCPFYLIRLQLFKENIHGPWDEAEIKEDLSRFLS

SEQ ID NO: 51753 - protein, 196 aa, Homo sapiens
RGPAYGLSREVQQKIEKQYDADLEQILIQWITTQCRKDVGRPQPGRENFQNWLKDGTVLCELINALYPEGQAPVKKIQASTMAFKQMEQISQFLQAAERYGINTTDIFQTVDLWEGKNMACVQRTLMNLGGLAVARDDGLFSGDPNWFPKKSKENPRNFSDNQLQEGKNVIGLQMGTNRGASQAGMTGYGMPRQIL

SEQ ID NO: 51754 - protein, 58 aa, Homo sapiens
IGQAMWLAPAYVLEFQGKNTFLFIWLAGLFFLLINCSILIQIISHYKEEPLTERIKYD

SEQ ID NO: 51755 - protein, 37 aa, Homo sapiens
LDTLFVPLLVGTGVALVTGATVLGTITCCFMKRLRKR

SEQ ID NO: 51756 - protein, 773 aa, Homo sapiens
KNPTWWSSSKSSQRLQGEWNSSMSEEELTKAMEGLGMDEGDGEGNILPIMQSIMQNLLSKDVLYPSLKEITEKYPEWLQSHRESLPPEQFEKYQEQHSVMCKICEQFEAETPTDSETTQKARFEMVLDLMQQLQDLGHPPKELAGEMLTWLFFCGSQWVYGPWLTYVGWLQQTSFKMSSKGSSTDGRTDLANGSLSSSPEEMSGAEEGRETSSGIEVEASDLSLSLTGDDGGPNRTSTESRGTDTESSGEDKDSDSMEDTGHYSINDENRVHDRSEEEEEEEEEEEEEQPRRRVQRKRANRDQDSSDDERALEDWVSSETSALPRPRWQALPALRERELGSSARFVYEACGARVFVQRFRLQHGLEGHTGCVNTLHFNQRGTWLASGSDDLKVVVWDWVRRQPVLDFESGHKSNVFQAKFLPNSGDSTLAMCARDGQVRVAELSATQCCKNTKRVAQHKGASHKLALEPDSPCTFLSAGEDAVVFTIDLRQDRPASKLVVTKEKEKKVGLYTIYVNPANTHQFAVGGRDQFVRIYDQRKIDENENNGVLKKFCPHHLVNSESKANITCLVYSHDGTELLASYNDEDIYLFNSSHSDGAQYVKRYKGHRNNATVKGVNFYGPKSEFVVSGSDCGHIFLWEKSSCQIIQFMEGDKGGVVNCLEPHPHLPVLATSGLDHDVKIWAPTAEASTELTGLKDVIKKNKRERDEDSLHQTDLFDSHMLWFLMHHLRQRRHHRRWREPGVGATDADSDESPSSSDTSDEEEGPDRVQCMPS

SEQ ID NO: 51757 - protein, 71 aa, Homo sapiens
LLAARAIVAIENPADVSVISSRNTGQRAVLKFAAATGATPIAGHFTPGTFTNQIQAAFWEPWLLMVTDPRG

SEQ ID NO: 51758 - protein, 50 aa, Homo sapiens
LGILVFGIWFAYSRGHFDRTKKGTSSKKVIYSQPSARSEGEFKQTSSFLV

SEQ ID NO: 51759 - protein, 123 aa, Homo sapiens
LGSLLRTFKQMVPSSASGQVRSHYVDWRMWRDVKRRKMAYEYADERLRINSLRKNTILPKILQDVADEEIAALPRDSCPVRIRNRCVMTSRPRGVKRRWRLSRIVFRHLADHGQLSGIQRATW

SEQ ID NO: 51760 - protein, 287 aa, Homo sapiens
IKVYEYDTVIQDAVDIHYPENEMTCNSKISCISWSSYHKNLLASSDYEGTVILWDGFTGQRSKVYQEHEKRCWSVDFNLMDPKLLASGSDDAKVKLWSTNLDNSVASIEAKANVCCVKFSPSSRYHLAFGCADHCVHYYDLRNTKQPIMVFKGHRKAVSYAKFVSGEEIVSASTDSQLKLWNVGKPYCLRSFKGHINEKNFVGLASNGDYIACGSENNSLYLYYKGLSKTLLTFKFDTVKSVLDKDRKEDDTNEFVSAVCWRALPDGESNVLIAANSQGTIKVLELV

SEQ ID NO: 51761 - protein, 38 aa, Homo sapiens
MWQTEQSHNAFSAGLKTAHRPELPLYYLKLHRWLVKFN

SEQ ID NO: 51762 - protein, 23 aa, Homo sapiens
IATMKRKATNKINPTHRRLFFLF

SEQ ID NO: 51763 - protein, 498 aa, Homo sapiens
ILQPHFKMKTFTWTLGVLFFLLVDTGHCRGGQFKIKKINQRRYPRATDGKEEAKKCAYTFLVPEQRITGPICVNTKGQDASTIKDMITRMDLENLKDVLSRQKREIDVLQLVVDVDGNIVNEVKLLRKESRNMNSRVTQLYMQLLHEIIRKRDNSLELSQLENKILNVTTEMLKMATRYRELEVKYASLTDLVNNQSVMITLLEEQCLRIFSRQDTHVSPPLVQVVPQHIPNSQQYTPGLLGGNEIQRDPGYPRDLMPPPDLATSPTKSPFKIPPVTFINEGPFKDCQQAKEAGHSVSGIYMIKPENSNGPMQLWCENSLDPGGWTVIQKRTDGSVNFFRNWENYKKGFGNIDGEYWLGLENIYMLSNQDNYKLLIELEDWSDKKVYAEYSSFRLEPESEFYRLRLGTYQGNAGDSMMWHNGKQFTTLDRDKDMYAGNCAHFHKGGWWYNACAHSNLNGVWYRGGHYRSKHQDGIFWAEYRGGSYSLRAVQMMIKPID

SEQ ID NO: 51764 - protein, 119 aa, Homo sapiens
LMAIRDAGFEISAMQMFNMDRVNVEEFYEVYKGVVTEYHDMVTEMYSGPCVAMEIQQNNATKTFREFCGPADPEIARHLRPGTLRAIFGKTKIQNAVHCTDLPEDGLLEVQYFFKILDN

SEQ ID NO: 51765 - protein, 34 aa, Homo sapiens
KFVEERDVFKTRILKIIDEGLKRFIIEITFKFPG

SEQ ID NO: 51766 - protein, 775 aa, Homo sapiens
IDVHPSEKALIVHYEVEATILGEMGDPMLGERKECQKIIRLKSLNANTDITSLARKVVEECKLIHPSKLNEVEQLLYYLQNRRDSLSGKEKKEKSSKPKDPPPFEGMEIDEVANINDMDEYIELLYEDIPDKVRGSALILQLARNPDNLEELLLNETALGALARVLREDWKQSVELATNIIYIFFCFSSFSQFHGLITHYKIGALCMNIIDHELKRHELWQEELSKKKKAVDEDPENQTLRKDYEKTFKKYQGLVVKQEQLLRVALYLLLNLAEDTRTELKMRNKNIVHMLVKALDRDNFELLILVVSFLKKLSIFMENKNDMVEMDIVEKLVKMIPCEHEDLLNITLRLLLNLSFDTGLRNKMVQVGLLPKLTALLGNDNYKQIAMCVLYHISMDDRFKSMFAYTDCIPQLMKMLFECSDERIDLELISFCINLAANKRNVQLICEGNGLKMLMKRALKFKDPLLMKMIRNISQHDGPTKNLFIDYVGDLAAQISNDEEEEFVIECLGTLANLTIPDLDWELVLKEYKLVPYLKDKLKPGAAEDDLVLEVVIMIGTVSMDDSCAALLAKSGIIPALIELLNAQQEDDEFVCQIIYVFYQMVFHQATRDVIIKETQAPAYLIDLMHDKNNEIRKVCDNTLDIIAEYDEEWAKKIQSEKFRWHNSQWLEMVESRQMDESEQYLYGDDRIEPYIHEGDILERPDLFYNSDGLIASEGAISPDFFNDYHLQNGDVVGQHSFPGSLGMDGFGQPVGILGRPATAYGFRPDEPYYYGYGS

SEQ ID NO: 51767 - protein, 36 aa, Homo sapiens
LQELQVSSAAAGVPGTNPVLNNLLSCVQEISDVVQR

SEQ ID NO: 51768 - protein, 32 aa, Homo sapiens
IYALFPGSMGSMSLLGLGTRRKQDIFTRKTKY

SEQ ID NO: 51769 - protein, 137 aa, Homo sapiens
ISSLYHEETIREEDKNIFDYCRENNIDHITKAIKSKNVDVNVKDEEGRALLHWACDRGHKELVTVLLQHRADINCQDNEGQTALHYASACEFLDIVELLLQSGADPTLRDQDGCLPEEVTGCKTVSLVLQRHTTGKA

SEQ ID NO: 51770 - protein, 50 aa, Homo sapiens
KLPRLKLEVMLEDNVCLPSNGKLYTKVINWVQRSIWENGDSLEELMEEVY

SEQ ID NO: 51771 - protein, 55 aa, Homo sapiens
MMGNMTSPRSNAGIATVGNTIYAVGGFDGNEFLNTVEVYNLESNEWSPYTKIFQF

SEQ ID NO: 51772 - protein, 65 aa, Homo sapiens
IMIKFNRLNHLTTDFNVIVEALSKSKAELMKISEDKTKIRRSSSKPLPEVTDEYKNDVKKQICLY

SEQ ID NO: 51773 - protein, 242 aa, Homo sapiens
KEHKIMVGSTDDPSVFSLPDSKLPGDKEFVSWQQDLEDSVKPTQQARPTVIRWSEGGKEVFISGSFNNWSTKIPLIKSHNDFVAILDLPEGEHQYKFFVDGQWVHDPSEPVVTSQLGTINNLIHVKKSDFEVFDALKLDSMESSETSCRDLSSSPPGPYGQEMYAFRSEERFKSPPILPPHLLQVILNKDTNISCDPALLPEPNHVMLNHLYALSIKDSVMVLSATHRYKKKYVTTLLYKPI

SEQ ID NO: 51774 - protein, 5 aa, Homo sapiens
IIAYF

SEQ ID NO: 51775 - protein, 295 aa, Homo sapiens
IWSLEPENFEKLKPVHGLIFLFKWQPGEEPAGSVVQDSRLDTIFFAKQVINNACATQAIVSVLLNCTHQDVHLGETLSEFKEFSQSFDAAMKGLALSNSDVIRQVHNSFARQQMFEFDTKTSAKEEDAFHFVSYVPVNGRLYELDGLREGPIDLGACNQDDWISAVRPVIEKRIQKYSEGEIRFNLMAIVSDRKMIYEQKIAELQRQLAEEEPMDTDQGNSMLSAIQSEVAKNQMLIEEEVQKLKRYKIENIRRKHNYLPFIMELLKTLAEHQQLIPLVEKAKEKQNAKKAQETK

SEQ ID NO: 51776 - protein, 111 aa, Homo sapiens
TAPVNQIQETISDNCVVIFSKTSCSYCTMAKKLFHDMNVNYKVVELDLLEYGNQFQDALYKMTGERTVPRIFVNGTFIGGATDTHRLHKEGKLLPLVHQCYLKKSKRKEFQ

SEQ ID NO: 51777 - protein, 41 aa, Homo sapiens
IVHPVRPEQMLDPREQSYLGTLLGLDSTTGVQNISTNEHHS

SEQ ID NO: 51778 - protein, 49 aa, Homo sapiens
MTFITNSNGEVDHRVRTSVSDFSGYTNMMSDVSEPCSTRVKTPTSQSYR

SEQ ID NO: 51779 - protein, 882 aa, Homo sapiens
KLGNQVLEMFDHAYGNYMEHAYPADELMPLTCRGRVRGQEPSRGDVDDALGKFSLTLIDSLDTLVVLNKTKEFEDAVRKVLRDVNLDNDVVVSVFETNIRVLGGLLGGHSLAIMLKEKGEYMQWYNDELLQMAKQLGYKLLPAFNTTSGLPYPRINLKFGIRKPEARTGTETDTCTACAGTLILEFAALSRFTGATIFEEYARKALDFLWEKRQRSSNLVGVTINIHTGDWVRKDSGVGAGIDSYYEYLLKAYVLLGDDSFLERFNTHYDAIMRYISQPPLLLDVHIHKPMLNARTWMDALLAFFPGLQVLKGDIRPAIETHEMLYQVIKKHNFLPEAFTTDFRVHWAQHPLRPEFAESTYFLYKATGDPYYLEVGKTLIENLNKYARVPCGFAAMKDVRTGSHEDRMDSFFLAEMFKYLYLLFADKEDIIFDIEDYIFTTEAHLLPLWLSTTNQSISKKNTTSEYTELDDSNFDWTCPNTQILFPNDPLYAQSIREPLKNVVDKSCPRGIIRVEESFRSGAKPPLRARDFMATNPEHLEILKKMGVSLIHLKDGRVQLVQHAIQAASSIDAEDGLRFMQEMIELSSQQQKEQQLPPRAVQIVSHPFFGRVVLTAGPAQFGLDLSKHKETRGFVASSKPSNGCSELTNPEAVMGKIALIQRGQCMFAEKARNIQNAGAIGGIVIDDNEGSSSDTAPLFQMAGDGKDTDDIKIPMLFLFSKEGSIILDAIREYEEVEVLLSDKAKDRDPEMENEEQPSSENDSQNQSGEQISSSSQEVDLVDQESSEENSLNSHPESLSLADMDNAASISPSEQTSNPTENHETTNLNGECTDLDNQLQEQSETEEDSNPNVSWGKKVQPIDSILADWNEDIEAFEMMEKDEL

SEQ ID NO: 51780 - protein, 24 aa, Homo sapiens
LSHKDDVKEGEGGQESFPELPSEE

SEQ ID NO: 51781 - protein, 47 aa, Homo sapiens
RDGCRFQKRIQETEDAIGYCLTFEHRERMFNRLQGTCFKGLNVLKQC

SEQ ID NO: 51782 - protein, 1193 aa, Homo sapiens
RCPKCLAQECSKPQEAFGFEQAARDYTLRTFGEMADAFKSDYFNMPVHMVPTELVEKEFWRLVSTIEEDVTVEYGADIASKEFGSGFPVRDGKIKLSPEEEEYLDSGWNLNNMPVMEQSVLAHITADICGMKLPWLYVGMCFSSFCWHIEDHWSYSINYLHWGEPKTWYGVPGYAAEQLENVMKKLAPELFVSQPDLLHQLVTIMNPNTLMTHEVPVYRTNQCAGEFVITFPRAYHSGFNQGFNFAEAVNFCTVDWLPLGRQCVEHYRLLHRYCVFSHDEMICKMASKADVLDVVVASTVQKDMAIMIEDEKALRETVRKLGVIDSERMDFELLPDDERQCVKCKTTCFMSAISCSCKPGLLVCLHHVKELCSCPPYKYKLRYRYTLDDLYPMMNALKLRAESYNEWALNVNEALEAKINKKKSLVSFKALIEESEMKKFPDNDLLRHLRLVTQDAEKCASVAQQLLNGKRQTRYRSGGGKSQNQLTVNELRQFVTQLYALPCVLSQTPLLKDLLNRVEDFQQHSQKLLSEETPSAAELQDLLDVSFEFDVELPQLAEMRIRLEQARWLEEVQQACLDPSSLTLDDMRRLIDLGVGLAPYSAVEKAMARLQELLTVSEHWDDKAKSLLKARPRHSLNSLATAVKEIEEIPAYLPNGAALKDSVQRARDWLQDVEGLQAGGRVPVLDTLIELVTRGRSIPVHLNSLPRLETLVAEVQAWKECAVNTFLTENSPYSLLEVLCPRCDIGLLGLKRKQRKLKEPLPNGKKKSTKLESLSDLERALTESKETASAMATLGEARLREMEALQSLRLANEGKLLSPLQDVDIKICLCQKAPAAPMIQCELCRDAFHTSCVAVPSISQGLRIWLCPHCRRSEKPPLEKILPLLASLQRIRVRLPEGDALRYMIERTVNWQHRAQQLLSSGNLKFVQDRVGSGLLYSRWQASAGQVSDTNKVSQPPGTTSFSLPDDWDNRTSYLHSPFSTGRSCIPLHGVSPEVNELLMEAQLLQVSLPEIQELYQTLLAKPSPAQQTDRSSPVRPSSEKNDCCRGKRDGINSLERKLKRRLEREGLSSERWERVKKMRTPKKKKIKLSHPKDMNNFKLERERSYELVRSAETHSLPSDTSYSEQEDSEDEDAICPAVSCLQPEGDEVDWVQCDGSCNQWFHQVCVGVSPEMAEKEDYICVRCTVKDAPSRK

SEQ ID NO: 51783 - protein, 334 aa, Homo sapiens
IANPPKAEEEQTCPVPQEEEEEVRVLTLPLQAHHAMEKMEEFVYKVWEGRWRVIPYDVLPDWLKDNDYLLHGHRPPMPSFRACFKSIFRIHTETGNIWTHLLGFVLFLFLGILTMLRPNMYFMAPLQEKVVFGMFFLGAVLCLSFSWLFHTVYCHSEKVSRTFSKLDYSGIALLIMGSFVPWLYYSFYCSPQPRLIYLSIVCVLGISAIIVAQWDRFATPKHRQTRAGVFLGLGLSGVVPTMHFTIAEGFVKATTVGQMGWFFLMAVMYITGAGLYAARIPERFFPGKFDIWFQSHQIFHVLVVAAAFVHFYGVSNLQEFRYGLEGGCTDDTLL

SEQ ID NO: 51784 - protein, 289 aa, Homo sapiens
LVTLLGLAVGSYLVRRSRRPQVTLLDPNEKYLLRLLDKTTVSHNTKRFRFALPTAHHTLGLPVGKHIYLSTRIDGSLVIRPYTPVTSDEDQGYVDLVIKVYLKGVHPKFPEGGKMSQYLDSLKVGDVVEFRGPSGLLTYTGKGHFNIQPNKKSPPEPRVAKKLGMIAGGTGITPMLQLIRAILKVPEDPTQCFLLFANQTEKDIILREDLEELQARYPNRFKLWFTLDHPPKDWAYSKGFVTADMIREHLPAPGDDVLVLLCGPPPMVQLACHPNLDKLGYSQKMRFTY

SEQ ID NO: 51785 - protein, 186 aa, Homo sapiens
LISMKLLSLVAVVGCLLVPPAEANKSSEDIRCKCICPPYRNISGHIYNQNVSQKDCNCLHVVEPMPVPGHDVEAYCLLCECRYEERSTTTIKVIIVIYLSVVGALLLYMAFLMLVDPLIRKPDAYTEQLHNEEENEDARSMAAAAASLGGPRANTVLERVEGAQQRWKLQVQEQRKTVFDRHKMLS

SEQ ID NO: 51786 - protein, 191 aa, Homo sapiens
LGAPTPPHRQPGAEGRGVGARSSQGAGGQRARPASPGRQNPALRGREGRRARRSLELSANLGAPMTAAATATVLKEGVLEKRSGGLLQLWKRKRCVLTERGLQLFEAKGTGGRPKELSFARIKAVECVESTGRHIYFTLVTEGGGEIDFRCPLEDPGWNAQITLGLVKFKNQQAIQTVRARQSLGTGTLVS

SEQ ID NO: 51787 - protein, 24 aa, Homo sapiens
LRCGAERGAAPAAAWSFPRTSGRP

SEQ ID NO: 51788 - protein, 601 aa, Homo sapiens
KMSRVAKYRRQVSEDPDIDSLLETLSPEEMEELEKELDVVDPDGSVPVGLRQRNQTEKQSTGVYNREAMLNFCEKETKKLMQREMSMDESKQVETKTDAKNGEERGRDASKKALGPRRDSDLGKEPKRGGLKKSFSRDRDEAGGKSGEKPKEEKIIRGIDKGRVRAAVDKKEAGKDGRGEERAVATKKEEEKKGSDRNTGLSRDKDKKREEMKEVAKKEDDEKVKGERRNTDTRKEGEKMKRAGGNTDMKKEDEKVKRGTGNTDTKKDDEKVKKNEPLHEKEAKDDSKTKTPEKQTPSGPTKPSEGPAKVEEEAAPSIFDEPLERVKNNDPEMTEVNVNNSDCITNEILVRFTEALEFNTVVKLFALANTRADDHVAFAIAIMLKANKTITSLNLDSNHITGKGILAIFRALLQNNTLTELRFHNQRHICGGKTEMEIAKLLKENTTLLKLGYHFELAGPRMTVTNLLSRNMDKQRQKRLQEQRQAQEAKGEKKDLLEVPKAGAVAKGSPKPSPQPSPKPSPKNSPKKGGAPAAPPPPPPPLAPPLIMENLKNSLSPATQRKMGDKVLPAQEKNSRDQLLAAIRSSNLKQLKKVEVPKLLQ

SEQ ID NO: 51789 - protein, 183 aa, Homo sapiens
LFNKLLDWFKALFWKEEMELTLVGLQYSGKTTFVNVIASGQFNEDMIPTVGFNMRKITKGNVTIKLWDIGGQPRFRSMWERYCRGVSAIVYMVDAADQEKIEASKNELHNLLDKPQLQGIPVLVLGNKRDLPGALDEKELIEKMNLSAIQDREICCYSISCKEKDNIDITLQWLIQHSKSRRS

SEQ ID NO: 51790 - protein, 34 aa, Homo sapiens
RPLLGIVQPMLQGIMNRLCKSNSEQPNRGLDDST

SEQ ID NO: 51791 - protein, 101 aa, Homo sapiens
IPGRFTKEAGTLAYYEICDFLRGATVHRILGQQVPYATKGNQWVGYDDQESVKSKVQYLKDRQLAGAMVWALDLDDFQGSFCGQDLRFPLTNAIKDALAAT

SEQ ID NO: 51792 - protein, 380 aa, Homo sapiens
LRDKMQWTSLLLLAGLFSLSQAQYEDDPHWWFHYLRSQQSTYYDPYDPYPYETYEPYPYGVDEGPAYTYGSPSPPDPRDCPQECDCPPNFPTAMYCDNRNLKYLPFVPSRMKYVYFQNNQITSIQEGVFDNATGLLWIALHGNQITSDKVGRKVFSKLRHLERLYLDHNNLTRMPGPLPRSLRELHLDHNQISRVPNNALEGLENLTALYLQHNEIQEVGSSMRGLRSLILLDLSYNHLRKVPDGLPSALEQLYMEHNNVYTVPDSYFRGAPKLLYVRLSHNSLTNNGLASNTFNSSSLLELDLSYNQLQKIPPVNTNLENLYLQGNRINEFSISSFCTVVDVVNFSKLQVLRLDGNEIKRSAMPADAPLCLRLASLIEI

SEQ ID NO: 51793 - protein, 28 aa, Homo sapiens
LLSRQSSPDRRWVGMPHFSLKRVRIQRG

SEQ ID NO: 51794 - protein, 162 aa, Homo sapiens
VDFALKVLQWSDYEIVRLQLWDIAGQERFTSMTRLYYRDASACVIMFDVTNATTFSNSQRWKQDLDSKLTLPNGEPVPCLLLANKCDLSPWAVSRDQIDRFSKENGFTGWTETSVKENKNINEAMRVLIEKMMRNSTEDIMSLSTQGDYINLQTKSSSWSCC

SEQ ID NO: 51795 - protein, 29 aa, Homo sapiens
LGDLLGTGLLALSFHVLWLIGDRDTDVGD

SEQ ID NO: 51796 - protein, 159 aa, Homo sapiens
LGASILSKIIILGDTTLKLQIWDTGGQERFRSMVSTFYKGSDGCILAFDVTDLESFEALDIWRGDVLAKIVPMEQSYPMVLLGNKIDLADRKVPQEVAQGWCREKDIPYFEVSAKNDINVVQAFEMLASRALSRYQSILENHLTESIKLSPDQSRSRCC

SEQ ID NO: 51797 - protein, 35 aa, Homo sapiens
IDLFTDAIKLNPCLAILYAKRASVFVKLQKPNAAI

SEQ ID NO: 51798 - protein, 69 aa, Homo sapiens
IKERIERVKKAREEHERAQREEEARRQSGAQYGSFPGGFPGGMPGNFPGGMPGMGGGMPGMNGQNAWNQ

SEQ ID NO: 51799 - protein, 485 aa, Homo sapiens
VLEVVVSRVTSSLAMLSDSFHMLSDVLALVVALVAERFARRTHATQKNTFGWIRAEVMGALVNAIFLTGLCFAILLEAIERFIEPHEMQQPLVVLGVGVAGLLVNVLGLCLFHHHSGFSQDSGHGHSHGGHGHGHGLPKGPRVKSTRPGSSDINVAPGEQGPDQEETNTLVANTSNSNGLKLDPADPENPRSGDTVEVQVNGNLVREPDHMELEEDRAGQLNMRGVFLHVLGDALGSVIVVVNALVFYFSWKGCSEGDFCVNPCFPDPCKAFVEIINSTHASVYEAGPCWVLYLDPTLCVVMVCILLYTTYPLLKESALILLQTVPKQIDIRNLIKELRNVEGVEEVHELHVWQLAGSRIIATAHIKCEDPTSYMEVAKTIKDVFHNHGIHATTIQPEFASVGSKSSVVPCELACRTQCALKQCCGTLPQAPSGKDAEKTPAVSISCLELSNNLEKKPRRTKAENIPAVVIEIKNMPNKQPESSL

SEQ ID NO: 51800 - protein, 2397 aa, Homo sapiens
IEAAAQASGSCWSSPFFSASTPSAAATGVPGPTDMAAVLQQVLERTELNKLPKSVQNKLEKFLADQQSEIDGLKGRHEKFKVESEQQYFEIEKRLSHSQERLVNETRECQSLRLELEKLNNQLKALTEKNKELEIAQDRNIAIQSQFTRTKEELEAEKRDLIRTNERLSQELEYLTEDVKRLNEKLKESNTTKGELQLKLDELQASDVSVKYREKRLEQEKELLHSQNTWLNTELKTKTDELLALGREKGNEILELKCNLENKKEEVSRLEEQMNGLKTSNEHLQKHVEDLLTKLKEAKEQQASMEEKFHNELNAHIKLSNLYKSAADDSEAKSNELTRAVEELHKLLKEAGEANKAIQDHLLEVEQSKDQMEKEMLEKIGRLEKELENANDLLSATKRKGAILSEEELAAMSPTAAAVAKIVKPGMKLTELYNAYVETQDQLLLEKLENKRINKYLDEIVKEVEAKAPILKRQREEYERAQKAVASLSVKLEQAMKEIQRLQEDTDKANKQSSVLERDNRRMEIQVKDLSQQIRVLLMELEEARGNHVIRDEEVSSADISSSSEVISQHLVSYRNIEELQQQNQRLLVALRELGETREREEQETTSSKITELQLKLESALTELEQLRKSRQHQMQLVDSIVRQRDMYRILLSQTTGVAIPLHASSLDDVSLASTPKRPSTSQTVSTPAPVPVIESTEAIEAKAALKQLQEIFENYKKEKAENEKIQNEQLEKLQEQVTDLRSQNTKISTQLDFASKRYEMLQDNVEGYRREITSLHERNQKLTATTQKQEQIINTMTQDLRGANEKLAVAEVRAENLKKEKEMLKLSEVRLSQQRESLLAEQRGQNLLLTNLQTIQGILERSETETKQRLSSQIEKLEHEISHLKKKLENEVEQRHTLTRNLDVQLLDTKRQLDTETNLHLNTKELLKNAQKEIATLKQHLSNMEVQVASQSSQRTGKGQPSNKEDVDDLVSQLRQTEEQVNDLKERLKTSTSNVEQYQAMVTSLEESLNKEKQVTEEVRKNIEVRLKESAEFQTQLEKKLMEVEKEKQELQDDKRRAIESMEQQLSELKKTLSSVQNEVQEALQRASTALSNEQQARRDCQEQAKIAVEAQNKYERELMLHAADVEALQAAKEQVSKMASVRQHLEETTQKAESQLLECKASWEERERMLKDEVSKCVCRCEDLEKQNRLLHDQIEKLSDKVVASVKEGVQGPLNVSLSEEGKSQEQILEILRFIRREKEIAETRFEVAQVESLRYRQRVELLERELQELQDSLNAEREKVQVTAKTMAQHEELMKKTETMNVVMETNKMLREEKERLEQDLQQMQAKVRKLELDILPLQEANAELSEKSGMLQAEKKLLEEDVKRWKARNQHLVSQQKDPDTEEYRKLLSEKEVHTKRIQQLTEEIGRLKAEIARSNASLTNNQNLIQSLKEDLNKVRTEKETIQKDLDAKIIDIQEKVKTITQVKKIGRRYKTQYEELKAQQDKVMETSAQSSGDHQEQHVSVQEMQELKETLNQAETKSKSLESQVENLQKTLSEKETEARNLQEQTVQLQSELSRLRQDLQDRTTQEEQLRQQITEKEEKTRKAIVAAKSKIAHLAGVKDQLTKENEELKQRNGALDQQKDELDVRITALKSQYEGRISRLERELREHQERHLEQRDEPQEPSNKVPEQQRQITLKTTPASGERGIASTSDPPTANIKPTPVVSTPSKVTAAAMAGNKSTPRASIRPMVTPATVTNPTTTPTATVMPTTQVESQEAMQSEGPVEHVPVFGSTSGSVRSTSPNVQPSISQPILTVQQQTQATAFVQPTQQSHPQIEPANQELSSNIVEVVQSSPVERPSTSTAVFGTVSATPSSSLPKRTREEEEDSTIEASDQVSDDTVEMPLPKKLKSVTPVGTEEEVMAEESTDGEVETQVYNQDSQDSIGEGVTQGDYTPMEDSEETSQSLQIDLGPLQSDQQTTTSSQDGQGKGDDVIVIDSDDEEEDDDENDGEHEDYEEDEEDDDDDEDDTGMGDEGEDSNEGTGSADGNDGYEADDAEGGDGTDPGTETEESMGGGEGNHRAADSQNSGEGNTGAAESSFSQEVSREQQPSSASERQAPRAPQSPRRPPHPLPPRLTIHAPPQELGPPVQRIQMTRRQSVGRGLQLTPGIGGMQQHFFDDEDRTVPSTPTLVVPHRTDGFAEAIHSPQVAGVPRFRFGPPEDMPQTSSSHSDLGQLASQGGLGMYETPLFLAHEEESGGRSVPTTPLQVAAPVTVFTESTTSDASEHASQSVPMVTTSTGTLSTTNETATGDDGDEVFVEAESEGISSEAGLEIDSQQEEEPVQASDESDLPSTSQDPPSSSSVDTSSSQPKPFRRVRLQTTLRQGVRGRQFNRQRGVSHAMGGRGGINRGNIN

SEQ ID NO: 51801 - protein, 61 aa, Homo sapiens
KFPLTTESAMKKIEDNNTLVFIVDVKANKHQIKQAVKKLYDTNVAKVNTLIRPDGEKKAYV

SEQ ID NO: 51802 - protein, 107 aa, Homo sapiens
LVKTKEEDGREAVEFRQETSVVNYIDQRPAAKKSAQLFFVVFEWKDPFIQKVQDIVTANPWNTIALLCGAFLALFKAAEFAKLSIKWMIKIRKRYLKRRGQATSHIS

SEQ ID NO: 51803 - protein, 23 aa, Homo sapiens
KNIKKSGGTPTSMATNWTSEIPL

SEQ ID NO: 51804 - protein, 327 aa, Homo sapiens
LVRRGARAGPRMPRGWTALCLLSLLPSGFMSLDNNGTATPELPTQGTFSNVSTNVSYQETTTPSTLGSTSLHPVSQHGNEATTNITETTVKFTSTSVITSVYGNTNSSVQSQTSVISTVFTTPANVSTPETTLKPSLSPGNVSDLSTTSTSLATSPTKPYTSSSPILSDIKAEIKCSGIREVKLTQGICLEQNKTSSCAEFKKDRGEGLARVLCGEEQADADAGAQVCSLLLAQSEVRPQCLLLVLANRTEISSKLQLMKKHQSDLKKLGILDFTEQDVASHQSYSQKTLIALVTSGALLAVLGITGYFLMNRRSWSPTGERLELEP

SEQ ID NO: 51805 - protein, 384 aa, Homo sapiens
LVRRGARAGPRMPRGWTALCLLSLLPSGFMSLDNNGTATPELPTQGTFSNVSTNVSYQETTTPSTLGSTSLHPVSQHGNEATTNITETTVKFTSTSVITSVYGNTNSSVQSQTSVISTVFTTPANVSTPETTLKPSLSPGNVSDLSTTSTSLATSPTKPYTSSSPILSDIKAEIKCSGIREVKLTQGICLEQNKTSSCAEFKKDRGEGLARVLCGEEQADADAGAQVCSLLLAQSEVRPQCLLLVLANRTEISSKLQLMKKHQSDLKKLGILDFTEQDVASHQSYSQKTLIALVTSGALLAVLGITGYFLMNRRSWSPTGERLGEDPYYTENGGGQGYSSGPGTSPEAQGKASVNRGAQENGTGQATSRNGHSARQHVVADTEL

SEQ ID NO: 51806 - protein, 63 aa, Homo sapiens
IAYLMKHTRMTMTDAYKFVKGKRPIISPNLNFMGQLLEFEEDLNNGVTPRILTPKLMGVETVV

SEQ ID NO: 51807 - protein, 110 aa, Homo sapiens
MDSDIKVLEDQFDEIIVDIATKRKQYPRKILECVIKTIKAKQEILKQYHPVVHPLDLKYDPDPVLNGNAFNFSPFNMMLAVDLSYMVFITSSPSYGKFEMQRGNSSKGDQ

SEQ ID NO: 51808 - protein, 67 aa, Homo sapiens
VDYIFYSAEKEDVAGHPGAEVALVGGLKLLARLSLLTEQDLWTVNGLPNENNSSDHLPLLAKFRLEL

SEQ ID NO: 51809 - protein, 279 aa, Homo sapiens
VFTEYEQIPKKKANGIFSTAALPENAERSRIREVVPYEENRVELIPTKENNTGYINASHIKVVVGGAEWHYIATQGPLPHTCHDFWQMVWEQGVNVIAMVTAEEEGGRTKSHRYWPKLGSKHSSATYGKFKVTTKFRTDSVCYATTGLKVKHLLSGQERTVWHLQYTDWPDHGCPEDVQGFLSYLEEIQSVRRHTNSMLEGTKNRHPPIVVHCSAGVGRTGVLILSELMIYCLEHNEKVEVPMMLRLLREQRMFMIQTIAQYKFVYQVLIQFLQNSRLI

SEQ ID NO: 51810 - protein, 51 aa, Homo sapiens
KIKIIAPPERKYSVWIGTSILASLSTFQQIWISKQEEYDKSGPSTVHCECF

SEQ ID NO: 51811 - protein, 60 aa, Homo sapiens
KQAGQKKKQGHDQKAAAKAALIYTCTVCRTRMPDPKTFKQHFESKHPKTSLPPELADVQA

SEQ ID NO: 51812 - protein, 24 aa, Homo sapiens
KKVRSSISKKDQIMYERLQESLSR

SEQ ID NO: 51813 - protein, 662 aa, Homo sapiens
IMQANGAGGGGGGGGGGGGGGGGGGGQGQTPELACLSAQNGESSPSSSSSAGDLAHANGLLPSAPSAASNNSNSLNVNNGVPGGAAAASSATVAAASATTAASSSLATPELGSSLKKKKRLSQSDEDVIRLIGQHLNGLGLNQTVDLLMQESGCRLEHPSATKFRNHVMEGDWDKAENDLNELKPLVHSPHAIVVRGALEISQTLLGIIVRMKFLLLQQKYLEYLEDGKVLEALQVLRCELTPLKYNTERIHVLSGYLMCSHAEDLRAKAEWEGKGTASRSKLLDKLQTYLPPSVMLPPRRLQTLLRQAVELQRDRCLYHNTKLDNNLDSVSLLIDHVCSRRQFPCYTQQILTEHCNEVWFCKFSNDGTKLATGSKDTTVIIWQVDPDTHLLKLLKTLEGHAYGVSYIAWSPDDNYLVACGPDDCSELWLWNVQTGELRTKMSQSHEDSLTSVAWNPDGKRFVTGGQRGQFYQCDLDGNLLDSWEGVRVQCLWCLSDGKTVLASDTHQRIRGYNFEDLTDRNIVQEDHPIMSFTISKNGRLALLNVATQGVHLWDLQDRVLVRKYQGVTQGFYTIHSCFGGHNEDFIASGSEDHKVYIWHKRSELPIAELTGHTRTVNCVSWNPQIPSMMASASDDGTVRIWGPAPFIDHQNIEEECSSMDS

SEQ ID NO: 51814 - protein, 149 aa, Homo sapiens
KNTVSSARFRKVDVDEYDENKFVDEEDGGDGQAGPDEGEVDSCLRQGNMTAALQAALKNPPINTKSQAVKDRAGSIVLKVLISFKANDIEKAVQSLDKNGVDLLMKYIYKGFESPSDNSSAMLLQWHEKALAAGGVGSIVRVLTARKTV

SEQ ID NO: 51815 - protein, 39 aa, Homo sapiens
RHHHHDSDSNSPCCKRRKRGHSGDRRSPSRRWHDRGSEA

SEQ ID NO: 51816 - protein, 15 aa, Homo sapiens
IDYILKSQLYINASG

SEQ ID NO: 51817 - protein, 534 aa, Homo sapiens
IYHHTGNNTFRVVGRKIQDHQVVINCAIPKGLKYNQATQTFHQWRDARQVYGLNFGSKEDANVFASAMMHALEVLNSQETGPTLPRQNSQLPAQVQNGPSQEELEIQRRQLQEQQRQKELERERLERERMERERLERERLERERLERERLEQEQLERERQERERQERLERQERLERQERLERQERLDRERQERQERERLERLERERQERERQEQLEREQLEWERERRISSAAAPASVETPLNSVLGDSSASEPGLQAASQPAETPSQQGIVLGPLAPPPPPPLPPGPAQASVALPPPPGPPPPPPLPSTGPPPPPPPPPLPNQVPPPPPPPPAPPLPASGFFLASMSEDNRPLTGLAAAIAGAKLRKVSRMEDTSFPSGGNAIGVNSASSKTDTGRGNGPLPLGGSGLMEEMSALLARRRRIAEKGSTIETEQKEDKGEDSEPVTSKASSTSTPEPTRKPWERTNTMNGSKSPVISRPKSTPLSQPSANGVQTEGLDYDRLKQDILDEMRKELTKLKEELIDAIRQELSKSNTA

SEQ ID NO: 51818 - protein, 320 aa, Homo sapiens
IASTPSSKPSVLPSPSAAAPASVETPLNSVLGDSSASEPGLQAASQPAETPSQQGIVLGPLAPPPPPPLPPGPAQASVALPPPPGPPPPPPLPSTGPPPPPPPPPLPNQVPPPPPPPPAPPLPASGFFLASMSEDNRPLTGLAAAIAGAKLRKVSRMEDTSFPSGGNAIGVNSASSKTDTGRGNGPLPLGGSGLMEEMSALLARRRRIAEKGSTIETEQKEDKGEDSEPVTSKASSTSTPEPTRKPWERTNTMNGSKSPVISRPKSTPLSQPSANGVQTEGLDYDRLKQDILDEMRKELTKLKEELIDAIRQELSKSNTA

SEQ ID NO: 51819 - protein, 28 aa, Homo sapiens
IHNISGTIPGQCLAQSATGSVAAAPQEA

SEQ ID NO: 51820 - protein, 490 aa, Homo sapiens
LPPPSPPGSGRGPGASGEQPEPGEAAAGGAAEEARRLEQRWGFGLEELYGLALRFFKEKDGKAFHPTYEEKLKLVALHKQVLMGPYNPDTCPEVGFFDVLGNDRRREWAALGNMSKEDAMVEFVKLLNRCCHLFSTYVASHKIEKEEQEKKRKEEEERRRREEEERERLQKEEEKRRREEEERLRREEEERRRIEEERLRLEQQKQQIMAALNSQTAVQFQQYAAQQYPGNYEQQQILIRQLQEQHYQQYMQQLYQVQLAQQQAALQKQQEVVVAGSSLPTSSKVNATVPSNMMSVNGQAKTHTDSSEKELEPEAAEEALENGPKESLPVIAAPSMWTRPQIKDFKEKIQQDADSVITVGRGEVVTVRVPTHEEGSYLFWEFATDNYDIGFGVYFEWTDSPNTAVSVHVSESSDDDEEEEENIGCEEKAKKNANKPLLDEIVPVYRRDCHEEVYAGSHQYPGRGVYLLKFDNSYSLWRSKSVYYRVYYTR

SEQ ID NO: 51821 - protein, 878 aa, Homo sapiens
VRLSKKMVDPEKPQLGMIDRWYHPGCFVKNREELGFRPEYSASQLKGFSLLATEDKEALKKQLPGVKSEGKRKGDEVDGVDEVAKKKSKKEKDKDSKLEKALKAQNDLIWNIKDELKKVCSTNDLKELLIFNKQQVPSGESAILDRVADGMVFGALLPCEECSGQLVFKSDAYYCTGDVTAWTKCMVKTQTPNRKEWVTPKEFREISYLKKLKVKKQDRIFPPETSASVAATPPPSTASAPAAVNSSASADKPLSNMKILTLGKLSRNKDEVKAMIEKLGGKLTGTANKASLCISTKKEVEKMNKKMEEVKEANIRVVSEDFLQDVSASTKSLQELFLAHILSPWGAEVKAEPVEVVAPRGKSGAALSKKSKGQVKEEGINKSEKRMKLTLKGGAAVDPDSGLEHSAHVLEKGGKVFSATLGLVDIVKGTNSYYKLQLLEDDKENRYWIFRSWGRVGTVIGSNKLEQMPSKEDAIEHFMKLYEEKTGNAWHSKNFTKYPKKFYPLEIDYGQDEEAVKKLTVNPGTKSKLPKPVQDLIKMIFDVESMKKAMVEYEIDLQKMPLGKLSKRQIQAAYSILSEVQQAVSQGSSDSQILDLSNRFYTLIPHDFGMKKPPLLNNADSVQAKVEMLDNLLDIEVAYSLLRGGSDDSSKDPIDVNYEKLKTDIKVVDRDSEEAEIIRKYVKNTHATTHNAYDLEVIDIFKIEREGECQRYKPFKQLHNRRLLWHGSRTTNFAGILSQGLRIAPPEAPVTGYMFGKGIYFADMVSKSANYCHTSQGDPIGLILLGEVALGNMYELKHASHISKLPKGKHSVKGLGKTTPDPSANISLDGVDVPLGTGISSGVNDTSLLYNEYIVYDIAQVNLKYLLKLKFNFKTSLW

SEQ ID NO: 51822 - protein, 198 aa, Homo sapiens
LHDTGKFTDGQLVSQKSDSSKDIRGDKITWIEGKEPGCETIGLLMSSMDDLIRHCNGKLGSYKINGRTKAMVACYPGNGTGYVRHVDNPNGDGRCVTCIYYLNKDWDAKVSGGILRIFPEGKAQFADIEPKFDRLLFFWSDRRNPHEVQPAYATRYAITVWYFDADERARAKVKYLTGEKGVRVELNKPSDSVGKDVF

SEQ ID NO: 51823 - protein, 35 aa, Homo sapiens
IFVPVPQLKSFQKIQVRLVCELEKKFSGKHVVFIA

SEQ ID NO: 51824 - protein, 22 aa, Homo sapiens
VYDQSATALHFLGRVANPLSTA

SEQ ID NO: 51825 - protein, 320 aa, Homo sapiens
IAASRSAVMSGNRPLDDRERKRFTYFSSLSPMARKIMQDKEKIREKYGPEWARLPPAQQDEIIDRCLVGPRAPAPRDPGDSEELTRFPGLRGPTGQKVVRFGDEDLTWQDEHSAPFSWETKSQMEFSISALSIQEPSNGTAASEPRPLSKASQGSQALKSSQGSRSSSLDALGPTRKEEEASFWKINAERSRGEGPEAEFQSLTPSQIKSMEKGEKVLPPCYRQEPAPKDREAKVERPSTLRQEQRPLPNVSTERERPQPVQAFSSALHEAAPSQLEGKLPSPDVRQDDGEDTLFSEPKFAQVSSSNVVLKTGFDFLDNW

SEQ ID NO: 51826 - protein, 32 aa, Homo sapiens
KTLPSVSETFPTLRSMIEVLNTDSSPRCLKKL

SEQ ID NO: 51827 - protein, 163 aa, Homo sapiens
VVEFHSNKKRKLTPDHNKNTKANPSVLERDVDTQEFNLEKARLEVHRFGITGYGKGKERILEQERAIMLGAKPPKKSYVNYKVLQEQIKEKKAAKEEEKRLAQETDIFKKKKRKGQEDRKSKKKSAPSILSNGRIGQVGKFKNGTLILSPVDIKKINSSRVAK

SEQ ID NO: 51828 - protein, 43 aa, Homo sapiens
IKRFLAKKQKQNHPIPQWIQMKTRNKIRYNSKRRHWRRTKLGL

SEQ ID NO: 51829 - protein, 93 aa, Homo sapiens
MAFMLGWHGVFLELSEDVKEYEHLTEIMSNVQLNSNFLALARELDIMEPKVPDDIYKTHLENNRFGGSGSQVDSARMNLASSFVSGFVNAAFV

SEQ ID NO: 51830 - protein, 157 aa, Homo sapiens
VAVLVKVAEARKNRPAGAIPSPYKDGSSNNSERWQHQIKEVLASSQEALVVTERKYLKSDWCKTQPLRQTVSEEGCRSRTILNRFCYGQCNSFYIPRHVKKEEESFQSCAFCKPQRVTSVLVELECPGLDPPFRLKKIQKVKQCRCMSVNLSDSDKQ

SEQ ID NO: 51831 - protein, 1080 aa, Homo sapiens
VNYDVKTFGSSLPVKVMEALTLAEVDDQLTINIDEGGWACLVCKEKLIIWKIALSPITKLSVCKELQLPPSDFHWSADLVALSYSSPSGEAHSTQAVAVMVATREGSIRYWPSLAGEDTYTEAFVDSGGDKTYSFLTAVQGGSFILSSSGSQLIRLIPESSGKIHQHILPQGQGMLSGIGRKVSSLFGILSPSSDLTLSSVLWDRERSSFYSLTSSNISKWELDDSSEKHAYSWDINRALKENITDAIWGSESNYEAIKEGVNIRYLDLKQNCDGLVILAAAWHSADNPCLIYYSLITIEDNGCQMSDAVTVEVTQYNPPFQSEDLILCQLTVPNFSNQTAYLYNESAVYVCSTGTGKFSLPQEKIVFNAQGDSVLGAGACGGVPIIFSRNSGLVSITSRENVSILAEDLEGSLASSVAGPNSESMIFETTTKNETIAQEDKIKLLKAAFLQYCRKDLGHAQMVVDELFSSHSDLDSDSELDRAVTQISVDLMDDYPASDPRWAESVPEEAPGFSNTSLIILHQLEDKMKAHSFLMDFIHQVGLFGRLGSFPVRGTPMATRLLLCEHAEKLSAAIVLKNHHSRLSDLVNTAILIALNKREYEIPSNLTPADVFFREVSQVDTICECLLEHEEQVLRDAPMDSIEWAEVVINVNNILKDMLQAASHYRQNRNSLYRREESLEKEPEYVPWTATSGPGGIRTVIIRQHEIVLKVAYPQADSNLRNIVTEQLVALIDCFLDGYVSQLKSVDKSSNRERYDNLEMEYLQKRSDLLSPLLSLGQYLWAASLAEKYCDFDILVQMCEQTDNQSRLQRYMTQFADQNFSDFLFRWYLEKGKRGKLLSQPISQHGQLANFLQAHEHLSWLHEINSQELEKAHATLLGLANMETRYFAKKKTLLGLSKLAALASDFSEDMLQEKIEEMAEQERFLLHQETLPEQLLAEKQLNLSAMPVLTAPQLIGLYICEENRRANEYDFKKALDLLEYIDEEEDININDLKLEILCKALQRDNWSSSDGKDDPIEVSKDSIFVKILQKLLKDGIQLSEYLPEVKDLLQADQLGSLKSNPYFEFVLKANYEYYVQGQI

SEQ ID NO: 51832 - protein, 39 aa, Homo sapiens
MVAVLDQGKITEYGKHEELLSKPNGIYRKLMNKQSFISA

SEQ ID NO: 51833 - protein, 12 aa, Homo sapiens
LVTGITQENQEH

SEQ ID NO: 51834 - protein, 57 aa, Homo sapiens
IVVNLTGRLNKCGDISPRFDVQSKDLEKWQNNLLPSRQFGFIVLTTSAGIMDHEEAR

SEQ ID NO: 51835 - protein, 446 aa, Homo sapiens
LAQPPTPQPPPVNGILVPNGFSKLEEPPELNRQSPNPRRGHAVPPTLVPLMNGSATPLPTALGLGGRAAASLAAVSGTAAASLGSAQPTDLGAHKRPASVSSSAAVEHEQREAAAKEKQPPPPAHRGPADSLSTAAGAAELSAEGAGKSRGSGEQDWVNRPKTVRDTLLALHQHGHSGPFESKFKKEPALTAGRLLGFEANGANGSKAVARTARKRKPSPEPEGEVGPPKINGEAQPWLSTSTEGLKIPMTPTSSFVSPPPPTASPHSNRTTPPEAAQNGQSPMAALILVADNAGGSHASKDANQVHSTTRRNSNSPPSPSSMNQRRLGPREVGGQGAGNTGGLEPVHPASLPDSSLATSAPLCCTLCHERLEDTHFVQCPSVPSHKFCFPCSRQSIKQQGASGEVYCPSGEKCPLVGSNVPWAFMQGEIATILAGDVKVKKERDS

SEQ ID NO: 51836 - protein, 78 aa, Homo sapiens
ILQEKLQEIRKHYLSLKSEVASIDRRRKRLKKKERESAATSSSSSSPSSSSITAAVMLTLAEPSMSSASQNGMSVECR

SEQ ID NO: 51837 - protein, 108 aa, Homo sapiens [sequence omitted]

SEQ ID NO: 51838 - protein, 30 aa, Homo sapiens
LSSPQYSPWELTELWKLKERCGDPCRCQAR

SEQ ID NO: 51839 - protein, 145 aa, Homo sapiens
KEVQESLKKIEELKAHWKWEQVLAMCQAIISSNSERLPDINIYQLKVLDCAMDACINLGLLEEALFYGTRTMEPYRIFFPGSHPVRGVQVMKVGKLQLHQGMFPQAMKNLRLAFDIMRVTHGREHSLIEDLILLLEECDANIRAS

SEQ ID NO: 51840 - protein, 174 aa, Homo sapiens
IEVNMFIGEKEFQKLMADPGNPDLYHVLSVIWQLACEIKVLHMEPWSSFDIYTRKGPLENPKRRELLDQLQQKLYLIQMIPRQNLFTKNLTPMNYNIFFHLLKHCFGRRSATVIDHLRSLTPLDARDILMQIGKQEDEKVVNMHPQDFKTLFETIERSKDCAYKWLYDETLEDR

SEQ ID NO: 51841 - protein, 729 aa, Homo sapiens
RNLSFNELYPSGTLKLQYNFDTIDQQFCDLADNKDTAECDIAEVDGELFVAQSNFTLILEGEEGEVEPGDFASSDVLPKAANTATEEKLVCSGENDNHGQIANLPSAVTSDQKSQKVDTLPYVPEPIKVAIAENLLDVIKDTRSKEITSDTMEQSIHETIPLVSQNIMCPTKLVKSAFKTAQETSTMTMNVSQVDDVVSSKTRTRGQRIQNVNVKSAQQEASADVATPKMPGQSVRKKTRKAKEISEASENIYSDVRGLSQNQQIPQNSVTPRRGRRKKEVNQDILENTSSVEQELQITTGRESKRLKSSQLLEPAVEETTKKEVKVSSVTKRTPRRIKRSVENQESVEIINDLKVSTVTSPSRMIRKLRSTNLDASENTGNKQDDKSSDKQLRIKHVRRVRGREVSPSDVREDSNLESSQLTVQAEFDMSAIPRKRGRPRKINPSEDVGSKAVKEERSPKKKEAPSIRRRSTRNTPAKSENVDVGKPALGKSILVPNEELSMVMSSKKKLTKKTESQSQKRSLHSVSEERTDEMTHKETNEQEERLLATASFTKSSRSSRTRSSKAILLPDLSEPNNEPLFSPASEVPRKAKAKKIEVPAQLKELVSDLSSQFVISPPALRSRQKNTSNKNKLEDELKDDAQSVETLGKPKAKRIRTSKTKQASKNTEKESAWSPPPIEIRLISPLASPADGVKSKPRKTTEVTGTGLGRNRKKLSSYPKQILRRKML

SEQ ID NO: 51842 - protein, 7 aa, Homo sapiens
RTRYSQL

SEQ ID NO: 51843 - protein, 157 aa, Homo sapiens
IRQSIDKTAGKIRILFKDKDRNWDDIESKLRAESEVPIVKTSSMEISSILQELKRVEKQLQAINAMIDPDGTLEALNNMGFPSAMLPSPPKQKSSPVNNHHSPGQTPTLGQPEARALHPAAVSAAAEFENAESEADFSIHFNRFNPDGEEEDVTVQE

SEQ ID NO: 51844 - protein, 119 aa, Homo sapiens
VKTSSMEISSILQELKRVEKQLQAINAMIDPDGTLEALNNMGFPSAMLPSPPKQKSSPVNNHHSPGQTPTLGQPEARALHPAAVSAAAEFENAESEADFSIHFNRFNPDGEEEDVTVQE

SEQ ID NO: 51845 - protein, 61 aa, Homo sapiens
VNNHHSPGQTPTLGQPEARALHPAAVSAAAEFENAESEADFSIHFNRFNPDGEEEDVTVQE

SEQ ID NO: 51846 - protein, 47 aa, Homo sapiens
KNTRHPFLTSLKYSFQTKDRLCFVMEYVNGGEMEFRSVVRLECSSTI

SEQ ID NO: 51847 - protein, 329 aa, Homo sapiens
IISDRAHIVFDFHQAADGIQEQQRQEQAGKNLGTTKKGIGPVYSSKAARSGLRMCDLVSDFDGFSERFKVLANQYKSIYPTLEIDIEGELQKLKGYMEKIKPMVRDGVYFLYEALHGPPKKILVEGANAALLDIDFGTYPFVTSSNCTVGGVCTGLGMPPQNVGEVYGVVKAYTTRVGIGAFPTEQDNEIGELLQTRGREFGVTTGRKRRCGWLDLVLLKYAHMINGFTALALTKLDILDMFTEIKVGVAYKLDGEIIPHIPANQEVLNKVEVQYKTLPGWNTDISNARAFKELPVNAQNYVRFIEDELQIPVKWIGVGKSRESMIQLF

SEQ ID NO: 51848 - protein, 19 aa, Homo sapiens
LGWRKSILWCVKRLQRRSQ

SEQ ID NO: 51849 - protein, 20 aa, Homo sapiens
RLSTSIRDLQNFKVLLQHSR

SEQ ID NO: 51850 - protein, 145 aa, Homo sapiens
KSSGSGAGKGAVSAEQVIAGFNRLRQEQRGLASKAAELEMELNEHSLVIDTLKEVDETRKCYRMVGGVLVERTVKEVLPALENNKEQIQKIIETLTQQLQAKGKELNEFREKHNIRLMGEDEKPAAKENSEGAGAKASSAGVLVS

SEQ ID NO: 51851 - protein, 152 aa, Homo sapiens
KSVLFVCLGNICRSPIAEAVFRKLVTDQNISENWRVDSAATSGYEIGNPPDYRGQSCMKRHGIPMSHVARQITKEDFATFDYILCMDESNLRDLNRKSNQVKTCKAKIELLGSYDPQKQLIIEDPYYGNDSDFETVYQQCVRCCRAFLEKAH

SEQ ID NO: 51852 - protein, 152 aa, Homo sapiens
KSVLFVCLGNICRSPIAEAVFRKLVTDQNISENWVIDSGAVSDWNVGRSPDPRAVSCLRNHGIHTAHKARQITKEDFATFDYILCMDESNLRDLNRKSNQVKTCKAKIELLGSYDPQKQLIIEDPYYGNDSDFETVYQQCVRCCRAFLEKAH

SEQ ID NO: 51853 - protein, 29 aa, Homo sapiens
IHSKTKSRKQLGRLMLKGDNIPLLQSVSN

SEQ ID NO: 51854 - protein, 21 aa, Homo sapiens
IDGDPGRKGAFPVSFVHFIAD

SEQ ID NO: 51855 - protein, 236 aa, Homo sapiens
LLWPRLLLFGDSITQFSFQQGGWGASLADRLVRKCDVLNRGFSGYNTRWAKIILPRLIRKGNSLDIPVAVTIFFGANDSALKDENPKQHIPLEEYAANLKSMVQYLKSVDIPENRVILITPTPLCETAWEEQCIIQGCKLNRLNSVVGEYANACLQVAQDCGTDVLDLWTLMQDSQDFSSYLSDGLHLSPKGNEFLFSHLWPLIEKKVSSLPLLLPYWRDVAEAKPELSLLGDGDH

SEQ ID NO: 51856 - protein, 47 aa, Homo sapiens
ILNLFSFLLRIKTSLLHEEVSLVEKKLFEKKYSVKRKKSRSKKVRRH

SEQ ID NO: 51857 - protein, 164 aa, Homo sapiens
LGLCNWSTLGVCAALKLPQISAVLAARSARGLSLPSLLLELAGFLVFLRYQCYYGYPPLTYLEYPILIAQDVILLLCIFHFNGNVKQATPYIAVLVSSWFILALQKWIIDLAMNLCTFISAASKFAQLQCLWKTRDSGTVSALTWSLSSYTCARSRSLSQAGVQ

SEQ ID NO: 51858 - protein, 197 aa, Homo sapiens
LGLCNWSTLGVCAALKLPQISAVLAARSARGLSLPSLLLELAGFLVFLRYQCYYGYPPLTYLEYPILIAQDVILLLCIFHFNGNVKQATPYIAVLVSSWFILALQKWIIDLAMNLCTFISAASKFAQLQCLWKTRDSGTVSALTWSLSSYTCATRIITTLMTTNDFTILLRFVIMLALNIWVTVTVLRYRKTAIKAE

SEQ ID NO: 51859 - protein, 118 aa, Homo sapiens
ITVSVKDLNGIDLTPVQDTPVASRKEDTYVHFNVDIELQKHVEKLTKGAAIFFEFKHYKPKKRFTSTKCFAFMEMDEIKLGPNVIELYKKPTDFKRKQLQLLTKKPLYLHLHQTLHKE

SEQ ID NO: 51860 - protein, 86 aa, Homo sapiens
VYSYKQVGVSLNRIFTVNPKGELVQEHAKTNISSYVRLCEVVDHVFPLLKRSHSSDFPCSDTFSNFTFWREPLPPFENQDIHSASA

SEQ ID NO: 51861 - protein, 41 aa, Homo sapiens
LDHPWFSTDFSVSNSAYGAKEVSDQLVPDVNMEENLDPFFN

SEQ ID NO: 51862 - protein, 193 aa, Homo sapiens
IRKKLVVVGDGACGKTCLLIVFSKDEFPEVYVPTVFENYVADIEVDGKQVELALWDTAGQEDYDRLRPLSYPDTDVILMCFSVDSPDSLENIPEKWVPEVKHFCPNVPIILVANKKDLRSDEHVRTELARMKQEPVRTDDGRAMAVRIQAYDYLECSAKTKEGVREVFETATRAALQKRYGSQNGCINCCKVL

SEQ ID NO: 51863 - protein, 165 aa, Homo sapiens
KGELPSELQGIFDKEEVDVKVEDKKNEICLSTKPVFQPFSGQGHRLGSATPKIVSKAKNIEVENKNNLSAVPLNNLEPITNIQIWLANGKRIVQKFNITHRVSHIKDFIEKYQGSQRSPPFSLATALPVLRLLDETLTLEEADLQNAVIIQRLQKTASFRELSEH

SEQ ID NO: 51864 - protein, 42 aa, Homo sapiens
KKIVLRLECVEPNCRSKRMLAIKRCKHFELGRDKRKGQVTQF

SEQ ID NO: 51865 - skipped

SEQ ID NO: 51866 - protein, 39 aa, Homo sapiens
RNNEELVVSASCKEPEQEPVPAQFQKVKPPKTNHKRGRK

SEQ ID NO: 51867 - protein, 32 aa, Homo sapiens
IDHRVTEESHEEPAFQNFMQESMAQYWKRNNK

SEQ ID NO: 51868 - protein, 58 aa, Homo sapiens
LVVLVVNLGVASYVESILLYTLTTAFTLAHIHYGVRVVKQLSSHFQIYPFSLRKPNSD

SEQ ID NO: 51869 - protein, 5 aa, Homo sapiens
INDAS

SEQ ID NO: 51870 - protein, 45 aa, Homo sapiens
RPGSQGEDVWPGAIRRKLGRTGRARAVLWSSSIPGAGRGASGWAG

SEQ ID NO: 51871 - protein, 26 aa, Homo sapiens
KGSGATRDMHPMSRERAKFVKSGLLL

SEQ ID NO: 51872 - protein, 485 aa, Homo sapiens
KLLREFRLVAADRRSWKILLFGVINLICTGFLLMWCSSTNSIALTAYTYLTIFDLFRDGVSPFWLGWSQTPDLKWSTHLGLPKCWDNRRELPCLSNSLMTCLISYWVTLRKPSPVYSFGFERLEVLAVFASTVLAQLGALFILKESAERFLEQPEIHTGRLLVGTFVALCFNLFTMLSIRNKPFAYVSEAASTSWLQEHVADLSRSLCGIIPGLSSIFLPRMNPFVLIDLAGAFALCITYMLIEINNYFAVDTASAIAIALMTFGTMYPMSVYSGKVLLQTTPPHVIGQLDKLIREVSTLDGVLEVRNEHFWTLGFGSLAGSVHVRIRRDANEQMVLAHVTNRLYTLVSTLTVQIFKDDWIRPALLSGPVAANVLNFSDHHVIPMPLLKGTDDLNPVTSTPAKPSSPPPEFSFNTPGKNVNPVILLNTQTRPYGFGLNHGHTPYSSMLNQGLGVPGIGATQGLRTGFTNIPSRYGTNNRIGQPRP

SEQ ID NO: 51873 - protein, 5 aa, Homo sapiens
LFNKL

SEQ ID NO: 51874 - protein, 28 aa, Homo sapiens
RELADDITAMDTLVTELQDLSNQFRNQY

SEQ ID NO: 51875 - protein, 14 aa, Homo sapiens
IKLSWVGPWGTWRF

SEQ ID NO: 51876 - protein, 352 aa, Homo sapiens
VGTLHLLLLVAALPWASRGVSPSASAWPEEKNYHQPAILNSSALRQIAEGTSISEMWQNDLQPLLIERYPGSPGSYAARQHIMQRIQRLQADWVLEIDTFLSQTPYGYRSFSNIISTLNPTAKRHLVLACHYDSKYFSHWNNRVFVGATDSAVPCAMMLELARALDKKLLSLKTVSDSKPDLSLQLIFFDGEEAFLHWSPQDSLYGSRHLAAKMASTPHPPGARGTSQLHGMDLLVLLDLIGAPNPTFPNFFPNSARWFERLQAIEHELHELGLLKDHSLEGRYFQNYSYGGVIQDDHIPFLRRGVPVLHLIPSPFPEVWHTMDDNEENLDESTIDNLNKILQVFVLEYLHL

SEQ ID NO: 51877 - protein, 184 aa, Homo sapiens
MYELSTNTQEKKHYANIGKTLSERAINRAPMNGHCHLWYAVLCGYVSEFEGLQNKINYGHLFKEHLDIAIKLLPEEPFLYYLKGRYCYTVSKLSWIEKKMAATLFGKIPSSTVQEALHNFLKAEELCPGYSNPNYMYLAKCYTDLEENQNALKFCNLALLLPTVTKEDKEAQKEMQKIMTSLKR

SEQ ID NO: 51878 - protein, 37 aa, Homo sapiens
LETQNWPDAVNQPRFPPVLLRPGEEYDHTTWFKFSVA

SEQ ID NO: 51879 - protein, 37 aa, Homo sapiens
VVTNQTTWTGRQLVFFKTGWSQVVPDPNKTTYVKASG

SEQ ID NO: 51880 - protein, 11 aa, Homo sapiens
LEDQQDPSPSS

SEQ ID NO: 51881 - protein, 337 aa, Homo sapiens
LLGRRVCADKMADGELNVDSLITRLLEVRGCRPGKIVQMTEAEVRGLCIKSREIFLSQPILLELEAPLKICGDIHGQYTDLLRLFEYGGFPPEANYLFLGDYVDRGKQSLETICLLLAYKIKYPENFFLLRGNHECASINRIYGFYDECKRRFNIKLWKTFTDCFNCLPIAAIVDEKIFCCHGGLSPDLQSMEQIRRIMRPTDVPDTGLLCDLLWSDPDKDVQGWGENDRGVSFTFGADVVSKFLNRHDLDLICRAHQVVEDGYEFFAKRQLVTLFSAPNYCGEFDNAGGMMSVDETLMCSFQILKPSEKKAKYQYGGLNSGRPVTPPRTANPPKKR

SEQ ID NO: 51882 - protein, 674 aa, Homo sapiens
IFSISAAPMPSDCEFSFFDPNDASCQEILFDPKTSVSELFAILRQWVPQVQQNIDIIGNEILKRGCNVNDRDGLTDMTLLHYTCKSGAHGIGDVETAVKFATQLIDLGADISLRSRWTNMNALHYAAYFDVPELIRVILKTSKPKDVDATCSDFNFGTALHIAAYNLCAGAVKCLLEQGANPAFRNDKGQIPADVVPDPVDMPLEMADAAATAKEIKQMLLDAVPLSCNISKAMLPNYDHVTGKAMLTSLGLKLGDRVVIAGQKVGTLRFCGTTEFASGQWAGIELDEPEGKNNGSVGKVQYFKCAPKYGIFAPLSKISKAKGRRKNITHTPSTKAAVPLIRSQKIDVAHVTSKVNTGLMTSKKDSASESTLSLPPGEELKTVTEKDVALLGSVSSCSSTSSLEHRQSYPKKQNAISSNKKTMSKSPSLSSRASAGLNSSATSTANNSRCEGELRLGERVLVVGQRLGTIRFFGTTNFAPGYWYGIELEKPHGKNDGSVGGVQYFSCSPRYGIFAPPSRVQRVTDSLDTLSEISSNKQNHSYPGFRRSFSTTSASSQKEINRRNAFSKSKAALRRSWSSTPTAGGIEGSVKLHEGSQVLLTSSNEMGTVRYVGPTDFASGIWLGLELRSAKGKNDGSVGDKRYFTCKPNHGVLVRPSRVTYRGINGSKLVDENC

SEQ ID NO: 51883 - protein, 1017 aa, Homo sapiens
LLGLLLLLARSGTRALVCLPCDESKCEEPRNCPGSIVQGVCGCCYTCASQRNESCGGTFGIYGTCDRGLRCVIRPPLNGDSLTEYEAGVCEDENWTDDQLLGFKPCNENLIAGCNIINGKCECNTIRTCSNPFEFPSQDMCLSALKRIEEEKPDCSKARCEVQFSPRCPEDSVLIEGYAPPGECCPLPSRCVCNPAGCLRKVCQPGNLNILVSKASGKPGECCDLYECKPVFGVDCRTVECPPVQQTACPPDSYETQVRLTADGCCTLPTRCECLSGLCGFPVCEVGSTPRIVSRGDGTPGKCCDVFECVNDTKPACVFNNVEYYDGDMFRMDNCRFCRCQGGVAICFTAQCGEINCERYYVPEGECCPVCEDPVYPFNNPAGCYANGLILAHGDRWREDDCTFCQCVNGERHCVATVCGQTCTNPVKVPGECCPVCEEPTIITVDPPACGELSNCTLTGKDCINGFKRDHNGCRTCQCINTEELCSERKQGCTLNCPFGFLTDAQNCEICECRPRPKKCRPIICDKYCPLGLLKNKHGCDICRCKKCPELSCSKICPLGFQQDSHGCLICKCREASASAGPPILSGTCLTVDGHHHKNEESWHDGCRECYCLNGREMCALITCPVPACGNPTIHPGQCCPSCADDFVVQKPELSTPSICHAPGGEYFVEGETWNIDSCTQCTCHSGRVLCETEVCPPLLCQNPSRTQDSCCPQCTDQPFRPSLSRNNSVPNYCKNDEGDIFLAAESWKPDVCTSCICIDSVISCFSESCPSVSCERPVLRKGQCCPYCIEDTIPKKVVCHFSGKAYADEERWDLDSCTHCYCLQGQTLCSTVSCPPLPCVEPINVEGSCCPMCPEMYVPEPTNIPIEKTNHRGEVDLEVPLWPTPSENDIVHLPRDMGHLQVDYRDNRLHPSEDSSLDSIASVVVPIIICLSIIIAFLFINQKKQWIPLLCWYRTPTKPSSLNNQLVSVDCKKGTRVQVDSSQRMLRIAEPDARFSGFYSMQKQNHLQADNFYQTV

SEQ ID NO: 51884 - protein, 6 aa, Homo sapiens
LMGLFD

SEQ ID NO: 51885 - protein, 239 aa, Homo sapiens
ICDAGKPKGKRIFILCGENFLKKKLPSSNKGVILIFMRTVVLTMKASVIEMFLVLLVTGVHSNKETAKKIKRPKFTVPQINCDVKAGKIIDPEFIVKCPAGCQDPKYHVYGTDVYASYSSVCGAAVHSGVLDNSGGKILVRKVAGQSGYKGSYSNGVQSLSLPRWRESFIVLESKPKKGVTYPSALTYSSSKSPAAQAGKCSRVIESKPSESMNTRRVLGDSGEINILTGQAPLALAIF

SEQ ID NO: 51886 - protein, 19 aa, Homo sapiens
VMQESLREKEYSFCVVKIF

SEQ ID NO: 51887 - protein, 724 aa, Homo sapiens
KPKGKRIFILCGENFLKKKLPSSNKGVILIFMRTVVLTMKASVIEMFLVLLVTGVHSNKETAKKIKRPKFTVPQINCDVKAGKIIDPEFIVKCPAGCQDPKYHVYGTDVYASYSSVCGAAVHSGVLDNSGGKILVRKVAGQSGYKGSYSNGVQSLSLPRWRESFIVLESKPKKGVTYPSALTYSSSKSPAAQAGETTKAYQRPPIPGTTAQPVTLMQLLAVTVAVATPTTLPRPSPSAASTTSIPRPQSVGHRSQEMDLWSTATYTSSQNRPRADPGIQRQDPSGAAFQKPVGADVSLGEMDSWKPGSVLLDEGLVPKEELSTQSLEPVSLGDPNCKIDLSFLIDGSTSIGKRRFRIQKQLLADVAQALDIGPAGPLMGVVQYGDNPATHFNLKTHTNSRDLKTAIEKITQRGGLSNVGRAISFVTKNFFSKANGNRSGAPNVVVVMVDGWPTDKVEEASRLARESGINIFFITIEGAAENEKQYVVEPNFANKAVCRTNGFYSLHVQSWFGLHKTLQPLVKRVCDTDRLACSKTCLNSADIGFVIDGSSSVGTGNFRTVLQFVTNLTKEFEISDTDTRIGAVQYTYEQRLEFGFDKYSSKPDILNAIKRVGYWSGGTSTGAAINFALEQLFKKSKPNKRKLMILITDGRSYDDVRIPAMAAHLKGVITYAIGVAWAAQEELEVIATHPARDHSFFVDEFDNLHQYVPRIIQNICTEFNSQPRN

SEQ ID NO: 51888 - protein, 254 aa, Homo sapiens
IPITGDTLRTFSLVLVLDLSKPNDLWPTMENLLQATKSHVDKVIMKLGKTNAKAVSEMRQKIWNNMPKDHPQDHELIDPFPVPLVIIGSKYDVFQDFESEKRKVICKTLRFVAHYYGASLMFTSKSEALLLKIRGVINQLAFGIDKSKSICVDQNKPLFITAGLDSFGQIGSPPVPENDIGKLHAHSPMELWKKVYEKLFPPKSINTLKDIKDPARDPQYAENEVDEMRIQKDLELEQYKRSSSKSWKQIELDS

SEQ ID NO: 51889 - protein, 862 aa, Homo sapiens
RSSSERRKEKSRDAARCRRSKETEVFYELAHELPLPHSVSSHLDKASIMRLAISFLRTHKLLSSVCSENESEAEADQQMDNLYLKALEGFIAVVTQDGDMIFLSENISKFMGLTQVELTGHSIFDFTHPCDHEEIRENLSLKNGSGFGKKSKDMSTERDFFMRMKCTVTNRGRTVNLKSATWKVLHCTGQVKVYNNCPPHNSLCGYKEPLLSCLIIMCEPIQHPSHMDIPLDSKTFLSRHSMDMKFTYCDDRITELIGYHPEELLGRSAYEFYHALDSENMTKSHQNLCTKGQVVSGQYRMLAKHGGYVWLETQGTVIYNPRNLQPQCIMCVNYVLSEIEKNDVVFSMDQTESLFKPHLMAMNSIFDSSGKGAVSEKSNFLFTKLKEEPEELAQLAPTPGDAIISLDFGNQNFEESSAYGKAILPPSQPWATELRSHSTQSEAGSLPAFTVPQAAAPGSTTPSATSSSSSCSTPNSPEDYYTSLDNDLKIEVIEKLFAMDTEAKDQCSTQTDFNELDLETLAPYIPMDGEDFQLSPICPEERLLAENPQSTPQHCFSAMTNIFQPLAPVAPHSPFLLDKFQQQLESKKTEPEHRPMSSIFFDAGSKASLPPCCGQASTPLSSMGGRSNTQWPPDPPLHFGPTKWAVGDQRTEFLGAAPLGPPVSPPHVSTFKTRSAKGFGARGPDVLSPAMVALSNKLKLKRQLEYEEQAFQDLSGGDPPGGSTSHLMWKRMKNLRGGSCPLMPDKPLSANVPNDKFTQNPMRGLGHPLRHLPLPQPPSAISPGENSKSRFPPQCYATQYQDYSLSSAHKVSGMASRLLGPSFESYLLPELTRYDCEVNVPVLGSSTLLQGGDLLRALDQAT

SEQ ID NO: 51890 - protein, 21 aa, Homo sapiens
MPTFWTRNLQKWFLFEHSAWV

SEQ ID NO: 51891 - protein, 670 aa, Homo sapiens
IVDFYFSPGPPSNSPLSTPTKDFPGFPGIPKAGTHVLYPIPESSSDSPLAISGGESSLLPTRPTCLSHALLPSDHSCTHPTPKVGLPDEVNPQQAESLGFQSDDLPQFQYFREDCAFSSPFWKDEGSDSHFTLDPPGSKKMFSSRNKEMPIDQKSLNKCSLNYICEKLEHLQSAENQDSLRSLSMHCLCAEENASSFVPHTLFRSQPKSGWSFMLRIPEKKNMMSSRQWGPIFLKVLPGGILQMYYEQGLEKPFKEIQLDPYCRLSEPKVENFSVAGKIHTVKIEHVSYTEKRKYHSKTEVVHEPDIEQMLKLGSTSYHDFLDFLTTVEEELMKLPAVSKPKKNYEEQEISLEIVDNFWGKVTKEGKFVESAVITQIYCLCFVNGNLECFLTLNDLELPKRDESYYEKDSEKKGIDILDYHFHKCVNVQEFEQSRIIKFVPLDACRFELMRFKTLYNGDNLPFSLKSVVVVQGAYVELQAFVNMASLAQRSSYAGSLRSCDNIRIHFPVPSQWIKALWTMNLQRQKSLKAKMNRRACLGSLQELESEPVIQVTVGSAKYESAYQAVVWKIDRLPDKNSSLDHPHCLSYKLELGSDQEIPSDWYPFATVQFSVPDTCASRTEVRSLGVESDVQPQKHVQQRACYNIQVEIEKKWIKIDGEDPDKIGDCITQ

SEQ ID NO: 51892 - protein, 88 aa, Homo sapiens
ITPDTWKDGARNTTESGGRKLNENKALTSKKARFDPYGKNKFSTCRICKSSVHQPGSHYCQGCAYKKGICAMCGKKVLDTKNYKQTSV

SEQ ID NO: 51893 - protein, 221 aa, Homo sapiens
KSTLMRQAGLLAVMAQMGCYVPAEVCRLTPIDRVFTRLGASDRIMSGESTFFVELSETASILMHATAHSLVLVDELGRGTATFDGTAIANAVVKELAETIKCRTLFSTHYHSLVEDYSQNVAVRLGHMACMVENECEDPSQETITFLYKFIKGACPKSYGFNAARLANLPEEVIQKGHRKAREFEKMNQSLRLFREVCLASERSTVDAEAVHKLLTLIKEL

SEQ ID NO: 51894 - protein, 97 aa, Homo sapiens
KNSHVGSDGSEGFHSEEDTDVDYEDDPLGDSGYASQPCAKISEKGQSGKKMRKQTCQEIDEELKEAAGSLLHLAGIRTCLGSLISTAKTQNQKQRKK

SEQ ID NO: 51895 - protein, 31 aa, Homo sapiens
MFRFPNKYCKDTKSKATEKIEILKVWQYSFT

SEQ ID NO: 51896 - protein, 144 aa, Homo sapiens
LEPIQSTSLIGTLTRTSDSEVPDVESREDLIKNHYMARIVELTSQLQLADSKSVHFYAECRALSKRLALAEKSKEALTEEMKLASQNISRLQDELTTTKRSYEDQLSMMSDHLCSMNETLSKQREEIDTLKMSSKGNSKKNKSR

SEQ ID NO: 51897 - protein, 57 aa, Homo sapiens
ISRLQDELTTTKRSYEDQLSMMSDHLCSMNETLSKQREEIDTLKMSSKGNSKKNKSR

SEQ ID NO: 51898 - protein, 25 aa, Homo sapiens
LANILVLCCYPWWSLPHLETIVYSQ

SEQ ID NO: 51899 - protein, 105 aa, Homo sapiens
LNLALKEQQPKVRGWLLASLDGQTTGLIPANYVKILGKRKGRKTVESSKVSKQQQSFTNPTLTKGATVADSLDEQEAAFESVFVETNKVPVAPDSIGKDGEKQDL

SEQ ID NO: 51900 - protein, 6 aa, Homo sapiens
LRVANP

SEQ ID NO: 51901 - protein, 176 aa, Homo sapiens
LLNALAQDTFHGYPGITEELLRSQLYPEVPPEEFRPFLAKMRGILKSIASADMDFNQLEAFLTAQTKKQGGITSDQAAVISKFWKSHKTKIRESLMNQSRWNSGLRGLSWRVDGKSQSRHSAQIHTPVAIIELELGKYGQESEFLCLEFDEVKVNQILKTLSEVEESISTLISQPN

SEQ ID NO: 51902 - protein, 1144 aa, Homo sapiens
KFQFVASYQELMVECTKKWQPDKLVVVWTRRSRRKSSKAHSWQPGIKNPYRGVVVWPVPENIEITVTLFKDPHAEEFEDKEWTFVIENESPSGRRKALATSSINMKQYASPMPTQTDVKLKFKPLSKKVVSAALQFSLSCIFLREGKATDEDMQSLASLMSMKQADIGNLDDFEEDNEDDDENRVNQEEKAAKITELINKLNFLDEAEKDLATVNSNPFDDPDAAELNPFGDPDSEEPITETASPRKTEDSFYNNSYNPFKEVQTPQYLNPFDEPEAFVTIKDSPPQSTKRKNIRPVDMSKYLYADSSKTEEEELDESNPFYEPKSTPPPNNLVNPVQELETERRVKRKAPAPPVLSPKTGVLNENTVSAGKDLSTSPKPSPIPSPVLGRKPNASQSLLVWCKEVTKNYRGVKITNFTTSWRNGLSFCAILHHFRPDLIDYKSLNPQDIKENNKKAYDGFASIGISRLLEPSDMVLLAIPDKLTVMTYLYQIRAHFSGQELNVVQIEENSSKSTYKVGNYETDTNSSVDQEKFYAELSDLKREPELQQPISGAVDFLSQDDSVFVNDSGVGESESEHQTPDDHLSPSTASPYCRRTKSDTEPQKSQQSSGRTSGSDDPGICSNTDSTQAQVLLGKKRLLKAETLELSDLYVSDKKKDMSPPFICEETDEQKLQTLDIGSNLEKEKLENSRSLECRSDPESPIKKTSLSPTSKLGYSYSRDLDLAKKKHASLRQTESDPDADRTTLNHADHSSKIVQHRLLSRQEELKERARVLLEQARRDAALKAGNKHNTNTATPFCNRQLSDQQDEERRRQLRERARQLIAEARSGVKMSELPSYGEMAAEKLKERSKASGEQNSKLVDLKLKKLLEVQPQVANSPSSAAQKAVTESSEQDMKSGTEDLRTERLQKTTERFRNPVVFSKDSTVRKTQLQSFSQYIENRPEMKRQRSIQEDTKKGNEEKAAITETQRKPSEDEVLNKGFKDTSQYVVGELAALENEQKQIDTRAALVEKRLRYLMDTGRNTEEEEAMMQEWFMLVNKKNALIRRMNQLSLLEKEHDLERRYELLNRELRAMLAIEDWQKTEAQKRREQLLLDELVALVNKRDALVRDLDAQEKQAEEEDEHLERTLEQNKGKMAKKEEKCVLQ

SEQ ID NO: 51903 - protein, 6 aa, Homo sapiens
KPKEVF

SEQ ID NO: 51904 - protein, 983 aa, Homo sapiens
INKLNFLDEAEKDLATVNSNPFDDPDAAELNPFGDPDSEEPITETASPRKTEDSFYNNSYNPFKEVQTPQYLNPFDEPEAFVTIKDSPPQSTKRKNIRPVDMSKYLYADSSKTEEEELDESNPFYEPKSTPPPNNLVNPVQELETERRVKRKAPAPPVLSPKTGVLNENTVSAGKDLSTSPKPSPIPSPVLGRKPNASQSLLVWCKEVTKNYRGVKITNFTTSWRNGLSFCAILHHFRPDLIDYKSLNPQDIKENNKKAYDGFASIGISRLLEPSDMVLLAIPDKLTVMTYLYQIRAHFSGQELNVVQIEENSSKSTYKVGNYETDTNSSVDQEKFYAELSDLKREPELQQPISGAVDFLSQDDSVFVNDSGVGESESEHQTPDDHLSPSTASPYCRRTKSDTEPQKSQQSSGRTSGSDDPGICSNTDSTQAQVLLGKKRLLKAETLELSDLYVSDKKKDMSPPFICEETDEQKLQTLDIGSNLEKEKLENSRSLECRSDPESPIKKTSLSPTSKLGYSYSRDLDLAKKKHASLRQTESDPDADRTTLNHADHSSKIVQHRLLSRQEELKERARVLLEQARRDAALKAGNKHNTNTATPFCNRQLSDQQDEERRRQLRERARQLIAEARSGVKMSELPSYGEMAAEKLKERSKASGDENDNIEIDTNEEIPEGFVVGGGDELTNLENDLDTPEQNSKLVDLKLKKLLEVQPQVANSPSSAAQKAVTESSEQDMKSGTEDLRTERLQKTTERFRNPVVFSKDSTVRKTQLQSFSQYIENRPEMKRQRSIQEDTKKGNEEKAAITETQRKPSEDEVLNKGFKDTSQYVVGELAALENEQKQIDTRAALVEKRLRYLMDTGRNTEEEEAMMQEWFMLVNKKNALIRRMNQLSLLEKEHDLERRYELLNRELRAMLAIEDWQKTEAQKRREQLLLDELVALVNKRDALVRDLDAQEKQAEEEDEHLERTLEQNKGKMAKKEEKCVLQ

SEQ ID NO: 51905 - protein, 335 aa, Homo sapiens
IMSEPIRVLVTGAAGQIAYSLLYSIGNGSVFGKDQPIILVLLDITPMMGVLDGVLMELQDCALPLLKDVIATDKEDVAFKDLDVAILVGSMPRREGMERKDLLKANVKIFKSQGAALDKYAKKSVKVIVVGNPANTNCLTASKSAPSIPKENFSCLTRLDHNRAKAQIALKLGVTANDVKNVIIWGNHSSTQYPDVNHAKVKLQGKEVGVYEALKDDSWLKGEFVTTVQQRGAAVIKARKLSSAMSAAKAICDHVRDIWFGTPEGEFVSMGVISDGNSYGVPDDLLYSFPVVIKNKTWKFVEGLPINDFSREKMDLTAKELTEEKESAFEFLSSA

SEQ ID NO: 51906 - protein, 465 aa, Homo sapiens
LVLCGLLEASGGGRALPQLSDDIPFRVNWPGTEFSLPTTGVLYKEDNYVIMTTAHKEKYKCILPLVTSGDEEEEKDYKGPNPRELLEPLFKQSSCSYRIESYWTYEVCHGKHIRQYHEEKETGQKINIHEYYLGNMLAKNLLFEKEREAEEKEKSNEIPTKNIEGQMTPYYPVGMGNGTPCSLKQNRPRSSTVMYICHPESKHEILSVAEVTTCEYEVVILTPLLCSHPKYRFRASPVNDIFCQSLPGSPFKPLTLRQLEQQEEILRVPFRRNKEEDLQSTKEERFPAIHKSIAIGSQPVLTVGTTHISKLTDDQLIKEFLSGSYCFRGGVGWWKYEFCYGKHVHQYHEDKDSGKTSVVVGTWNQEEHIEWAKKNTARAYHLQDDGTQTVRMVSHFYGNGDICDITDKPRQVTVKLKCKESDSPHAVTVYMLEPHSCQYILGVESPVICKILDTADENGLLSLPN

SEQ ID NO: 51907 - protein, 245 aa, Homo sapiens
IQAIQVLRFHLLELEKVHELCDNFCHRYISCLKGKMPIDLVIDDREGGSKSDSEDITRSANLTDQPSWNRDHDDTASTRSGGTPGPSSGGHTSHSGDNSSEQGDGLDNSVASPSTGDDDDPDKDKKRHKKRGIFPKVATNIMRAWLFQHLTHPYPSEEQKKQLAQDTGLTILQVNNWFINARRRIVQPMIDQSNRAVSQGTPYNPDGQPMGGFVMDGQQHMGIRAPGPMSGMGMNMGMEGQWHYM

SEQ ID NO: 51908 - protein, 79 aa, Homo sapiens
TGLTILQVNNWFINARRRIVQPMIDQSNRAVSQGTPYNPDGQPMGGFVMDGQQHMGIRAPGPMSGMGMNMGMEGQWHYM

SEQ ID NO: 51909 - protein, 292 aa, Homo sapiens
VNRAKRKAGVDPLVPLRSLGLSLSGGDQEDAGRILIEELRDRFPYLSESYLITTDAAGSIATATPDGGVVLISGTGSNCRLINPDGSESGCGGWGHMMGDEGSAYWIAHQAVKIVFDSIDNLEAAPHDIGYVKQAMFHYFQVPDRLGILTHLYRDFDKCRFAGFCRKIAEGAQQGDPLSRYIFRKAGEMLGRHIVAVLPEIDPVLFQGKIGLPILCVGSVWKSWELLKEGFLLALTQGREIQAQNFFSSFTLMKLRHSSALGGASLGARHIGHLLPMDYSANAIAFYSYTFS

SEQ ID NO: 51910 - protein, 651 aa, Homo sapiens
IQEGLASKFTSLTKVLYDFNKILENGRIHGSPLQKLVIENFDDEQIWQQLELQNEPILQYFQNAVSETINDEDISLLPESEEQEREEDGSEIEADDKEDLEDLEEEEVSDMGNDDPEMGERAENSSKSDLRKSPVFSDEDSDLDFDISKLEQQSKVQNKGQGKPREKSIVDDKFFKLSEMEAYLENIEKEEERKDDNDEEEEDIDFFEDIDSDEDEGGLFGSKKLKSGKSSRNLKYKDFFDPVESDEDITNVHDDELDSNKEDDEIAEEEAEELSISETDEDDDLQENEDNKQHKESLKRVTFALPDDAETEDTGVLNVKKNSDEVKSSFEKRQEKMNEKIASLEKELLEKKPWQLQGEVTAQKRPENSLLEETLHFDHAVRMAPVITEETTLQLEDIIKQRIRDQAWDDVVRKEKPKEDAYEYKKRLTLDHEKSKLSLAEIYEQEYIKLNQQKTAEEENPEHVEIQKMMDSLFLKLDALSNFHFIPKPPVPEIKVVSNLPAITMEEVAPVSVSDAALLAPEEIKEKNKAGDIKTAAEKTATDKKRERRKKKYQKRMKIKEKEKRRKLLEKSSVDQAGKYSKTVASEKLKQLTKTGKASFIKDEGKDKALKSSQAFFSKLQDQVKMQINDAKKTEKKKKKRQDISVHKLKL

SEQ ID NO: 51911 - protein, 37 aa, Homo sapiens
RHSSALGGASLGARHIGHLLPMDYSANAIAFYSYTFS

SEQ ID NO: 51912 - protein, 5 aa, Homo sapiens
IKEYI

SEQ ID NO: 51913 - protein, 331 aa, Homo sapiens
TAERRALGIGFQWLSLATLVLICAGQGGRREDGGPACYGGFDLYFILDKSGSVLHHWNEIYYFVEQLAHKFISPQLRMSFIVFSTRGTTLMKLTEDREQIRQGLEELQKVLPGGDTYMHEGFERASEQIYYENRQGYRTASVIIALTDGELHEDLFFYSEREANRSRDLGAIVYCVGVKDFNETQLARIADSKDHVFPVNDGFQALQGIIHSILKKSCIEILAAEPSTICAGESFQVVVRGNGFRHARNVDRVLCSFKINDSVTLNEKPFSVEDTYLLCPAPILKEVGMKAALQVSMNDGLSFISSSVIITTTHCSLHKIASGPTTAACME

SEQ ID NO: 51914 - protein, 562 aa, Homo sapiens
TAERRALGIGFQWLSLATLVLICAGQGGRREDGGPACYGGFDLYFILDKSGSVLHHWNEIYYFVEQLAHKFISPQLRMSFIVFSTRGTTLMKLTEDREQIRQGLEELQKVLPGGDTYMHEGFERASEQIYYENRQGYRTASVIIALTDGELHEDLFFYSEREANRSRDLGAIVYCVGVKDFNETQLARIADSKDHVFPVNDGFQALQGIIHSILKKSCIEILAAEPSTICAGESFQVVVRGNGFRHARNVDRVLCSFKINDSVTLNEKPFSVEDTYLLCPAPILKEVGMKAALQVSMNDGLSFISSSVIITTTHCSDGSILAIALLILFLLLALALLWWFWPLCCTVIIKEVPPPPAEESEEEDDDGLPKKKWPTVDASYYGGRGVGGIKRMEVRWGEKGSTEEGAKLEKAKNARVKMPEQEYEFPEPRNLNNNMRRPSSPRKWYSPIKGKLDALWVLLRKGYDRVSVMRPQPGDTGRCINFTRVKNNQPAKYPLNNAYHTSSPPPAPIYTPPPPAPHCPPPPPSAPTPPIPSPPSTLPPPPQAPPPNRAPPPSRPPPRPSV

SEQ ID NO: 51915 - protein, 56 aa, Homo sapiens
VESTDYLTGDLDWSSSSVSDSDERGSMQSLGSDEGYSSTSIKRIKLQDSHKACLGL

SEQ ID NO: 51916 - protein, 55 aa, Homo sapiens
KPEPKPKKAPAKKGEKVPKGKKGKADAGKEGNYPAEKGDAITDQAREAEGDGEAK

SEQ ID NO: 51917 - protein, 68 aa, Homo sapiens
VLVLSARNDEALRQLEAELGAERSGLRVVRVPADLGAEAGLQQLLGALRELPRPKGLQRLLLINNAAS

SEQ ID NO: 51918 - protein, 107 aa, Homo sapiens
ISSLCALQPFKGWALYCAGKAARDMLFQVLALEEPNVRVLNYAPGPLDTDMQQLARETSVDPDMRKGLQELKAKGKLVDCKVSAQKLLSLLEKDEFKSGAHVDFYDK

SEQ ID NO: 51919 - protein, 25 aa, Homo sapiens
KDPPLFCSCSHVTVVDRAVTITDLR

SEQ ID NO: 51920 - protein, 125 aa, Homo sapiens
KNLFENGSLSDIEWHIYQDWHSFLLWEFASRITLHGFIYLQASPQVCLKRLYQRAREEEKGIELAYLEQLHGQHEAWLIHKTTKLHFEALMNIPVLVLDVNDDFSEEVTKQEDLMREVNTFVKNL

SEQ ID NO: 51921 - protein, 42 aa, Homo sapiens
ISSIYSQRAVEETYNSCRYCNICCRYSKSDHSRYDQGRSSSH

SEQ ID NO: 51922 - protein, 33 aa, Homo sapiens
LPDLEDYSPCALPPESVPQIFPMGLSSSEGDIP

SEQ ID NO: 51923 - protein, 70 aa, Homo sapiens
MSTAQSLKSVDYEVFGRVQGVCFRMYTEDEARKIGVVGWVKNTSKGTVTGQVQGPEDKVNSMNSSAPEAG

SEQ ID NO: 51924 - protein, 75 aa, Homo sapiens
MYTEDEARKIGVVGWVKNTSKGTVTGQVQGPEDKVNSMKSWLSKVGSPSSRIDRTNFSNEKTISKLEYSNFSIRY

SEQ ID NO: 51925 - protein, 2369 aa, Homo sapiens
LRQFKMTTTVATDYDNIEIQQQYSDVNNRWDVDDWDNENSSARLFERSRIKALADEREAVQKKTFTKWVNSHLARVSCRITDLYTDLRDGRMLIKLLEVLSGERLPKPTKGRMRIHCLENVDKALQFLKEQRVHLENMGSHDIVDGNHRLTLGLIWTIILRFQIQDISVETEDNKEKKSAKDALLLWCQMKTAGYPNVNIHNFTTSWRDGMAFNALIHKHRPDLIDFDKLKKSNAHYNLQNAFNLAEQHLGLTKLLDPEDISVDHPDEKSIITYVVTYYHYFSKMKALAVEGKRIGKVLDNAIETEKMIEKYESLASDLLEWIEQTIIILNNRKFANSLVGVQQQLQAFNTYRTVEKPPKFTEKGNLEVLLFTIQSKMRANNQKVYMPREGKLISDINKAWERLEKAEHERELALRNELIRQEKLEQLARRFDRKAAMRETWLSENQRLVSQDNFGFDLPAVEAATKKHEAIETDIAAYEERVQAVVAVARELEAENYHDIKRITARKDNVIRLWEYLLELLRARRQRLEMNLGLQKIFQEMLYIMDWMDEMKVLVLSQDYGKHLLGVEDLLQKHTLVEADIGIQAERVRGVNASAQKFATDGEGYKPCDPQVIRDRVAHMEFCYQELCQLAAERRARLEESRRLWKFFWEMAEEEGWIREKEKILSSDDYGKDLTSVMRLLSKHRAFEDEMSGRSGHFEQAIKEGEDMIAEEHFGSEKIRERIIYIREQWANLEQLSAIRKKRLEEASLLHQFQADADDIDAWMLDILKIVSSSDVGHDEYSTQSLVKKHKDVAEEIANYRPTLDTLHEQASALPQEHAESPDVRGRLSGIEERYKEVAELTRLRKQALQDTLALYKMFSEADACELWIDEKEQWLNNMQIPEKLEDLEVIQHRFESLEPEMNNQASRVAVVNQIARQLMHSGHPSEKEIKAQQDKLNTRWSQFRELVDRKKDALLSALSIQNYHLECNETKSWIREKTKVIESTQDLGNDLAGVMALQRKLTGMERDLVAIEAKLSDLQKEAEKLESEHPDQAQAILSRLAEISDVWEEMKTTLKNREASLGEASKLQQFLRDLDDFQSWLSRTQTAIASEDMPNTLTEAEKLLTQHENIKNEIDNYEEDYQKMRDMGEMVTQGQTDAQYMFLRQRLQALDTGWNELHKMWENRQNLLSQSHAYQQFLRDTKQAEAFLNNQEYVLAHTEMPTTLEGAEAAIKKQEDFMTTMDANEEKINAVVETGRRLVSDGNINSDRIQEKVDSIDDRHRKNRETASELLMRLKDNRDLQKFLQDCQELSLWINEKMLTAQDMSYDEARNLHSKWLKHQAFMAELASNKEWLDKIEKEGMQLISEKPETEAVVKEKLTGLHKMWEVLESTTQTKAQRLFDANKAELFTQSCADLDKWLHGLESQIQSDDYGKDLTSVNILLKKQQMLENQMEVRKKEIEELQSQAQALSQEGKSTDEVDSKRLTVQTKFMELLEPLNERKHNLLASKEIHQFNRDVEDEILWVGERMPLATSTDHGHNLQTVQLLIKKNQTLQKEIQGHQPRIDDIFERSQNIVTDSSSLSAEAIRQRLADLKQLWGLLIEETEKRHRRLEEAHRAQQYYFDAAEAEAWMSEQELYMMSEEKAKDEQSAVSMLKKHQILEQAVEDYAETVHQLSKTSRALVADSHPESERISMRQSKVDKLYAGLKDLAEERRGKLDERHRLFQLNREVDDLEQWIAEREVVAGSHELGQDYEHVTMLQERFREFARDTGNIGQERVDTVNHLADELINSGHSDAATIAEWKDGLNEAWADLLELIDTRTQILAASYELHKFYHDAKEIFGRIQDKHKKLPEELGRDQNTVETLQRMHTTFEHDIQALGTQVRQLQEDAARLQAAYAGDKADDIQKRENEVLEAWKSLLDACESRRVRLVDTGDKFRFFSMVRDLMLWMEDVIRQIEAQEKPRDVSSVELLMNNHQGIKAEIDARNDSFTTCIELGKSLLARKHYASEEIKEKLLQLTEKRKEMIDKWEDRWEWLRLILEVHQFSRDASVAEAWLLGQEPYLSSREIGQSVDEVEKLIKRHEAFEKSAATWDERFSALERLTTLELLEVRRQQEEEERKRRPPSPEPSTKVSEEAESQQQWDTSKGEQVSQNGLPAEQGSPRMAETVDTSEMVNGATEQRTSSKESSPIPSPTSDRKAKTALPAQSAATLPARTQETPSAQMEGFLNRKHEWEAHNKKASSRSWHNVYCVINNQEMGFYKDAKTAASGIPYHSEVPVSLKEAVCEVALDYKKKKHVFKLRLNDGNEYLFQAKDDEEMNTWIQAISSAISSDKHEVSASTQSTPASSRAQTLPTSVVTITSESSPGKREKDKEKDKEKRFSLFGKKK

SEQ ID NO: 51926 - protein, 77 aa, Homo sapiens
LPLARVKALVKADPDVTLAGQEAIFILARAAELFVETIAKDAYCCAQQGKRKTLQRRDLDNAIEAVDEFAFLEGTLD

SEQ ID NO: 51927 - protein, 199 aa, Homo sapiens
VDHCKEQNVPVPKEPIIFSKFASSIVGPYDEVVLPPQSQEVDWEVELAVVIGKKGKHIKATDAMAHVAGFTVAHDVSARDWQMRRNGKQWLLGKTFDTFCPLGPALVTKDSVADPHNLKICCRVNGEVVQSGNTNQMVFKTEDLIAWVSQFVTFYPGDVILTGTPPGVGVFRKPPVFLKKGDEVQCEIEELGVIINKVV

SEQ ID NO: 51928 - protein, 141 aa, Homo sapiens
KATDAMAHVAGFTVAHDVSARDWQMRRNGKQWLLGKTFDTFCPLGPALVTKDSVADPHNLKICCRVNGEVVQSGNTNQMVFKTEDLIAWVSQFVTFYPGDVILTGTPPGVGVFRKPPVFLKKGDEVQCEIEELGVIINKVV

SEQ ID NO: 51929 - protein, 156 aa, Homo sapiens
IPQVPLFNILAKFNGITEKEYKTYKENFLKRFQLTKLPPYLIFCIKRFTKNNFFVEKNPTIVNFPITNVDLREYLSEEVQAVHKNTTYDLIANIVHDGKPSEGSYRIHVLHHGTGKWYELQDLQVTDILPQMITLSEAYIQIWKRRDNDETNQQGA

SEQ ID NO: 51930 - protein, 88 aa, Homo sapiens
LANARERTRVHTISAAFEALRKQVPCYSYGQKLSKLAILRIACNYILSLARLADLDYSADHSNLSFSECVQRCTRTLQAEGRAKKRKE

SEQ ID NO: 51931 - protein, 166 aa, Homo sapiens
LASSTYRNCVKNASLISALSTGRFSHIQTPVVSSTPRLTTSERNLTCGHTSVILNRMAPVLPSVLKLPVRSLTYFSARKGKRKTVKAVIDRFLRLHCGLWVRRKAGYKKKLWKKTPARKKRLREFVFCNKTQSKLLDKMTTSFWKRRNWYVDDPYQKYHDRTNLKV

SEQ ID NO: 51932 - protein, 25 aa, Homo sapiens
KAEVCAFFFFSFLVVCTSLGMEGNK

SEQ ID NO: 51933 - protein, 6 aa, Homo sapiens
MKQEAL

SEQ ID NO: 51934 - protein, 152 aa, Homo sapiens
LQMQLQLERQHAQAARQQLETARNATRRTNTSSVTTTITQSTATTNIANTESSQQTLQNSQFLLTRLNDPKMSETERQSMESERADRSLFVQELLLSTLVREESSSSDEDDRGEMADFGAMGCVDIMPLDVALENLNLKESNKGNEPPPPPL

SEQ ID NO: 51935 - protein, 197 aa, Homo sapiens
IAVETDVRVNKDSLTDLYVQHAIPLPQRDLPKNRWGKMMEKKREQHEIKNETKRSSTVDGLRKRPLIVFDGSSTSTSIKVKKTENGDNDRLKPPPQASFTSNAFRKLSNSSSSVSPLILSSNLPVNNKTEHNNNDAKQNHDLTHRKSPSGPVKSPPLSPVGTTPVKLKRAAPKEEAEAMNNLKPPQAKRKIQHVTWP

SEQ ID NO: 51936 - protein, 648 aa, Homo sapiens
KDSGKTLDKKPSKEMSSDSEYDSDDDRTKEERAYDKAKRRIEKRRLEHSKNVNTEKLRAPIICVLGHVDTGKTKILDKLRHTHVQDGEAGGITQQIGATNVPLEAINEQTKMIKNFDRENVRIPGMLIIDTPGHESFSNLRNRGSSLCDIAILVVDIMHGLEPQTIESINLLKSKKCPFIVALNKIDRLYDWKKSPDSDVAATLKKQKKNTKDEFEERAKAIIVEFAQQGLNAALFYENKDPRTFVSLVPTSAHTGDGMGSLIYLLVELTQTMLSKRLAHCEELRAQVMEVKALPGMGTTIDVILINGRLKEGDTIIVPGVEGPIVTQIRGLLLPPPMKELRVKNQYEKHKEVEAAQGVKILGKDLEKTLAGLPLLVAYKEDEIPVLKDELIHELKQTLNAIKLEEKGVYVQASTLGSLEALLEFLKTSEVPYAGINIGPVHKKDVMKASVMLEHDPQYAVILAFDVRIERDAQEMADSLGVRIFSAEIIYHLFDAFTKYRQDYKKQKQEEFKHIAVFPCKIKILPQYIFNSRDPIVMGVTVEAGQVKQGTPMCVPSKNFVDIGIVTSIEINHKQVDVAKKGQEVCVKIEPIPGESPKMFGRHFEATDILVSKISRQSIDALKDWFRDEMQKSDWQLIVELKKVFEII

SEQ ID NO: 51937 - protein, 608 aa, Homo sapiens
IEKRRLEHSKNVNTEKLRAPIICVLGHVDTGKTKILDKLRHTHVQDGEAGGITQQIGATNVPLEAINEQTKMIKNFDRENVRIPGMLIIDTPGHESFSNLRNRGSSLCDIAILVVDIMHGLEPQTIESINLLKSKKCPFIVALNKIDRLYDWKKSPDSDVAATLKKQKKNTKDEFEERAKAIIVEFAQQGLNAALFYENKDPRTFVSLVPTSAHTGDGMGSLIYLLVELTQTMLSKRLAHCEELRAQVMEVKALPGMGTTIDVILINGRLKEGDTIIVPGVEGPIVTQIRGLLLPPPMKELRVKNQYEKHKEVEAAQGVKILGKDLEKTLAGLPLLVAYKEDEIPVLKDELIHELKQTLNAIKLEEKGVYVQASTLGSLEALLEFLKTSEVPYAGINIGPVHKKDVMKASVMLEHDPQYAVILAFDVRIERDAQEMADSLGVRIFSAEIIYHLFDAFTKYRQDYKKQKQEEFKHIAVFPCKIKILPQYIFNSRDPIVMGVTVEAGQVKQGTPMCVPSKNFVDIGIVTSIEINHKQVDVAKKGQEVCVKIEPIPGESPKMFGRHFEATDILVSKISRQSIDALKDWFRDEMQKSDWQLIVELKKVFEII

SEQ ID NO: 51938 - protein, 101 aa, Homo sapiens
RKFPDVKFIKAISTTCIPNYPDRNLPTIFVYLEGDIKAQFIGPLVFGGMNLTRDELEWKLSESGAIMTDLEENPKKPIEDVLLSSVRRSVLMKRDSDSEGD

SEQ ID NO: 51939 - protein, 4 aa, Homo sapiens
VTPS

SEQ ID NO: 51940 - protein, 572 aa, Homo sapiens
KKNMKVLLRLICFIALLISSLEADKCKEREEKIILVSSANEIDVRPCPLNPNEHKGTITWYKDDSKTPVSTEQASRIHQHKEKLWFVPAKVEDSGHYYCVVRNSSYCLRIKISAKFVENEPNLCYNAQAIFKQKLPVAGDGGLVCPYMEFFKNENNELPKLQWYKDCKPLLLDNIHFSGVKDRLIVMNVAEKHRGNYTCHASYTYLGKQYPITRVIEFITLEENKPTRPVIVSPANETMEVDLGSQIQLICNVTGQLSDIAYWKWNGSVIDEDDPVLGEDYYSVENPANKRRSTLITVLNISEIESRFYKHPFTCFAKNTHGIDAAYIQLIYPVTNFQKHMIGICVTLTVIIVCSVFIYKIFKIDIVLWYRDSCYDFLPIKASDGKTYDAYILYPKTVGEGSTSDCDIFVFKVLPEVLEKQCGYKLFIYGRDDYVGEDIVEVINENVKKSRRLIIILVRETSGFSWLGGSSEEQIAMYNALVQDGIKVVLLELEKIQDYEKMPESIKFIKQKHGAIRWSGDFTQGPQSAKTRFWKNVRYHMPVQRRSPSSKHQLLSPATKEKLQREAHVPLG

SEQ ID NO: 51941 - protein, 33 aa, Homo sapiens
LYLQNKPPGFINTKRNFGLFLLRWRIQDITIAW

SEQ ID NO: 51942 - protein, 67 aa, Homo sapiens
MSLTYVIMHKPYLSRNYPLQETEDLCALIWSFLKMKIMSYLNYSGIRIANLYFLTIYTLVESKIGSS

SEQ ID NO: 51943 - protein, 22 aa, Homo sapiens
KSITNCLMCGDLHCRMPVTHLE

SEQ ID NO: 51944 - protein, 331 aa, Homo sapiens
INRMGFWILAILTILMYSTAAKFSKQSWGLENEALIVRCPRQGKPSYTVDWYYSQTNKSIPTQERNRVFASGQLLKFLPAAVADSGIYTCIVRSPTFNRTGYANVTIYKKQSDCNVPDYLMYSTVSGSEKNSKIYCPTIDLYNWTAPLEWFKNCQALQGSRYRAHKSFLVIDNVMTEDAGDYTCKFIHNENGANYSVTATRSFTVKDEQGFSLFPVIGAPAQNEIKEVEIGKNANLTCSACFGKGTQFLAAVLWQLNGTKITDFGEPRIQQEEGQNQSFSNGLACLDMVLRIADVKEEDLLLQYDCLALNLHGLRRHTVRLSRKNPSKECF

SEQ ID NO: 51945 - protein, 50 aa, Homo sapiens
MSAAVLQVHATIVSEKLLDPRIYYINSAASFFAFIATLLYILHAFSIYYH

SEQ ID NO: 51946 - protein, 74 aa, Homo sapiens
KSAANLEYLKNVLLQFIFLKPGSERERLLPVINTMLQLSPEEKGKLAAVAQGEEENASRSSGWASYLHSWSGLR

SEQ ID NO: 51947 - protein, 296 aa, Homo sapiens
LYHEQCFVCAQCFQQFPEGLFYEFEGRKYCEHDFQMLFAPCCHQCGEFIIGRVIKAMNNSWHPECFRCDLCQEVLADIGFVKNAGRHLCRPCHNREKARGLGKYICQKCHAIIDEQPLIFKNDPYHPDHFNCANCGKELTADARELKGELYCLPCHDKMGVPICGACRRPIEGRVVNAMGKQWHVEHFVCAKCEKPFLGHRHYERKGLAYCETHYNQLFGDVCFHCNRVIEGDVVSALNKAWCVNCFACSTCNTKLTLKNKFVEFDMKPVCKKCYEKFPLELKKRLKKLAETLGRK

SEQ ID NO: 51948 - protein, 315 aa, Homo sapiens
IHFEPIVSLPEVEVKSGEEDEEILFKERAKLYRWDRDVSQWKERGVGDIKILWHTMKNYYRILMRRDQVFKVCANHVITKTMELKPLNVSNNALVWTASDYADGEAKVEQLAVRFKTKEVADCFKKTFEECQQNLMKLQKGHVSLAAELSKETNPVVFFDVCADGEPLGRITMELFSNIVPRTAENFRALCTGEKGFGFKNSIFHRVIPDFVCQGGDITKHDGTGGQSIYGDKFEDENFDVKHTGPGLLSMANQGQNTNNSQFVITLKKAEHLDFKHVVFGFVKDGMDTVKKIESFGSPKGSVCRRITITECGQI

SEQ ID NO: 51949 - protein, 558 aa, Homo sapiens
LVKMVAACRSVAGLLPRRRRCFPARAPLLRVALCLLCWTPAAVRAVPELGLWLETVNDKSGPLIFRKTMFNSTDIKLSVKSFHCSGPVKFTIVWHLKYHTCHNEHSNLEELFQKHKLSVDEDFCHYLKNDNCWTTKNENLDCNSDSQVFPSLNNKELINIRNVSNQERSMDVVARTQKDGFHIFIVSIKTENTDASWNLNVSLSMIGPHGYISASDWPLMIFYMVMCIVYILYGILWLTWSACYWKDILRIQFWIAAVIFLGMLEKAVFYSEYQNISNTGLSTQGLLIFAELISAIKRTLARLLVIIVSLGYGIVKPRLGTVMHRVIGLGLLYLIFAAVEGVMRVIGGSNHLAVVLDDIILAVIDSIFVWFIFISLAQTMKTLRLRKNTVKFSLYRHFKNTLIFAVLASIVFMGWTTKTFRIAKCQSDWMERWVDDAFWSFLFSLILIVIMFLWRPSANNQRYAFMPLIDDSDDEIEEFMVTSENLTEGIKLRASKSVSNGTAKPATSENFDEDLKWVEENIPSSFTDVALPVLVDSDEEIMTRSEMAEKMFSSEKIM

SEQ ID NO: 51950 - protein, 37 aa, Homo sapiens
KLYAELCQGIVDIAISSVFPPPDVEQPQTQPAAFIKL

SEQ ID NO: 51951 - protein, 45 aa, Homo sapiens
MRNRKYNCTLCSRSDTIDTVSVPYVFRYFVAELAAMNIKVKLDVV

SEQ ID NO: 51952 - protein, 70 aa, Homo sapiens
IAQCTSSHPIIRQIRQACAQPFEAFEECLRQNEAAVGNCAEHMRRFLQCAEQVQPPRSPATVEAQPLPAS

SEQ ID NO: 51953 - protein, 215 aa, Homo sapiens
VSQPQKTSEMAANKSKGQSSLALHKVIMVGSGGVGKSALTLQFMYDEFVEDYEPTKADSYRKKVVLDGEEVQIDILDTAGQEDYAAIRDNYFRSGEGFLLVFSITEHESFTATAEFREQILRVKAEEDKIPLLVVGNKSDLEERRQVPVEEARSKAEEWGVQYVETSAKTRANVDKVFFDLMREIRTKKMSENKDKNGKKSSKNKKSFKERCCLL

SEQ ID NO: 51954 - protein, 1284 aa, Homo sapiens
LLFVFWWQKGKMANDSPAKSLVDIDLSSLRDPAGIFELVEVVGNGTYGQVYKGRHVKTGQLAAIKVMDVTEDEEEEIKLEINMLKKYSHHRNIATYYGAFIKKSPPGHDDQLWLVMEFCGAGSITDLVKNTKGNTLKEDWIAYISREILRGLAHLHIHHVIHRDIKGQNVLLTENAEVKLVDFGVSAQLDRTVGRRNTFIGTPYWMAPEVIACDENPDATYDYRSDLWSCGITAIEMAEGAPPLCDMHPMRALFLIPRNPPPRLKSKKWSKKFFSFIEGCLVKNYMQRPSTEQLLKHPFIRDQPNERQVRIQLKDHIDRTRKKRGEKDETEYEYSGSEEEEEEVPEQEGEPSSIVNVPGESTLRRDFLRLQQENKERSEALRRQQLLQEQQLREQEEYKRQLLAERQKRIEQQKEQRRRLEEQQRREREARRQQEREQRRREQEEKRRLEELERRRKEEEERRRAEEEKRRVEREQEYIRRQLEEEQRHLEVLQQQLLQEQAMLLHDHRRPHPQHSQQPPPPQQERSKPSFHAPEPKAHYEPADRAREVEDRFRKTNHSSPEAQSKQTGRVLEPPVPSRSESFSNGNSESVHPALQRPAEPQVPVRTTSRSPVLSRRDSPLQGSGQQNSQAGQRNSTSSIEPRLLWERVEKLVPRPGSGSSSGSSNSGSQPGSHPGSQSGSGERFRVRSSSKSEGSPSQRLENAVKKPEDKKEVFRPLKPADLTALAKELRAVEDVRPPHKVTDYSSSSEESGTTDEEDDDVEQEGADESTSGPEDTRAASSLNLSNGETESVKTMIVHDDVESEPAMTPSKEGTLIVRQSTVDQKRASHHESNGFAGRIHLLPDLLQQSHSSSTSSTSSSPSSSQPTPTMSPQTPQDKLTANETQSASSTLQKHKSSSSFTPFIDPRLLQISPSSGTTVTSVVGFSCDGMRPEAIRQDPTRKGSVVNVNPTNTRPQSDTPEIRKYKKRFNSEILCAALWGVNLLVGTESGLMLLDRSGQGKVYPLINRRRFQQMDVLEGLNVLVTISGKKDKLRVYYLSWLRNKILHNDPEVEKKQGWTTVGDLEGCVHYKVVKYERIKFLVIALKSSVEVYAWAPKPYHKFMAFKSFGELVHKPLLVDLTVEEGQRLKVIYGSCAGFHAVDVDSGSVYDIYLPTHIQCSIKPHAIIILPNTDGMELLVCYEDEGVYVNTYGRITKDVVLQWGEMPTSVAYIRSNQTMGWGEKAIEIRSVETGHLDGVFMHKRAQRLKFLCERNDKVFFASVRSGGSSQVYFMTLGRTSLLSW

SEQ ID NO: 51955 - protein, 24 aa, Homo sapiens
RYLKYLTKKYLKKNNLHDWFVHSC

SEQ ID NO: 51956 - protein, 60 aa, Homo sapiens
IAYARIEGDMIVCAAYAHELPKYGVKVGLTNYAAEYCTGLLLARRLLNRFGTDNIYEGQV

SEQ ID NO: 51957 - protein, 226 aa, Homo sapiens
VSEIFVELQGFLAAEQDIREEIRKVVQSLEQTAREILTLLQGVHQGAGFQDIPKRCLKAREHFGTVKTHLTSLKTKFPAEQYYRFHEHWRFVLQRLVFLAAFVVYLETETLVTREAVTEILGIEPDREKGFHLDVEDYLSGVLILASELSRLSVNSVTAGDYSRPLHISTFINELDSGFRLLNLKNDSLRKRYDGLKYDVKKVEEVVYDLSIRGFNKETAAACVEK

SEQ ID NO: 51958 - protein, 48 aa, Homo sapiens
KDDTERTNRLVLLGRNLDKDILKQLFIATVTETEKQWTTHFKEDQVCT

SEQ ID NO: 51959 - protein, 61 aa, Homo sapiens
KLFNDAIRLAVSYKQNSQDFMDEIFQELENFSLEQEEEDVPDQEQSSSIETPSEEVASPHS

SEQ ID NO: 51960 - protein, 176 aa, Homo sapiens
TEAIQALFERGERRLNLDVQCDSCQELAVVPVFVDPGEESHRPFVVVQARLGDSRHRIRKRGLECDGRTNLCCRQQFFIDFRLIGWNDWIIAPTGYYGNYCEGSCPAYLAGVPGSASSFHTAVVNQYRMRGLNPGTVNSCCIPTKLSTMSMLYFDDEYNIVKRDVPNMIVEECGCA

SEQ ID NO: 51961 - protein, 129 aa, Homo sapiens
KKVLSTEEMELYELAQAAGGAIDPDVFKILVDLLKLNVAPLAVFQMLKSMCAGQRLASEPQDPAAVSLPTSSVPETRGRNKGSAALGGALALAERSSREGSSQRMPRQPSATRLPKGGGPGKSPTRGST

SEQ ID NO: 51962 - protein, 90 aa, Homo sapiens
IAARGEAEFEKAAEEVRHLKTKPSDEEMLFIYGHYKQATVGDINTERPGMLDFTGKAKWDAWNELKGTSKEDAMKAYINKVEELKKKYGI

SEQ ID NO: 51963 - protein, 10 aa, Homo sapiens
KAAHHTALTD

SEQ ID NO: 51964 - protein, 62 aa, Homo sapiens
ILLLVSFVLSSGGLLGFVILLRNQVTLIGFTLMFWCEFTASFLLFLNAISGLHINSITHPWE

SEQ ID NO: 51965 - protein, 20 aa, Homo sapiens
LQGDPALQDAGDSSRKEYFI

SEQ ID NO: 51966 - protein, 511 aa, Homo sapiens
KGAMLWFQGAIPAAIATAKRSGAVFVVFVAGDDEQSTQMAASWEDDKVTEASSNSFVAIKIDTKSEACLQFSQIYPVVCVPSSFFIGDSGIPLEVIAGSVSADELVTRIHKVRQMHLLKSETSVANGSQSESSVSTPSASFEPNNTCENSQSRNAELCEIPPTSDTKSDTATGGESAGHATSSQEPSGCSDQRPAEDLNIRVERLTKKLEERREEKRKEEEQREIKKEIERRKTGKEMLDYKRKQEEELTKRMLEERNREKAEDRAARERIKQQIALDRAERAARFAKTKEEVEAAKAAALLAKQAEMEVKRESYARERSTVARIQFRLPDGSSFTNQFPSDAPLEEARQFAAQTVGNTYGNFSLATMFPRREFTKEDYKKKLLDLELAPSASVVLLPAGRPTASIVHSSSGDIWTLLGTVLYPFLAIWRLISNFLFSNPPPTQTSVRVTSSEPPNPASSSKSEKREPVRKRVLEKRGDDFKKEGKIYRLRTQDDGEDENNTWNGNSTQQM

SEQ ID NO: 51967 - protein, 36 aa, Homo sapiens
ILIDPFHKAIRRNPDTQWITKPVHKHREMRGLTSAG

SEQ ID NO: 51968 - protein, 31 aa, Homo sapiens
ILASLSTFQQMWISKQEYDESGPSIVHRKCF

SEQ ID NO: 51969 - protein, 4 aa, Homo sapiens
VMVE

SEQ ID NO: 51970 - protein, 76 aa, Homo sapiens
LYPSLIPSETASTSPAASDFFMWLQMAGFPKGLWLQHIPWCICTAVSSFLQLCLNRSFTMRSSRFNSMAPNDEISF

SEQ ID NO: 51971 - protein, 1566 aa, Homo sapiens
LALWRTDHGPGMGCKGDASGACAAGALPVTGVCYKMGVLVVLTVLWLFSSVKADSKAITTSLTTKWFSTPLLLEASEFLAEDSQEKFWNFVEASQNIGSSDHDGTDYSYYHAILEAAFQFLSPLQQNLFKFCLSLRSYSATIQAFQQIAADEPPPEGCNSFFSVHGKKTCESDTLEALLLTASERPKPLLFKGDHRYPSSNPESPVVIFYSEIGSEEFSNFHRQLISKSNAGKINYVFRHYIFNPRKEPVYLSGYGVELAIKSTEYKAKDDTQVKGTEVNTTVIGENDPIDEVQGFLFGKLRDLHPDLEGQLKELRKHLVESTNEMAPLKVWQLQDLSFQTAARILASPVELALVVMKDLSQNFPTKARAITKTAVSSELRTEVEENQKYFKGTLGLQPGDSALFINGLHMDLDTQDIFSLFDVLRNEARVMEGLHRLGIEGLSLHNVLKLNIQPSEADYAVDIRSPAISWVNNLEVDSRYNSWPSSLQELLRPTFPGVIRQIRKNLHNMVFIVDPAHETTAELMNTAEMFLSNHIPLRIGFIFVVNDSEDVDGMQDAGVAVLRAYNYVAQEVDDYHAFQTLTHIYNKVRTGEKVKVEHVVSVLEKKYPYVEVNSILGIDSAYDRNRKEARGYYEQTGVGPLPVVLFNGMPFEREQLDPDELETITMHKILETTTFFQRAVYLGELPHDQDVVEYIMNQPNVVPRINSRILTAERDYLDLTASNNFFVDDYARFTILDSQGKTAAVANSMNYLTKKGMSSKEIYDDSFIRPVTFWIVGDFDSPSGRQLLYDAIKHQKSSNNVRISMINNPAKEISYENTQISRAIWAALQTQTSNAAKNFITKMAKEGAAEALAAGADIAEFSVGGMDFSLFKEVFESSKMDFILSHAVYCRDVLKLKKGQRAVISNGRIIGPLEDSELFNQDDFHLLENIILKTSGQKIKSHIQQLRVEEDVASDLVMKVDALLSAQPKGDPRIEYQFFEDRHSAIKLRPKEGETYFDVVAVVDPVTREAQRLAPLLLVLAQLINMNLRVFMNCQSKLSDMPLKSFYRYVLEPEISFTSDNSFAKGPIAKFLDMPQSPLFTLNLNTPESWMVESVRTPYDLDNIYLEEVDSVVAAEYELEYLLLEGHCYDITTGQPPRGLQFTLGTSANPVIVDTIVMANLGYFQLKANPGAWILRLRKGRSEDIYRIYSHDGTDSPPDADEVVIVLNNFKSKIIKVKVQKKADMVNEDLLSDGTSENESGFWDSFKWGFTGQKTEEVKQDKDDIINIFSVASGHLYERFLRIMMLSVLKNTKTPVKFWFLKNYLSPTFKEFIPYMANEYNFQYELVQYKWPRWLHQQTEKQRIIWGYKILFLDVLFPLVVDKFLFVDADQIVRTDLKELRDFNLDGAPYGYTPFCDSRREMDGYRFWKSGYWASHLAGRKYHISALYVVDLKKFRKIAAGDRLRGQYQGLSQDPNSLSNLDQDLPNNMIHQVPIKSLPQEWLWCETWCDDASKKRAKTIDLCNNPMTKEPKLEAAVRIVPEWQDYDQEIKQLQIRFQKEKETGALYKEKTKEPSREGPQKREEL

SEQ ID NO: 51972 - protein, 93 aa, Homo sapiens
KTQGTGYLARTSSGFPGASGKWELLQSWRLPSFLSPVLQVLYLVDQKLRSVFSLMLIGKKTEPIKLVLNRVMVTKINGGIVLLPGRIFLVPLK

SEQ ID NO: 51973 - protein, 230 aa, Homo sapiens
KLTYAEAKAVCEFEGGHLATYKQLEAARKIGFHVCAAGWMAKGRVGYPIVKPGPNCGFGKTGIIDYGIRLNRSERWDAYCYNPHAKECGGVFTDPKQIFKSPGFPNEYEDNQICYWHIRLKYGQRIHLSFLDFDLEDDPGCLADYVEIYDSYDDVHGFVGRYCGDELPDDIISTGNVMTLKFLSDASVTAGGFQIKYVAMDPVSKSSQGKNTSTTSTGNKNFLAGRFSHL

SEQ ID NO: 51974 - protein, 99 aa, Homo sapiens
IPVFDISEKTVNGIENKSLSPDEERLVSDIIDPVALEIPLSKNLLAQISALALQLDSEDLHNYSGSQLFEMHEKLSCMANSVIKNLQSRWRSPSHENSI

SEQ ID NO: 51975 - protein, 48 aa, Homo sapiens
KERLRRALEENRLIPTELRREALALQGSLEFDDAGGEGNYTRCDQPRG

SEQ ID NO: 51976 - protein, 63 aa, Homo sapiens
MITTSRDPSSRLKMFAKELKLVFPGAQRMNRGRHEVGALVRACKANGVTDLLVVHEHRGTPGL

SEQ ID NO: 51977 - protein, 116 aa, Homo sapiens
LGTMSEAKPHLITHGFSSRLGKRVSDILRYLFPVPKDDSHRVITFANQDDYISFRHHVYKKTDHRNVELTEVGPRFELKLYMIRLGTLEQEATADVEWRWHPYTNTARKRVFLSTE

SEQ ID NO: 51978 - protein, 68 aa, Homo sapiens
TPRAQRPGAHAEDARGTLPGRVPADQSPAGSGAYEDVAGGAQTGGLGFNLRIGRPKGPRDPPAEWTRV

SEQ ID NO: 51979 - protein, 31 aa, Homo sapiens; identical to SEQ ID NO: 51968

SEQ ID NO: 51980 - protein, 214 aa, Homo sapiens
LLRQSTILKRWKKNWFDLWSDGHLIYYDDQTRQNIEDKVHMPMDCINIRTGQECRDTQPPDGKSKDCMLQIVCRDGKTISLCAESTDDCLAWKFTLQDSRTNTAYVGSAVMTDETSVVSSPPPYTAYAAPAPEQAYGYGPYGGAYPPGTQVVYAANGQAYAVPYQYPYAGLYGQQPANQVIIRERYRDNDSDLALGMLAGAATGMALGSLFWVF

SEQ ID NO: 51981 - protein, 31 aa, Homo sapiens; identical to SEQ ID NO: 51968

SEQ ID NO: 51982 - protein, 381 aa, Homo sapiens
ILAWFWNERFWLPHNVTWADLKNTEEATFPQAEDLYLAFPLAFCIFMVRLIFERFVAKPCAIALNIQANGPQIAPPNAILEKVFTAITKHPDEKRLEGLSKQLDWDVRSIQRWFRQRRNQEKPSTLTRFCESMWRFSFYLYVFTYGVRFLKKTPWLWNTRHCWYNYPYQPLTTDLHYYYILELSFYWSLMFSQFTDIKRKDFGIMFLHHLVSIFLITFSYVNNMARVGTLVLCLHDSADALLEAAKMANYAKFQKMCDLLFVMFAVVFITTRLGIFPLWVLNTTLFESWEIVGPYPSWWVFNLLLLLVQGLNCFWSYLIVKIACKAVSRGKVSKDDRSDIESSSDEEDSEPPGKNPHTATTTNGTSGTNGYLLTGSCSMDD

SEQ ID NO: 51983 - protein, 82 aa, Homo sapiens
IAPIPDKGAVRLHPCDNRNKGLKWLHKSTSVFHPELVNHIVFENNQQLLCLEGNFSQKILKVAACDPVKPYQKWKFEKYYEA

SEQ ID NO: 51984 - protein, 45 aa, Homo sapiens
LSTDSIERLPVYNKAAWKHYNTNHEADDWCVPSREPKDMTTFRSA

SEQ ID NO: 51985 - protein, 102 aa, Homo sapiens
VEKLQESVKEINSLHKVYSASPIFGVDYEMEEKPQPLEALTVEQIQDDVEIDSDGHTDAFVAYFADGNKQQDREPVFSEELGLAIEKLKDGFTLQGLWEVMS

SEQ ID NO: 51986 - protein, 22 aa, Homo sapiens
LASNSIKRMKPSGRHAWIEILQ

SEQ ID NO: 51987 - protein, 275 aa, Homo sapiens
LALLKMLKHGRAGVPMEVMGLMLGEFVDDYTVRVIDVFAMPQSGTGVSVEAVDPVFQAKMLDMLKQTGRPEMVVGWYHSHPGFGCWLSGVDINTQQSFEALSERAVAVVVDPIQSVKGKVVIDAFRLINANMMVLGHEPRQTTSNLGHLNKPSIQALIHGLNRHYYSITINYRKNELEQKMLLNLHKKSWMEGLTLQDYSEHCKHNESVVKEMLELAKNYNKAVEEEDKMTPEQLAIKNVGKQDPKRHLEEHVDVLMTSNIVQCLAAMLDTVVFK

SEQ ID NO: 51988 - protein, 413 aa, Homo sapiens
MEKFLVEYKSAVEKKLAEYKCNTNTAIELKLVRFPEDLENDIRTFFPEYTHQLFGDDETAFGYKGLKILLYYIAGSLSTMFRVEYASKVDENFDCVEADDVEGKIRQIIPPGFCTNTNDFLSLLEKEVDFKPFGTLLHTYSVLSPTGGENFTFQIYKADMTCRGFREYHERLQTFLMWFIETASFIDVDDERWHYFLVFEKYNKDGATLFATVGYMTVYNYYVYPDKTRPRVSQMLILTPFQGQGHGAQLLETVHRYYTEFPTVLDITAEDPSKSYVKLRDFVLVKLCQDLPCFSREKLMQGFNEDMVIEAQQKFKINKQHARRVYEILRLLVTDMSDAEQYRSYRLDIKRRLISPYKKKQRDLAKMRKCLRPEELTNQMNQIEISMQHEQLEESFQELVEDYRRVIERLAQE

SEQ ID NO: 51989 - protein, 48 aa, Homo sapiens
LEKELFREMESILQNKHLDVEKIVNLFPQCTKDEIQIYQSNLSVKVSS

SEQ ID NO: 51990 - protein, 367 aa, Homo sapiens
LNEIKENQRSPVRVKERKITDHRNVSESPNRKNEKEKKVKDHKSNSKERDIRRNSEKDDKYKNKVKKRAKSKSRSKSKEKSKSKERDSKHNRNEEKRMRSRSKGRDHENVKEKEKQSDSKGKDQERSRSKEKSKQLESKSNEHDHSKSKEKDRRAQSRSRECDITKGKHSYNSRTRERSRSRDRSRRVRSRTHDRDRSRSKEYHRYREQEYRRRGRSRSRERRTPPGRSRSKDRRRRRRDSRSSEREESQSRNKDKYRNQESKSSHRKENSESEKRMYSKSRDHNSSNNSREKKADRDQSPFSKIKQSSQDNELKSSMLKNKEDEKIRSSVEKENQKSKGQENDHVHEKNKKFDHESSPGTDEDKSG

SEQ ID NO: 51991 - protein, 19 aa, Homo sapiens
IFENNWLMFKTEDCHDCLS

SEQ ID NO: 51992 - protein, 411 aa, Homo sapiens
IAAMAENGDNEKMAALEAKICHQIEYYFGDFNLPRDKFLKEQIKLDEGWVPLEIMIKFNRLNRLTTDFNVIVEALSKSKAELMEISEDKTKIRRSPSKPLPEVTDEYKNDVKNRSVYIKGFPTDATLDDIKEWLEDKGQVLNIQMRRTLHKAFKGSIFVVFDSIESAKKFVETPGQKYKETDLLILFKDDYFAKKNEERKQNKVEAKLRAKQEQEAKQKLEEDAEMKSLEEKIGCLLKFSGDLDDQTCREDLHILFSNHGEIKWIDFVRGAKEGIILFKEKAKEALGKAKDANNGNLQLRNKEVTWEVLEGEVEKEALKKIIEDQQESLNKWKSKGRRFKGKGKGNKAAQPGSGKGKVQFQGKKTKFASDDEHDEHDENGATGPVKRAREETDKEEPASKQQKTENGAGDQ

SEQ ID NO: 51993 - protein, 205 aa, Homo sapiens
LGQCRDNVEPKKLPISEEEQIYPWDTCAAVHDVRLSLLQRYFKDSSCLLAVSIGWEGGVYVQTCGHTLHIDCHKSYMESLRNDQVLQGFSVDKGEFTCPLCRQFANSVLPCYPGSNVENNPWQRPSNKSIQDLIKEVEELQGRPGAFPVSISSETNLSKEMESVMKDIKNTTQKKYRDYSKTPGSPDNDFLFMYSVARYHLTSNE

SEQ ID NO: 51994 - protein, 185 aa, Homo sapiens
LDWPVPAFDIITQWCFEIKSFTERHAEQGKALLIQESKWKLPHLLQLPENYNTIFQYYHRKTCSVCTKVPKDPAVCLVCGTFVCLKGLCCKQQSYCECVLHSQNCGAGTGIFLLINASVIIIIRGHRFCLWGSVYLDAHGEEDRDLRRGKPLYICKERYKVLEQQWISHTFDHINKRWGPHYNGL

SEQ ID NO: 51995 - protein, 4 aa, Homo sapiens
MFNS

SEQ ID NO: 51996 - protein, 30 aa, Homo sapiens
VEYRKKPHRPSPAKTNKERARGDHRGWRNF

SEQ ID NO: 51997 - protein, 60 aa, Homo sapiens
IEDGKVVTVHLEKIKKMEWWSRLVSSDPEINTKKINPENSKLSDLDSETHIMVEKTIYDQ

SEQ ID NO: 51998 - protein, 35 aa, Homo sapiens
LVLHIEQKPNRVFSCYVYQMICDTGEEEETINRSC

SEQ ID NO: 51999 - protein, 36 aa, Homo sapiens
KEGFDALDPFIPILVSNYNPKEFESRIQYCLENNWL

SEQ ID NO: 52000 - protein, 270 aa, Homo sapiens
LLVGFLSVIFALVWVLHYREGLGWDGSALEFNWHPVLMVTGFVFIQGIAIIVYRLPWTWKCSKLLMKSIHAGLNAVAAILAIISVVAVFENHNVNNIANMYSLHSWVGLIAVICYLLQLLSGFSVFLLPWAPLSLRAFLMPIHVYSGIVIFGTVIATALMGLTEKLIFSLRDPAYSTFPPEGVFVNTLGLLILVFGALIFWIVTRPQWKRPKEPNSTILHPNGGTEQGARGSMPAYSGNNMDKSDSELNSEVAARKRNLALDEAGQRSTM

SEQ ID NO: 52001 - protein, 573 aa, Homo sapiens
KRQEVMKWNGWGYNDSKFIFNKKGQIELTGKRYPLSGMGLPTFKEWIQNTLGVNVEHKTTSKASLNPSDTPPSVVNEDFLHDLKETNISYSQEADDRVFRAHGHCLHEIFLLREGMFERIPDIVLWPTCHDDVVKIVNLACKYNLCIIPIGGGTSVSYGLMCPADETRTIISLDTSQMNRILWVDENNLTAHVEAGITGQELERQLKESGYCTGHEPDSLEFSTVGGWVSTRASGMKKNIYGNIEDLVVHIKMVTPRGIIEKSCQGPRMSTGPDIHHFIMGSEGTLGVITEATIKIRPVPEYQKYGSVAFPNFEQGVACLREIAKQRCAPASIRLMDNKQFQFGHALKPQVSSIFTSFLDGLKKFYITKFKGFDPNQLSVATLLFEGDREKVLQHEKQVYDIAAKFGGLAAGEDNGQRGYLLTYVIAYIRDLALEYYVLGESFETSAPWDRVVDLCRNVKERITRECKEKGVQFAPFSTCRVTQTYDAGACIYFYFAFNYRGISDPLTVFEQTEAAAREEILANGGSLSHHHGVGKLRKQWLKESISDVGFGMLKSVKEYVDPNNIFGNRNLL

SEQ ID NO: 52002 - protein, 162 aa, Homo sapiens
KKNTKLSSKTTAKLSTSAKRIQKELAEITLDPPPNCSAGPKGDNIYEWRSTILGPPGSVYEGGVFFLDITFSSDYPFKPPKVTFRTRIYHCNINSQGVICLDILKDNWSPALTISKVLLSICSLLTDCNPADPLVGSIATQYLTNRAEHDRIARQWTKRYAT

SEQ ID NO: 52003 - protein, 38 aa, Homo sapiens
ISYVMWKAGFFKRQYKSILQEENRRDSWSYINSKSNDD

SEQ ID NO: 52004 - protein, 7 aa, Homo sapiens
IICSTSL

SEQ ID NO: 52005 - protein, 13 aa, Homo sapiens
IFLWNEKEVLEMS

SEQ ID NO: 52006 - protein, 783 aa, Homo sapiens
IRDLKRIILCFLIVYMAILVGTDQDFYSLLGVSKTASSREIRQAFKKLALKLHPDKNPNNPNAHGDFLKINRAYEVLKDEDLRKKYDKYGEKGLEDNQGGQYESWNYYRYDFGIYDDDPEIITLERREFDAAVNSGELWFVNFYSPGCSHCHDLAPTWRDFAKEVDGLLRIGAVNCGDDRMLCRMKGVNSYPSLFIFRSGMAPVKYHGDRSKESLVSFAMQHVRSTVTELWTGNFVNSIQTAFAAGIGWLITFCSKGGDCLTSQTRLRLSGMLDGLVNVGWMDCATQDNLCKSLDITTSTTAYFPPGATLNNKEKNSILFLNSLDAKEIYLEVIHNLPDFELLSANTLEDRLAHHRWLLFFHFGKNENSNDPELKKLKTLLKNDHIQVGRFDCSSAPDICSNLYVFQPSLAVFKGQGTKEYEIHHGKKILYDILAFAKESVNSHVTTLGPQNFPANDKEPWLVDFFAPWCPPCRALLPELRRASNLLYGQLKFGTLDCTVHEGLCNMYNIQAYPTTVVFNQSNIHEYEGHHSAEQILEFIEDLMNPSVVSLTPTTFNELVTQRKHNEVWMVDFYSPWCHPCQVLMPEWKRMARTLTGLINVGSIDCQQYHSFCAQENVQRYPEIRFFPPKSNKAYHYHSYNGWNRDAYSLRIWGLGFLPQVSTDLTPQTFSEKVLQGKNHWVIDFYAPWCGPCQNFAPEFELLARMIKGKVKAGKVDCQAYAQTCQKAGIRAYPTVKFYFYERAKRNFQEEQINTRDAKAIAALISEKLETLRNQGKRNKDEL

SEQ ID NO: 52007 - protein, 255 aa, Homo sapiens
MNSRVFIGNLNTLVVKKSDVEAIFSKYGKIVGCSVHKGFAFFQYVNERNARAAVAGEDGRMIAGQVLDINLAAEPKVNRGKAGVKRSAAEMYGSSFDLDCDFQRDYYDRMYSYPARVPPPPPIARAVVPSKRQRVSGNTSQRGISGFNSKSGQRGSSKSGKLKGDDLQAIKRELTQIKQKVDSFLENLEKIEKEQSKQAVEMNNVKSEEEQSSSSVKKDETNVKMESEGGADDSAEEGDLLDDDDNEDGGMTSWS

SEQ ID NO: 52008 - protein, 107 aa, Homo sapiens
KSLCVVQGLVDIYIFSEDTTFKWDSCAAHAILRAMGGGIVDLKECLERNPETGLDLPQLVYHVENEGAAGVDRWANKGGLIAYRSRKRLETFLSLLVQNLAPAETHT

SEQ ID NO: 52009 - protein, 54 aa, Homo sapiens
KDRWNNTPMDEALHFGHHDVFKILQEYQVQYTPQGDSDNGKENQTVHKNLDGLL

SEQ ID NO: 52010 - protein, 16 aa, Homo sapiens
RRFQGCCNCNRFPDEF

SEQ ID NO: 52011 - protein, 18 aa, Homo sapiens
IMLVIALYEDKIVFDIQF

SEQ ID NO: 52012 - protein, 14 aa, Homo sapiens
VFIVDVKANKHQVK

SEQ ID NO: 52013 - protein, 102 aa, Homo sapiens
LLSDMAHEHGHEHGHHKMELPDYRQWKIEGTPLETIQKKLAAKGLRDPWGRNEAWRYMGGFAKSVSFSDVFFKGFKWGFAAFVVAVGAEYYLESLNKDKKHH

SEQ ID NO: 52014 - protein, 119 aa, Homo sapiens
VLMAEIGEDLDKSDVSSLIFLMKDYMGRGKISKEKSFLDLVVELEKLNLVAPDQLDLLEKCLKNIHRIDLKTKIQKYKQSVQGAGTSYRNVLQAAIQKSLKDPSNNFRVSLEKTYGIPA

SEQ ID NO: 52015 - protein, 34 aa, Homo sapiens
VNYEVSNKDDKKNMGKQMPQPTFTLRKKLVFPSD

SEQ ID NO: 52016 - protein, 138 aa, Homo sapiens
TSFLLAGFVSLFRIRTIMKHDGTKTEKLEKLMVRIGVFSVLYTVPATIVLACYFYEQAFREHWERTWLLQTCKSYAVPCPPGHFPPMSPDFTVFMIKYLMTMIVGITTGFWIWSGKTLQSWRRFYHRLSHSSKGETAV

SEQ ID NO: 52017 - protein, 73 aa, Homo sapiens
KNNSMNSNMGTGTFGPVGNGVHTGPESREHQFSHAGRSNGRGLINPQLQGTASNQTVMTTISNGRDPRRAFKR

SEQ ID NO: 52018 - protein, 94 aa, Homo sapiens
VGRTLESQVKVVALCAGSGSSVLQGVEADLYLTGEMSHHDTLDAASQGINVILCEHSNTERGFLSDLRDMLDSHLENKINIILSETDRDPLQVV

SEQ ID NO: 52019 - protein, 42 aa, Homo sapiens
VLCVSRSAYCLGSSHPRGFLAMKMRHLNAMGFHVILVRKKCK

SEQ ID NO: 52020 - protein, 317 aa, Homo sapiens
MTVQAQPQIATLAQVSMPAAHATSSAPTVTLVQLPNGQTVQVHGVIQAAQPSVIQSPQVQTVQSSCKDLKRLFSGTQISTIAESEDSQESVDSVTDSQKRREILSRRPSYRKILNDLSSDAPGVPRIEEEKSEEETSAPAITTVTVPTPIYQTSSGQYIAITQGGAIQLANNGTDGVQGLQTLTMTNAAATQPGTTILQYAQTTDGQQILVPSNQVVVQAASGDVQTYQIRTAPTSTIAPGVVMASSPALPTQPAEEAARKREVRLMKNREAARECRRKKKEYVKCLENRVAVLENQNKTLIEELKALKDLYCHKSD

SEQ ID NO: 52021 - protein, 86 aa, Homo sapiens
LIIKALKEPPRDRKKQKNIKHSGNITFDEIVNIVRQMRHRSLARELSGTIKEILGTAQSVGCNVDGRHPHDIIDDINSGAVECPAS

SEQ ID NO: 52022 - protein, 526 aa, Homo sapiens
LFETSVGYAIFKVLNEKKLQEVDSLWKEFETPEKANKIVKLKHFEKFQDTAEALAAFTALMEGKINKQLKKVLKKIVKEAHEPLAVADAKLGGVIKEKLNLSCIHSPVVNELMRGIRSQMDGLIPGVEPREMAAMCLGLAHSLSRYRLKFSADKVDTMIVQAISLLDDLDKELNNYIMRCREWYGWHFPELGKIISDNLTYCKCLQKVGDRKNYASAKLSELLPEEVEAEVKAAAEISMGTEVSEEDICNILHLCTQVIEISEYRTQLYEYLQNRMMAIAPNVTVMVGELVGARLIAHAGSLLNLAKHAASTVQILGAEKALFRALKSRRDTPKYGLIYHASLVGQTSPKHKGKISRMLAAKTVLAIRYDAFGEDSSSAMGVENRAKLEARLRTLEDRGIRKISGTGKALAKTEKYEHKSEVKTYDPSGDSTLPTCSKKRKIEQVDKEDEITEKKAKKAKIKVKVEEEEEEKVAEEEETSVKKKKKRGKKKHIKEEPLSEEEPCTSTAIASPEKKKKKKKKRENED

SEQ ID NO: 52023 - protein, 98 aa, Homo sapiens
LDLSATNVLDGSSIQIGESTQDGKSGSGEKIKKRVKTPYSLKRWRPSTWVISTESLDCEVNNNGSNRAVHSKSSTAVYLAEGGTATTMVSKDIGMNCL

SEQ ID NO: 52024 - protein, 42 aa, Homo sapiens
IGKEHKKFVQILGDLGMQVTSQIHFTKEAPSIENHFRVHEVF

SEQ ID NO: 52025 - protein, 165 aa, Homo sapiens
KAFLIWAYFDKEFSITEFSEGAKQAFAHVSKLLSQCKFDLLEELVAKEVLHALKEKVTSLPDNHKNALAANIDEIVFTSTGDISIYYDEKGRKFVNILMCFWYLTSANIPSETLRGASVFQVKLGNQNVETKQLLSASYEFQREFTQGVKPDWTIARIEHSKLLE

SEQ ID NO: 52026 - protein, 570 aa, Homo sapiens
LWIPRAYSTRSKMAELNTHVNVKEKIYAVRSVVPNKSNNEIVLVLQQFDFNVDKAVQAFVDGSAIQVLKEWNMTGKKKNNKRKRSKSKQHQGNKDAKDKVERPEAGPLQPQPPQIQNGPMNGCEKDSSSTDSANEKPALIPREKKISILEEPSKALRGVTEGNRLLQQKLSLDGNPKPIHGTTERSDGLQWSAEQPCNPSKPKAKTSPVKSNTPAAHLEIKPDELAKKRGPNIEKSVKDLQRCTVSLTRYRVMIKEEVDSSVKKIKAAFAELHNCIIDKEVSLMAEMDKVKEEAMEILTARQKKAEELKRLTDLASQMAEMQLAELRAEIKHFVSERKYDEELGKAARFSCDIEQLKAQIMLCGEITHPKNNYSSRTPCSSLLPLLNAHAATSGKQSNFSRKSSTHNKPSEGKAANPKMVSSLPSTADPSHQTMPANKQNGSSNQRRRFNPQYHNNRLNGPAKSQGSGNEAEPLGKGNSRHEHRRQPHNGFRPKNKGGAKNQEASLGMKTPEAPAHSEKPRRRQHAADTSEARPFRGSVGRVSQCNLCPTRIEVSTDAAVLSVPAVTLVA

SEQ ID NO: 52027 - protein, 61 aa, Homo sapiens
LEKVVAIYDYTKDKEDELSFQEGAIIYVIKKNDDGWYEGVMNGVTGLFPGNYVESIMHYSE

SEQ ID NO: 52028 - protein, 16 aa, Homo sapiens
IRRCKEENKREKNTKI

SEQ ID NO: 52029 - protein, 231 aa, Homo sapiens
LANLGAECLRMLDSGADYLHLDVMDGHFVPNITFGHPVVESLRKQLGQDPFFDMHMMVSKPEQWVKPMAVAGANQYTFHLEATENPGALIKDIRENGMKSCSVTQAEVQWHSQGPLQVGLAIKPGTSVEYLAPWANQIDMALVMTVEPGFGGQKFMEDMMPKVHWLRTQFPSLDIEVDGGVGPDTVHKCAEAGANMIVSGSAIMRSEDPRSVINLLRNVCSEAAQKRSLDR

SEQ ID NO: 52030 - protein, 91 aa, Homo sapiens
LERKTVLPSKHAVPEVIEDFLCNFLIKMGMTRTLDCFQSEWYELIQKGVTELRTVGNVPDVYTQIMLLENENKNLKKDLKHYKQAAEYVIF

SEQ ID NO: 52031 - protein, 287 aa, Homo sapiens
TLALKFENAAAGNKPEAVEVTFADFDGVLYHISNPNGDKTKVMVSISLKFYKELQAHGADELLKRVYGSFLVNPESGYNVSLLYDLENLPASKDSIVHQAGMLKRNCFASVFEKYFQFQEEGKEGENRAVIHYRDDETMYVESKKDRVTVVFSTVFKDDDDVVIGKVFMQEFKEGRRASHTAPQVLFSHREPPLELKDTDAAVGDNIGYITFVLFPRHTNASARDNTINLIHTFRDYLHYHIKCSKAYIHTRMRAKTSDFLKVLNRARPDAEKKEMKTITGKTFSSR

SEQ ID NO: 52032 - protein, 132 aa, Homo sapiens
KGRGARNARVLRGILAGATANKASHNRTRALQSHSSPEGKEEPEPLSPELEYIPRKRGKNPMKAVGLAWAIGFPCGILLFILTKREVDKDRVKQMKARQNMRLSNTGEYESQRFRASSQSAPSPDVGSGVQT

SEQ ID NO: 52033 - protein, 7 aa, Homo sapiens
RQPRPGS

SEQ ID NO: 52034 - protein, 26 aa, Homo sapiens
IRWAPSASPGRAHSPWTSSSVASDRP

SEQ ID NO: 52035 - protein, 205 aa, Homo sapiens
LTGTGTGPSRAEAGSGGPGFTFTFRSPEEVFREFFGSGDPFAELFDDLGPFSELQNRGSRHSGPFFTFSSSFPGHSDFSSSSFSFSPGAGAFRSVSTSTTFVQGRRITTRRIMENGQERVEVEEDGQLKSVTINGVPDDLALGLELSRREQQPSVTSRSGGTQVQQTPASCPLDSDLSEDEDLQLAMAYSLSEMEAAGKKPADVF

SEQ ID NO: 52036 - protein, 89 aa, Homo sapiens
MTESTDYLYKDPKQQKIYDLFQKSFEKEGSDMELLEAAESFDPGSASGTSGSSSQNMGDTLDESSLTASPQKKRRFEFFDNWDSFTSPL

SEQ ID NO: 52037 - protein, 726 aa, Homo sapiens
KAAVVLCMDVGFTMSNSIPGIESPFEQAKKVITMFVQRQVFAENKDEIALVLFGTDGTDNPLSGGDQYQNITVHRHLMLPDFDLLEDIESKIQPGSQQADFLDALIVSMDVIQHETIGKKFEKRHIEIFTDLSSRFSKSQLDIIIHSLKKCDISLQFFLPFSLGKEDGSGDRGDGPFRLGGHGPSFPLKGITEQQKEGLEIVKMVMISLEGEDGLDEIYSFSESLRKLCVFKKIERHSIHWPCRLTIGSNLSIRIAAYKSILQERVKKTWTVVDAKTLKKEDIQKETVYCLNDDDETEVLKEDIIQGFRYGSDIVPFSKVDEEQMKYKSEGKCFSVLGFCKSSQVQRRFFMGNQVLKVFAARDDEAAAVALSSLIHALDDLDMVAIVRYAYDKRANPQVGVAFPHIKHNYECLVYVQLPFMEDLRQYMFSSLKNSKKYAPTEAQLNAVDALIDSMSLAKKDEKTDTLEDLFPTTKIPNPRFQRLFQCLLHRALHPREPLPPIQQHIWNMLNPPAEVTTKSQIPLSKIKTLFPLIEAKKKDQVTAQEIFQDNHEDGPTAKKLKTEQGGAHFSVSSLAEGSVTSVGSVNPAENFRVLVKQKKASFEEASNQLINHIEQFLDTNETPYFMKSIDCIRAFREEAIKFSEEQRFNNFLKALQEKVEIKQLNHFWEIVVQDGITLITKEEASGSSVTAEEAKKFLAPKDKPSGDTAAVFEEGGDVDDLLDMI

SEQ ID NO: 52038 - protein, 79 aa, Homo sapiens
VVPKPKHCQEKMQCEVKDEKDDMKMETDIKRNKKTLLDQHGQYPIWMNQRQRKRLKAKREKRKEKNKAKAVKVAKGLAW

SEQ ID NO: 52039 - protein, 328 aa, Homo sapiens
LVRLLQQGHRCLLAPVAPKLVPPVRGVKKGFRAAFRFQKELERQRLLRCPPPPVRRSEKPNWDYHAEIQAFGHRLQENFSLDLLKTAFVNSCYIKSEEAKRQQLGIEKEAVLLNLKSNQELSEQGTSFSQTCLTQFLEDEYPDMPTEGIKNLVDFLTGEEVVCHVARNLAVEQLTLSEEFPVPPAVLQQTFFAVIGALLQSSGPERTALFIRDFLITQMTGKELFEMWKIINPMGLLVEELKKRNVSAPESRLTRQSGGTTALPLYFVGLYCDKKLIAEGPGETVLVAEEEAARVALRKLYGFTENRRPWNYSKPKETLRAEKSITAS

SEQ ID NO: 52040 - protein, 235 aa, Homo sapiens
LYFNMASMLWKGINLERRLGSRWFAYVITAFSVLTGVVYLLLQFAVAEFMDEPDFKRSCAVGFSGVLFALKVLNNHYCPGGFVNILGFPVPNRFACWVELVAIHLFSPGTSFAGHLAGILVGLMYTQGPLKKIMEACAGGFSSSVGYPGRQYYFNSSGSSGYQDYYPHGRPDHYEEAPRNYDTYTAGLSEEEQLERALQASLWDRGNTRNSPPPYGFHLSPEEMRRQRLHRFDSQ

SEQ ID NO: 52041 - protein, 557 aa, Homo sapiens
KRKQEEKHLKMLRDMTGLPHNRKCFDCDQRGPTYVNMTVGSFVCTSCSGSLRGLNPPHRVKSISMTTFTQQEIEFLQKHGNEVCKQIWLGLFDDRSSAIPDFRDPQKVKEFLQEKYEKKRWYVPPEQAKVVASVHASISGSSASSTSSTPEVKPLKSLLGDSAPTLHLNKGTPSQSPVVGRSQGQQQEKKQFDLLSDLGSDIFAAPAPQSTATANFANFAHFNSHAAQNSANADFANFDAFGQSSGSSNFGGFPTASHSPFQPQTTGGSAASVNANFAHFDNFPKSSSADFGTFNTSQSHQTASAVSKVSTNKAGLQTADKYAALANLDNIFSAGQGGDQGSGFGTTGKAPVGSVVSVPSQSSASSDKYAALAELDSVFSSAATSSNAYTSTSNASSNVFGTVPVVASAQTQPASSSVPAPFGATPSTNPFVAAAGPSVASSTNPFQTNARGATAATFGTASMSMPTGFGTPAPYSLPTSFSGSFQQPAFPAQAAFPQQTAFSQQPNGAGFAAFGQTKPVVTPFGQVAAAGVSSNPFMTGAPTGQFPTGSSSTNPFL

SEQ ID NO: 52042 - protein, 95 aa, Homo sapiens
KLSFREFLLIFHKAAAGELQEDSGLMALAKLSEIDVALEGVKGAKNFFEAKVQALSSASKFEAELKAEQDERKREEEERRLRQAAFQKLKANFNT

SEQ ID NO: 52043 - protein, 4 aa, Homo sapiens
MKSE

SEQ ID NO: 52044 - protein, 224 aa, Homo sapiens [sequence omitted]

SEQ ID NO: 52045 - protein, 42 aa, Homo sapiens
IFQNHRASYKYKDFGQMGLRLEAEFEKDFKEVFAIQETNGNS

SEQ ID NO: 52046 - protein, 442 aa, Homo sapiens
TEDQGVDDRLLYDIVFKHFKRNKVEISNAIKKTFPFLEGLRDRDLITNKMFEDSQDSCRNLVPVQRVVYNVLSELEKTFNLPVLEALFSDVNMQEYPDLIHIYKGFENVIHDKLPLQESEEEEREERSGLQLSLEQGTGENSFRSLTWPPSGSPSHAGTTPPENGLSEHPCETEQINAKRKDTTSDKDDSLGSQQTNEQCAQKAEPTESCEQIAVQVNNGDAGREMPCPLPCDEESPEAELHNHGIQINSCSVRLVDIKKEKPFSNSKVECQAQARTHHNQASDIIVISSEDSEGSTDVDEPLEVFISAPRSEPVINNDNPLESNDEKEGQEATCSRPQIVPEPMDFRKLSTFRESFKKRVIGQDHDFSESSEEEAPAEASSGALRSKHGEKAPMTSRSTSTWRIPSRKRRFSSSDFSDLSNGEELQETCSSSLRRGSGKED

SEQ ID NO: 52047 - protein, 23 aa, Homo sapiens
IFEKNFRNIFAIQETSKNIIMFI

SEQ ID NO: 52048 - protein, 11 aa, Homo sapiens
KGKSKEDCTMS

SEQ ID NO: 52049 - protein, 82 aa, Homo sapiens
RELADCTWHMAEKLGCFWPNAEVDRFFLAVHGRYFRSCPISGRAVRDPPGSILYPFIVVPITVTLLVTALVVWQSKRTEGIV

SEQ ID NO: 52050 - protein, 10 aa, Homo sapiens
VDDYIKRYAR

SEQ ID NO: 52051 - skipped

SEQ ID NO: 52052 - protein, 265 aa, Homo sapiens
KISFQPAVAGIKGDKADKASASAPAPASATEILLTPAREEQPPQHRSKRGGSVGGVCYLSMGMVVLLMGLVFASVYIYRYFFLAQLARDNFFRCGVLYEDSLSSQVRTQMELEEDVKIYLDENYERINVPVPQFGGGDPADIIHDFQRGLTAYHDISLDKCYVIELNTTIVLPPRNFWELLMNVKRGTYLPQTYIIQEEMVVTEHVSDKEALGSFIYHLCNGKDTYRLRRRATRRRINKRGAKNCNAIRHFENTFVVETLICGVV

SEQ ID NO: 52053 - protein, 927 aa, Homo sapiens
LNAVVNDFWAEISESVDKIEVLYEDEGFRSRQFAALVASKVFYHLGAFEESLNYALGAGDLFNVNDNSEYVETIIAKCIDHYTKQCVENADLPEGEKKPIDQRLEGIVNKMFQRCLDDHKYKQAIGIALETRRLDVFEKTILESNDVPGMLAYSLKLCMSLMQNKQFRNKVLRVLVKIYMNLEKPDFINVCQCLIFLDDPQAVSDILEKLVKEDNLLMAYQICFDLYESASQQFLSSVIQNLRTVGTPIASVPGSTNTGTVPGSEKDSDSMETEEKTSSAFVGKTPEASPEPKDQTLKMIKILSGEMAIELHLQFLIRNNNTDLMILKNTKDAVRNSVCHTATVIANSFMHCGTTSDQFLRDNLEWLARATNWAKFTATASLGVIHKGHEKEALQLMATYLPKDTSPGSAYQEGGGLYALGLIHANHGGDIIDYLLNQLKNASNDIVRHGGSLGLGLAAMGTARQDVYDLLKTNLYQDDAVTGEAAGLALGLVMLGSKNAQAIEDMVGYAQETQHEKILRGLAVGIALVMYGRMEEADALIESLCRDKDPILRRSGMYTVAMAYCGSGNNKAIRRLLHVAVSDVNDDVRRAAVESLGFILFRTPEQCPSVVSLLSESYNPHVRYGAAMALGICCAGTGNKEAINLLEPMTNDPVNYVRQGALIASALIMIQQTEITCPKVNQFRQLYSKVINDKHDDVMAKFGAILAQGILDAGGHNVTISLQSRTGHTHMPSVVGVLVFTQFWFWFPLSHFLSLAYTPTCVIGLNKDLKMPKVQYKSNCKPSTFAYPAPLEVPKEKEKEKVSTAVLSITAKAKKKEKEKEKKEEEKMEVDEAEKKEEKEKKKEPEPNFQLLDNPARVMPAQLKVLTMPETCRYQPFKPLSIGGIIILKDTSEDIEELVEPVAAHGPKIEEEEQEPEPPEPFEYIDD

SEQ ID NO: 52054 - protein, 80 aa, Homo sapiens
LVEFGANLNLVKWESLGPESRGRRKVDPEALQVFKEARSVPRTLLCLCRVAVRRALGKHRLHLIPSLPLPDPIKKFLLHE

SEQ ID NO: 52055 - protein, 146 aa, Homo sapiens
LGTSEEELERQPKRFGRKRRYSKKSSEDGSPTPGKRGKKGSPSAQSFEELQSQRILANVRERQRTQSLNEAFAALRKIIPTLPSDKLSKIQTLKLAARYIDFLYQVLQSDEMDNKMTSCSYVAHERLSYAFSVWRMEGAWSMSASH

SEQ ID NO: 52056 - protein, 513 aa, Homo sapiens
LSDVPQAEISGEHLRICPQGYTCCTSEMEENLANRSHAELETALRDSSRVLQAMLATQLRSFDDHFQHLLNDSERTLQATFPGAFGELYTQNARAFRDLYSELRLYYRGANLHLEETLAEFWARLLERLFKQLHPQLLLPDDYLDCLGKQAEALRPFGEAPRELRLRATRAFVAARSFVQGLGVASDVVRKVAQVPLGPECSRAVMKLVYCAHCLGVPGARPCPDYCRNVLKGCLANQADLDAEWRNLLDSMVLITDKFWGTSGVESVIGSVHTWLAEAINALQDNRDTLTAKVIQGCGNPKVNPQGPGPEEKRRRGKLAPRERPPSGTLEKLVSEAKAQLRDVQDFWISLPGTLCSEKMALSTASDDRCWNGMARGRYLPEVMGDGLANQINNPEVEVDITKPDMTIRQQIMQLKIMTNRLRSAYNGNDVDFQDASDDGSGSGSGDGCLDDLCSRKVSRKSSSSRTPLTHALPGLSEQEGQKTSAASCPQPPTFLLPLLLFLALTVARPRWR

SEQ ID NO: 52057 - protein, 87 aa, Homo sapiens
LCSSGPCRNGGTCKEAGGEYHCSCPYRFTGRHCEIGKPDSCASGPCHNGGTCFHYIGKYKCDCPPGFSGRHCEIGKVGGRPGQGGQG

SEQ ID NO: 52058 - protein, 7 aa, Homo sapiens
MSKVNQV

SEQ ID NO: 52059 - protein, 52 aa, Homo sapiens
LRRPGEAGEDAAGEREAEVFSSLMVKNGGDRRNIQSPADCRDALGCPDPCGS

SEQ ID NO: 52060 - protein, 14 aa, Homo sapiens
KNLTPGEQIDKNPS

SEQ ID NO: 52061 - protein, 52 aa, Homo sapiens
LATWLRRRGGWTDVLKCVVSTDPGLRSHWLVAALCSFGRFLKAAFFVLLPER

SEQ ID NO: 52062 - protein, 365 aa, Homo sapiens
LGRKYSIFTEKDEILSDVASRLWFTYRKNFPAIGGTGPTSDTGWGCMLRCGQMIFAQALVCRHLGRDWRWTQRKRQPDSYFSVLNAFIDRKDSYYSIHQIAQMGVGEGKSIGQWYGPNTVAQVLKKLAVFDTWSSLAVHIAMDNTVVMEEIRRLCRTSVPCAGATAFPADSDRHCNGFPAGAEVTNRPSPWRPLVLLIPLRLGLTDINEAYVETLKHCFMMPQSLGVIGGKPNSAHYFIGYVGEELIYLDPHTTQPAVEPTDGCFIPDESFHCQHPPCRMSIAELDPSIAVGFFCKTEDDFNDWCQQVKKLSLLGGALPMFELVELQPSHLACPDVLNLSLDSSDVERLERFFDSEDEDFEILSL

SEQ ID NO: 52063 - protein, 218 aa, Homo sapiens
KEVQHNCQLHRISFCADDKTDKRIFTFICKDSESNKHLCYVFDSEKCAEEITLTIGQAFDLAYRKFLESGGKDVETRKQIAGLQKRIQDLETENMELKNKVQDLENQLRITQVSAPPAGSMTPKSPSTDIFDMIPFSPISHQSSMPTRNGTQPPPVPSRSTEIKRDLFGAEPFDPFNCGAADFPPDIQSKLDEMQEGFKMGLTLEGTVFCLDPLDSRC

SEQ ID NO: 52064 - protein, 63 aa, Homo sapiens
MTGPVLKGREQLDGATLNCFSFLLFAQRVSCLIFRHDELCAKGELATSRSASSHYYFGTTGSC

SEQ ID NO: 52065 - protein, 5 aa, Homo sapiens
LMVLL

SEQ ID NO: 52066 - protein, 11 aa, Homo sapiens
RMFPSWSVLCG

SEQ ID NO: 52067 - protein, 34 aa, Homo sapiens
RRHRTPWSTRITRLAWYRWSSRRKWKTWGTRSKG

SEQ ID NO: 52068 - protein, 28 aa, Homo sapiens
RRKWPCWPCWCSRSCWFPRCSWSSRPTW

SEQ ID NO: 52069 - protein, 49 aa, Homo sapiens
RKVYRQQQNSNIFFLADRTEMLSESKNILDELKKEYQEIENLDKTKIKK

SEQ ID NO: 52070 - protein, 11 aa, Homo sapiens
IQDLWQWRKSL

SEQ ID NO: 52071 - protein, 246 aa, Homo sapiens
LTWNECRAQVDRFPAARFKKFATEDEAWAFVRKSASPEVSEGHENQHGQESEAKASKRLREPLDGDGHESAEPYAKHMKPSVEPAPPVSRDTFSYMGDFVVVYTDGCCSSNGRRRPRAGIGVYWGPGHPLNVGIRLPGRQTNQRAEIHAACKAIEQAKTQNINKLVLYTDSMFTINGITNWVQGWKKNGWKTSAGKEVINKEDFVALERLTQGMDIQWMHVPGHSGFIGNEEADRLAREGAKQSED

SEQ ID NO: 52072 - protein, 1079 aa, Homo sapiens
ITLLAIFRVDPKHLTVNAVLISIASVVGLAFVLNCRTWWQVLDSLLNSQRKRLHNAASKLHKLKSEGFMKVLKCEVELMARMAKTIDSFTQNQTRLVVIIDGLDACEQDKVLQMLDTVRVLFSKGPFIAIFASDPHIIIKAINQNLNSVLRDSNINGHDYMRNIVHLPVFLNSRGLSNARKFLVTSATNGDVPCSDTTGIQEDADRRVSQNSLGEMTKLGSKTALNRRDTYRRRQMQRTITRQMSFDLTKLLVTEDWFSDISPQTMRRLLNIVSVTGRLLRANQISFNWDRLASWINLTEQWPYRTSWLILYLEETEGIPDQMTLKTIYERISKNIPTTKDVEPLLEIDGDIRNFEVFLSSRTPVLVARDVKVFLPCTVNLDPKLREIIADVRAAREQISIGGLAYPPLPLHEGPPRAPSGYSQPPSVCSSTSFNGPFAGGVVSPQPHSSYYSGMTGPQHPFYNRPFFAPYLYTPRYYPGGSQHLISRPSVKTSLPRDQNNGLGSGPAPGPVVLLNSLNVDAVCEKLKQIEGLDQSMLPQYCTTIKKANINGRVLAQCNIDELKKEMNMNFGDWHLFRSTVLEMRNAESHVVPEDPRFLSESSSGPAPHGEPARRASHNELPHTELSSQTPYTLNFSFEELNTLGLDEGAPRHSNLSWQSQTRRTPSLSSLNSQDSSIEISKLTDKVQAEYRDAYREYIAQMSQLEGGPGSTTISGRSSPHSTYYMGQSSSGGSIHSNLEQEKGKDSEPKPDDGRKSFLMKRGDVIDYSSSGVSTNDASPLDPITEEDEKSDQSGSKLLPGKKSSERSSLFQTDLKLKGSGLRYQKLPSDEDESGTEESDNTPLLKDDKDRKAEGKVERVPKSPEHSAEPIRTFIKAKEYLSDALLDKKDSSDSGVRSSESSPNHSLHNEVADDSQLEKANLIELEDDSHSGKRGIPHSLSGLQDPIIARMSICSEDKKSPSECSLIASSPEENWPACQKAYNLNRTPSTVTLNNNSAPANRANQNFDEMEGIRETSQVILRPSSSPNPTTIQNENLKSMTHKRSQRSSYTRLSKDPPELHAAASSESTGFGEERESIL

SEQ ID NO: 52073 - protein, 43 aa, Homo sapiens
IQLSQSKKFDEGENSLGQNSFSTTNNVCNQNQEIASRHSSLKQ

SEQ ID NO: 52074 - protein, 791 aa, Homo sapiens
KLDSLLSDYDILSLSNIQQHSVRKRDLQTSTHVETLLTFSALKRHFKLYLTSSTERFSQNFKVVVVDGKNESEYTVKWQDFFTGHVVGEPDSRVLAHIRDDDVIIRINTDGAEYNIEPLWRFVNDTKDKRMLVYKSEDIKNVSRLQSPKVCGYLKVDNEELLPKGLVDREPPEELVHRVKRRADPDPMKNTCKLLVVADHRFYRYMGRGEESTTTNYLIELIDRVDDIYRNTSWDNAGFKGYGIQIEQIRILKSPQEVKPGEKHYNMAKSYPNEEKDAWDVKMLLEQFSFDIAEEASKVCLAHLFTYQDFDMGTLGLAYVGSPRANSHGGVCPKAYYSPVGKKNIYLNSGLTSTKNYGKTILTKEADLVTTHELGHNFGAEHDPDGLAECAPNEDQGGKYVMYPIAVSGDHENNKMFSNCSKQSIYKTIESKAQECFQERSNKVCGNSRVDEGEECDPGIMYLNNDTCCNSDCTLKEGVQCSDRNSPCCKNCQFETAQKKCQEAINATCKGVSYCTGNSSECPPPGNAEDDTVCLDLGKCKDGKCIPFCEREQQLESCACNETDNSCKVCCRDLSGRCVPYVDAEQKNLFLRKGKPCTVGFCDMNGKCEKRVQDVIERFWDFIDQLSINTFGKFLADNIVGSVLVFSLIFWIPFSILVHCVDKKLDKQYESLSLFHPSNVEMLSSMDSASVRIIKPFPAPQTPGRLQPAPVIPSAPAAPKLDHQRMDTIQEDPSTDSHMDEDGFEKDPFPNSSTAAKSFEDLTDHPVTRSEKAASFKLQRQNRVDSKETEC

SEQ ID NO: 52075 - protein, 89 aa, Homo sapiens
IDEVCCQNDGPHSALYTMMKDQYANYVVQKMIDMAEPAQRKIIMHKIRPHITTLRKYTYGKHILAKLEKYYLKNSPDLGPIGGPPNGML

SEQ ID NO: 52076 - protein, 131 aa, Homo sapiens
KNWRGQTIQEKRIVEAANKKEVDYETGDIPTEWEAWIRRTRKTPPTMEEILKNEKHREEIKIKSQDFYEKEKLLSKETSEELLPPPVQTQIKGRASAPYFGKEKPSVAPSSTGKTFQPGSWMPRDGKSHNE

SEQ ID NO: 52077 - protein, 156 aa, Homo sapiens
MSESPNGRIATPLLCWFRYVLYVTGYLLLKPCPETIKSLLIRRGLQVMNLENEFSPLNILEPFCLANAAYLGGQEMMEVVKRDDETIKEHLCKLTFYYGTIDPWCPKEYYEDIKKDFPEGDIRLCEKNIPHAFITHFNQEMADMIADSLKDDLSKM

SEQ ID NO: 52078 - protein, 116 aa, Homo sapiens
IRRGLQVMNLENEFSPLNILEPFCLANAAYLGGQEMMEVVKRDDETIKEHLCKLTFYYGTIDPWCPKEYYEDIKKDFPEGDIRLCEKNIPHAFITHFNQEMADMIADSLKDDLSKM

SEQ ID NO: 52079 - protein, 17 aa, Homo sapiens
KLITSDKKVLAILINIF

SEQ ID NO: 52080 - protein, 197 aa, Homo sapiens
INNAGIFQCPYMKTEDGFEMQFGVNHLGHFLLTNLLLGLLKSSAPSRIVVVSSKLYKYGDINFDDLNSEQSYNKSFCYSRSKLANILFTRELARRLEGTNVTVNVLHPGIVRTNLGRHIHIPLLVKPLFNLVSWAFFKTPVEGAQTSIYLASSPEVEGVSGRYFGDCKEEELLPKAMDESVARKLWDISEVMVGLLK

SEQ ID NO: 52081 - protein, 4 aa, Homo sapiens
MSCI

SEQ ID NO: 52082 - protein, 311 aa, Homo sapiens
KPSPGEGEVLLKVAASALNRADLMQRQGQYDPPPGASNILGLEASGHVAELGPGCQGHWKIGDTAMALLPGGGQAQYVTVPEGLLMPIPEGLTLTQAAAIPEAWLTAFQLLHLVGNVQAGDYVLIHAGLSGVGTAAIQLTRMAGAIPLVTAGSQKKLQMAEKLGAAAGFNYKKEDFSEATLKFTKGAGVNLILDCIGGSYWEKNVNCLALDGRWVLYGLMGGGDINGPLFSKLLFKRGSLITSLLRSRDNKYKQMLVNAFTEQILPHFSTEGPQRLLPVLDRIYPVTEIQEAHKYMEANKNIGKIVLELPQ

SEQ ID NO: 52083 - protein, 251 aa, Homo sapiens
IGDTAMALLPGGGQAQYVTVPEGLLMPIPEGLTLTQAAAIPEAWLTAFQLLHLVGNVQAGDYVLIHAGLSGVGTAAIQLTRMAGAIPLVTAGSQKKLQMAEKLGAAAGFNYKKEDFSEATLKFTKGAGVNLILDCIGGSYWEKNVNCLALDGRWVLYGLMGGGDINGPLFSKLLFKRGSLITSLLRSRDNKYKQMLVNAFTEQILPHFSTEGPQRLLPVLDRIYPVTEIQEAHKYMEANKNIGKIVLELPQ

SEQ ID NO: 52084 - protein, 82 aa, Homo sapiens
LHTHRDHPHTAAYLQELGRMRKVVLEAPDETTLKELAETLQQKNIDHMLWLEQPENIATCIALRPYPKEEVGQYLKKFRLFK

SEQ ID NO: 52085 - protein, 29 aa, Homo sapiens
RQRDCSGAPSRWKMVCTLSHWDSWPWWRI

SEQ ID NO: 52086 - protein, 79 aa, Homo sapiens
LLVLGPSPEQRVEIVPRDLRMKDKFLKHLTGPLYFSPKCSKHFHRLYHNTRDCTIPAYYKRCARLLTRLAVSPVCMEDK

SEQ ID NO: 52087 - protein, 110 aa, Homo sapiens
LATFHALCVLLTCLSSRSYRLQIGHFLCLVILVYCAEYINEAAAMNWRLFSKYQYFDSRGMFISIVFSAPLLVNAMIIVVMWVWKTLNVMTDLKNAQERRKEKKRRRKED

SEQ ID NO: 52088 - protein, 1462 aa, Homo sapiens
LFCAWGTLAVVAQKPGAGCPSRCLCFRTTVRCMHLLLEAVPAVAPQTSILDLRFNRIREIQPGAFRRLRNLNTLLLNNNQIKRIPSGAFEDLENLKYLYLYKNEIQSIDRQAFKGLASLEQLYLHFNQIETLDPDSFQHLPKLERLFLHNNRITHLVPGTFNHLESMKRLRLDSNTLHCDCEILWLADLLKTYAESGNAQAAAICEYPRRIQGRSVATITPEELNCERPRITSEPQDADVTSGNTVYFTCRAEGNPKPEIIWLRNNNELSMKTDSRLNLLDDGTLMIQNTQETDQGIYQCMAKNVAGEVKTQEVTLRYFGSPARPTFVIQPQNTEVLVGESVTLECSATGHPPPRISWTRGDRTPLPVDPRVNITPSGGLYIQNVVQGDSGEYACSATNNIDSVHATAFIIVQALPQFTVTPQDRVVIEGQTVDFQCEAKGNPPPVIAWTKGGSQLSVDRRHLVLSSGTLRISGVALHDQGQYECQAVNIIGSQKVVAHLTVQPRVTPVFASIPSDTTVEVGANVQLPCSSQGEPEPAITWNKDGVQVTESGKFHISPEGFLTINDVGPADAGRYECVARNTIGSASVSMVLSVNVPDVSRNGDPFVATSIVEAIATVDRAINSTRTHLFDSRPRSPNDLLALFRYPRDPYTVEQARAGEIFERTLQLIQEHVQHGLMVDLNGTSYHYNDLVSPQYLNLIANLSGCTAHRRVNNCSDMCFHQKYRTHDGTCNNLQHPMWGASLTAFERLLKSVYENGFNTPRGINPHRLYNGHALPMPRLVSTTLIGTETVTPDEQFTHMLMQWGQFLDHDLDSTVVALSQARFSDGQHCSNVCSNDPPCFSVMIPPNDSRARSGARCMFFVRSSPVCGSGMTSLLMNSVYPREQINQLTSYIDASNVYGSTEHEARSIRDLASHRGLLRQGIVQRSGKPLLPFATGPPTECMRDENESPIPCFLAGDHRANEQLGLTSMHTLWFREHNRIATELLKLNPHWDGDTIYYETRKIVGAEIQHITYQHWLPKILGEVGMRTLGEYHGYDPGINAGIFNAFATAAFRFGHTLVNPLLYRLDENFQPIAQDHLPLHKAFFSPFRIVNEGGIDPLLRGLFGVAGKMRVPSQLLNTELTERLFSMAHTVALDLAAINIQRGRDHGIPPYHDYRVYCNLSAAHTFEDLKNEIKNPEIREKLKRLYGSTLNIDLFPALVVEDLVPGSRLGPTLMCLLSTQFKRLRDGDRLWYENPGVFSPAQLTQIKQTSLARILCDNADNITRVQSDVFRVAEFPHGYGSCDEIPRVDLRVWQDCCEDCRTRGQFNAFSYHFRGRRSLEFSYQEDKPTKKTRPRKIPSVGRQGEHLSNSTSAFSTRSDASGTNDFREFVLEMQKTITDLRTQIKKLESRLSTTECVDAGGESHANNTKWKKDACTICECKDGQVTCFVEACPPATCAVPVNIPGACCPVCLQKRAEEKP

SEQ ID NO: 52089 - protein, 41 aa, Homo sapiens
LVGFMLYRMKKKDEGSYSLEEPKQANGGAYQKPTKQEEFYA

SEQ ID NO: 52090 - protein, 4 aa, Homo sapiens
KFYQ

SEQ ID NO: 52091 - protein, 29 aa, Homo sapiens
IFANMLGVSLFLLVVLYHYVAVNNPKKQE

SEQ ID NO: 52092 - protein, 36 aa, Homo sapiens
RENGEEAKELPGETLESKNTQNDFEVHIVQVENDEI

SEQ ID NO: 52093 - protein, 31 aa, Homo sapiens
LMVRVLATPRCERGRECSRRRRGRVHQPPGQ

SEQ ID NO: 52094 - protein, 271 aa, Homo sapiens
VQTDFSSDPLQKVVCFNHDNTLLATGGTDGYVRVWKVPSLEKVLEFKAHEGEIEDLALGPDGKLVTVGRDLKASVWQKDQLVTQLHWQENGPTFSSTPYRYQACRFGQVPDQPAGLRLFTVQIPHKRLRQPPPCYLTAWDGSNFLPLRTKSCGHEVVSCLDVSESGTFLGLGTVTGSVAIYIAFSLQCLYYVREAHGIVVTDVAFLPEKGRGPELLGSHETALFSVAVDSRCQLHLLPSRRSVPVWLLLLLCVGLIIVTILLLQSAFPGFL

SEQ ID NO: 52095 - protein, 116 aa, Homo sapiens
LLFQDTDLGSFHDLLRREPMLRMQEGEGHSQLCLDRLQLEAIHKVRFSPNLDSYGWLVSGGQSGLVRIHFVRGLASPLGHRMQLESRAHFNAMFQPSSPTRRPGFSPTSHRLLPTP

SEQ ID NO: 52096 - protein, 497 aa, Homo sapiens
VGREMTKEEKLQLRKEKKQQKKKRKEEKGAEPETGSAVSAAQCQVGPTRELPESGIQLGTPREKVPAGRSKAELRAERRAKQEAERALKQARKGEQGGPPPKASPSTAGETPSGVKRLPEYPQVDDLLLRRLVKKPERQQVPTRKDYGSKVSLFSHLPQYSRQNSLTQFMSIPSSVIHPAMVRLGLQYSQGLVSGSNARCIALLRALQQVIQDYTTPPNEELSRDLVNKLKPYMSFLTQCRPLSASMHNAIKFLNKEITSVGSSKREEEAKSELRAAIDRYVQEKIVLAAQAISRFAYQKISNGDVILVYGCSSLVSRILQEAWTEGRRFRVVVVDSRPWLEGRHTLRSLVHAGVPASYLLIPAASYVLPEVSKVLLGAHALLANGSVMSRVGTAQLALVARAHNVPVLVCCETYKFCERVQTDAFVSNELDDPDDLQCKRGEHVALANWQNHASLRLLNLVYDVTPPELVDLVITELGMIPCSSVPVVLRVKSSDQ

SEQ ID NO: 52097 - protein, 53 aa, Homo sapiens
INRQINLELYASSIYLCVAYYFDSDDVALKNFAKYFLHQSHEEREHAEKLMKL

SEQ ID NO: 52098 - protein, 83 aa, Homo sapiens
VHFALHLEKNVNQSLLELHKLATDKNDPHLCDFIETHYLNEQVKAIKELGDHVTNMHEMGAPESGVAEYLFDKHTLGDSDNES

SEQ ID NO: 52099 - protein, 214 aa, Homo sapiens
VALIRGKQLIVANAGDSRCVVSEAGKALDMSYDHKPEDEVELARIKNAGGKVTMDGRVNGGLNLSRAIGDHFYKRNKNLPPEEQMISALPDIKVLTLTDDHEFMVIACDGIWNVMSSQEVVDFIQSKISQRDENGELRLLSSIVEELLDQCLAPDTSGDGTGCDNMTCIIICFKPRNTAELQPESGKRKLEEVLSTEGAEENGNSDKKKKAKRD

SEQ ID NO: 52100 - protein, 52 aa, Homo sapiens
IEFKRPGKAANKDNWNKFLMAIKTSHSPVCQDVLKFISQWCGGLPSTSFSFQ

SEQ ID NO: 52101 - protein, 16 aa, Homo sapiens
VGTRQKKSPSINTIDV

SEQ ID NO: 52102 - protein, 190 aa, Homo sapiens
IGSVLSLQKFWQHRIKDYHSYMLQISKQLSEEYERIVNPEKATEDAKPVKIKEEPVSDITFPVSEELEADLASGDQSLPMGVLGAQSERFPSNLEVEASPQASSAEVNASPLWNLAHVKMEPQESEEGNVSGHGVLGSDVFEEPMSGMSEAGIPQSPDDSDSSYGSHSTDSLMGSSPVFNQRCKKRMRKI

SEQ ID NO: 52103 - protein, 55 aa, Homo sapiens
LGSDVFEEPMSGMSEAGIPQSPDDSDSSYGSHSTDSLMGSSPVFNQRCKKRMRKI

SEQ ID NO: 52104 - protein, 245 aa, Homo sapiens
TYCGSCAAHAYKQVDPSITRRIFILGPSHHVPLSRCALSSVDIYRTPLYDLRIDQKIYGELWKTGMFERMSLQTDEDEHSIEMHLPYTAKAMESHKDEFTIIPVLVGALSESKEQEFGKLFSKYLADPSNLFVVSSDFCHWGQRFRYSYYDESQGEIYRSIEHLDKMGMSIIEQLDPVSFSNYLKKYHNTICGRHPIGVLLNAITELQKNGMNMSFSFLNYAQSSQCRNWQDSSVSYAAGALTVH

SEQ ID NO: 52105 - protein, 387 aa, Homo sapiens
RCQLHYKELKMKIRKNISEIRELENIEEHQSVDIATLEDEAQENKSKMKMVEEHMEQQKENMEHLKSLKIEAENKYDAIKFKINQLSELADPLKDELNLADSEVDNQKRGKRHYEEKQKEHLDTLNKKKRELDMKEKELEEKMSQARQICPERIEVEKSASILDKEINRLRQKIQAEHASHGDREEIMRQYQEARETYLDLDSKVRTLKKFIKLLGEIMEHRFKTYQQFRRCLTLRCKLYFDNLLSQRAYCGKMNFDHKNETLSISVQPGEGNKAAFNDMRALSGGERSFSTVCFILSLWSIAESPFRCLDEFDVYMDMVNRRIAMDLILKMADSQRFRQFILLTPQSMSSLPSSKLIRILRMSDPERGQTTLPFRPVTQEEDDDQR

SEQ ID NO: 52106 - protein, 32 aa, Homo sapiens
LGKVTIAQGGILPNIQAILLPKKTESHKAKSK

SEQ ID NO: 52107 - protein, 30 aa, Homo sapiens
IIIYRAAYFSIYDTAKGMLPDPKNTHILIS

SEQ ID NO: 52108 - protein, 1359 aa, Homo sapiens
LEALIRDPRSPINVESLLDGLNSLVLDLDFPALRKNKNIDNFLNRYEKIVKKIRGLQMKAEDYDVVKVIGRGAFGEVQLVRHKASQKVYAMKLLSKFEMIKRSDSAFFWEERDIMAFANSPWVVQLFYAFQDDRYLYMVMEYMPGGDLVNLMSNYDVPEKWAKFYTAEVVLALDAIHSMGLIHRDVKPDNMLLDKHGHLKLADFGTCMKMDETGMVHCDTAVGTPDYISPEVLKSQGGDGFYGRECDWWSVGVFLYEMLVGDTPFYADSLVGTYSKIMDHKNSLCFPEDAEISKHAKNLICAFLTDREVRLGRNGVEEIRQHPFFKNDQWHWDNIRETAAPVVPELSSDIDSSNFDDIEDDKGDVETFPIPKAFVGNQLPFIGFTYYRENLLLSDSPSCRETDSIQSRKNEESQEIQKKLYTLEEHLSNEMQAKEELEQKCKSVNTRLEKTAKELEEEITLRKSVESALRQLEREKALLQHKNAEYQRKADHEADKKRNLENDVNSLKDQLEDLKKRNQNSQISTEKVNQLQRQLDETNALLRTESDTAARLRKTQAESSKQIQQLESNNRDLQDKNCLLETAKLKLEKEFINLQSALESERRDRTHGSEIINDLQGRICGLEEDLKNGKILLAKVELEKRQLQERFTDLEKEKSNMEIDMTYQLKVIQQSLEQEEAEHKATKARLADKNKIYESIEEAKSEAMKEMEKKLLEERTLKQKVENLLLEAEKRCSLLDCDLKQSQQKINELLKQKDVLNEDVRNLTLKIEQETQKRCLTQNDLKMQTQQVNTLKMSEKQLKQENNHLMEMKMNLEKQNAELRKERQDADGQMKELQDQLEAEQYFSTLYKTQVRELKEECEEKTKLGKELQQKKQELQDERDSLAAQLEITLTKADSEQLARSIAEEQYSDLEKEKIMKELEIKEMMARHKQELTEKDATIASLEETNRTLTSDVANLANEKEELNNKLKDVQEQLSRLKDEEISAAAIKAQFEKQLLTERTLKTQAVNKLAEIMNRKEPVKRGNDTDVRRKEKENRKLHMELKSEREKLTQQMIKYQKELNEMQAQIAEESQIRIELQMTLDSKDSDIEQLRSQLQALHIGLDSSSIGSGPGDAEADDGFPESRLEGWLSLPVRNNTKKFGWVKKYVIVSSKKILFYDSEQDKEQSNPYMVLDIDKLFHVRPVTQTDVYRADAKEIPRIFQILYANEGESKKEQEFPVEPVGEKSNYICHKGHEFIPTLYHFPTNCEACMKPLWHMFKPPPALECRRCHIKCHKDHMDKKEEIIAPCKVYYDISTAKNLLLLANSTEEQQKWVSRLVKKIPKKPPAPDPFARSSPRTSMKIQQNQSIRRPSRQLAPNKPS

SEQ ID NO: 52109 - protein, 13 aa, Homo sapiens
LERKTAMNSLGFR

SEQ ID NO: 52110 - protein, 72 aa, Homo sapiens
VSPGTLAFSVTLFTIFAFINVGVLLYRRRPEIGGELGGPRTAKLLTSCLFVLLWLLYIFFSSLEAYCHIKGF

SEQ ID NO: 52111 - protein, 300 aa, Homo sapiens
LEEKLSLCFRPSDPGAEPPRTAVRPITERSLLQGDEIWNALTDNYGNVMPVDWKSSHTRTLHLLTLNLSEKGVSDSLLFDTSDDEELREQLDMHSIIVSCVNDEPLFTADQVIEEIEEMMQESPDPEDDETPTQSDRLSMLSQEIQTLKRSSTGSYEERVKRLSVSELNEILEEIETAIKEYSEELVQQLALRDELEFEKEVKNSFISVLIEVQNKQKEHKETAKKKKKLKNGSSQNGKNERSHMPGTYLTTVIPYEKKNGPPSVEDLQILTKILRAMKEDSEKVPSLLTDYILKVLCPT

SEQ ID NO: 52112 - protein, 131 aa, Homo sapiens
ILTLESNVDTTANSSCQINRVISHPTLPISITAHEDRHIKFYDNNTGKLIHSMVAHLEAVTSLAVDPNGLYLMSGSHDCSIRLWNLESKTCIQEFTAHRKKFEESIHDVAFHPSKCYIASAGADALAKVFV

SEQ ID NO: 52113 - protein, 541 aa, Homo sapiens
MEELNTYRQKQGVVLKYQELPNSGPPHDRRFTFQVIIDGREFPEGEGRSKKEAKNAAAKLAVEILNKEKKAVSPLLLTTTNSSEGLSMGNYIGLINRIAQKKRLTVNYEQCASGVHGPEGFHYKCKMGQKEYSIGTGSTKQEAKQLAAKLAYLQILSEETSVKSDYLSSGSFATTCESQSNSLVTSTLASESSSEGDFSADTSEINSNSDSLNSSSLLMNGLRNNQRKAKRSLAPRFDLPDMKETKYTVDKRFGMDFKEIELIGSGGFGQVFKAKHRIDGKTYVIKRVKYNNEKAEREVKALAKLDHVNIVHYNGCWDGFDYDPETSDDSLESSDYDPENSKNSSRSKTKCLFIQMEFCDKGTLEQWIEKRRGEKLDKVLALELFEQITKGVDYIHSKKLIHRDLKPSNIFLVDTKQVKIGDFGLVTSLKNDGKRTRSKGTLRYMSPEQISSQDYGKEVDLYALGLILAELLHVCDTAFETSKFFTDLRDGIISDIFDKKEKTLLQKLLSKKPEDRPNTSEILRTLTVWKKSPEKNERHTC

SEQ ID NO: 52114 - protein, 15 aa, Homo sapiens
KKRIKTTQKTKKQRK

SEQ ID NO: 52115 - protein, 532 aa, Homo sapiens
TYEEDREYESQAKRLKTEEGEIDYSAEEGENRREATPRGGGDGGGGGRSFSQPEAGGSHHKVSVSPVVHVRGLCESVVEADLVEALEKFGTICYVMMMPFKRQALVEFENIDSAKECVTFAADEPVYIAGQQAFFNYSTSKRITRPGNTDDPSGGNKVLLLSIQNPLYPITVDVLYTVCNPVGKVQRIVIFKRNGIQAMVEFESVLCAQKAKAALNGADIYAGCCTLKIEYARPTRLNVIRNDNDSWDYTKPYLGRRDRGKGRQRQAILGEHPSSFRHDGYGSHGPLLPLPSRYRMGSRDTPELVAYPLPQASSSYMHGGNPSGSVVMVSGLHQLKMNCSRVFNLFCLYGNIEKVKFMKTIPGTALVEMGDEYAVERAVTHLNNVKLFGKRLNVCVSKQHSVVPSQIFELEDGTSSYKDFAMSKNNRFTSAGQASKNIIQPPSCVLHYYNVPLCVTEETFTKLCNDHEVLTFIKYKVFDAKPSAKTLSGLLEWECKTDAVEALTALNHYQIRVPNGSNPYTLKLCFSTSSHL

SEQ ID NO: 52116 - protein, 63 aa, Homo sapiens
RHLPSPPLTQEVDLHSIAGPPVPPRQSTSQHIPKLPPKTYKREHTHPSMHRDGPPLLENAHSS

SEQ ID NO: 52117 - protein, 104 aa, Homo sapiens
LDCCIKIVNLQGRLKSSRKLSSELTFDFQIESIVCLQDSVLAFWKHGMQGRSFRSNEVTQEISDSTRIFRLLGSDRVVVLESRPTDNPTANSNLYILAGHENSY

SEQ ID NO: 52118 - protein, 145 aa, Homo sapiens
IFAPNHVVAKSRFWYFVSQLKKMKKSSGEIVYCGQVFEKFPLRVKNFGIWLRYDSRSGTHNMYREYRDLTTAGAVTRCYRDMSARHGGRAHSIQIMKVEEIAASKCRRPAVKQFHDSKIKFPLPHRVLRRQHKPRFTTKRPNTFF

SEQ ID NO: 52119 - protein, 85 aa, Homo sapiens
MCLQIWLQKNQVLVHKIVHTNFVEKLFCRKEQRVPQRTVWRAPQLQLQKTLVIVQNVQECLENHKIYQQHLLNSIFRRNCQMKWF

SEQ ID NO: 52120 - protein, 33 aa, Homo sapiens
RTHHDNWQEHKQQFTDDQLLVLTDLLVSPCYYA

SEQ ID NO: 52121 - protein, 18 aa, Homo sapiens
LQDSILNPMSANLVDLGS

SEQ ID NO: 52122 - protein, 94 aa, Homo sapiens
IQESKFLGGDMEHTHLVKGLDFALLQKVRAEIASKEKEEEELMEKPQKETKKDEDPENKIEFKTRLGRNVYRVLFKNKHISGMSCSCRAAWPMW

SEQ ID NO: 52123 - protein, 343 aa, Homo sapiens
TRYKTELCRPFEESGTCKYGEKCQFAHGFHELRSLTRHPKYKTELCRTFHTIGFCPYGPRCHFIHNADERRPAPSGGASGDLRAFGTRDALHLGFPREPRPKLHHSLSFSGFPSGHHQPPGGLESPLLLDSPTSRTPPPPSCSSASSCSSSASSCSSASAASTPSGAPTCCASAAAAAAAALLYGTGGAEDLLAPGAPCAACSSASCANNAFAFGPELSSLITPLAIQTHNFAAVAAAAYYRSQQQQQQQGLAPPAQPPAPPSATLPAGAAAPPSPPFSFQLPRRLSDSPVFDAPPSPPDSLSDRDSYLSGSLSSGSLSGSESPSLDPGRRLPIFSRLSISDD

SEQ ID NO: 52124 - protein, 8 aa, Homo sapiens
MNIPKQIE

SEQ ID NO: 52125 - protein, 1391 aa, Homo sapiens
LLRSARWLLRAGAAPRLPLSLRLLPGGPGRLHAASYLPAARAGPVAGGLLSPARLYAIAAKEKDIQEESTFSSRKISNQFDWALMRLDLSVRRTGRIPKKLLQKVFNDTCRSGGLGGSHALLLLRSCGSLLPELKLEERTEFAHRIWDTLQKLGAVYDVSHYNALLKVYLQNEYKFSPTDFLAKMEEANIQPNRVTYQRLIASYCNVGDIEGASKILGFMKTKDLPVTEAVFSALVTGHARAGDMENAENILTVMRDAGIEPGPDTYLALLNAYAEKGDIDHVKQTLEKVEKSELHLMDRDLLQIIFSFSKAGYPQYVSEILEKVTCERRYIPDAMNLILLLVTEKLEDVALQILLACPVSKEDGPSVFGSFFLQHCVTMNTPVEKLTDYCKKLKEVQMHSFPLQFTLHCALLANKTDLAKALMKAVKEEGFPIRPHYFWPLLVGRRKEKNVQGIIEILKGMQELGVHPDQETYTDYVIPCFDSVNSARAILQENGCLSDSDMFSQAGLRSEAANGNLDFVLSFLKSNTLPISLQSIRSSLLLGFRRSMNINLWSEITELLYKDGRYCQEPRGPTEAVGYFLYNLIDSMSDSEVQAKEEHLRQYFHQLEKMNVKIPENIYRGIRNLLESYHVPELIKDAHLLVESKNLDFQKTVQLTSSELESTLETLKAENQPIRDVLKQLILVLCSEENMQKALELKAKYESDMVTGGYAALINLCCRHDKVEDALNLKEEFDRLDSSAVLDTGKYVGLVRVLAKHGKLQDAINILKEMKEKDVLIKDTTALSFFHMLNGAALRGEIETVKQLHEAIVTLGLAEPSTNISFPLVTVHLEKGDLSTALEVAIDCYEKYKVLPRIHDVLCKLVEKGETDLIQKAMDFVSQEQGEMVMLYDLFFAFLQTGNYKEAKKIIETPGIRARSARLQWFCDRCVANNQVETLEKLVELTQKLFECDRDQMYYNLLKLYKINGDWQRADAVWNKIQEENVIPREKTLRLLAEILREGNQEVPFDVPELWYEDEKHSLNSSSASTTEPDFQKDILIACRLNQKKGAYDIFLNAKEQNIVFNAETYSNLIKLLMSEDYFTQAMEVKAFAETHIKGFTLNDAANSRLIITQVRRDYLKEAVTTLKTVLDQQQTPSRLAVTRVIQALAMKGDVENIEVVQKMLNGLEDSIGLSKMVFINNIALAQIKNNNIDAAIENIENMLTSENKVIEPQYFGLAYLFRKVIEEQLEPAVEKISIMAERLANQFAIYKPVTDFFLQLVDAGKVDDARALLQRCGAIAEQTPILLLFLLRNSRKQGKASTVKSVLELIPELNEKEEAYNSLMKSYVSEKDVTSAKALYEHLTAKNTKLDDLFLKRYASLLKYAGEPVPFIEPPESFEFYAQQLRKLRENSS

SEQ ID NO: 52126 - protein, 655 aa, Homo sapiens
KDLQPVKQENEKPLPENMDAFEKVRTKLETQPQEEYEIINVEVKHGGFVYYQEGCCLVRSKDEEADNDNYEVLFNLEELKLDQPFIDCIRVAPDEKYVAAKIRTEDSEASTCVIIKLSDQPVMEASFPNVSSFEWVKDEEDEDVLFYTFQRNLRCHDVYRATFGDNKRNERFYTEKDPSYFVFLYLTKDSRFLTINIMNKTTSEVWLIDGLSPWDPPVLIQKRIHGVLYYVEHRDDELYILTNVGEPTEFKLMRTAADTPAIMNWDLFFTMKRNTKVIDLDMFKDHCVLFLKHSNLLYVNVIGLADDSVRSLKLPPWACGFIMDTNSDPKNCPFQLCSPIRPPKYYTYKFAEGKLFEETGHEDPITKTSRVLRLEAKSKDGKLVPMTVFHKTDSEDLQKKPLLVHVYGAYGMDLKMNFRPERRVLVDDGWILAYCHVRGGGELGLQWHADGRLTKKLNGLADLEACIKTLHGQGFSQPSLTTLTAFSAGGVLAGALCNSNPELVRAVTLEAPFLDVLNTMMDTTLPLTLEELEEWGNPSSDEKHKNYIKRYCPYQNIKPQHYPSIHITAYENDERVPLKGIVSYTEKLKEAIAEHAKDTGEGYQTPNIILDIQPGGNHVIEDSHKKITAQIKFLYEELGLDSTSVFEDLKKYLKF

SEQ ID NO: 52127 - protein, 47 aa, Homo sapiens
IYNPTTGEFLWRTAKSWGLILLFYLIFYGFLAALFSFTMWVMLQTQR

SEQ ID NO: 52128 - protein, 12 aa, Homo sapiens
MTAILCVSRLWL

SEQ ID NO: 52129 - protein, 35 aa, Homo sapiens
LSFLAPCMCCYLPLRACYHCGVMCRCCGGKHKAAA

SEQ ID NO: 52130 - protein, 136 aa, Homo sapiens
INEDYPVEIHEYLSAFENSIGAVDEMLKTMMSVSRNELLQKLDPLEQAKVDLVSAYTLNSMFWVYLATQGVNPKEHPVKQELERIRVYMNRVKEITDKKKAGKLDRGAASRFVKNALWEPKSKNASKVANKGKSKS

SEQ ID NO: 52131 - protein, 81 aa, Homo sapiens
IKNGVCSLEFDRKDISMNKLVATSLEGKFHVFDMRTQHPTKGFASVSEKAHKSTVWQVRHLPQNRELFLTAGGAGGLHLWK

SEQ ID NO: 52132 - protein, 86 aa, Homo sapiens
RELFLTAGGAGGLHLWKYEYPIQRSKKDSEGIEMGVAGSVSLLQNVTLSTQPISSLDWSPDKRGLCVCSSFDQTVRVLIVTKLNKI

SEQ ID NO: 52133 - protein, 146 aa, Homo sapiens
IMEIRVFPDKGYSFVRFNSHESAAHAIVSVNGTTIEGHVVKCYWGKETLDMINPVQQNQIGYPQPYGQWGQWYGNAQQIGQYMPNGWQVPAYGMYGQAWNQQGFNQTQSSAPWMGPNYGVQPPQGQNGSMLPNQPSGYRVAGYETQ

SEQ ID NO: 52134 - protein, 49 aa, Homo sapiens
KGSSCGPQTKNHCITSADCIGEKGAGTEKPEINHLSFLEKRMLRLSRFG

SEQ ID NO: 52135 - protein, 1068 aa, Homo sapiens
IMTMLADHAARQLLDFSQKLDINLLDNVVNCLYHGEGAQQRMAQEVLTHLKEHPDAWTRVDTILEFSQNMNTKYYGLQILENVIKTRWKILPRNQCEGIKKYVVGLIIKTSSDPTCVEKEKVYIGKLNMILVQILKQEWPKHWPTFISDIVGASRTSESLCQNNMVILKLLSEEVFDFSSGQITQVKSKHLKDSMCNEFSQIFQLCQFVMENSQNAPLVHATLETLLRFLNWIPLGYIFETKLISTLIYKFLNVPMFRNVSLKCLTEIAGVSVSQYEEQFVTLFTLTMMQLKQMLPLNTNIRLAYSNGKDDEQNFIQNLSLFLCTFLKEHDQLIEKRLNLRETLMEALHYMLLVSEVEETEIFKICLEYWNHLAAELYRESPFSTSASPLLSGSQHFDVPPRRQLYLPMLFKVRLLMVSRMAKPEEVLVVENDQGEVVREFMKDTDSINLYKNMRETLVYLTHLDYVDTERIMTEKLHNQVNGTEWSWKNLNTLCWAIGSISGAMHEEDEKRFLVTVIKDLLGLCEQKRGKDNKAIIASNIMYIVGQYPRFLRAHWKFLKTVVNKLFEFMHETHDGVQDMACDTFIKIAQKCRRHFVQVQVGEVMPFIDEILNNINTIICDLQPQQVHTFYEAVGYMIGAQTDQTVQEHLIEKYMLLPNQVWDSIIQQATKNVDILKDPETVKQLGSILKTNVRACKAVGHPFVIQLGRIYLDMLNVYKCLSENISAAIQANGEMVTKQPLIRSMRTVKRETLKLISGWVSRSNDPQMVAENFVPPLLDAVLIDYQRNVPAAREPEVLSTMAIIVNKLGGHITAEIPQIFDAVFECTLNMINKDFEEYPEHRTNFFLLLQAVNSHCFPAFLAIPPTQFKLVLDSIIWAFKHTMRNVADTGLQILFTLLQNVAQEEAAAQSFYQTYFCDILQHIFSVVTDTSHTAGLTMHASILAYMFNLVEEGKISTSLNPGNPVNNQIFLQEYVANLLKSAFPHLQDAQVKLFVTGLFSLNQDIPAFKEHLRDFLVQIKEFAGEDTSDLFLEEREIALRQADEEKHKRQMSVPGIFNPHEIPEEMCD

SEQ ID NO: 52136 - protein, 142 aa, Homo sapiens
LDEIEELCPTSTSTEAATAATDSVKGTSSEAGTQKLDGPQESRADDSKLMDSLPGNFEITTSTGFLTDLTLDDILFADIDTSMYDFDPCTSSSGTASKMAPVSADDLLKTLAPYSSQPVTPSQPFKMDLTELDHIMEVLVGS

SEQ ID NO: 52137 - protein, 56 aa, Homo sapiens
MPFTDIGTFETVWQVKFYNYHKRDHCQWGSPFSVIEYECKPNETRSLMWVNKESFL

SEQ ID NO: 52138 - protein, 167 aa, Homo sapiens
KTTFPTTCSLLSPRQLFRIEGVKSVFFGPDFITVTKENEELDWNLLKPDIYATIMDFFASGLPLVTEETPSGEAGSEEDDEVVAMIKELLDTRIRPTVQEDGGDVIYKGFEDGIVQLKLQGSCTSCPSSIITLKNGIQNMLQFYIPEVEGVEQVMDDESDEKEANSP

SEQ ID NO: 52139 - protein, 180 aa, Homo sapiens
IPGKPVLETRTMDFPTPAAAFRSPLARQLFRIEGVKSVFFGPDFITVTKENEELDWNLLKPDIYATIMDFFASGLPLVTEETPSGEAGSEEDDEVVAMIKELLDTRIRPTVQEDGGDVIYKGFEDGIVQLKLQGSCTSCPSSIITLKNGIQNMLQFYIPEVEGVEQVMDDESDEKEANSP

SEQ ID NO: 52140 - protein, 139 aa, Homo sapiens
KHLATSLMQLLLEAEVRQLTLGALQQFNLDVRECEQFARSGPVPGFQEDTLQLAFIDLRQLLDLFIQWDWSTYLADYGQPNCKYLRVNPVTALTLLEKMKDTSRKNNMFAQFRKNERDKQKLIDTVAKQLRGLISSHHS

SEQ ID NO: 52141 - protein, 112 aa, Homo sapiens
KQSRSSLSIALSSGLEKLKTVTSGSIQPVTQAPQAGQMVDTKRLKDSAVLDQSAKYYHLTHDELISLLLQRERELSQRDEHVQELESYIDRLLVRIMETSPTLLQIPPGPPK

SEQ ID NO: 52142 - protein, 70 aa, Homo sapiens
RLKDSAVLDQSAKYYHLTHDELISLLLQRERELSQRDEHVQELESYIDRLLVRIMETSPTLLQIPPGPPK

SEQ ID NO: 52143 - protein, 8 aa, Homo sapiens
MIICTFKC

SEQ ID NO: 52144 - protein, 21 aa, Homo sapiens
IPVNVTSIPTFELLQPPWTFW

SEQ ID NO: 52145 - protein, 169 aa, Homo sapiens
LDLFPECRVTLLLFKDVKNAGDLRRKAMEGTIDGSLINPTVIVDPFQILVAANKAVHLYKLGKMKTRTLSTEIIFNLSPNNNISEALKKFGISANDTSILIVYIEEGEKQINQEYLISQVEGHQVSLKNLPEIMNITEVKKIYKLSSQEESIGTLLDAIICRMSTKDVL

SEQ ID NO: 52146 - protein, 341 aa, Homo sapiens
LALGGRLLGTHMSQWHHPRSGWGRRRDFSGRSSAKKKGGNHIPERWKDYLPVGQRMPGTRFIAFKVPLQKSFEKKLAPEECFSPLDLFNKIREQNEELGLIIDLTYTQRYYKPEDLPETVPYLKIFTVGHQVPDDETIFKFKHAVNGFLKENKDNDKLIGVHCTHGLNRTGYLICRYLIDVEGVRPDDAIELFNRCRGHCLERQNYIEDLQNGPIRKNWNSSVPRSSDFEDSAHLMQPVHNKPVKQGPRYNLHQIQGHSAPRHFHTQTQSLQQSVRKFSENPHVYQRHHLPPPGPPGEDYSHRRYSWNVKPNASRAAQDRRRWYPYNYSRLSYPACWEWTQ

SEQ ID NO: 52147 - protein, 5 aa, Homo sapiens
LLMGF

SEQ ID NO: 52148 - protein, 4 aa, Homo sapiens
IKED

SEQ ID NO: 52149 - protein, 102 aa, Homo sapiens
IQRSFSSPENFQRQAVMNSALRQMSYGGKFASSPLDQSGFSPSVQSHSHSFNQSSSSQWRQGTPSSQRKVRMNSHPYLADRHYSREQRYTDHGSDHHYRGKR

SEQ ID NO: 52150 - protein, 25 aa, Homo sapiens
MSKDNLIVPILEEGVQNSISGESEA

SEQ ID NO: 52151 - protein, 154 aa, Homo sapiens
IPTVRASSTSQPLDQVTGSVWNLGRLNHVAIAVPDLEKAAAFYKNILGAQVSEAVPLPEHGVSVVFVNLGNTKMELLHPLGRDSPIAGFLQKNKAGGMHHICIEVDNINAAVMDLKKKKIRSLSEEVKIGAHGKPVIFLHPKDCGGVLVELEQA

SEQ ID NO: 52152 - protein, 20 aa, Homo sapiens
ILSKSNLNPDAKEFIPGEKY

SEQ ID NO: 52153 - protein, 72 aa, Homo sapiens
VTQILKEKFPRATAIKVTDISGGCGAMYEIKIESEEFKEKRTVQQHQMVNQALKEEIKEMHGLRIFTSVPKR

SEQ ID NO: 52154 - protein, 217 aa, Homo sapiens
KMSFLFSSRSSKTFKPKKNIPEGSHQYELLKHAEATLGSGNLRQAVMLPEGEDLNEWIAVNTVDFFNQINMLYGTITEFCTEASCPVMSAGPRYEYHWADGTNIKKPIKCSAPKYIDYLMTWVQDQLDDETLFPSKIGVPFPKNFMSVAKTILKRLFRVYAHIYHQHFDSVMQLQEEAHLNTSFKHFIFFVQEFNLIDRRELAPLQELIEKLGSKDR

SEQ ID NO: 52155 - protein, 21 aa, Homo sapiens
KRRPTSTPPLSTLFSLFRSLI

SEQ ID NO: 52156 - protein, 1242 aa, Homo sapiens
TPSGSRMSAEASARPLRVGSRVEVIGKGHRGTVAYVGATLFATGKWVGVILDEAKGKNDGTVQGRKYFTCDEGHGIFVRQSQIQVFEDGADTTSPETPDSSASKVLKREGTDTTAKTSKLPTRPASTGVAGASSSLGPSGSASAGELSSSEPSTPAQTPLAAPIIPTPVLTSPGAVPPLPSPSKEEEGLRAQVRDLEEKLETLRLKRAEDKAKLKELEKHKIQLEQVQEWKSKMQEQQADLQRRLKEARKEAKEALEAKERYMEEMADTADAIEMATLDKEMAEERAESLQQEVEALKERVDELTTDLEILKAEIEEKGSDGAASSYQLKQLEEQNARLKDALVRMRDLSSSEKQEHVKLQKLMEKKNQELEVVRQQRERLQEELSQAESTIDELKEQVDAALGAEEMVEMLTDRNLNLEEKVRELRETVGDLEAMNEMNDELQENARETELELREQLDMAGARVREAQKRVEAAQETVADYQQTIKKYRQLTAHLQDVNRELTNQQEASVERQQQPPPETFDFKIKFAETKAHAKAIEMELRQMEVAQANRHMSLLTAFMPDSFLRPGGDHDCVLVLLLMPRLICKAELIRKQAQEKFELSENCSERPGLRGAAGEQLSFAAGLVYSLSLLQATLHRYEHALSQCSVDVYKKVGSLYPEMSAHERSLDFLIELLHKDQLDETVNVEPLTKAIKYYQHLYSIHLAEQPEDCTMQLADHIKFTQSALDCMSVEVGRLRAFLQGGQEATDIALLLRDLETSCSDIRQFCKKIRRRMPGTDAPGIPAALAFGPQVSDTLLDCRKHLTWVVAVLQEVAAAAAQLIAPLAENEGLLVAALEELAFKASEQIYGTPSSSPYECLRQSCNILISTMNKLATAMQEGEYDAERPPSKPPPVELRAAALRAEITDAEGLGLKLEDRETVIKELKKSLKIKGEELSEANVRLSLLEKKLDSAAKDADERIEKVQTRLEETQALLRKKEKEFEETMDALQADIDQLEAEKAELKQRLNSQSKRTIEGLRGPPPSGIATLVSGIAGGAIPGQAPGSVPGPGLVKDSPLLLQQISAMRLHISQLQHENSILKGAQMKASLASLPPLHVAKLSHEGPGSELPAGALYRKTSQLLETLNQLSTHTHVVDITRTSPAAKSPSAQLMEQVAQLKSLSDTVEKLKDEVLKETVSQRPGATVPTDFATFPSSAFLRAKEEQQDDTVYMGKVTFSCAAGFGQRHRLVLTQEQLHQLHSRLIS

SEQ ID NO: 52157 - protein, 34 aa, Homo sapiens
KQNRPIPQWIRMKTGNKIRYNSKRRHWRRTKLGL

SEQ ID NO: 52158 - protein, 40 aa, Homo sapiens
KELQVKQQLDSCVTKCVDDHMHLIPTMTKKMKEALLSIGK

SEQ ID NO: 52159 - protein, 320 aa, Homo sapiens
LSRSFLLPQNGIRHCSYTASRQHLYVDKNTKIICQGFTGKQGTFHSQQALEYGTKLVGGTTPGKGGQTHLGLPVFNTVKEAKEQTGATASVIYVPPPFAAAAINEAIEAEIPLVVCITEGIPQQDMVRVKHKLLRQEKTRLIGPNCPGVINPGECKIGIMPGHIHKKGRIGIVSRSGTLTYEAVHQTTQVGLGQSLCVGIGGDPFNGTDFIDCLEIFLNDSATEGIILIGEIGGNAEENAAEFLKQHNSGPNSKPVVSFIAGLTAPPGRRMGHAGAIIAGGKGGAKEKISALQSAGVVVSMSPAQLGTTIYKEFEKRKML

SEQ ID NO: 52160 - protein, 84 aa, Homo sapiens
VWLNVNYLALGALHHYGHLEGPHQARAAKLHGELRANVVGNVWRQYQATGFLWEQYSDRDGRGMGCRPFHGWTSLVLLAMAEDY

SEQ ID NO: 52161 - protein, 108 aa, Homo sapiens
LARLGLRPVKQVRVQFCPFEKNVESTRTFLQTVSSEKVRSTNLNCSVIADVRHDGSEPCVDVLFGDGHRLIMRGAHLTALEMLTAFASHIRARDAAGSGDKPGADTGR

SEQ ID NO: 52162 - protein, 89 aa, Homo sapiens
LCLERLSSGKDKNKSVLQNKYVRCSVRAEVRHLRRVLCHRLMLNPQHVQLLFDNEVLPDHMTMKQIWLSRWFGKPSPLLLQYSVKEKRR

SEQ ID NO: 52163 - protein, 48 aa, Homo sapiens
MLNPQHVQLLFDNEVLPDHMTMKQIWLSRWFGKPSPLLLQYSVKEKRR

SEQ ID NO: 52164 - protein, 11 aa, Homo sapiens
IGPDRDTAHSS

SEQ ID NO: 52165 - protein, 204 aa, Homo sapiens
KKNIRATERALNWDSFNTGDCFILDLGQNIFAWCGGKSNILERNKARDLALAIRDSERQGKAQVEIVTDGEEPAEMIQVLGPKPALKEGNPEEDLTADKANAQAAALYKVSDATGQMNLTKVADSSPFALELLISDDCFVLDNGLCGKIYIWKGRKANEKERQAALQVAEGFISRMQYAPNTQVEILPQGHESPIFKQFFKDWK

SEQ ID NO: 52166 - protein, 756 aa, Homo sapiens
VSAGSARTSPSSDKVQKDKAELISGPRQDSRIGKLLGFEWTDLSSWRRLVTLLNRPTDPASLAVFRFLFGFLMVLDIPQERGLSSLDRKYLDGLDVCRFPLLDALRPLPLDWMYLVYTIMFLGALGMMLGLCYRISCVLFLLPYWYVFLLDKTSWNNHSYLYGLLAFQLTFMDANHYWSVDGLLNAHRRNAHVPLWNYAVLRGQIFIVYFIAGVKKLDADWVEGYSMEYLSRHWLFSPFKLLLSEELTSLLVVHWGGLLLDLSAGFLLFFDVSRSIGLFFVSYFHCMNSQLFSIGMFSYVMLASSPLFCSPEWPRKLVSYCPRRLQQLLPLKAAPQPSVSCVYKRSRGKSGQKPGLRHQLGAAFTLLYLLEQLFLPYSHFLTQGYNNWTNGLYGYSWDMMVHSRSHQHVKITYRDGRTGELGYLNPGVFTQSRRWKDHADMLKQYATCLSRLLPKYNVTEPQIYFDIWVSINDRFQQRIFDPRVDIVQAAWSPFQRTSWVQPLLMDLSPWRAKLQEIKSSLDNHTEVVFIADFPGLHLENFVSEDLGNTSIQLLQGEVTVELVAEQKNQTLREGEKMQLPAGEYHKVYTTSPSPSCYMYVYVNTTELALEQDLAYLQELKEKVENGSETGPLPPELQPLLEGEVKGGPEPTPLVQTFLRRQQRLQEIERRRNTPFHERFFRFLLRKLYVFRRSFLMTCISLRNLILGRPSLEQLAQEVTYANLRPFEAVGELNPSNTDSSHSNPPESNPDPVHSEF

SEQ ID NO: 52167 - protein, 431 aa, Homo sapiens
IKFTGRVEFIFVNVENWDNKSYMTDIGIYNMPSYILRTPEGIYRYGNHTGEFISLQAMDSFLRSLQPEVNDLFVLSLVLVNLMAWMDLFITQGATIKRFVVLISTLGTYNSLLIISWLPVLGFLQLPYLDSFYEYSLKLLRYSNTTTLASWVRADWMFYSSHPALFLSTYLGHGLLIDYFEKKRRRNNNNDEVNANNLEWLSSLWDWYTSYLFHPIASFQNFPVESDWDEDPDLFLERLAFPDLWLHPLIPTDYIKNLPMWRFKCLGVQSEEEMSEGSQDTENDSESENTDTLSSEKEVFEDKQSVLHNSPGTASHCDAEACSCANKYCQTSPCERKGRSYGSYNTNEDMEPDWLTWPADMLHCTECVVCLENFENGCLLMGLPCGHVFHQNCIVMWLAGGRHCCPVCRWPSYKKKQPYAQHQPLSNDVPS

SEQ ID NO: 52168 - protein, 220 aa, Homo sapiens
LFGKTQEKPPKELVNEWSLKIRKEMRVVDRQIRDIQREEEKVKRSVKDAAKKGQKDVCIVLAKEMIRSRKAVSKLYASKAHMNSVLMGMKNQLAVLRVAGSLQKSTEVMKAMQSLVKIPEIQATMRELSKEMMKAGIIEEMLEDTFESMDDQEEMEEEAEMEIDRILFEITAGALGKAPSKVTDALPEPEPPGAMAASEDEEEEEEALEAMQSRLATLRS

SEQ ID NO: 52169 - protein, 59 aa, Homo sapiens
IRSNSSPLQQMTFETSFQFLKQATMLGSHDELRSPSACLVVGKVVRGGTGLFELKQPLR

SEQ ID NO: 52170 - protein, 72 aa, Homo sapiens
MAASSTKSWWETGEVQAQSAAKTPSCKDIVAGDMSKKSLWEQKGGSKTSSTIKHSGPWRKHQTNTDGGTFKD

SEQ ID NO: 52171 - protein, 28 aa, Homo sapiens
KGGSKTSSTIKTLWQLHWVLAEFWKTGM

SEQ ID NO: 52172 - protein, 20 aa, Homo sapiens
LYDYGDRSKASIEAHPWLKH

SEQ ID NO: 52173 - protein, 57 aa, Homo sapiens
LSPMCSLKQMLCLIPAGESHRLELLGRERPSCTLLRDCHAPPGGLRTFDMLQSWPRQ

SEQ ID NO: 52174 - protein, 26 aa, Homo sapiens
VVECISWAPESSYSSISEATGSETKK

SEQ ID NO: 52175 - protein, 60 aa, Homo sapiens [sequence omitted]

SEQ ID NO: 52176 - protein, 93 aa, Homo sapiens
ITGDLSDNHDVISLKLFELTVERTPEEEKLHRDVFLPSVDNMKLPEMTAPLPPLSGLALFLIVFFSLVFSVFAIVIGIILYNKWQEQSRKRFY

SEQ ID NO: 52177 - protein, 75 aa, Homo sapiens
RQRPKKTALASQVRRRRPQKMSLISRVRTARPQKTAPASRVRRIRPQKTSLTSRVRRSRLQKTALTSPVQRSRAQ

SEQ ID NO: 52178 - protein, 31 aa, Homo sapiens
IPPIARGSAPRQVWAADSFLSIPSSIHPEPG

SEQ ID NO: 52179 - protein, 70 aa, Homo sapiens
MAASSTKSWWETGEVQAQSAAKTPSCKDIVAGDMSKKSLWEQKGGSKTSSTIKTLWQLHWVLAEFWKTGM

SEQ ID NO: 52180 - protein, 108 aa, Homo sapiens
LGKTFDTFCPLGPALVTKDSVADPHNLKICCRVNGEVVQSSNTNQMVFKTEDLIAWVSQFVTFYPGDVILTGTPPGVGVFRKPPVFLKKGDEVQCEIEELGVIINKVV

SEQ ID NO: 52181 - protein, 325 aa, Homo sapiens
LEGDLFIGPKAEEHRGLLTIRYPMEHGVVRDWNDMERIWQYVYSKDQLQTFSEEHPVLLTEAPLNPSKNREKAAEVFFETFNVPALFISMQAVLSLYATGRTTGVVLDSGDGVTHAVPIYEGFAMPHSIMRVDIAGRDVSRYLRLLLRKEGVDFHTSAEFEVVRTIKERACYLSINPQKDEALETEKVQYTLPDGSTLDVGPARFRAPELLFQPDLVGDESEGLHEVVAFAIHKSDMDLRRTLFANIVLSGGSTLFKGFGDRLLSEVKKLAPKDIKIKISAPQERLYSTWIGGSILASLDTFKKMWVSKKEYEEDGSRAIHRKTF

SEQ ID NO: 52182 - protein, 271 aa, Homo sapiens
RNASAVVLYNEERYGNITLPMSHAGTGNIVVIMISYPKGREILELVQKGIPVTMTIGVGTRHVQEFISGQSVVFVAIAFITMMIISLAWLIFYYIQRFLYTGSQIGSQSHRKETKKVIGQLLLHTVKHGEKGIDVDAENCAVCIENFKVKDIIRILPCKHIFHRICIDPWLLDHRTCPMCKLDVIKALGYWGEPGDVQEMPAPESPPGRDPAANLSLALPDDDGSDDSSPPSASPAESEPQCDPSFKGDAGENTALLEAGRSDSRHGGPIS

SEQ ID NO: 52183 - protein, 458 aa, Homo sapiens
LPATMASSEVARHLLFQSHMATKTTCMSSQGSDDEQIKRENIRSLTMSGHVGFESLPDQLVNRSIQQGFCFNILCVGETGIGKSTLIDTLFNTNFEDYESSHFCPNVKLKAQTYELQESNVQLKLTIVNTVGFGDQINKEESYQPIVDYIDAQFEAYLQEELKIKRSLFTYHDSRIHVCLYFISPTGHSLKTLDLLTMKNLDSKVNIIPVIAKADTVSKTELQKFKIKLMSELVSNGVQIYQFPTDDDTIAKVNAAMNGQLPFAVVGSMDEVKVGNKMVKARQYPWGVVQVENENHCDFVKLREMLICTNMEDLREQTHTRHYELYRRCKLEEMGFTDVGPENKPVSVQETYEAKRHEFHGERQRKEEEMKQMFVQRVKEKEAILKEAERELQAKFEHLKRLHQEERMKLEEKRRLLEEEIIAFSKKKATSEIFHSQSFLATGSNLRKDKDRKNSNFL

SEQ ID NO: 52184 - protein, 50 aa, Homo sapiens; identical to SEQ ID NO: 51945

SEQ ID NO: 52185 - protein, 19 aa, Homo sapiens
RKRRLQDKLAATQKKLDLA

SEQ ID NO: 52186 - protein, 348 aa, Homo sapiens
LANQCRFVTGLRVRRAQQIAQLYGRLYSESSRRVLLGRLWRRLHGRPGHASALMAALAGVFVWDEERIQEEELQRSINEMKRLEEMSNMFQSSGVQHHPPEPKAQTEGNEDSEGKEQRWEMVMDKKHFKLWRRPITGTHLYQYRVFGTYTDVTPRQFFNVQLDTEYRKKWDALVIKLEVIERDVVSGSEVLHWVTHFPYPMYSRDYVYVRRYSVDQENNMMVLVSRAVEHPSVPESPEFVRVRSYESQMVIRPHKSFDENGFDYLLTYSDNPQTVFPRYCVSWMVSSGMPDFLEKLHMATLKAKNMEIKVKDYISAKPLEMSSEAKATSQSSERKNEGSCGPARIEYA

SEQ ID NO: 52187 - protein, 1433 aa, Homo sapiens
MNEIVYEKIMEHAGKNQVLVFVHSRKETGKTARAIRDMCLEKDTLGLFLREGSASTEVLRTEAEQCKNLELKDLLPYGFAIHHAGMTRVDRTLVEDLFADKHIQVLVSTATLAWGVNLPAHTVIIKGTQVYSPEKGRWTELGALDILQMLGRAGRPQYDTKGEGILITSHGELQYYLSLLNQQLPIESQMVSKLPDMLNAEIVLGNVQNAKDAVNWLGYAYLYIRMLRSPTLYGISHDDLKGDPLLDQRRLDLVHTAALMLDKNNLVKYDKKTGNFQVTELGRIASHYYITNDTVQTYNQLLKPTLSEIELFRVFSLSSEFKNITVREEEKLELQKLLERVPIPVKESIEEPSAKINVLLQAFISQLKLEGFALMADMVYVTQSAGRLMRAIFEIVLNRGWAQLTDKTLNLCKMIDKRMWQSMCPLRQFRKLPEEVVKKIEKKNFPFERLYDLNHNEIGELIRMPKMGKTIHKYVHLFPKLELSVHLQPITRSTLKVELTITPDFQWDEKVHGSSEAFWILVEDVDSEVILHHEYFLLKAKYAQDEHLITFFVPVFEPLPPQYFIRVVSDRWLSCETQLPVSFRHLILPEKYPPPTELLDLQPLPVSALRNSAFESLYQDKFPFFNPIQTQVFNTVYNSDDNVFVGAPTGSGKTICAEFAILRMLLQSSEGRCVYITPMEALAEQVYMDWYEKFQDRLNKKVVLLTGETSTDLKLLGKGNIIISTPEKWDILSRRWKQRKNVQNINLFVVDEVHLIGGENGPVLEVICSRMRYISSQIERPIRIVALSSSLSNAKDVAHWLGCSATSTFNFHPNVRPVPLELHIQGFNISHTQTRLLSMAKPVYHAITKHSPKKPVIVFVPSRKQTRLTAIDILTTCAADIQRQRFLHCTEKDLIPYLEKLSDSTLKETLLNGVGYLHEGLSPMERRLVEQLFSSGAIQVVVASRSLCWGMNVAAHLVIIMDTQYYNGKIHAYVDYPIYDVLQMVGHANRPLQDDEGRCVIMCQGSKKDFFKKFLYEPLPVESHLDHCMHDHFNAEIVTKTIENKQDAVDYLTWTFLYRRMTQNPNYYNLQGISHRHLSDHLSELVEQTLSDLEQSKCISIEDEMDVAPLNLGMIAAYYYINYTTIELFSMSLNAKTKVRGLIEIISNAAEYENIPIRHHEDNLLRQLAQKVPHKLNNPKFNDPHVKTNLLLQAHLSRMQLSAELQSDTEEILSKAIRLIQACVDVLSSNGWLSPALAAMELAQMVTQAMWSKDSYLKQLPHFTSEHIKRCTDKGVESVFDIMEMEDEERNALLQLTDSQIADVARFCNRYPNIELSYEVVDKDSIRSGGPVVVLVQLEREEEVTGPVIAPLFPQKREEGWWVVIGDAKSNSLISIKRLTLQQKAKVKLDFVAPATGAHNYTLYFMSDAYMGCDQEYKFSVDVKEAETDSDSD

SEQ ID NO: 52188 - protein, 11 aa, Homo sapiens
KRTKFHIEKNI

SEQ ID NO: 52189 - protein, 55 aa, Homo sapiens
IGLMGTENSPAPHAPSTSSPADDLGQTYNPWRIWSPTIGRRSSDPWSNSHFPHEN

SEQ ID NO: 52190 - protein, 57 aa, Homo sapiens
KEDLGACLLQSDCVVQEGKSPRQCLKEGYCNSLKYAFFECKRSVLDNRARFRGRKGY

SEQ ID NO: 52191 - protein, 234 aa, Homo sapiens
LNSVPFGRMEADASVDMFSKVLEHQLLQTTKLVEEHLDSEIQKLDQMDEDELERLKEKRLQALRKAQQQKQEWLSKGHGEYREIPSERDFFQEVKESENVVCHFYRDSTFRCKILDRHLAILSKKHLETKFLKLNVEKAPFLCERLHIKVIPTLALLKDGKTQDYVVGFTDLGNTDDFTTETLEWRLGSSDILNYSGNLMEPPFQNQKKFGTNFTKLEKKTIRGKKYDSDSDDD

SEQ ID NO: 52192 - protein, 20 aa, Homo sapiens
IRALRNRLIVLLLECKRSRK

SEQ ID NO: 52193 - protein, 6 aa, Homo sapiens
MKQEAL

SEQ ID NO: 52194 - protein, 29 aa, Homo sapiens
MVKLIFPCSAPLNTTKYLGNYSADNDKGL

SEQ ID NO: 52195 - protein, 65 aa, Homo sapiens
KFYVQGYCTRGENCLYLHNEYPCKFYHTGTKCYQGEYCKFSHAPLTPETQELLAKVLDTEKKSCK

SEQ ID NO: 52196 - protein, 74 aa, Homo sapiens
KNLKVKGPVRMPAKTLRITTRKTTCGEDSKTWDHFQMRIHKRLIDLHSPSEIVKQITSISIEPGVEVEVTIADA

SEQ ID NO: 52197 - protein, 280 aa, Homo sapiens
INHDVVEPLYIEVDQIYHLASPASPPNYMYNPIKTLKTNTIGTLNMLGLAKRVGARLLLASTSEVYGDPEVHPQSEDYWGHVNPIGPRACYDEGKRVAETMCYAYMKQEGVEVRVARIFNTFGPRMHMNDGRVVSNFILQALQGEPLTVYGSGSQTRAFQYVSDLVNGLVALMNSNVSSPVNLGNPEEHTILEFAQLIKNLVGSGSEIQFLSEAQDDPQKRKPDIKKAKLMLGWEPVVPLEEGLNKAIHYFRKELEYQANNQYIPKPKPARIKKGRTRHS

SEQ ID NO: 52198 - protein, 13 aa, Homo sapiens
KVTKSAQKAQKAK

SEQ ID NO: 52199 - protein, 342 aa, Homo sapiens
VSEYAEKQSELSAEESPEKLGTSQLHRRKVISLNKQIAQKTKHLEELRASHTSLQARYNEAKKTLTELKTYSEKLDKEQAALEKIESKADPSILQNLRALVAMNENLKSQEQEFKAHCREEMTRLQQEIENLKAERAPRGDEKTLSSGEPPGTLTSAMTHDEDLDRRYNMEKEKLYKIRLLQARRNREIAILHRKIDEVPSRAELIQYQKRFIELYRQISAVHKETKQFFTLYNTLDDKKVYLEKEISLLNSIHENFSQAMASPAARDQFLRQMEQIVEGIKQSRMKMEKKKQENKMRRDQLNDQYLELLEKQRLYFKTVKEFKEEGRKNEMLLSKVKAKAS

SEQ ID NO: 52200 - protein, 4 aa, Homo sapiens
MARL

SEQ ID NO: 52201 - protein, 89 aa, Homo sapiens
KRPRTAFTAEQLQRLKAEFQANRYITEQRRQTLAQELSLNESQIKIWFQNKRAKIKKATGIKNGLALHLMAQGLYNHSTTTVQDKDESE

SEQ ID NO: 52202 - protein, 53 aa, Homo sapiens
KTNELVLSLEDDERLLLKEDSTLKAAGIASETEIAFFCEEDYKNYKANPISSW

SEQ ID NO: 52203 - protein, 329 aa, Homo sapiens
LLFSVLLPLRLDGIIQWSYWAVFAPIWLWKLLVVAGASVGAGVWARNPRYRTEGEACVEFKAMLIAVGIHLLLLMFEVLVCDRVERGTHFWLLVFMPLFFVSPVSVAACVWGFRHDRSLELEILCSVNILQFIFIALKLDRIIHWPWLVVFVPLWILMSFLCLVVLYYIVWSLLFLRSLDVVAEQRRTHVTMAISWITIVVPLLTFEVLLVHRLDGHNTFSYVSIFVPLWLSLLTLMATTFRRKGGNHWWFGIRRDFCQFLLEIFPFLREYGNISYDLHHEDSEDAEETSVPEAPKIAPIFGKKARVVITQSPGKYVPPPPKLNIDMPD

SEQ ID NO: 52204 - protein, 24 aa, Homo sapiens
IFQLSRESKSSAVCQKKSYWKYHI

SEQ ID NO: 52205 - protein, 74 aa, Homo sapiens
IIPGLLQGYDNTESSVRKASVFCLVAIYSVIGEDLKPHLAQLTGSKMKLLNLYIKRAQTTNSNSSSSSDVSTHS

SEQ ID NO: 52206 - protein, 24 aa, Homo sapiens
MEYHSSRSKAPSKHVHPLFKRFRK

SEQ ID NO: 52207 - protein, 259 aa, Homo sapiens
LLGQGAFGRVYLCYDVDTGRELAVKQVQFDPDSPETSKEVNALECEIQLLKNLLHERIVQYYGCLRDPQEKTLSIFMEYMPGGSIKDQLKAYGALTENVTRKYTRQILEGVHYLHSNMIVHRDIKGANILRDSTGNVKLGDFGASKRLQTICLSGTGMKSVTGTPYWMSPEVISGEGYGRKADIWSVACTVVEMLTEKPPWAEFEAMAAIFKIATQPTNPKLPPHVSDYTRDFLKRIFVEAKLRPSADELLRHMFVHYH

SEQ ID NO: 52208 - protein, 18 aa, Homo sapiens
MAPRRVGARAAAGGLGAE

SEQ ID NO: 52209 - protein, 252 aa, Homo sapiens
VPGVLDRRDSAALRTPRKFYYITLLRDPVSRYLSEWRHVQRGATWKTSLHMCDGRTPTPEELPPCYEGTDWSGCTLQEFMDCPYNLANNRQVRMLADLSLVGCYNLSFIPEGKRAQLLLESAKKNLRGMAFFGLTEFQRKTQYLFERTFNLKFIRPFMQYNSTRAGGVEVDEDTIRRIEELNDLDMQLYDYAKDLFQQRYQYKRQLERREQRLRSREERLLHRAKEALPREDADEPGRVPTEDYMSHIIEKW

SEQ ID NO: 52210 - protein, 91 aa, Homo sapiens
LTNLEHDVYERLTNLQEGIIPKKKAATDDDLHRINELIQGNMQRCKLVMDQISEARDSMLKVLDHKDRVLKLLNKNGTVKKVSKLKRKEKV

SEQ ID NO: 52211 - protein, 183 aa, Homo sapiens
LLKILQELPSVSQETLKHSGIGRAVMYLYKHPKESRSNKDMAGKLINEWSRPIFGLTSNYKGMTREEREQRDLEQMPQRRRMNSTGGQTPRRDLEKVLTGEEKALRPGDPGFCARARVPMPSNKDYVVRPKWNVEMESSRFQATSKKGISRLDKQMRKFTDIRKKSRSAHAVKISIEGNKMPL

SEQ ID NO: 52212 - protein, 81 aa, Homo sapiens
MKTLNYTARFSRFKNRETIASVRSLLLQKKLHKFELACLANLCPETAEESKALIPSLEGRFEDEELQQILDDIQTKRSFQY

SEQ ID NO: 52213 - protein, 126 aa, Homo sapiens
LSTEEMELYELAQAAGGGIDPDVFKILVDLLKLNVAPLAVFQMLKSMCAGQRLASEPQDPAAVSLPTSSVPETRGRDKGSAALGGVLALAERSNHEGSSQRMPRQPSATRLPKGGGPGKSPTQGST

SEQ ID NO: 52214 - protein, 193 aa, Homo sapiens
LSKTSVVDLLYWRDIKKTGVVFGASLFLLLSLTVFSIVSVTAYIALALLSVTISFRIYKGVIQAIQKSDEGHPFRAYLESEVAISEELVQKYSNSALGHVNCTIKELRRLFLVDDLVDSLKFAVLMWVFTYVGALFNGLTLLILALISLFSVPVIYERHQAQIDHYLGLANKNVKDAMAKIQAKIPGLKRKAE

SEQ ID NO: 52215 - protein, 38 aa, Homo sapiens [sequence omitted]

SEQ ID NO: 52216 - protein, 62 aa, Homo sapiens
LNEDRQWDDRGTGHVSSTYVEELKGMSLLVRAESDGSLLLESKINPNTAYQKQQASSCLSLI

SEQ ID NO: 52217 - protein, 498 aa, Homo sapiens
RDAFFKTLAKLGILPALEIVMGMDDLQVRSAATDIFSYLVEFSPSMVREFVMQEAQQSDDDILLINVVIEQMICDTDPELGGAVQLMGLLRTLIDPENMLATTNKTEKSEFLNFFYNHCMHVLTAPLLTNTSEDKCEKDFFLKHYRYSWSFICTPSHSHSHSTPSSSISQDNIVGSNKNNTICPDNYQTAQLLALILELLTFCVEHHTYHIKNYIMNKDLLRRVLVLMNSKHTFLALCALRFMRRIIGLKDEFYNRYITKGNLFEPVINALLDNGTRYNLLNSAVIELFEFIRVEDIKSLTAHIVENFYKALESIEYVQTFKGLKTKYEQEKDRQNQKLNSVPSILRSNRFRRDAKALEEDEEMWFNEDEEEEGKAVVAPVEKPKPEDDFPDNYEKFMETKKAKESEDKENLPKRTSPGGFKFTFSHSASAANGTNSKSVVAQIPPATSNGSSSKTTNLPTSVTATKGSLVGLVDYPDDEEEDEEEESSPRKRPRLGS

SEQ ID NO: 52218 - protein, 68 aa, Homo sapiens
KLPHTAPPIYLNSDLKGPLTAGPTNYSNPVYAKLYMDGQNCRNSLGSVDERKELLPKKIEIGIRETVA

SEQ ID NO: 52219 - protein, 117 aa, Homo sapiens
ICKDDQEQQLEFGAVYTATITEIRDTGVMVKLYPNMTAVLLHNTQLDQRKIKHPTALGLEVGQEIQVKYFGRDPADGRMRLSRKVLQSPATTVVRTLNDRSSIVMGEPISQSSSNSQ

SEQ ID NO: 52220 - protein, 4 aa, Homo sapiens
RQEY

SEQ ID NO: 52221 - protein, 41 aa, Homo sapiens
IDEPLEGSEDRIITITGTQDQIQNAQYLPQNSVKQYSGKFF

SEQ ID NO: 52222 - protein, 78 aa, Homo sapiens
IEEWSHALYLKLRKETFILEGKENREKRMIKRACEQLSSRYLEVLINLYRTHIDIIGSSSDTYLFKKGVMKLIGQKVS

SEQ ID NO: 52223 - protein, 98 aa, Homo sapiens
IGVADKILKKKEYPLYINQTCHRVTVSPYTEIHLKKYQIFSGTSKRTVLLTGMEGIQMDEEIVEDLINIHFQRAKNGGGEVDVVKCSLGQPHIAYFEE

SEQ ID NO: 52224 - protein, 58 aa, Homo sapiens
LQQLELIKPMERTSGNSQREYQLMKLLLDNTQIMNALQKYPNCPTDVRQWATSSLSWL

SEQ ID NO: 52225 - protein, 306 aa, Homo sapiens
LKQNINLSAPIMSRFDLFFILVDECNEVTDYAIARRIVDLHSRIEESIDRVYSLDDIRRYLLFARQFKPKISKESEDFIVEQYKHLRQRDGSGVTKSSWRITVRQLESMIRLSEAMARMHCCDEVQPKHVKEAFRLLNKSIIRVETPDVNLDQEEEIQMEVDEGAGGINGHADSPAPVNGINGYNEDINQESAPKASLRLGFSEYCRISNLIVLHLRKVEEEEDESALKRSELVNWYLKEIESEIDSEEELINKKRIIEKVIHRLTHYDHVLIELTQAGLKGSTEGSESYEEDPYLVVNPNYLLED

SEQ ID NO: 52226 - protein, 19 aa, Homo sapiens
IKKTLTKIDNSLDKLKTDC

SEQ ID NO: 52227 - protein, 37 aa, Homo sapiens
KLTSIKDHQWHIQACCALTGEGLCQGLEWMMSRLKIR

SEQ ID NO: 52228 - protein, 509 aa, Homo sapiens
TNEYNTTEDWSLIMDICDKVGSTPNGAKDCLKAIMKRVNHKVPHVALQALTLLGACVANCGKIFHLEVCSRDFATEVRAVIKNKAHPKVCEKLKSLMVEWSEEFQKDPQFSLISATIKSMKEEGITFPPAGSQTVSAAAKNGTSSNKNKEDEDIAKAIELSLQEQKQQHTETKSLYPSSEIQLNNKVARKVRALYDFEAVEDNELTFKHGEIIIVLDDSDANWWKGENHRGIGLFPSNFVTTNLNIETEAAAVDKLNVIDDDVEEIKKSEPEPVYIDEDKMDRALQVLQSIDPTDSKPDSQDLLDLEDICQQMGPMIDEKLEEIDRKHSELSELNVKVLEALELYNKLVNEAPVYSVYSKLHPPAHYPPASSGVPMQTYPVQSHGGNYMGQSIHQVTVAQSYSLGPDQIGPLRSLPPNVNSSVTAQPAQTSYLSTGQDTVSNPTYMNQNSNLQSATGTTAYTQQMGMSVDMSSYQNTTSNLPQLAGFPVTVPAHPVAQQHTNYHQQPLL

SEQ ID NO: 52229 - protein, 19 aa, Homo sapiens
VEVSSNTGEETSKQETVAE

SEQ ID NO: 52230 - protein, 561 aa, Homo sapiens
KQAFKELLKEKRVPSNASWEQAMKMIINDPRYSALAKLSEKKQAFNAYKVQTEKEEKEEARSKYKEAKESFQRFLENHEKMTSTTRYKKAEQMFGEMEVWNAISERDRLEIYEDVLFFLSKKEKEQAKQLRKRNWEALKNILDNMANVTYSTTWSEAQQYLMDNPTFAEDEELQNMDKEDALICFEEHIRALEKEEEEEKQKSLLRERRRQRKNRESFQIFLDELHEHGQLHSMSSWMELYPTISSDIRFTNMLGQPGSTALDLFKFYVEDLKARYHDEKKIIKDILKDKGFVVEVNTTFEDFVAIISSTKRSTTLDAGNIKLAFNSLLEKAEAREREREKEEARKMKRKESAFKSMLKQAAPPIELDAVWEDIRERFVKEPAFEDITLESERKRIFKDFMHVLEHECQHHHSKNKKHSKKSKKHHRKRSRSRSGSDSDDDDSHSKKKRQRSESRSASEHSSSAESERSYKKSKKHKKKSKKRRHKSDSPESDAEREKDKKEKDRESEKDRTRQRSESKHKSPKKKTGKDSGNWDTSGSELSEGELEKRRRTLLEQLDDDQ

SEQ ID NO: 52231 - protein, 48 aa, Homo sapiens
ISKALVDVGVDFQAMWYTDEDHGIASSTAHQHIYTHMSHFIKQCFSLP

SEQ ID NO: 52232 - protein, 171 aa, Homo sapiens
IPASQVSTQNLKTLKTFGAPRPYSSSGPSPFALAVVKRSQSFSKERTESPSASALVQPPANTEEGKTHSVNKFVDIPQLGVSDKENNSAHNEQNSQIPTPTDGPSFTVMRQSSLTFQSSDPEQMRQSLLTAIRSGEAAAKLKRVTIPSNTISVNGRSRLSHSMSPDAQDGH

SEQ ID NO: 52233 - protein, 11 aa, Homo sapiens
IRRFASWHTVF

SEQ ID NO: 52234 - protein, 115 aa, Homo sapiens
VHDSQGPPNANEDYREASSCAVNLVLRLRNSRKELNDIRFEFTPGRDTADGVSQELFSAGLVDGHDVVIVAANLQKIVDDPKALKTLTFKLASGCDGSEIPDEVKLIGFAQLSVS

SEQ ID NO: 52235 - protein, 208 aa, Homo sapiens
KKVRLKELESRLQQVDGFEKPKLLLEQYPTRPHIAACMLYTIHNTYDDIENKVVADLGCGCGVLSIGTAMLGAGLCVGFDIDEDALEIFNRNAEEFELTNIDMVQCDVCLLSNRMSKSFDTVIMNPPFGTKNNKGTDMAFLKTALEMARTAVYSLHKSSTREHVQKKAAEWKIKIDIIAELRYDLPASYKFHKKKSVDIEVDLIRFSF

SEQ ID NO: 52236 - protein, 222 aa, Homo sapiens
LPLLGLAAAAVADCPSSTWIQFQDSCYIFLQEAIKVESIEDVRNQCTDHGADMISIHNEEENAFILDTLKKQWKGPDDILLGMFYDTDDASFKWFDNSNMTFDKWTDQDDDEDLVDTCAFLHIKTGEWKKGNCEVSSVEGTLCKTAIPYKRKYLSDNHILISALVIASTVILTVLGAIIWFLYKKHSDSRFTTVFSTAPQSPYNEDCVLVVGEENEYPVQFD

SEQ ID NO: 52237 - protein, 114 aa, Homo sapiens
KPHHCVALRIPEGLWQLSPCQEKKGFICKMEADIHTAEALPEKGPSHSIIPLAVVLTLIVIVAICTLSFCIYKHNGGFFRRLAGFRNPYYPATNFSTVYLEENILISDLEKSDQ

SEQ ID NO: 52238 - protein, 94 aa, Homo sapiens
LMIDGLVSQLGERIEKLWKRDEGGTGKYPPASLHAVLDMYLLDGVTEAAKHSITIYLLLDIMYSFPNKTDTPIESFPTVFAISWGQVKLIQGFG

SEQ ID NO: 52239 - protein, 50 aa, Homo sapiens
KPKSSSTALTTNVTEQTEKDGDKDVFASEVTPSDLQKQMGNLEDAETRIS

SEQ ID NO: 52240 - protein, 56 aa, Homo sapiens
IRRCLAYRKEDRFDVHQLANDPYLLPHMRRSNSSGNLHMAGLTASPTPPSSSIITY

SEQ ID NO: 52241 - protein, 596 aa, Homo sapiens
IGFTGSSDNGGINQESSQIQIIPGSNQTLLASGTPSANIQNLIPQTGQVQVQGVAIGGSSFPGQTQVVANVPLGLPGNITFVPINSVDLDSLGLSGSSQTMTAGINADGHLINTGQAMDSSDNSERTGERVSPDINETNTDTDLFVPTSSSSQLPVTIDSTGILQQNTNSLTTSSGQVHSSDLQGNYIQSPVSEETQAQNIQVSTAQPVVQHLQLQESQQPTSQAQIVQGITPQTIHGVQASGQNISQQALQNLQLQLNPGTFLIQAQTVTPSGQVTWQTFQVQGVQNLQNLQIQNTAAQQITLTPVQTLTLGQVAAGGAFTSTPVSLSTGQLPNLQTVTVNSIDSAGIQLHPGENADSPADIRIKEEEPDPEEWQLSGDSTLNTNDLTHLRVQVVDEEGDQQHQEGKRLRRVACTCPNCKEGGGRGTNLGKKKQHICHIPGCGKVYGKTSHLRAHLRWHSGERPFVCNWMYCGKRFTRSDELQRHRRTHTGEKKFVCPECSKRFMRSDHLAKHIKTHQNKKGIHSSSTVLASVEAARDDTLITAGGTTLILANIQQGSVSGIGTVNTSATSNQDILTNTEIPLQLVTVSGNETME

SEQ ID NO: 52242 - protein, 97 aa, Homo sapiens
RYYTTDNPWCASQWSKYITTGFAKSSVAAESWNLFNSGTDSDPFWTGNLANVSSTRGPELAEFANTEYCCPTNNFDACSNPHTWSSCGRWSLHFNSS

SEQ ID NO: 52243 - protein, 105 aa, Homo sapiens
LRNEVAQLKQLLLAHKDCPVTAMQKKSGYHTADKDDSSEDISVPSSPHTEAIQHSSVSTSNGVSSTSKAEAVATSVLTQMADQSTEPALSQIVMAPSSQSQPSGS

SEQ ID NO: 52244 - protein, 31 aa, Homo sapiens
IETESQLYCPGWKRTSFPPSDNLFQTSQLKN

SEQ ID NO: 52245 - protein, 620 aa, Homo sapiens
VKTVVVMLQNVVPAEVSLVCVVKPDEFWDKKVTHFCFWKEKDRLGFEVILVSANKLTRYIEPCQLTEDFGGSLTYDHMDWLNKRLVFEKFTKESTSLLDELALINNGSDKGNQQEKERSVDLNFLPSVDPETVLQTGHELLSELQQRRFNGSDGGVSWSPMDDELLAQPQVMKLLDSLREQYTRYQEVCRQRSKRTQLEEIQQKVMQVVNWLEGPGSEQLRAQWGIGDSIRASQALQQKHEEIESQHSEWFAVYVELNQQIAALLNAGDEEDLVELKSLQQQLSDVCYRQASQLEFRQNLLQAALEFHGVAQDLSQQLDGLLGMLCVDVAPADGASIQQTLKLLEEKLKSVDVGLQGLREKGQGLLDQISNQASWAYGKDVTIENKENVDHIQGVMEDMQLRKQRCEDMVDVRRLKMLQMVQLFKCEEDAAQAVEWLSELLDALLKTHIRLGDDAQETKVLLEKHRKFVDVAQSTYDYGRQLLQATVVLCQSLRCTSRSSGDTLPRLNRVWKQFTIASEERVHRLEMAIAFHSNAEKILQDCPEEPEAINDEEQFDEIEAVGKSLLDRLTVPVVYPDGTEQYFGSPSDMASTAENIRDRMKLVNLKRQQLRHPEMVTTES

SEQ ID NO: 52246 - protein, 8 aa, Homo sapiens
LFIQLGCS

SEQ ID NO: 52247 - protein, 82 aa, Homo sapiens [sequence omitted]

SEQ ID NO: 52248 - protein, 67 aa, Homo sapiens
LRRNWNQYKIQFGNSFSNSEALRSASYTVSTISDGPGYSHDCPSEHLNGKSIHDIENVLLKPENLYN

SEQ ID NO: 52249 - protein, 36 aa, Homo sapiens
LFCVGPLPCTLLLTLGYVLYASAMTLLTERGKLHQP

SEQ ID NO: 52250 - protein, 87 aa, Homo sapiens
VGPREAGLRRRKGPTKTPEPESSEAPQDPLNWFGILVPHSLRQAQASFRDGLQLAADIASLQNRIDWGRSQLRGLQEKLKQLEPGAA

SEQ ID NO: 52251 - protein, 31 aa, Homo sapiens; identical to SEQ ID NO: 51968

SEQ ID NO: 52252 - protein, 196 aa, Homo sapiens
IMNPVYSPGSSGVPYANAKGIGYPAGFPMGYAAAAPAYSPNMYPGANPTFQTGYTPGTPYKVSCSPTSGAVPPYSSSPNPYQTAVYPVRSAYPQQSPYAQQGTYYTQPLYAAPPHVIHHTTVVQPNGMPATVYPAPIPPPRGNGVTMGMVAGTTMAMSAGTLLTAHSPTPVAPHPVTVPTYRAPGTPTYSYVPPQW

SEQ ID NO: 52253 - protein, 41 aa, Homo sapiens
VALEQAQKVRYEGSYALTSEEAERSDGDPVQPAVLQVHQTS

SEQ ID NO: 52254 - protein, 51 aa, Homo sapiens
KKPDCDDWESGLNAMECALHLEKNVNQSLLELHKLATDKNDPHLCDLRYIT

SEQ ID NO: 52255 - protein, 140 aa, Homo sapiens
LSRTMRHSKRTYCPDWDDKDWDYGKWRSSSSHKRRKRSHSSAQENKRCKYNHSKMCDSHYLESRSINEKDYHSRRYIDEYRNDYTQGCEPGHRQRDHESRYQNHSSKSSGRSGRSSYKSKHRIHHSTSHRRSHGMKLLIL

SEQ ID NO: 52256 - protein, 246 aa, Homo sapiens
IVFELLGLSTYDFIKENGFLPFRLDHIRKMAYQICKSVNFLHSNKLTHTDLKPENILFVQSDYTEAYNPKIKRDERTLINPDIKVVDFGSATYDDEHHSTLVSTRHYRAPEVILALGWSQPCDVWSIGCILIEYYLGFTVFPTHDSKEHLAMMERILGPLPKHMIQKTRKRKYFHHDRLDWDEHSSAGRYVSRRCKPLKEFMLSQDVEHERLFDLIQKMLEYDPAKRITLREALKHPFFDLLKKSI

SEQ ID NO: 52257 - protein, 19 aa, Homo sapiens
IPVDNGTLTDFLEKEEEEA

SEQ ID NO: 52258 - protein, 213 aa, Homo sapiens
IKTTENIDVSMDVKPSWTTRDVALTVHRAFRMIGLFSHGFLAGCAVWNIVVIYVLAGDQLSNLSNLLQQYKTLAYPFQSLLYLLLALSTISAFDRIDFAKISVAIRNFLALDPTALASFLYFTALILSLSQQMTSDRIHLYTPSSVNGSLWEAGIEEQILQPWIVVNLVVALLVGLSWLFLSYRPGMDLSEELMFSSEVEEYPDKEKEIKASS

SEQ ID NO: 52259 - protein, 380 aa, Homo sapiens
KQTWESPNMSRRRFDCRSISGLLTTTPQIPIKMENFNNFYILTSKELGRGKFAVVRQCISKSTGQEYAAKFLKKRRRGQDCRAEILHEIAVLELAKSCPRVINLHEVYENTSEIILILEYAAGGEIFSLCLPELAEMVSENDVIRLIKQILEGVYYLHQNNIVHLDLKPQNILLSSIYPLGDIKIVDFGMSRKIGHACELREIMGTPEYLAPEILNYDPITTATDMWNIGIIAYMLLTHTSPFVGEDNQETYLNISQVNVDYSEETFSSVSQLATDFIQSLLVKNPEKRPTAEICLSHSWLQQWDFENLFHPEETSSSSQTQDHSVRSSEDKTSKSSCNGTCGDREDKENIPEDSSMVSKRFRFDDSLPNPHELVSDLLC

SEQ ID NO: 52260 - protein, 24 aa, Homo sapiens
LSLIYQSSGNTGMAQTLLYTYCSI

SEQ ID NO: 52261 - protein, 46 aa, Homo sapiens
IQDTRAKNAQKSNQNGKDSKPSSTPRSKGQESFKKQEKTPKTPKRT

SEQ ID NO: 52262 - protein, 21 aa, Homo sapiens
TVYSCGNPKICIFCYRAVVSC

SEQ ID NO: 52263 - protein, 37 aa, Homo sapiens
IFGTSVPENGHHPKKQSDGMEEYKTFGLGLTNVKKNR

SEQ ID NO: 52264 - protein, 383 aa, Homo sapiens
LAEGYFDAAGRLTPEFSQRLTNKIRELLQQMERGLKSADPRDGTGYTGWAGIAVLYLHLYDVFGDPAYLQLAHGYVKQSLNCLTKRSITFLCGDAGPLAVAAVLYHKMNNEKQAEDCITRLIHLNKIDPHAPNEMLYGRIGYIYALLFVNKNFGVEKIPQSHIQQICETILTSGENLARKRNFTAKSPLMYEWYQEYYVGAAHGLAGIYYYLMQPSLQVSQGKLHSLVKPSVDYVCQLKFPSGNYPPCIGDNRDLLVHWCHGAPGVIYMLIQAYKVFREEKYLCDAYQCADVIWQYGLLKKGYGLCHGSAGNAYAFLTLYNLTQDMKYLYRACKFAEWCLEYGEHGCRTPDTPFSLFEGMAGTIYFLADLLVPTKARFPAFEL

SEQ ID NO: 52265 - protein, 76 aa, Homo sapiens
IPAKRIGVPEEVSSVVCFLLSPAASFITGQSVDVDGGRSLYTHSYEVPDHDNWPKGAGDLSVVKKMKETFKEKAKL

SEQ ID NO: 52266 - protein, 362 aa, Homo sapiens
LRNIAGKPSHLLTKEEQAAKLKAEKIRVALEKIKEAQVKKLVIRVHMSDDSSKTMMVDERQTVRQVLDNLMDKSHCGYSLDWSLVETVSELQMERIFEDHENLVENLLNWTRDSQNKLIFMERIEKYALFKNPQNYLLGKKETAEMADRNKEVLLEECFCGSSVTVPEIEGVLWLKDDGKKSWKKRYFLLRASGIYYVPKGKAKVSRDLVCFLQLDHVNVYYGQDYRNKYKAPTDYCLVLKHPQIQKKSQYIKYLCCDDVRTLHQWVNGIRIAKYGKQLYMNYQEALKRTESAYDWTSLSSSSIKSGSSSSSIPESQSNHSNQSDSGVSDTQPAGHVRSQSIVSSVFSEAWKRGTQLEESSK

SEQ ID NO: 52267 - protein, 8 aa, Homo sapiens
LADQDDTE

SEQ ID NO: 52268 - protein, 57 aa, Homo sapiens
LNPILYVLISKKFQARFRSSVAEILKYTLWEVSCSGTVSEQLRNSETKNLCLLETAQ

SEQ ID NO: 52269 - protein, 247 aa, Homo sapiens
VVSQRAKELNKRLTAPPAAFLCHLDNLLRPLLKDAAHPSEATFSCDCVADALILRVRSELSGLPFYWNFHCMLASPSLVSQHLIRPLMGMSLALQCQVRELATLLHMKDLEIQDYQESGATLIRDRLKTEPFEENSFLEQFMIEKLPEACSIGDGKPFVMNLQDLYMAVTTQEVQVGQKHQGAGDPHTSNSASLQGIDSQCVNQPEQLVSSAPTLSAPEKESTGTSGPLQRPQLSKVKRKKPRGLFS

SEQ ID NO: 52270 - protein, 45 aa, Homo sapiens
KDGCIVERGRHEALLSRGGVYADMWQLQQGQEETSEDTKPQTMER

SEQ ID NO: 52271 - protein, 34 aa, Homo sapiens
IREMACTTGVLQTLTLFKGFFELFPSLSHNLLVD

SEQ ID NO: 52272 - protein, 16 aa, Homo sapiens
RKCWSSWAEGSSWKRW

SEQ ID NO: 52273 - protein, 23 aa, Homo sapiens
RKPWATWANWTSRCTRQCRRSRT

SEQ ID NO: 52274 - protein, 5 aa, Homo sapiens
MYLPH

SEQ ID NO: 52275 - protein, 144 aa, Homo sapiens
VNPNTRVMNSRGMWLTYALGVGLLHIVLLSIPFFSVPVAWTLTNIIHNLGMYVFLHAVKGTPFETPDQGKARLLTHWEQLDYGVQFTSSRKFFTISPIILYFLASFYTKYDPTHFILNTASLLSVLIPKMPQLHGVRIFGINKY

SEQ ID NO: 52276 - protein, 1836 aa, Homo sapiens
LRFCLRSQPEDLEAPKTHRFKVKTFKKVKPCGICRQVITQEGCTCKVCSFSCHRKCQAKVAAPCVPPSNHELVPITTENAPKNVVDKGEGASRGGNTRKSLEDNGSTRVTPSVQPHLQPIRNMSVSRTMEDSCELDLVYVTERIIAVSFPSTANEENFRSNLREVAQMLKSKHGGNYLLFNLSERRPDITKLHAKVLEFGWPDLHTPALEKICSICKAMDTWLNADPHNVVVLHNKGNRGRIGVVIAAYMHYSNISASADQALDRFAMKRFYEDKIVPIGQPSQRRYVHYFSGLLSGSIKMNNKPLFLHHVIMHGIPNFESKGGCRPFLRIYQAMQPVYTSGIYNIPGDSQTSVCITIEPGLLLKGDILLKCYHKKFRSPARDVIFRVQFHTCAIHDLGVVFGKEDLDDAFKDDRFPEYGKVEFVFSYGPEKIQGMEHLENGPSVSVDYNTSDPLIRWDSYDNFSGHRDDGMEEVVGHTQGPLDGSLYAKVKKKDSLHGSTGAVNATRPTLSATPNHVEHTLSVSSDSGNSTASTKTDKTDEPVPGASSATAALSPQEKRELDRLLSGFGLEREKQGAMYHTQHLRSRPAGGSAVPSSGRHVVPAQVHVNGGALASERETDILDDELPNQDGHSAGSMGTLSSLDGVTNTSEGGYPEALSPLTNGLDKSYPMEPMVNGGGYPYESASRAGPAHAGHTAPMRPSYSAQEGLAGYQREGPHPAWPQPVTTSHYAHDPSGMFRSQSFSEAEPQLPPAPVRGGSSREAVQRGLNSWQQQQQQQQQPRPPPRQQERAHLESLVASRPSPQPLAETPIPSLPEFPRAASQQEIEQSIETLNMLMLDLEPASAAAPLHKSQSVPGAWPGASPLSSQPLSGSSRQSHPLTQSRSGYIPSGHSLGTPEPAPRASLESVPPGRSYSPYDYQPCLAGPNQDFHSKSPASSSLPAFLPTTHSPPGPQQPPASLPGLTAQPLLSPKEATSDPSRTPEEEPLNLEGLVAHRVAGVQAREKQPAEPPAPLRRRAASDGQYENQSPEATSPRSPGVRSPVQCVSPELALTIALNPGGRPKEPHLHSYKEAFEEMEGTSPSSPPPSGVRSPPGLAKTPLSALGLKPHNPADILLHPTGEPRSYVESVARTAVAGPRAQDSEPKSFSAPATQAYGHEIPLRNGTLGGSFVSPSPLSTSSPILSADSTSVGSFPSGESSDQGPRTPTQPLLESGFRSGSLGQPSPSAQRNYQSSSPLPTVGSSYSSPDYSLQHFSSSPESQARAQFSVAGVHTVPGSPQARHRTVGTNTPPSPGFGWRAINPSMAAPSSPSLSHHQMMGPPGTGFHGSTVSSPQSSAATTPGSPSLCRHPAGVYQVSGLHNKVATTPGSPSLGRHPGAHQGNLASGLHSNAIASPGSPSLGRHLGGSGSVVPGSPCLDRHVAYGGYSTPEDRRPTLSRQSSASGYQAPSTPSFPVSPAYYPGLSSPATSPSPDSAAFRQGSPTPALPEKRRMSVGDRAGSLPNYATINGKVSSPVASGMSSPSGGSTVSFSHTLPDFSKYSMPDNSPETRAKVKFVQDTSKYWYKPEISREQAIALLKDQEPGAFIIRDSHSFRGAYGLAMKVSSPPPTIMQQNKKGDMTHELVRHFLIETGPRGVKLKGCPNEPNFGSLSALVYQHSIIPLALPCKLVIPNRDPTDESKDSSGPANSTADLLKQGAACNVLFVNSVDMESLTGPQAISKATSETLAADPTPAATIVHFKVSAQGITLTDNQRKLFFRRHYPLNTVTFCDLDPQERKWMKTEGGAPAKLFGFVARKQGSTTDNACHLFAELDPNQPASAIVNFVSKVMLNAGQKR

SEQ ID NO: 52277 - protein, 771 aa, Homo sapiens
LLLSVLRPAGPVAVGISLGFTLSLLSVTWVEEPCGPGPPQPGDSELPPRGNTNAARRPNSVQPGAEREKPGAGEGAGENWEPRVLPYHPAQPGQAAKKAVRTRYISTELGIRQRLLVAVLTSQTTLPTLGVAVNRTLGHRLERVVFLTGARGRRAPPGMAVVTLGEERPIGHLHLALRHLLEQHGDDFDWFFLVPDTTYTEAHGLARLTGHLSLASAAHLYLGRPQDFIGGEPTPGRYCHGGFGVLLSRMLLQQLRPHLEGCRNDIVSARPDEWLGRCILDATGVGCTGDHEGVHYSHLELSPGEPVQEGDPHFRSALTAHPVRDPVHMYQLHKAFARAELERTYQEIQELQWEIQNTSHLAVDGDQAAAWPVGIPAPSRPASRFEVLRWDYFTEQHAFSCADGSPRCPLRGADRADVADVLGTALEELNRRYHPALRLQKQQLVNGYRRFDPARGMEYTLDLQLEALTPQGGRRPLTRRVQLLRPLSRVEILPVPYVTEASRLTVLLPLAAAERDLAPGFLEAFATAALEPGDAAAALTLLLLYEPRQAQRVAHADVFAPVKAHVAELERRFPGARVPWLSVQTAAPSPLRLMDLLSKKHPLDTLFLLAGPDTVLTPDFLNRCRMHAISGWQAFFPMHFQAFHPAVAPPQGPGPPELGRDTGRFDRQAASEACFYNSDYVAARGRLAAASEQEEELLESLDVYELFLHFSSLHVLRAVEPALLQRYRAQTCSARLSEDLYHRCLQSVLEGLGSRTQLAMLLFEQEQGNST

SEQ ID NO: 52278 - protein, 80 aa, Homo sapiens
LQKEDTVRRLVLPAVQLEDSGEYLCEIDDESASFTVTVTESYQSQDSSNNNPELCVLLKKPKTRRLWSRFPPWRRTAGTE

SEQ ID NO: 52279 - protein, 583 aa, Homo sapiens
KRDLLFQALGRTYTDEEFDELCFEFGLELDEITSEKEIISKEQGNVKAAGASDVVLYKIDVPANRYDLLCLEGLVRGLQVFKERIKAPVYKRVMPDGKIQKLIITEETAKIRPFAVAAVLRNIKFTKDRYDSFIELQEKLHQNICRKRALVAIGTHDLDTLSGPFTYTAKRPSDIKFKPLNKTKEYTACELMNIYKTDNHLKHYLHIIENKPLYPVIYDSNGVVLSMPPIINGDHSRITVNTRNIFIECTGTDFTKAKIVLDIIVTMFSEYCENQFTVEAAEVVFPNGKSHTFPELAYRKEMVRADLINKKVGIRETPENLAKLLTRMYLKSEVIGDGNQIEIEIPPTRADIIHACDIVEDAAIAYGYNNIQMTLPKTYTIANQFPLNKLTELLRHDMAAAGFTEALTFALCSQEDIADKLGVDISATKAVHISNPKTAEFQVARTTLLPGLLKTIAANRKMPLPLKLFEISDIVIKDSNTDVGAKNYRHLCAVYYNKNPGFEIIHGLLDRIMQLLDVPPGEDKGGYVIKASEGPAFFPGRCAEIFARGQSVGKLGVLHPDVITKFELTMPCSSLEINVGPFL

SEQ ID NO: 52280 - protein, 13 aa, Homo sapiens
LKRRKSLKQKKKR

SEQ ID NO: 52281 - protein, 138 aa, Homo sapiens
RGFKLNWMNLRDAETGKILWQGTEDLSVPGVEHEARVPKKILKCKAVSRELNFSSTEQMEKFRLEQKVYFKGQCLEEWFFEFGFVIPNSTNTWQSLIEAAPESQMMPASVLTGNVIIETKFFDDDLLVSTSRVRLFYV

SEQ ID NO: 52282 - protein, 42 aa, Homo sapiens
LYGTNPLNRQKLDSKKLLGSLASVFVRLPCGGVGVSVPLMCK

SEQ ID NO: 52283 - protein, 353 aa, Homo sapiens
LRLLKLAATSASARVVAAGAQRVRGIHSSVQCKLRYGMWHFLLGDKASKRLTERSRVITVDGNICTGKGKLAKEIAEKLGFKHFPEAGIHYPDSTTGDGKPLATDYNGNCSLEKFYDDPRSNDGNSYRLQSWLYSSRLLQYSDALEHLLTTGQGVVLERSIFSDFVFLEAMYNQGFIRKQCVDHYNEVKSVTICDYLPPHLVIYIDVPVPEVQRRIQKKGDPHEMKITSAYLQDIENAYKKTFLPEMSEKCEVLQYSAREAQDSKKVVEDIEYLKFDKGPWLKQDNRTLYHLRLLVQDKFEVLNYTSIPIFLPEVTIGAHQTDRVLHQFRELPGRKYSPGYNTEVGDKWIWLK

SEQ ID NO: 52284 - protein, 29 aa, Homo sapiens
LMDLAANEKAVHADFFNDFEDLFDDDDIQ

SEQ ID NO: 52285 - protein, 719 aa, Homo sapiens
LSASHSAAIMVKLAKAGKNQGDPKKMAPPPKEVEEDSEDEEMSEDEEDDSSGEEVVIPQKKGKKAAATSAKKVVVSPTKKVAVATPAKKAAVTPGKKAAATPAKKTVTPAKAVTTPGKKGATPGKALVATPGKKGAAIPAKGAKNGKNAKKEDSDEEEDDDSEEDEEDDEDEDEDEDEIEPAAMKAAAAAPASEDEDDEDDEDDEDDDDDEEDDSEEEAMETTPAKGKKAAKVVPVKAKNVAEDEDEEEDDEDEDDDDDEDDEDDDDEDDEEEEEEEEEEPVKEAPGKRKKEMAKQKAAPEAKKQKVEGTEPTTAFNLFVGNLNFNKSAPELKTGISDVFAKNDLAVVDVRIGMTRKFGYVDFESAEDLEKALELTGLKVFGNEIKLEKPKGKDSKKERDARTLLAKNLPYKVTQDELKEVFEDAAEIRLVSKDGKSKGIAYIEFKTEADAEKTFEEKQGTEIDGRSISLYYTGEKGQNQDYRGGKNSTWSGESKTLVLSNLSYSATEETLQEVFEKATFIKVPQNQNGKSKGYAFIEFASFEDAKEALNSCNKREIEGRAIRLELQGPRGSPNARSQPSKTLFVKGLSEDTTEETLKESFDGSVRARIVTDRETGSSKGFGFVDFNSEEDAKAAKEAMEDGEIDGNKVTLDWAKPKGEGGFGGRGGGRGGFGGRGGGRGGRGGFGGRGRGGFGGRGGFRGGRGGGGDHKPQGKKTKFE

SEQ ID NO: 52286 - protein, 2045 aa, Homo sapiens
KREVPMSNRPNNNPGGSLRRSQRNTAGAQPQDDSIGGRSHLGQAKHKGYSPPESRKSNSKAPKVQSNTTSELSRGHLSKRSCSSSSAVIVPQPEDPDRANTSERQKTGQVPKKDNSRGVKRSASPDYNRTNSPSSAKKPKALQHTESPSETNKPHSKSKKRHLDQEQQLKSAQSPSTSKAHTRKSGATGGSRSQKRKRTESSCVKSGSGSESTGAEERSAKPTKLASKSATSAKAGCSTITDSSSAASTSSSSSAVASASSTVPPGARVKQGKDQNKARRSRSASSPSPRRSSREKEQSKTGGSSKFDWAARFSPKVSLPKTKLSLPGSSKSETSKPGPSGLQAKLASLRKSTKKRSESPPAELPSLRRSTRQKTTGSCASTSRRGSGLGKRGAAEARRQEKMADPESNQEAVNSSAARTDEAPQGAAASSSVAGAVGMTTSGESESDDSEMGRLQALLEARGLPPHLFGPLGPRMSQLFHRTIGSGASSKAQQLLQGLQASDESQQLQAVIEMCQLLVMGNEETLGGFPVKSVVPALITLLQMEHNFDIMNHACRALTYMMEALPRSSAVVVDAIPVFLEKLQVIQCIDVAEQALTALEMLSRRHSKAILQAGGLADCLLYLEFFSINAQRNALAIAANCCQSITPDEFHFVADSLPLLTQRLTHQDKKSVESTCLCFARLVDNFQHEENLLQQVASKDLLTNVQQLLVVTPPILSSGMFIMVVRMFSLMCSNCPTLAVQLMKQNIAETLHFLLCGASNGSCQEQIDLVPRSPQELYELTSLICELMPCLPKEGIFAVDTMLKKGNAQNTDGAIWQWRDDRGLWHPYNRIDSRIIEQINEDTGTARAIQRKPNPLANSNTSGYSESKKDDARAQLMKEDPELAKSFIKTLFGVLYEVYSSSAGPAVRHKCLRAILRIIYFADAELLKDVLKNHAVSSHIASMLSSQDLKIVVGALQMAEILMQKLPDIFSVYFRREGVMHQVKHLAESESLLTSPPKACTNGSGSMGSTTSVSSGTATAATHAAADLGSPSLQHSRDDSLDLSPQGRLSDVLKRKRLPKRGPRRPKYSPPRDDDKVDNQAKSPTTTQSPKSSFLASLNPKTWGRLSTQSNSNNIEPARTAGGSGLARAASKDTISNNREKIKGWIKEQAHKFVERYFSSENMDGSNPALNVLQRLCAATEQLNLQVDGGAECLVEIRSIVSESDVSSFEIQHSGFVKQLLLYLTSKSEKDAVSREIRLKRFLHVFFSSPLPGEEPIGRVEPVGNAPLLALVHKMNNCLSQMEQFPVKVHDFPSGNGTGGSFSLNRGSQALKFFNTHQLKCQLQRHPDCANVKQWKGGPVKIDPLALVQAIERYLVVRGYGRVREDDEDSDDDGSDEEIDESLAAQFLNSGNVRHRLQFYIGEHLLPYNMTVYQAVRQFSIQAEDERESTDDESNPLGRAGIWTKTHTIWYKPVREDEESNKDCVGGKRGRAQTAPTKTSPRNAKKHDELWHDGVCPSVSNPLEVYLIPTPPENITFEDPSLDVILLLRVLHAISRYWYYLYDNAMCKEIIPTSEFINSKLTAKANRQLQDPLVIMTGNIPTWLTELGKTCPFFFPFDTRQMLFYVTAFDRDRAMQRLLDTNPEINQSDSQDSRVAPRLDRKKRTVNREELLKQAESVMQDLGSSRAMLEIQYENEVGTGLGPTLEFYALVSQELQRADLGLWRGEEVTLSNPKGSQEGTKYIQNLQGLFALPFGRTAKPAHIAKVKMKFRFLGKLMAKAIMDFRLVDLPLGLPFYKWMLRQETSLTSHDLFDIDPVVARSVYHLEDIVRQKKRLEQDKSQTKESLQYALETLTMNGCSVEDLGLDFTLPGFPNIELKKGGKDIPVTIHNLEEYLRLVIFWALNEGVSRQFDSFRDGFESVFPLSHLQYFYPEELDQLLCGSKADTWDAKTLMECCRPDHGYTHDSRAVKFLFEILSSFDNEQQRLFLQFVTGSPRLPVGGFRSLNPPLTIVRKTFESTENPDDFLPSVMTCVNYLKLPDYSSIEIMREKLLIAAREGQQSFHLS

SEQ ID NO: 52287 - protein, 1727 aa, Homo sapiens
KREVPMSNRPNNNPGGSLRRSQRNTAGAQPQDDSIGGSRRGSGLGKRGAAEARRQEKMADPESNQEAVNSSAARTDEAPQGAAASSSVAGAVGMTTSGESESDDSEMGRLQALLEARGLPPHLFGPLGPRMSQLFHRTIGSGASSKAQQLLQGLQASDESQQLQAVIEMCQLLVMGNEETLGGFPVKSVVPALITLLQMEHNFDIMNHACRALTYMMEALPRSSAVVVDAIPVFLEKLQVIQCIDVAEQALTALEMLSRRHSKAILQAGGLADCLLYLEFFSINAQRNALAIAANCCQSITPDEFHFVADSLPLLTQRLTHQDKKSVESTCLCFARLVDNFQHEENLLQQVASKDLLTNVQQLLVVTPPILSSGMFIMVVRMFSLMCSNCPTLAVQLMKQNIAETLHFLLCGASNGSCQEQIDLVPRSPQELYELTSLICELMPCLPKEGIFAVDTMLKKGNAQNTDGAIWQWRDDRGLWHPYNRIDSRIIEAAHQVGEDEISLSTLGRVYTIDFNSMQQINEDTGTARAIQRKPNPLANSNTSGYSESKKDDARAQLMKEDPELAKSFIKTLFGVLYEVYSSSAGPAVRHKCLRAILRIIYFADAELLKDVLKNHAVSSHIASMLSSQDLKIVVGALQMAEILMQKLPDIFSVYFRREGVMHQVKHLAESESLLTSPPKACTNGSGSMGSTTSVSSGTATAATHAAADLGSPSLQHSRDDSLDLSPQGRLSDVLKRKRLPKRGPRRPKYSPPRDDDKVDNQAKSPTTTQSPKSSFLASLNPKTWGRLSTQSNSNNIEPARTAGGSGLARAASKDTISNNREKIKGWIKEQAHKFVERYFSSENMDGSNPALNVLQRLCAATEQLNLQVDGGAECLVEIRSIVSESDVSSFEIQHSGFVKQLLLYLTSKSEKDAVSREIRLKRFLHVFFSSPLPGEEPIGRVEPVGNAPLLALVHKMNNCLSQMEQFPVKVHDFPSGNGTGGSFSLNRGSQALKFFNTHQLKCQLQRHPDCANVKQWKGGPVKIDPLALVQAIERYLVVRGYGRVREDDEDSDDDGSDEEIDESLAAQFLNSGNVRHRLQFYIGEHLLPYNMTVYQAVRQFSIQAEDERESTDDESNPLGRAGIWTKTHTIWYKPVREDEESNKDCVGGKRGRAQTAPTKTSPRNAKKHDELWHDGVCPSVSNPLEVYLIPTPPENITFEDPSLDVILLLRVLHAISRYWYYLYDNAMCKEIIPTSEFINSKLTAKANRQLQDPLVIMTGNIPTWLTELGKTCPFFFPFDTRQMLFYVTAFDRDRAMQRLLDTNPEINQSDSQDSRVAPRLDRKKRTVNREELLKQAESVMQDLGSSRAMLEIQYENEVGTGLGPTLEFYALVSQELQRADLGLWRGEEVTLSNPKGSQEGTKYIQNLQGLFALPFGRTAKPAHIAKVKMKFRFLGKLMAKAIMDFRLVDLPLGLPFYKWMLRQETSLTSHDLFDIDPVVARSVYHLEDIVRQKKRLEQDKSQTKESLQYALETLTMNGCSVEDLGLDFTLPGFPNIELKKGGKDIPVTIHNLEEYLRLVIFWALNEGVSRQFDSFRDGFESVFPLSHLQYFYPEELDQLLCGSKADTWDAKTLMECCRPDHGYTHDSRAVKFLFEILSSFDNEQQRLFLQFVTGSPRLPVGGFRSLNPPLTIVRKTFESTENPDDFLPSVMTCVNYLKLPDYSSIEIMREKLLIAAREGQQSFHLS

SEQ ID NO: 52288 - protein, 403 aa, Homo sapiens
RPQSSRPVLLSKIEGHQDAVTAALLIPKEDGVITASEDRTIRVWLKRDSGQYWPSIYHTMASPCSAMAYHHDSRRIFVGQDNGAVMEFHVSEDFNKMNFIKTYPAHQNRVSAIIFSLATEWVISTGHDKCVSWMCTRSGNMLGRHFFTSWASCLQYDFDTQYAFVGDYSGQITLLKLEQNTCSVITTLKGHEGSVACLWWDPIQRLLFSGASDNSIIMWDIGGRKGRTLLLQGHHDKVQSLCYLQLTRQLVSCSSDGGIAVWNMDVSREEAPQWLESDSCQKCEQPFFWNIKQMWDTKTLGLRQHHCRKCGQAVCGKCSSKRSSYPVMGFEFQVRVCDSCYDSIKDEDRTSLATFHEGKHNISHMSMDIARGLMVTCGTDRIVKIWDMTPVVGCSLATGFSPH

SEQ ID NO: 52289 - protein, 46 aa, Homo sapiens
KEPHVEQITRKFRLNSEGKLEQTVSMATTTQPMTQHLHVTYKKVTP

SEQ ID NO: 52290 - protein, 45 aa, Homo sapiens [sequence omitted]

SEQ ID NO: 52291 - protein, 162 aa, Homo sapiens
IANLGDSRAILCRYNEESQKHAALSLSKEHNPTQYEERMRIQKAGGNVRDGRVLGVLEVSRSIGDGQYKRCGVTSVPDIRRCQLTPNDRFILLACDGLFKVFTPEEAVNFILSCLEDEKIQTREGKSAADARYEAACNRLANKAVQRGSADNVTVMVVRIGH

SEQ ID NO: 52292 - protein, 19 aa, Homo sapiens
RTSRRERRKRRCWDSRGPG

SEQ ID NO: 52293 - protein, 93 aa, Homo sapiens [sequence omitted]

SEQ ID NO: 52294 - protein, 280 aa, Homo sapiens
INSMFLGFDGTLFDYFNGYEDLKNKKVRFVGHAKQRIQEDYLRILRYFRFYGRIVDKPGDHDPETLEAIAENAKGLAGISGERIWVELKKILVGNHVNHLIHLIYDLDVAPYIGLPANASLEEFDKVSKNVDGFSPKPVTLLASLFKVQDDVTKLDLRLKIAKEEKNLGLFIVKNRKDLIKATDSSDPLKPYQDFIIDSREPDATTRVCELLKYQGEHCLLKEMQQWSIPPFPVSGHDIRKVGISSGKEIGALLQQLREQWKKSGYQMEKDELLSYIKKT

SEQ ID NO: 52295 - protein, 7 aa, Homo sapiens
MGLPSGC

SEQ ID NO: 52296 - protein, 54 aa, Homo sapiens
IMPAAPARPCNGERSSWGWCSSGLASMEYCGSSSGWGPAWASTSAFRSASASSV

SEQ ID NO: 52297 - protein, 15 aa, Homo sapiens
LEWCTSGSSMDTDSD

SEQ ID NO: 52298 - protein, 5 aa, Homo sapiens
LTASA

SEQ ID NO: 52299 - protein, 73 aa, Homo sapiens
IPESAGFFSEMTEDELVVLQQMFFGIIICALATLAAKGDLVFTAIFIGAVAAMTGYWLSERSDRVLEGFIKGR

SEQ ID NO: 52300 - protein, 113 aa, Homo sapiens
LPPGTGRRIHSYRGHLWLFRDAGTHDGLLVNQTELFVPSLNVDGQPIFANITLPVYTLKERCLQVVRSLVKPENYRRLDIVRSLYEDLEDHPNVQKDLERLTQERIAHQRMGD

SEQ ID NO: 52301 - protein, 11 aa, Homo sapiens
LRENTSRLYSL

SEQ ID NO: 52302 - protein, 46 aa, Homo sapiens
KNCCNEHLHMFTIWLGYINSTLNPLIYPLCNENFKKTFKRILHIRS

SEQ ID NO: 52303 - protein, 63 aa, Homo sapiens
LAFDKCTACSSKVLDQYEREGFNFLAKVFNSSHSFLEDLTGLTLLHQETQAAEIWDMSDDETI

SEQ ID NO: 52304 - protein, 461 aa, Homo sapiens
ISSVDLSVMEDHSHSFDIKPFTTVDFSSISTPHYEDIPFTRTDPVVADYKYDLKLQEYQSAIKVEPASPPYYSEKTQLYNKPHEEPSNSLMAIECRVCGDKASGFHYGVHACEGCKGFFRRTIRLKLIYDRCDLNCRIHKKSRNKCQYCRFQKCLAVGMSHNAIRFGRMPQAEKEKLLAEISSDIDQLNPESADLRALAKHLYDSYIKSFPLTKAKARAILTGKTTDKSPFVIYDMNSLMMGEDKIKFKHITPLQEQSKEVAIRIFQGCQFRSVEAVQEITEYAKSIPGFVNLDLNDQVTLLKYGVHEIIYTMLASLMNKDGVLISEGQGFMTREFLKSLRKPFGDFMEPKFEFAVKFNALELDDSDLAIFIAVIILSGDRPGLLNVKPIEDIQDNLLQALELQLKLNHPESSQLFAKLLQKMTDLRQIVTEHVQLLQVIKKTETDMSLHPLLQEIYKDLY

SEQ ID NO: 52305 - protein, 7 aa, Homo sapiens
KSVPILT

SEQ ID NO: 52306 - protein, 381 aa, Homo sapiens
ICKYYQKGYCAYGTRCRYDHTRPSAAAGGAVGTMAHSVPSPAFHSPHPPSEVTASIVKTNSHEPGKREKRTLVLRDRNLSGMAERKTQPSMVSNPGSCSDPQPSPEMKPHSYLDAIRSGLDDVEASSSYSNEQQLCPYAAAGECRFGDACVYLHGEVCEICRLQVLHPFDPEQRKAHEKICMLTFEHEMEKAFAFQASQDKVCSICMEVILEKASASERRFGILSNCNHTYCLSCIRQWRCAKQFENPIIKSCPECRVISEFVIPSVYWVEDQNKKNELIEAFKQGMGKKACKYFEQGKGTCPFGSKCLYRHAYPDGRLAEPEKPRKQLSSQGTVRFFNSVRLWDFIENRESRHVPNNEDVDMTELGDLFMHLSGVESSEP

SEQ ID NO: 52307 - protein, 12 aa, Homo sapiens
LDDMISYYKQVT

SEQ ID NO: 52308 - protein, 6 aa, Homo sapiens
ITGASL

SEQ ID NO: 52309 - protein, 149 aa, Homo sapiens
IHYTVRVYSACSFTFSKIPSPYTLSKRINGKWSGQSAGGCGNFQETHKNNPIYQFHIEKTGPLLIELRGPRQYSVGFEVVTVSTLGDPGPHGFLRKSSGDYRCGFCYLELENIPSGIFNIIPSTFLPKQEGPFFLDFNSIIPIKITQLQ

SEQ ID NO: 52310 - protein, 527 aa, Homo sapiens
VVCIMSGARSKLALFLCGCYVVALGAHTGEESVADHHEAEYYVAAVYEHPSILSLNPLALISRQEALELMNQNLDIYEQQVMTAAQKDVQIIVFPEDGIHGFNFTRTSIYPFLDFMPSPQVVRWNPCLEPHRFNDTEVLQRLSCMAIRGDMFLVANLGTKEPCHSSDPRCPKDGRYQFNTNVVFSNNGTLVDRYRKHNLYFEAAFDVPLKVDLITFDTPFAGRFGIFTCFDILFFDPAIRVLRDYKVKHVVYPTAWMNQLPLLAAIEIQKAFAVAFGINVLAANVHHPVLGMTGSGIHTPLESFWYHDMENPKSHLIIAQVAKNPVGLIGAENATGETDPSHSKFLKILSGDPYCEKDAQEVHCDEATKWNVNAPPTFHSEMMYDNFTLVPVWGKEGYLHVCSNGLCCYLLYERPTLSKELYALGVFDGLHTVHGTYYIQVCALVRCGGLGFDTCGQEITEATGIFEFHLWGNFSTSYIFPLFLTSGMTLEVPDQLGWENDHYFLRKSRLSSGLVTAALYGRLYERD

SEQ ID NO: 52311 - protein, 10 aa, Homo sapiens
VSALSSASIW

SEQ ID NO: 52312 - protein, 47 aa, Homo sapiens
IATYLYKGGKKHLSRMESLFFSQGENRGKGREAIQFEVPVNGLSEGN

SEQ ID NO: 52313 - protein, 13 aa, Homo sapiens
RSCTRCWQMSGPG

SEQ ID NO: 52314 - protein, 13 aa, Homo sapiens
MTCCIWQVLATCS

SEQ ID NO: 52315 - protein, 207 aa, Homo sapiens
KKPRGKMSSYAFFVQTCREEHKKKHPDASVNFSEFSKKCSERWKTMSAKEKGKFEDMAKADKARYEREMKTYIPPKGETKKKFKDPNAPKRLPSAFFLFCSEYRPKIKGEHPGLSIGDVAKKLGEMWNNTAADDKQPYEKKAAKLKEKYEKDIAAYRAKGKPDAAKKGVVKAEKSKKKKEEEEDEEDEEDEEEEEDEEDEEEDDDDE

SEQ ID NO: 52316 - protein, 162 aa, Homo sapiens
KESKVSMSKNSKLLSTSAKRIQKELADITLDPPPNCSAGPKGDNIYEWRSTILGPPGSVYEGGVFFLDITFTPEYPFKPPKVTFRTRIYHCNINSQGVICLDILKDNWSPALTISKVLLSICSLLTDCNPADPLVGSIATQYMTNRAEHDRMARQWTKRYAT

SEQ ID NO: 52317 - protein, 94 aa, Homo sapiens
MFEFSEKLNALQLSDEEMSLFTAVVLVSADRSGIENVNSVEALQETLIRALRTLIMKNHPNEASIFTKLLLKLPDLRSLNNMHSEELLAFKVHP

SEQ ID NO: 52318 - protein, 55 aa, Homo sapiens
LLLLIASIVAASKSYNQSGLVAGAIFGFMATFLCMASIWLSYKISCVTQSTDAAV

SEQ ID NO: 52319 - protein, 387 aa, Homo sapiens
LCVACALRAGRAQYERYSFRSFPRDELMPLESAYRHALDKYSGEHWAESVGYLEISLRLHRLLRDSEAFCHRNCSAAPQPEPAAGLASYPELRLFGGLLRRAHCLKRCKQGLPAFRQSQPSREVLADFQRREPYKFLQFAYFKANNLPKAIAAAHTFLLKHPDDEMMKRNMAYYKSLPGAEDYIKDLETKSYESLFIRAVRAYNGENWRTSITDMELALPDFFKAFYECLAACEGSREIKDFKDFYLSIADHYVEVLECKIQCEENLTPVIGGYPVEKFVATMYHYLQFAYYKLNDLKNAAPCAVSYLLFDQNDKVMQQNLVYYQYHRDTWGLSDEHFQPRPEAVQFFNVTTLQKELYDFAKENIMDDDEGEVVEYVDDLLELEETS

SEQ ID NO: 52320 - protein, 10 aa, Homo sapiens
MSLWEGDSSN

SEQ ID NO: 52321 - protein, 553 aa, Homo sapiens
LAIDITTDSLVREQTASSQVDPGSWGKPGKIWEGCVWVFFLQISLLALFFFPLVCVFCFVLFFKKILAVLELASGGVSEASSVTGTVRNSGLRGSSAWGTIPCHPVPCLGDKDSSYMGKRLDQPQMYPQYTYYYPHYLQTKQSYAPAPHPMAPPSPSTNSSSNNSSNNSSGEQLSKTNLYIRGLPPGTTDQDLIKLCQPYGKIVSTKAILDKNTNQCKGYGFVDFDSPAAAQKAVASLKANGVQAQMAKQQEQDPTNLYISNLPISMDEQELENMLKPFGHVISTRILRDANGVSRGVGFARMESTEKCEVVIQHFNGKYLKTPPGIPAPSEPLLCKFADGGQKKRQNQSKYTQNGRPWPREGEAGMALTYDPTAAIQNGFYSSPYSIATNRMIPQTSITPFIAASPVSTYQVQSTSWMPHPPYVMQPTGAVITPTMDHPMSMQPANMMGPLTQQMNHLSLGTTGTIQSQDRIMILHQLLCQYMTAAAPMQGTYIPQYTPVPPTAVSIEGVVADTSPQTVAPSSQDTSGQQQQIAVDTSNEHAPAYSYQQSKP

SEQ ID NO: 52322 - protein, 559 aa, Homo sapiens
LWPLHIVLWTRIASTIPPHVQKSVNNDMIVTDNNGAVKFPQLCKFCDVRFSTCDNQKSCMSNCSITSICEKPQEVCVAVWRKNDENITLETVCHDPKLPYHDFILEDAASPKCIMKEKKKPGETFFMCSCSSDECNDNIIFSEEYNTSNPDLLLVIFQVTGISLLPPLGVAISVIIIFYCYRVNRQQKLSSTWETGKTRKLMEFSEHCAIILEDDRSDISSTCANNINHNTELLPIELDTLVGKGRFAEVYKAKLKQNTSEQFETVAVKIFPYEEYASWKTEKDIFSDINLKHENILQFLTAEERKTELGKQYWLITAFHAKGNLQEYLTRHVISWEDLRKLGSSLARGIAHLHSDHTPCGRPKMPIVHRDLKSSNILVKNDLTCCLCDFGLSLRLDPTLSVDDLANSGQVGTARYMAPEVLESRMNLENVESFKQTDVYSMALVLWEMTSRCNAVGEVKDYEPPFGSKVREHPCVESMKDNVLRDRGRPEIPSFWLNHQGIQMVCETLTECWDHDPEARLTAQCVAERFSELEHLDRLSGRSCSEEKIPEDGSLNTTK

SEQ ID NO: 52323 - protein, 288 aa, Homo sapiens
KMVQKKNAAGALDLLKELKNIPMTLELLQSTRIGMSVNAIRKQSTDEEVTSLAKSLIKSWKKLLDGPSTEKDLDEKKKEPAITSQNSPEAREESTSSGNVSNRKDETNARDTYVSSFPRAPSTSDSVQLKCREMLAAALRTGDDYIAIGADEEELGSQIEEAIYQEIRNTDMKYKNRVRSRISNLKDAKNPNLRKNVLCGNIPPDLFARMTAEEMASDELKEMWKNLTKEAIREHQMAKTGGTQTDLFTCGKCKKKNCTYTQVQTRSADEPVTTFVVCNECGNRWKFC

SEQ ID NO: 52324 - protein, 268 aa, Homo sapiens
VRRRLSLFLNVRTQVAADWTALAEEMDFEYLEIRQLETQADPTGRLLDAWQGRPGASVGRLLELLTKLGRDDVLLELGPSIEEDCQKYILKQQQEEAEKPLQVAAVDSSVPRTAELAGITTLDDPLGHMPERFDAFICYCPSDIQFVQEMIRQLEQTNYRLKLCVSDRDVLPGTCVWSIASELIEKRCRRMVVVVSDDYLQSKECDFQTKFALSLSPGAHQKRLIPIKYKAMKKEFPSILRFITVCDYTNPCTKSWFWTRLAKALSLP

SEQ ID NO: 52325 - protein, 520 aa, Homo sapiens
LPWSINRDDYELQEVIGSGATAVVQAAYCAPKKEKVAIKRINLEKCQTSMDELLKEIQAMSQCHHPNIVSYYTSFVVKDELWLVMKLLSGGSVLDIIKHIVAKGEHKSGVLDESTIATILREVLEGLEYLHKNGQIHRDVKAGNILLGEDGSVQIADFGVSAFLATGGDITRNKVRKTFVGTPCWMAPEVMEQVRGYDFKADIWSFGITAIELATGAAPYHKYPPMKVLMLTLQNDPPSLETGVQDKEMLKKYGKSFRKMISLCLQKDPEKRPTAAELLRHKFFQKAKNKEFLQEKTLQRAPTISERAKKVRRVPGSSGRLHKTEDGGWEWSDDEFDEESEEGKAAISQLRSPRVKESISNSELFPTTDPVGTLLQVPEQISAHLPQPAGQIATQPTQVSLPPTAEPAKTAQALSSGSGSQETKIPISLVLRLRNSKKELNDIRFEFTPGRDTAEGVSQELISAGLVDGRDLVIVAANLQKIVEEPQSNRSVTFKLASGVEGSDIPDDGKLIGFAQLSIS

SEQ ID NO: 52326 - protein, 10 aa, Homo sapiens
RLSWNNLDSL

SEQ ID NO: 52327 - protein, 32 aa, Homo sapiens
IEPDDYFMSRYEKKLEELKAKEQSGTQIRKPS

SEQ ID NO: 52328 - protein, 39 aa, Homo sapiens
IELLCQDQVLDPNMDLRTVKHFIWKSGGDLTLHYRQKST

SEQ ID NO: 52329 - protein, 26 aa, Homo sapiens
LSEALPGDNVGFNVKNMSVKDVHRGN

SEQ ID NO: 52330 - protein, 303 aa, Homo sapiens
IFTMSGALDVLQMKEEDVLKFLAAGTHLGGTNLDFQMEQYIYKRKSDGIYIINLKRTWEKLLLAARAIVAIENPADVSVISSRNTGQVCGTVRAVLKFAAATGATPIAGRFTPGTFTNQIQAAFREPRLLVVTDPRADHQPLTEASYVNLPTIALCNTDSPLRYVDIAIPCNNKGAHSVGLMWWMLAREVLRMRGTISREHPWEVMPDLYFYRDPEEIEKEEQAAAEKAVTKEEFQGEWTAPAPEFTATQPEVADWSEGVQVPSVPIQQFPTEDWSAQPATEDWSAAPTAQATEWVGATTDWS

SEQ ID NO: 52331 - protein, 305 aa, Homo sapiens
MVEIYLLNLAISNLLFLVTLPFWGISVAWHWVFGSFLCKMVSTLYTINFYSGIFFISCMSLDKYLEIVHAQPYHRLRTRAKSLLLATIVWAVSLAVSIPDMVFVQTHENPKGVWNCHADFGGHGTIWKLFLRFQQNLLGFLLPLLAMIFFYSRIGCVLVRLRPAGQGRALKIAAALVVAFFVLWFPYNLTLFLHTLLDLQVFGNCEVSQHLDYALQVTESIAFLHCCFSPILYAFSSHRFRQYLKAFLAAVLGWHLAPGTAQASLSSCSESSILTAQEEMTGMNDLGERQSENYPNKEDVGNKSA

SEQ ID NO: 52332 - protein, 62 aa, Homo sapiens
LEQGKESCFTQPQGVLSRNDWRAGWIGYLELRRYTYLAKAVLRRIVSKIFRNRQCWEDRRKA

SEQ ID NO: 52333 - protein, 84 aa, Homo sapiens [sequence omitted]

SEQ ID NO: 52334 - skipped

SEQ ID NO: 52335 - protein, 72 aa, Homo sapiens
KTLTTVQGIADDYDKKKLVKAFKKKFACNGTVIEHPEYGEVIQLQGDQRKNICQFLLEVGIVKEEQLKVHGF

SEQ ID NO: 52336 - protein, 26 aa, Homo sapiens
IFAGYKRGLQNQREHTALLKIEGVYA

SEQ ID NO: 52337 - protein, 37 aa, Homo sapiens
VHQRTHTGEKPYECEKCGAAFISNSHLMRHHRTHLVE

SEQ ID NO: 52338 - protein, 268 aa, Homo sapiens
VDGRGCEDYRCVEVETDVVSNTSGSARVKLGHTDILVGVKAEMGTPKLEKPNEGYLEFFVDCSASATPEFEGRGGDDLGTEIANTLYRIFNNKSSVDLKTLCISPREHCWVLYVDVLLLECGGNLFDAISIAVKAALFNTRIPRVRVLEDEEGSKDIELSDDPYDCIRLSVENVPCIVTLCKIGYRHVVDATLQEEACSLASLLVSVTSKGVVTCMRKVGKGSLDPESIFEMMETGKRVGKVLHASLQSVVHKEESLGPKRQKVGFLG

SEQ ID NO: 52339 - protein, 95 aa, Homo sapiens
KLCAHYTWDASVLLQAWPAVDPEFLQQPEVVQMAVLINNKACGKIPVPQQVARDQDKVHEFVLQSELGVRLLQGRSIKKSFLSPRTALINFLVQD

SEQ ID NO: 52340 - protein, 72 aa, Homo sapiens
LQALGKSYHPGCFRCVICNECLDGVPFTVDSENKIYCVRDYHKVLAPKCAACGLPILPPEVRCPSRHAPRGF

SEQ ID NO: 52341 - protein, 579 aa, Homo sapiens
LKLHITPEKFYVEACDDGADDVLTIDRVSTEVTLAVKKDVPPSAVTRPIFGILGTIHLVAGNYLIVITKKIKVGEFFSHVVWKATDFDVLSYKKTMLHLTDIQLQDNKTFLAMLNHVLNVDGFYFSTTYDLTHTLQRLSNTSPEFQEMSLLERADQRFVWNGHLLRELSAQPEVHRFALPVLHGFITMHSCSINGKYFDWILISRRSCFRAGVRYYVRGIDSEGHAANFVETEQIVHYNGSKASFVQTRGSIPVFWSQRPNLKYKPLPQISKVANHMDGFQRHFDSQVIIYGKQVIINLINQKGSEKPLEQTFATMVSSLGSGMMRYIAFDFHKECKNMRWDRLSILLDQVAEMQDELSYFLVDSAGQVVANQEGVFRSNCMDCLDRTNVIQSLLARRSLQAQLQRLGVLHVGQKLEEQDEFEKIYKNAWADNANACAKQYAGTGALKTDFTRTGKRTHLGLIMDGWNSMIRYYKNNFSDGFRQDSIDLFLGNYSVDELESHSPLSVPRDWKFLALPIIMVVAFSMCIICLLMAGDTWTETLAYVLFWGVASIGTFFIILYNGKDFVDAPRLVQKEKID

SEQ ID NO: 52342 - protein, 37 aa, Homo sapiens
REKSFMCTVCGRGFREKSELIKHQRIHTGDKPYVCRD

SEQ ID NO: 52343 - protein, 19 aa, Homo sapiens
KAAGKGPLATGGIKKSGKK

SEQ ID NO: 52344 - protein, 83 aa, Homo sapiens
MYGVTASARTKPRPSAVTTTAHLATTRNTSPSLGESRGTKDLPPVKDPGALSREGLLAPLGLLAILTLAVATLYGLSLATPGE

SEQ ID NO: 52345 - protein, 24 aa, Homo sapiens
LGDICLRDLQELQKTKILMHLRKR

SEQ ID NO: 52346 - protein, 140 aa, Homo sapiens
LFYLNNVTGGGETVFPVADNRTYDEMSLIQDDVDLRDTRRHCDKGNLRVKPQQGTAVFWYNYLPDGQGWVGDVDDYSLHGGCLVTRGTKWIANNWINVDPSRARQALFQQEMARLAREGGTDSQPEWALDRAYRDARVEL

SEQ ID NO: 52347 - protein, 94 aa, Homo sapiens
LRVKPQQGTAVFWYNYLPDGQGWVGDVDDYSLHGGCLVTRGTKWIANNWINVDPSRARQALFQQEMARLAREGGTDSQPEWALDRAYRDARVEL

SEQ ID NO: 52348 - protein, 88 aa, Homo sapiens
VLEEYSVPCAHAAHVTGLKILSPSIMVSASIDQRLTFWRLGHGEPTFMNSTVFHVPDVADMDCWPVSPEFGHRCALGGQGLEVYNWYD

SEQ ID NO: 52349 - protein, 175 aa, Homo sapiens
LYRARPSLRCPPVELPWAPRRGHRLSPADDELYQRTRISLLQREAAQAMYIDSYNSRGFMINGNRVLGPCALLPHSVVQWNVGSHQDITEDSFSLFWLLEPRIEIVVVGTGDRTERLQSQVLQAMRQRGIAVEVQDTPNACATFNFLCHEGRVTGAALIPPPGGTSLTSLGQAAQ

SEQ ID NO: 52350 - protein, 91 aa, Homo sapiens
LPATVLGALGSEFLREWEAQDMRVTLFKLLLLWLVLSLLGIQLAWGFYGNTVTGLYHRPGLGGQNGSTPDGSTHFPSWEMAANEPLKTHRE

SEQ ID NO: 52351 - protein, 11 aa, Homo sapiens
VCSGMEQVCRG

SEQ ID NO: 52352 - protein, 906 aa, Homo sapiens
KTIDLSKLGPGMRMSVGLSLLLPLSGRTFLLLLSVVMAQSHWPSEPSEAVRDWENQLEASMHSVLSDLHEAVPTVVGIPDGTAVVGRSFRVTIPTDLIASSGDIIKVSAAGKEALPSWLHWDSQSHTLEGLPLDTDKGVHYISVSATRLGANGSHIPQTSSVFSIEVYPEDHSELQSVRTASPDPGEVVSSACAADEPVTVLTVILDADLTKMTPKQRIDLLHRMRSFSEVELHNMKLVPVVNNRLFDMSAFMAGPGNAKKVVENGALLSWKLGCSLNQNSVPDIHGVEAPAREGAMSAQLGYPVVGWHIANKKPPLPKRVRRQIHATPTPVTAIGPPTTAIQEPPSRIVPTPTSPAIAPPTETMAPPVRDPVPGKPTVTIRTRGAIIQTPTLGPIQPTRVSEAGTTVPGQIRPTMTIPGYVEPTAVATPPTTTTKKPRVSTPKPATPSTDSTTTTTRRPTKKPRTPRPVPRVTTKVSITRLETASPPTRIRTTTSGVPRGGEPNQRPELKNHIDRVDAWVGTYFEVKIPSDTFYDHEDTTTDKLKLTLKLREQQLVGEKSWVQFNSNSQLMYGLPDSSHVGKHEYFMHATDKGGLSAVDAFEIHVHRRPQGDRAPARFKAKFVGDPALVLNDIHKKIALVKKLAFAFGDRNCSTITLQNITRGSIVVEWTNNTLPLEPCPKEQIAGLSRRIAEDDGKPRPAFSNALEPDFKATSITVTGSGSCRHLQFIPVVPPRRVPSEAPPTEVPDRDPEKSSEDDVYLHTVIPAVVVAAILLIAGIIAMICYRKKRKGKLTLEDQATFIKKGVPIIFADELDDSKPPPSSSMPLILQEEKAPLPPPEYPNQSVPETTPLNQDTMGEYTPLRDEDPNAPPYQPPPPFTAPMEGKGSRPKNMTPYRSPPPYVPP

SEQ ID NO: 52353 - protein, 93 aa, Homo sapiens
IKYSRETDSDRKLVDKEDIDTSSKGGCVQQATGWRKGTGLGYGHPGLASSEEAEGRMRGPSVGASGRTSKRQSNETYRDAVRRVMFARYKELD

SEQ ID NO: 52354 - protein, 47 aa, Homo sapiens
LASSEEAEGRMRGPSVGASGRTSKRQSNETYRDAVRRVMFARYKELD

SEQ ID NO: 52355 - protein, 75 aa, Homo sapiens
IDHSNIGNKMLQAMGWREGSGLGRKCQGITAPIEAQVRLKGAGLGAKGSAYGLSGADSYKDAVRKAMFARFTEME

SEQ ID NO: 52356 - protein, 307 aa, Homo sapiens
IVKQMKIIHEDGYSEEECRQYRAVVYSNTIQSIMAIVKAMGNLQIDFADPSRADDARQLFALSCTAEEQGVLPDDLSGVIRRLWADHGVQACFGRSREYQLNDSAAYYLNDLERIAQSDYIPTQQDVLRTRVKTTGIVETHFTFKDLHFKMFDVGGQRSERKKWIHCFEGVTAIIFCVALSAYDLVLAEDEEMNRMHESMKLFDSICNNKWFTDTSIILFLNKKDLFEEKITHSPLTICFPEYTGANKYDEAASYIQSKFEDLNKRKDTKEIYTHFTCATDTKNVQFVFDAVTDVIIKNNLKDCGLF

SEQ ID NO: 52357 - protein, 179 aa, Homo sapiens
LFSWHPVLMSLAFSFLMTEALLVFSPESSLLHSLSRKGRARCHWVLQLLALLCALLGLGLVILHKEQLGKAHLVTRHGQAGLLAVLWAGLQCSGGVGLLYPKLLPRWPLAKLKLYHATSGLVGYLLGSASLLLGMCSLWFTASVTGAAWYLAVLCPVLTSLVIMNQVSNAYLYRKRIQP

SEQ ID NO: 52358 - protein, 295 aa, Homo sapiens
LTLLAFAGYSGLLAGVEVSAGSPPIRNVTVAYKFHMGLYGETGRLFTESCSISPKLRSIAVYYDNPHMVPPDKCRCAVGSILSEGEESPSPELIDLYQKFGFKVFSFPAPSHVVTATFPYTTILSIWLATRRVHPALDTYIKERKLCAYPRLEIYQEDQIHFMCPLARQGDFYVPEMKETEWKWRGLVEAIDTQVDGTGADTMSDTSSVSLEVSPGSRETSAATLSPGASSRGWDDGDTRSEHSYSESGASGSSFEELDLEGEGPLGESRLDPGTEPLGTTKWLWEPTAPEKGKE

SEQ ID NO: 52359 - protein, 47 aa, Homo sapiens
LARESLRQLRHLPNHSVVKLRNAGHACYLHKPQDFHLVLLAFLDHLP

SEQ ID NO: 52360 - protein, 66 aa, Homo sapiens [sequence omitted]

SEQ ID NO: 52361 - protein, 137 aa, Homo sapiens
LVNLDLRDNRIEQMEEVRSIGSLPCLEHVSLLNNPLSIIPDYRTKVLAQFGERASEVCLDDTVTTEKELDTVEVLKAIQKAKEVKSKLSNPEKKGGEDSRLSAAPCIRPSSSPPTVAPASASLPQPILSNQGILGDE

SEQ ID NO: 52362 - protein, 545 aa, Homo sapiens
KLKKASKRMTCHKRYKIQKKVREHHRKLRKEAKKRGHKKPRKDPGVPNSAPFKEALLREAELRKQRLEELKQQQKLDRQKELEKKRKLETNPDIKPSNVEPMEKEFGLCKTENKAKSGKQNSKKLYCQELKKVIEASDVVLEVLDARDPLGCRCPQVEEAIVQSGQKKLVLILNKSDLVPKENLESWLNYLKKELPTVVFRASTKPKDKGKITKRVKAKKNAAPFRSEVCFGKEGLWKLLGGFQETCSKAIRVGVIGFPNVGKSSIINSLKQEQMCNVGVSMGLTRSMQVVPLDKQITIIDSPSFIVSPLNSSSALALRSPASIEVVKPMEAASAILSQADARQVVLKYTVPGYRNSLEFFTVLAQRRGMHQKGGIPNVEGAAKLLWSEWTGASLAYYCHPPTSWTPPPYFNESIVVDMKSGFNLEELEKNNAQSIRAIKGPHLANSILFQSSGLTNGIIEEKDIHEELPKRKERKQEEREDDKDSDQETVDEEVDENSSGMFAAEETGEALSEETTAGEQSTRSFILDKIIEEDDAYDFSTDYV

SEQ ID NO: 52363 - protein, 115 aa, Homo sapiens
LPPALSCPPPQPAMLEHLSSLPTQMDYKGQKLAEQMFQGIILFSAIVGFIYGYVAEQFGWTVYIVMAGFAFSCLLTLPPWPIYRRHPLKWLPVQESSTDDKKPGERKIKRHAKNN

SEQ ID NO: 52364 - protein, 76 aa, Homo sapiens
VQKEYEKTQTVLSELKLKFEMTEQEKQSITDELKQCKNNLKLLREKGNNPSILQPVPAVFIGLFLAFLFWCFGPLW

SEQ ID NO: 52365 - protein, 27 aa, Homo sapiens
VEAMERFGSRNGKTSKKITIANCGQLY

SEQ ID NO: 52366 - protein, 76 aa, Homo sapiens
RNLSLLKDIEAAEKSLQTRIHPLPRPEVVSLETRYWASVEEYIPKWEQFLLGRAPYPFAVENQNEAENTIQNEAQR

SEQ ID NO: 52367 - protein, 21 aa, Homo sapiens
LDQVLLPVHQAGPPPPPVSTS

SEQ ID NO: 52368 - protein, 48 aa, Homo sapiens
IVEIINSRDVKVQVMGKVPTISINKTDGCHAYLSKNSLDCEIVSAKSS

SEQ ID NO: 52369 - protein, 520 aa, Homo sapiens
IVPDFEVGEEFHEEPKTYYELKSQPLKSSSSAEHPGASKPPISSSSMTSRILLRQQLMREQMQEQERREQQQKLQAAQFMQQRVPVSQTPAINVSVPTTLPSATQVPMEVLKVQTHLENPTKYHIQQAQRQQVKQYLSTTLANKHANQVLSLPCPNQPGDHVMPPVPGSSAPNSPMAMLTLNSNCEKEGFYKFEEQNRAESECPGMNTHSRASCMQMDDVIDDIISLESSYNEEILGLMDPALQMANTLPVSGNLIDLYGNQGLPPPGLTISNSCPANLPNIKRELTACIFPTESEARALAKERQKKDNHNLIERRRRFNINDRIKELGTLIPKSNDPDMRWNKGTILKASVDYIRKLQREQQRAKELENRQKKLEHANRHLLLRIQELEMQARAHGLSLIPSTGLCSPDLVNRIIKQEPVLENCSQDLLQHHADLTCTTTLDLTDGTITFNNNLGTGTEANQAYSVPTKMGSKLEDILMDDTLSPVGVTDPLLSSVSPGASKTSSRRSSMSMEETEHTC

SEQ ID NO: 52370 - protein, 73 aa, Homo sapiens
IRCPFVENTWKIKFINLKIMGESSLAPGTLPKPSVKFEQSDLEAFYNVITVCGTNEVRHNVKQASDSGTGDQV

SEQ ID NO: 52371 - protein, 2603 aa, Homo sapiens
RMPVTEKDLAEDAPWKKIQQNTFTRWCNEHLKCVNKRIGNLQTDLSDGLRLIALLEVLSQKRMYRKYHQRPTFRQMQLENVSVALEFLDRESIKLVSIDSKAIVDGNLKLILGLVWTLILHYSISMPVWEDEGDDDAKKQTPKQRLLGWIQNKIPYLPITNFNQNWQDGKALGALVDSCAPGLCPDWESWDPQKPVDNAREAMQQADDWLGVPQVITPEEIIHPDVDEHSVMTYLSQFPKAKLKPGAPLKPKLNPKKARAYGRGIEPTGNMVKQPAKFTVDTISAGQGDVMVFVEDPEGNKEEAQVTPDSDKNKTYSVEYLPKVTGLHKVTVLFAGQHISKSPFEVSVDKAQGDASKVTAKGPGLEAVGNIANKPTYFDIYTAGAGVGDIGVEVEDPQGKNTVELLVEDKGNQVYRCVYKPMQPGPHVVKIFFAGDTIPKSPFVVQVGEACNPNACRASGRGLQPKGVRIRETTDFKVDTKAAGSGELGVTMKGPKGLEELVKQKDFLDGVYAFEYYPSTPGRYSIAITWGGHHIPKSPFEVQVGPEAGMQKVRAWGPGLHGGIVGRSADFVVESIGSEVGSLGFAIEGPSQAKIEYNDQNDGSCDVKYWPKEPGEYAVHIMCDDEDIKDSPYMAFIHPATGGYNPDLVRAYGPGLEKSGCIVNNLAEFTVDPKDAGKAPLKIFAQDGEGQRIDIQMKNRMDGTYACSYTPVKAIKHTIAVVWGGVNIPHSPYRVNIGQGSHPQKVKVFGPGVERSGLKANEPTHFTVDCTEAGEGDVSVGIKCDARVLSEDEEDVDFDIIHNANDTFTVKYVPPAAGRYTIKVLFASQEIPASPFRVKVDPSHDASKVKAEGPGLSKAGVENGKPTHFTVYTKGAGKAPLNVQFNSPLPGDAVKDLDIIDNYDYSHTVKYTPTQQGNMQVLVTYGGDPIPKSPFTVGVAAPLDLSKIKLNGLENRVEVGKDQEFTVDTRGAGGQGKLDVTILSPSRKVVPCLVTPVTGRENSTAKFIPREEGLYAVDVTYDGHPVPGSPYTVEASLPPDPSKVKAHGPGLEGGLVGKPAEFTIDTKGAGTGGLGLTVEGPCEAKIECSDNGDGTCSVSYLPTKPGEYFVNILFEEVHIPGSPFKADIEMPFDPSKVVASGPGLEHGKVGEAGLLSVDCSEAGPGALGLEAVSDSGTKAEVSIQNNKDGTYAVTYVPLTAGMYTLTMKYGGELVPHFPARVKVEPAVDTSRIKVFGPGIEGKDVFREATTDFTVDSRPLTQVGGDHIKAHIANPSGASTECFVTDNADGTYQVEYTPFEKGLHVVEVTYDDVPIPNSPFKVAVTEGCQPSRVQAQGPGLKEAFTNKPNVFTVVTRGAGIGGLGITVEGPSESKINCRDNKDGSCSAEYIPFAPGDYDVNITYGGAHIPGSPFRVPVKDVVDPSKVKIAGPGLGSGVRARVLQSFTVDSSKAGLAPLEVRVLGPRGLVEPVNVVDNGDGTHTVTYTPSQEGPYMVSVKYADEEIPRSPFKVKVLPTYDASKVTASGPGLSSYGVPASLPVDFAIDARDAGEGLLAVQITDQEGKPKRAIVHDNKDGTYAVTYIPDKTGRYMIGVTYGGDDIPLSPYRIRATQTGDASKCLATGPGIASTVKTGEEVGFVVDAKTAGKGKVTCTVLTPDGTEAEADVIENEDGTYDIFYTAAKPGTYVIYVRFGGVDIPNSPFTVMATDGEVTAVEEAPVNACPPGFRPWVTEEAYVPVSDMNGLGFKPFDLVIPFAVRKGEITGEVHMPSGKTATPEIVDNKDGTVTVRYAPTEVGLHEMHIKYMGSHIPESPLQFYVNYPNSGSVSAYGPGLVYGVANKTATFTIVTEDAGEGGLDLAIEGPSKAEISCIDNKDGTCTVTYLPTLPGDYSILVKYNDKHIPGSPFTAKITDDSRRCSQVKLGSAADFLLDISETDLSSLTASIKAPSGRDEPCLLKRLPNNHIGISFIPREVGEHLVSIKKNGNHVANSPVSIMVVQSEIGDARRAKVYGRGLSEGRTFEMSDFIVDTRDAGYGGISLAVEGPSKVDIQTEDLEDGTCKVSYFPTVPGVYIVSTKFADEHVPGSPFTVKISGEGRVKESITRTSRAPSVATVGSICDLNLKIPEINSSDMSAHVTSPSGRVTEAEIVPMGKNSHCVRFVPQEMGVHTVSVKYRGQHVTGSPFQFTVGPLGEGGAHKVRAGGPGLERGEAGVPAEFSIWTREAGAGGLSIAVEGPSKAEITFDDHKNGSCGVSYIAQEPGNYEVSIKFNDEHIPESPYLVPVIAPSDDARRLTVMSLQESGLKVNQPASFAIRLNGAKGKIDAKVHSPSGAVEECHVSELEPDKYAVRFIPHENGVHTIDVKFNGSHVVGSPFKVRVGEPGQAGNPALVSAYGTGLEGGTTGIQSEFFINTTRAGPGTLSVTIEGPSKVKMDCQETPEGYKVMYTPMAPGNYLISVKYGGPNHIVGSPFKAKVTGQRLVSPGSANETSSILVESVTRSSTETCYSAIPKASSDASKVTSKGAGLSKAFVGQKSSFLVDCSKAGSNMLLIGVHGPTTPCEEVSMKHVGNQQYNVTYVVKERGDYVLAVKWGEEHIPGSPFHVTVP

SEQ ID NO: 52372 - protein, 23 aa, Homo sapiens
KTAKLIIDFLASVHNTDNNKKLD

SEQ ID NO: 52373 - protein, 36 aa, Homo sapiens
LKRFIAIIAVSCSVIESKKTVMEGWVKVMVPEASKS

SEQ ID NO: 52374 - protein, 412 aa, Homo sapiens
KIKNQPKERLVLSWADLGPDKYLSDKDFQCLIKLLPSCLHPYIYRVTFATANESSALLIRMFNEKGTLKDLIYKAKPKDPFLKKYCNPKKIQGLELQQIKTYGRQILEVLKFLHDKGFPYGHLHASNVMLDGDTCRLLDLENSLLGLPSFYRSYFSQFRKINTLESVDVHCFGHLLYEMTYGRPPDSVPVDSFPPAPSMAVVAVLESTLSCEACKNGMPTISRLLQMPLFSDVLLTTSEKPQFKIPTKLKEALRIAKECIEKRLIEEQKQIHQHRRLTRAQSHHGSEEERKKRKILARKKSKRSALENSEEHSAKYSNSNNSAGSGASSPLTSPSSPTPPSTSGISALPPPPPPPPPPAAPLPPASTEAPAQLSSQAVNGMSRGALLSSIQNFQKGTLRKAKTCDHSAPKIG

SEQ ID NO: 52375 - protein, 40 aa, Homo sapiens
ITKQGFTIRNTRVHHMSERANENTVEHNWTFCRLARKTDD

SEQ ID NO: 52376 - protein, 14 aa, Homo sapiens
MPPSFPGPWKELPA

SEQ ID NO: 52377 - protein, 7 aa, Homo sapiens
MSCASPR

SEQ ID NO: 52378 - protein, 1393 aa, Homo sapiens
KASGDPYWAYSGAYGPEHWVTSSVSCGGRHQSPIDILDQYARVGEEYQELQLDGFDNESSNKTWMKNTGKTVAILLKDDYFVSGAGLPGRFKAEKVEFHWGHSNGSAGSEHSINGRRFPVEMQIFFYNPDDFDSFQTAISENRIIGAMAIFFQVSPRDNSALDPIIHGLKGVVHHEKETFLDPFVLRDLLPASLGSYYRYTGSLTTPPCSEIVEWIVFRRPVPISYHQLEAFYSIFTTEQQDHVKSVEYLRNNFRPQQRLHDRVVSKSAVRDSWNHDMTDFLENPLGTEASKVCSSPPIHMKVQPLNQTALQVSWSQPETIYHPPIMNYMISYSWTKNEDEKEKTFTKDSDKDLKATISHVSPDSLYLFRVQAVCRNDMRSDFSQTMLFQANTTRIFQGTRIVKTGVPTASPASSADMAPISSGSSTWTSSGIPFSFVSMATGMGPSSSGSQATVASVVTSTLLAGLGFGGGGISSFPSTVWPTRLPTAASASKQAARPVLATTEALASPGPDGDSSPTKDGEGTEEGEKDEKSESEDGEREHEEDGEKDSEKKEKSGVTHAAEERNQTEPSPTPSSPNRTAEGGHQTIPGHEQDHTAVPTDQTGGRRDAGPGLDPDMVTSTQVPPTATEEQYAGSDPKRPEMPSKKPMSRGDRFSEDSRFITVNPAEKNTSGMISRPAPGRMEWIIPLIVVSALTFVCLILLIAVLVYWRGCNKIKSKGFPRRFREVPSSGERGEKGSRKCFQTAHFYVEDSSSPRVVPNESIPIIPIPDDMEAIPVKQFVKHIGELYSNNQHGFSEDFEEVQRCTADMNITAEHSNHPENKHKNRYINILAYDHSRVKLRPLPGKDSKHSDYINANYVDGYNKAKAYIATQGPLKSTFEDFWRMIWEQNTGIIVMITNLVEKGRRKCDQYWPTENSEEYGNIIVTLKSTKIHACYTVRRFSIRNTKVKKGQKGNPKGRQNERVVIQYHYTQWPDMGVPEYALPVLTFVRRSSAARMPETGPVLVHCSAGVGRTGTYIVIDSMLQQIKDKSTVNVLGFLKHIRTQRNYLVQTEEQYIFIHDALLEAILGKETEVSSNQLHSYVNSILIPGVGGKTRLEKQFKLVTQCNAKYVECFSAQKECNKEKNRNSSVVPSERARVGLAPLPGMKGTDYINASYIMGYYRSNEFIITQHPLPHTTKDFWRMIWDHNAQIIVMLPDNQSLAEDEFVYWPSREESMNCEAFTVTLISKDRLCLSNEEQIIIHDFILEATQDDYVLEVRHFQCPKWPNPDAPISSTFELINVIKEEALTRDGPTIVHDEYGAVSAGMLCALTTLSQQLENENAVDVFQVAKMINLMRPGVFTDIEQYQFIYKAMLSLVSTKENGNGPMTVDKNGAVLIADESDPAESMESLV

SEQ ID NO: 52379 - protein, 375 aa, Homo sapiens
KRNNLTILQRYMSSKIPAVTYPKNESTPPSEELELDKWKTTMKSSVQEECVSTISSSKDEDPLAATREFIEMWRLLGREVPEHITEEELKTLMECVSNTAKKKYLKYLYTKEKVKKARQIKKEMKAAAREEAKNIKLLETTEEDKQKNFLFLRLWDRNMDIAMGWKGAQAMQFGQPLVFDMAYENYMKRKELQNTVSQLLESEGWNRRNVDPFHIYFCNLKIDGALHRELVKRYQEKWDKLLLTSTEKSHVDLFPKDSIIYLTADSPNVMTTFRHDKVYVIGSFVDKSMQPGTSLAKAKRLNLATECLPLDKYLQWEIGNKNLTLDQMIRILLCLKNNGNWQEALQFVPKRKHTGFLEISQHSQEFINRLKKAKT

SEQ ID NO: 52380 - protein, 10 aa, Homo sapiens
TYFVMSEKQW

SEQ ID NO: 52381 - protein, 90 aa, Homo sapiens
KHIKVQAQVKLLEKRVVHLGVGTPGRIKELVKQGGLNLSPLKFLVFDWNWRDQKLRRMMDIPEIRKEVFELLEMGVLSLCKSESLKLGLF

SEQ ID NO: 52382 - protein, 664 aa, Homo sapiens
LRNIIQGRPLPADLRAKVWKIALNVAGKGDSLASWDGILDLPEQNTIHKDCLQFIDQLSVPEEKAAELLLDIESVITFYCKSRNIKYSTSLSWIHLLKPLVHLQLPRSDLYNCFYAIMNKYIPRDCSQKGRPFHLFRLLIQYHEPELCSYLDTKKITPDSYALNWLGSLFACYCSTEVTQAIWDGYLQQADPFFIYFLMLIILVNAKEVILTQESDSKEEVIKFLENTPSSLNIEDIEDLFSLAQYYCSKTPASFRKDNHHLFGSTLLGIKDDDADLSQALCLAISVSEILQANQLQGEGVRFFVVDCRPAEQYNAGHLSTAFHLDSDLMLQNPSEFAQSVKSLLEAQKQSIESGSIAGGEHLCFMGSGREEEDMYMNMVLAHFLQKNKEYVSIASGGFMALQQHLADINVDGPENGYGHWIASTSGSRSSINSVDGESPNGSSDRGMKSLVNKMTVALKTKSVNVREKVISFIENTSTPVDRMSFNLPWPDRSCTERHVSSSDRVGKPYRGVKPVFSIGDEEEYDTDEIDSSSMSDDDRKEVVNIQTWINKPDVKHHFPCKEVKESGHMFPSHLLVTATHMYCLREIVSRKGLAYIQSRQALNSVVKITSKKKHPELITFKYGNSSASGIEILAIERYLIPNAGDATKAIKQQIMKVLDALES

SEQ ID NO: 52383 - protein, 6 aa, Homo sapiens
IHTEAF

SEQ ID NO: 52384 - protein, 31 aa, Homo sapiens
VARSHPTHGLIFMGLWDQKNRNSNNKSPAAV

SEQ ID NO: 52385 - protein, 15 aa, Homo sapiens
TKVSSVASIASKETS

SEQ ID NO: 52386 - protein, 52 aa, Homo sapiens
MPAVSAFFSLAALAEVAAMENVHRGQRSTPLTHDGQPKEMPQAPVLISCADQ

SEQ ID NO: 52387 - protein, 540 aa, Homo sapiens
LCPGGGKAQLSSASLLGAGLLLQPPTPPPLLLLLFPLLLFSRLCGALAGPIIVEPHVTAVWGKNVSLKCLIEVNETITQISWEKIHGKSSQTVAVHHPQYGFSVQGEYQGRVLFKNYSLNDATITLHNIGFSDSGKYICKAVTFPLGNAQSSTTVTVLVEPTVSLIKGPDSLIDGGNETVAAICIAATGKPVAHIDWEGDLGEMESTTTSFPNETATIISQYKLFPTRFARGRRITCVVKHPALEKDIRYSFILDIQYAPEVSVTGYDGNWFVGRKGVNLKCNADANPPPFKSVWSRLDGQWPDGLLASDNTLHFVHPLTFNYSGVYICKVTNSLGQRSDQKVIYISDPPTTTTLQPTIQWHPSTADIEDLATEPKKLPFPLSTLATIKDDTIATIIASVVGGALFIVLVSVLAGIFCYRRRRTFRGDYFAKNYIPPSDMQKESQIDVLQQDELDSYPDSVKKENKNPVNNLIRKDYLEEPEKTQWNNVENLNRFERPMDYYEDLKMGMKFVSDEHYDENEDDLVSHVDGSVISRREWYV

SEQ ID NO: 52388 - protein, 36 aa, Homo sapiens
MYPLYNQMCYQDRSPGKHHQNNDPKRVYIDPREHYV

SEQ ID NO: 52389 - skipped

SEQ ID NO: 52390 - protein, 166 aa, Homo sapiens
RQKLIEKEVKIRERQRAQARPLTRYLPVRKEDFDLRSHVETAGHNIDTCYHVSITEKTCRGFLIKMGGKIKTWKKRWFVFDRNKRTFSYYADKHETKLKGVIYFQAIEEVYYDHLKNANKSPNPLLTFSVKTHDRIYYMVAPSPEAMRIWMDVIVTGAEGYTHFLL

SEQ ID NO: 52391 - protein, 269 aa, Homo sapiens
IPQRAPRWLPACRQKTSLSFLNRPDLPNLAYKKLKGKSPGIIFIPGYLSYMNGTKALAIEEFCKSLGHACIRFDYSGVGSSDGNSEESTLGKWRKDVLSIIDDLADGPQILVGSSLGGWLMLHAAIARPEKVVALIGVATAADTLVTKFNQLPVELKKEVEMKGVWSMPSKYSEEGVYNVQYSFIKEAEHHCLLHSPIPVNCPIRLLHGMKDDIVPWHTSMQVADRVLSTDVDVILRKHSDHRMREKADIQLLVYTIDDLIDKLSTIVN

SEQ ID NO: 52392 - protein, 38 aa, Homo sapiens
IGGLEGGAFSPIPTVASPRMDPKGYCCYYGARQLLSQL

SEQ ID NO: 52393 - protein, 88 aa, Homo sapiens
VDSVVGIQKTDNIAIEMCEEFALPYVIVLTKIDKSSKGHLLKQVLQIQKFVNMKTQGCFPQLFPVSAVTFSGIHLLRCFIASVTGSLD

SEQ ID NO: 52394 - protein, 141 aa, Homo sapiens
LPLPLLLSFQYKENKRRYQRKEPLTPFRITQVSPGNRGSLSPEEQPKGPWAGVDREGGGVGGIAWWKVACGREPKVQRHSPGDGVSGRRRCPCVGTRQRAGTAGPGTTPPPAAWTPSVAHQEGGGIWNPRGPVPAVCSSAS

SEQ ID NO: 52395 - protein, 573 aa, Homo sapiens
LLFCLLISATVFRPGLGWYTVNSAYGDTIIIPCRLDVPQNLMFGKWKYEKPDGSPVFIAFRSSTKKSVQYDDVPEYKDRLNLSENYTLSISNARISDEKRFVCMLVTEDNVFEAPTIVKVFKQPSKPEIVSKALFLETEQLKKLGDCISEDSYPDGNITWYRNGKVLHPLEGAVVIIFKKEMDPVTQLYTMTSTLEYKTTKADIQMPFTCSVTYYGPSGQKTIHSEQAVFDIYYPTEQVTIQVLPPKNAIKEGDNITLKCLGNGNPPPEEFLFYLPGQPEGIRSSNTYTLTDVRRNATGDYKCSLIDKKSMIASTAITVHYLDLSLNPSGEVTRQIGDALPVSCTISASRNATVVWMKDNIRLRSSPSFSSLHYQDAGNYVCETALQEVEGLKKRESLTLIVEGKPQIKMTKKTDPSGLSKTIICHVEGFPKPAIQWTITGSGSVINQTEESPYINGRYYSKIIISPEENVTLTCTAENQLERTVNSLNVSAISIPEHDEADEISDENREKVNDQAKLIVGIVVGLLLAALVAGVVYWLYMKKSKTASKHVNKDLGNMEENKKLEENNHKTEA

SEQ ID NO: 52396 - protein, 48 aa, Homo sapiens
LEPMTHEVLSTFIPSEGSSSKVEESVARDGSISLCDPGGLWDVGFRPL

SEQ ID NO: 52397 - protein, 22 aa, Homo sapiens
IREALKSDKLAQLKELIHRQAS

SEQ ID NO: 52398 - protein, 367 aa, Homo sapiens
KESGSKWKVFIDQINRSLENYEPCSSQNCSCYHGVIEEDLTPFRGGISRKMMAEVVRRKLGTHYQITKNRLYRENDCMFPSRCSGVEHFILEVIGRLPDMEMVINVRDYPQVPKWMEPAIPVFSFSKTSEYHDIMYPAWTFWEGGPAVWPIYPTGLGRWDLFREDLVRSAAQWPWKKKNSTAYFRGSRTSPERDPLILLSRKNPKLVDAEYTKNQAWKSMKDTLGKPAAKDVHLVDHCKYKYLFNFRGVAASFRFKHLFLCGSLVFHVGDEWLEFFYPQLKPWVHYIPVKTDLSNVQELLQFVKANDDVAQEIAERGSQFIRNHLQMDDITCYWENLLSEYSKFLSYNVTRRKGYDQIIPKMLKTEL

SEQ ID NO: 52399 - protein, 283 aa, Homo sapiens
VPPPAPRSFLCRALCLFPRVFAAEAVTADSEVLEERQKRLPYVPEPYYPESGWDRLRELFGKDEQQRISKDLANICKTAATAGIIGWVYGGIPAFIHAKQQYIEQSQAEIYHNRFDAVQSAHRAATRGFIRYGWRWGWRTAVFVTIFNTVNTSLNVYRNKDALSHFVIAGAVTGSLFRINVGLRGLVAGGIIGALLGTPVGGLLMAFQKYSGETVQERKQKDRKALHELKLEEWKGRLQVTEHLPEKIESSLQEDEPENDAKKIEALLNLPRNPSVIDKQDKD

SEQ ID NO: 52400 - protein, 168 aa, Homo sapiens
RLQRQRAILYKRLKVPPAINQFTQALDRQTATQLLKLAHKYRPESRQEKKQRLLAWAKKKAAGRGDVPTKRPPVLRTGVNTVTTLVENKKAQLVVIAHNADPIKLAVFLPALCRKMGVPYCITKGKARLGRLVHRKTCTTVAFTQVNSEDKGTLAKLVEVIRTNYNDR

SEQ ID NO: 52401 - protein, 17 aa, Homo sapiens
ITKLEKAKAKELATKLG

SEQ ID NO: 52402 - protein, 139 aa, Homo sapiens
RLCERDVSSSLRLTRSSDLKRINGFCTKPQESPGAPSRTYNRVPLHKPTDWQKKILIWSGRFKKEDEIPETVSLEMLDAAKNKMRVKISYLMIALTVVGCIFMVIEGKKAAQRHETLTSLNLEKKARLKEEAAMKAKTE

SEQ ID NO: 52403 - protein, 98 aa, Homo sapiens
IQTEEHPNPGKRYPGIQRTAYLPDNKEGRKVLKLLYRAFDQKLIFTVGYSRVLGVSDVITWNDIHHKTSRFGGPEMYGYPDPSYLKRVKEELKAKGIE

SEQ ID NO: 52404 - protein, 73 aa, Homo sapiens
MKPEFLHLTPGVQLEAGGDNLGQQYNSPQEVIGKRGSDIIIVGRGIISAADRLEAAEMYRKAAWEAYLSRLGV

SEQ ID NO: 52405 - protein, 50 aa, Homo sapiens
LTFGLICLCNMYLYELRNLWQLFFHVTVGAFVTLQIWLRQAQGKAPDYDV

SEQ ID NO: 52406 - protein, 340 aa, Homo sapiens
TRACAYQDRRGQQRLPEWRDPDKYCPSYNKSPQSNSPVLLSRLHFEKDADSSERIIAPMRWGLVPSWFKESDPSKLQFNTTNCRSDTVMEKRSFKVPLGKGRRCVVLADGFYEWQRCQGTNQRQPYFIYFPQIKTEKSGSIGAADSPENWEKVWDNWRLLTMAGIFDCWEPPEGGDVLYSYTIITVDSCKGLSDIHHRMPAILDGEEAVSKWLDFGEVSTQEALKLIHPTENITFHAVSSVVNNSRNNTPECLAPVDLVVKKELRASGSSQRMLQWLATKSPKKEDSKTPQKEESDVPQWSSQFLQKSPLPTKRGTAGLLEQWLKREKEEEPVAKRPYSQ

SEQ ID NO: 52407 - protein, 5 aa, Homo sapiens
VTWSL

SEQ ID NO: 52408 - protein, 18 aa, Homo sapiens
LTFKRYVFDTHKRMVQSP

SEQ ID NO: 52409 - protein, 147 aa, Homo sapiens
MHDDYDLRQEQLNKASLLSSKKFLENLLEKFNSHVDHGTGALVISSLLDFLTFALCAPYSETTEGQQFDMLLEMVASNGRTLFKLFQHPSMAIIKGAGLVMKAIIEEGDKEIATKMQELALSEGALPRHLHTAMFTISSDQRMLTNS

SEQ ID NO: 52410 - protein, 164 aa, Homo sapiens
IFPRYLGTSMKALIQMLEICIGFVVPFLIMGVCYFITARTLMKMPNIKISRPLKVLLTVVIVFIVTQLPYNIVKFCRAIDIIYSLITSCNMSKRMDIAIQVTESIALFHSCLNPILYVFMGASFKNYVMKVAKKYGSWRRQRQSVEEFPFDSEGPTEPTSTFSI

SEQ ID NO: 52411 - protein, 358 aa, Homo sapiens
VVDSNPYSRLMALKRMGIVSDYEKIRTFAVAIVGVGGVGSVTAEMLTRCGIGKLLLFDYDKVELANMNRLFFQPHQAGLSKVQAAEHTLRNINPDVLFEVHNYNITTVENFQHFMDRISNGGLEEGKPVDLVLSCVDNFEARMTINTACNELGQTWMESGVSENAVSGHIQLIIPGESACFACAPPLVVAANIDEKTLKREGVCAASLPTTMGVVAGILVQNVLKFLLNFGTVSFYLGYNAMQDFFPTMSMKPNPQCDDRNCRKQQEEYKKKVAALPKQEVIQEEEEIIHEDNEWGIELVSEVSEEELKNFSGPVPDLPEGITVAYTIPKKQEDSVTELTVEDSGESLEDLMAKMKNM

SEQ ID NO: 52412 - protein, 397 aa, Homo sapiens
VFAKTEVVDSDGSVKDKITAFIVERDFGGVTNGKPEDKLGIRGSNTCEVHFENTKIPVENILGEVGDGFKVAMNILNSGRFSMGSVVAGLLKRLIEMTAEYACTRKQFNKRLSEFGLIQEKFALMAQKAYVMESMTYLTAGMLDQPGFPDCSIEAAMVKVFSSEAAWQCVSEALQILGGLGYTRDYPYERILRDTRILLIFEGTNEILRMYIALTGLQHAGRILTTRIHELKQAKVSTVMDTVGRRLRDSLGRTVDLGLTGNHGVVHPSLADSANKFEENTYCFGRTVETLLLRFGKTIMEEQLVLKRVANILINLYGMTAVLSRASRSIRIGLRNHDHEVLLANTFCVEAYLQNLFSLSQLDKYAPENLDEQIKKVSQQILEKRAYICAHPLDRTC

SEQ ID NO: 52413 - protein, 55 aa, Homo sapiens
LANTFCVEAYLQNLFSLSQLDKYAPENLDEQIKKVSQQILEKRAYICAHPLDRTC

SEQ ID NO: 52414 - protein, 932 aa, Homo sapiens
RRYLSTLRNQRAEEQVARFQKIPNGENETMIPVLTSKKASELPVSEVASILQADLQNGLNKCEVSHRRAFHGWNEFDISEDEPLWKKYISQFKNPLIMLLLASAVISVLMHQFDDAVSITVAILIVVTVAFVQEYRSEKSLEELSKLVPPECHCVREGKLEHTLARDLVPGDTVCLSVGDRVPADLRLFEAVDLSIDESSLTGETTPCSKVTAPQPAATNGDLASRSNIAFMGTLVRCGKAKGVVIGTGENSEFGEVFKMMQAEEAPKTPLQKSMDLLGKQLSFYSFGIIGIIMLVGWLLGKDILEMFTISVSLAVAAIPEGLPIVVTVTLALGVMRMVKKRAIVKKLPIVETLGCCNVICSDKTGTLTKNEMTVTHIFTSDGLHAEVTGVGYNQFGEVIVDGDVVHGFYNPAVSRIVEAGCVCNDAVIRNNTLMGKPTEGALIALAMKMGLDGLQQDYIRKAEYPFSSEQKWMAVKCVHRTQQDRPEICFMKGAYEQVIKYCTTYQSKGQTLTLTQQQRDVYQQEKARMGSAGLRVLALASGPELGQLTFLGLVGIIDPPRTGVKEAVTTLIASGVSIKMITGDSQETAVAIASRLGLYSKTSQSVSGEEIDAMDVQQLSQIVPKVAVFYRASPRHKMKIIKSLQKNGSVVAMTGDGVNDAVALKAADIGVAMGQTGTDVCKEAADMILVDDDFQTIMSAIEEGKGIYNNIKNFVRFQLSTSIAALTLISLATLMNFPNPLNAMQILWINIIMDGPPAQSLGVEPVDKDVIRKPPRNWKDSILTKNLILKILVSSIIIVCGTLFVFWRELRDNVITPRDTTMTFTCFVFFDMFNALSSRSQTKSVFEIGLCSNRMFCYAVLGSIMGQLLVIYFPPLQKVFQTESLSILDLLFLLGLTSSVCIVAEIIKKVERSREKIQKHVSSTSSSFLEV

SEQ ID NO: 52415 - protein, 162 aa, Homo sapiens
MLFGRIPLRYAILMQMRFDGRLGFPGGFVDTQDRSLEDGLNRELREELGEAAAAFRVERTDYRSSHVGSGPRVVAHFYAKRLTLEELLAVEAGATRAKDHGLEVLGLVRVPLYTLRDGVGGLPTFLENSFIGSAREQLLEALQDLGLLQSGSISGLKIPAHH

SEQ ID NO: 52416 - protein, 138 aa, Homo sapiens
KAVTKDEDEWKELEQKEVDYSGLRVQAMQISSEKEEDDNEKRQDPGDNWEEGGGGGGGMEKSSGPWNKTAPVQAPPAPVIVTETPEPAMTSGVYRPPGARLTTTRKTPQGPPEIYSDTQFPSLQSTAKHVESRNRYLK

SEQ ID NO: 52417 - protein, 14 aa, Homo sapiens
RWWWRYGKIFRSLE

SEQ ID NO: 52418 - protein, 79 aa, Homo sapiens
RKTPQGPPEIYSDTQFPSLQSTAKHVESRKDKEMEKSFEVVRHKNRGRDEVSKNQALKLQLDNQYAVLENQKSSHSQYN

SEQ ID NO: 52419 - protein, 328 aa, Homo sapiens
RLKCDEWSVNSVGKIECVSAETTEDCIAKIMNGEADAMSLDGGFVYIAGKCGLVPVLAENYNKSDNCEDTPEAGYFAIAVVKKSASDLTWDNLKGKKSCHTAVGRTAGWNIPMGLLYNKINHCRFDEFFSEGCAPGSKKDSSLCKLCMGSGLNLCEPNNKEGYYGYTGAFRCLVEKGDVAFVKHQTVPQNTGGKNPDPWAKNLNEKDYELLCLDGTRKPVEEYANCHLARAPNHAVVTRKDKEACVHKILRQQQHLFGSNVTDCSGNFCLFRSETKDLLFRDDTVCLAKLHDRNTYEKYLGEEYVKAVGNLRKCSTSSLLEACTFRRP

SEQ ID NO: 52420 - protein, 232 aa, Homo sapiens
LESTKAYNMVDIIHSVVDEREFFEIMPNYAKNIIVGFARMNGRTVGIVGNQPKVASGCLDINSSVKGARFVRFCDAFNIPLITFVDVPGFLPGTAQEYGGIIRHGAKLLYAFAEATVPKVTVITRKAYGGAYDVMSSKHLCGDTNYAWPTAEIAVMGAKGAVEIIFKGHENVEAAQAEYIEKFANPFPAAVRGFVDDIIQPSSTRARICCDLDVLASKKVQRPWRKHANIPL

SEQ ID NO: 52421 - protein, 147 aa, Homo sapiens
KSPRKHNYRNESARESLCDSPHQNLSRPLLENKLKAFSIGKMSTAKRTLSKKEQEELKKKEDEKAAAEIYEEFLAAFEGSDGNKVKTFVRGGVVNAAKEEHETDEKRGKIYKPSSRFADQKNPPNQSSNERPPSLLVIETKKPVSHT

SEQ ID NO: 52422 - protein, 266 aa, Homo sapiens
VDESELEAQAVTTSKWELFDQHEESEEEENQNQEEESEDEEDTQSSKSEEHHLYSNPIKEEMTESKFSKYSEMSEEKRAKLREIELKVMKFQDELESGKRPKKPGQSFQEQVEHYRDKLLQREKEKELERERERDKKDKEKLESRSKDKKEKDECTPTRKERKRRHSTSPSPSRSSSGRRVKSPSPKSERSERSERSHKESSRSRSSHKDSPRDVSKKAKRSPSGSRTPKRSRRSRSRSPKKSGKKSRSQSRSPHRSHKKSKKNKH

SEQ ID NO: 52423 - protein, 214 aa, Homo sapiens
VLQSFPSDEGWPFAKYLGACGRMVAVNYVGEELWSYFNAPWEKRVDLAWQLMEIAEQLTNNDFEFALYLLDVSFDNFAVGPRDGKVIIVDAENVLVADKRLIRQNKPENWDVWYESKFDDCDKEACLSFSKEILCARATVDHNYYAVCQNLLSRHATWRGTSGGLLHDPPSEIAKDGRLEALLDECANPKKRYGRFQAAKELREYLAQLSNNVR

SEQ ID NO: 52424 - protein, 147 aa, Homo sapiens
LTTALSMIVYRSIKEKISMWTALFTFGWTGTIWGISTMFILQEPIIPLDGETWSYLIAICVCSTAAFLGVYYALDKFHPALVSTVQHLEIVVAMVLQLLVLHIFPSIYDVFGGVIIMISVFVLAGYKLYWRNLRKQDYQEILDSPIK

SEQ ID NO: 52425 - protein, 647 aa, Homo sapiens
RLFDPDPQKVLQGVIDMKNAVIGNNKQKANLIVLGAVPRLLYLLQQETSSTELKTECAVVLGSLAMGTENNVKSLLDCHIIPALLQGLLSPDLKFIEACLRCLRTIFTSPVTPEELLYTDATVIPHLMALLSRSRYTQEYICQIFSHCCKGPDHQTILFNHGAVQNIAHLLTSLSYKVRMQALKCFSVLAFENPQVSMTLVNVLVDGELLPQIFVKMLQRDKPIEMQLTSAKCLTYMCRAGAIRTDDNCIVLKTLPCLVRMCSKERLLEERVEGAETLAYLIEPDVELQRIASITDHLIAMLADYFKYPSSVSAITDIKRLDHDLKHAHELRQAAFKLYASLGANDEDIRKKIIETENMMDRIVTGLSESSVKVRLAAVRCLHSLSRSVQQLRTSFQDHAVWKPLMKVLQNAPDEILVVASSMLCNLLLEFSPSKEPILESGAVELLCGLTQSENPALRVNGIWALMNMAFQAEQKIKADILRSLSTEQLFRLLSDSDLNVLMKTLGLLRNLLSTRPHIDKIMSTHGKQIMQAVTLILEGEHNIEVKEQTLCILANIADGTTAKDLIMTNDDILQKIKYYMGHSHVKLQLAAMFCISNLIWNEEEGSQERQDKLRDMGIVDILHKLSQSPDSNLCDKAKMALQQYLA

SEQ ID NO: 52426 - protein, 93 aa, Homo sapiens
RESFPMILVANKVDLMHLRKITREQGKEMATKHNIPYIETSAKDPPLNVDKAFHDLVRVIRQQIPEKSQKKKKKTKWRGDRATGTHKLQCVIL

SEQ ID NO: 52427 - protein, 135 aa, Homo sapiens
MFKLVGKETFYVGAAKTKATINIDAISGFAYEYTLEINGKSLKKYMEDRSKTTNTWVLHMDGENFRIVLEKDAMDVWCNGKKLETAGEFVDDGTETHFSIGNHDCYIKAVSSGKRKEGIIHTLIVDNREIPEIAS

SEQ ID NO: 52428 - protein, 269 aa, Homo sapiens
ISEVQLNTMAGASVNRVVSPGPLHCLKVILEKEGPRSLFRGLGPNLVGVAPSRAIYFAAYSNCKEKLNDVFDPDSTQVHMISAAMAGFTAITATNPIWLIKTRLQLDARNRGERRMGAFECVRKVYQTDGLKGFYRGMSASYAGISETVIHFVIYESIKQKLLEYKTASTMENDEESVKEASDFVGMMLAAATSKTCATTIAYPHEVVRTRLREEGTKYRSFFQTLSLLVQEEGYGSLYRGLTTHLVRQIPNTAIMMATYELVVYLLNG

SEQ ID NO: 52429 - protein, 73 aa, Homo sapiens
KGYACFQCPKICKTAAALGMHQKKHLFKSPSQQEKIGDVCHENSNPLENQHFIGSEDNDQKDNIQTGVENVVL

SEQ ID NO: 52430 - protein, 274 aa, Homo sapiens
KKSLNQSLAEWKLFIYNPTTGEFLGRTAKSWGLILLFYLVFYGFLAALFSFTMWVMLQTLNDEVPKYRDQIPSPGLMVFPKPVTALEYTFSRSDPTSYAGYIEDLKKFLKPYTLEEQKNLTVCPDGALFEQKGPVYVACQFPISLLQACSGMNDPDFGYSQGNPCILVKMNRIIGLKPEGVPRIDCVSKNEDIPNVAVYPHNGMIDLKYFPYYGKKLHVGYLQPLVAVQVSFAPNNTGKEVTVECKIDGSANLKSQDDRDKFLGRVMFKITARA

SEQ ID NO: 52431 - protein, 370 aa, Homo sapiens
VFATNSTQVIKMILNSSTEDGIKRIQDDCPKAGRHNYIFVMIPTLYSIIFVVGIFGNSLVVIVIYFYMKLKTVASVFLLNLALADLCFLLTLPLWAVYTAMEYRWPFGNYLCKIASASVSFNLYASVFLLTCLSIDRYLAIVHPMKSRLRRTMLVAKVTCIIIWLLAGLASLPAIIHRNVFFIENTNITVCAFHYESQNSTLPIGLGLTKNILGFLFPFLIILTSYTLIWKALKKAYEIQKNKPRNDDIFKIIMAIVLFFFFSWIPHQIFTFLDVLIQLGIIRDCRIADIVDTAMPITICIAYFNNCLNPLFYGFLGKKFKRYFLQLLKYIPPKAKSHSNLSTKMSTLSYRPSDNVSSSTKKPAPCFEVE

SEQ ID NO: 52432 - protein, 33 aa, Homo sapiens
RAGPDQKYTGFPVSFSDHSYKLYSYLEGPKEGL

SEQ ID NO: 52433 - protein, 14 aa, Homo sapiens
VVTFAPVNVTTKVC

SEQ ID NO: 52434 - protein, 91 aa, Homo sapiens
IEQAMDLVKSHLMYAVREEVEVLKEQIKELVERNSLLERENALLKSLSSNDQLSQLPTQQANPGSTSQQQAVIAQPPQPTQPPQQPNVSSA

SEQ ID NO: 52435 - protein, 45 aa, Homo sapiens
LLLLLVAASAMVRSEASANLGGVPSKRLKMQYATGPLLKFQICVS

SEQ ID NO: 52436 - protein, 144 aa, Homo sapiens
RRVFEEYMRVISQRYPDIRIEGENYLPQPIYRHIASFLSVFKLVLIGLIIVGKDPFAFFGMQAPSIWQWGQENKVYACMMVFFLSNMIENQCMSTGAFEITLNDVPVWSKLESGHLPSMQQLVQILDNEMKLNVHMDSIPHHRS

SEQ ID NO: 52437 - protein, 676 aa, Homo sapiens
KDGHHHYEGAVVILDAGAQYGKVIDRRVRELFVQSEIFPLETPAFAIKEQGFRAIIISGGPNSVYAEDAPWFDPAIFTIGKPVLGICYGMQMMNKVFGGTVHKKSVREDGVFNISVDNTCSLFRGLQKEEVVLLTHGDSVDKVADGFKVVARSGNIVAGIANESKKLYGAQFHPEVGLTENGKVILKNFLYDIAGCSGTFTVQNRELECIREIKERVGTSKVLVLLSGGVDSTVCTALLNRALNQEQVIAVHIDNGFMRKRESQSVEEALKKLGIQVKVINAAHSFYNGTTTLPISDEDRTPRKRISKTLNMTTSPEEKRKIIGDTFVKIANEVIGEMNLKPEEVFLAQGTLRPDLIESASLVASGKAELIKTHHNDTELIRKLREEGKVIEPLKDFHKDEVRILGRELGLPEELVSRHPFPGPGLAIRVICAEEPYICKDFPETNNILKIVADFSASVKKPHTLLQRVKACTTEEDQEKLMQITSLHSLNAFLLPIKTVGVQGDCRSYSYVCGISSKDEPDWESLIFLARLIPRMCHNVNRVVYIFGPPVKEPPTDVTPTFLTTGVLSTLRQADFEAHNILRESGYAGKISQMPVILTPLHFDRDPLQKQPSCQRSVVIRTFITSDFMTGIPATPGNEIPVEVVLKMVTEIKKIPGISRIMYDLTSKPPGTTEWE

SEQ ID NO: 52438 - protein, 219 aa, Homo sapiens
IEHIDEVQNETDRLNEQASEEILKVEQKYNKLRQPFFQKRSELIAKIPNFWVTTFVSHPQVSALLGEEDEEALHYLTRVEVTEFEDIKSGYRIDFYFDENPYFENKVLSKEFLLNESGDPSSKSTEIKWKSGKDLTKRSSQTQNKASRKRQHEEPESFFTWFTDHSDAGADELGEVIKDDIWPNPLQYYLVPDMDDEEGEGEEDDDDDEEEEGLEDIDE

SEQ ID NO: 52439 - protein, 5 aa, Homo sapiens
RIFRL

SEQ ID NO: 52440 - protein, 660 aa, Homo sapiens
IHIMEMETTEPEPDCVVQPPSPPDDFSCQMRLSEKITPLKTCFKKKDQKRLGTGTLRSLRPILNTLLESGSLDGVFRSRNQSTDENSLHEPMMKKAMEINSSCPPAENNMSVLIPDRTNVGDQIPEAHPSTEAPERVVPIQDHSFPSETLSGTVADSTPAHFQTDLLHPVSSDVPTSPDCLDKVIDYVPGIFQENSFTIQYILDTSDKLSTELFQDKSEEASLDLVFELVNQLQYHTHQENGIEICMDFLQGTCIYGRDCLKHHTVLPYHWQIKRTTTQKWQSVFNDSQEHLERFYCNPENDRMRMKYGGQEFWADLNAMNVYETTEFDQLRRLSTPPSSNVNSIYHTVWKFFCRDHFGWREYPESVIRLIEEANSRGLKEVRFMMWNNHYILHNSFFRREIKRRPLFRSCFILLPYLQTLGGVPTQAPPPLEATSSSQIICPDGVTSANFYPETWVYMHPSQDFIQVPVSAEDKSYRIIYNLFHKTVPEFKYRILQILRVQNQFLWEKYKRKKEYMNRKMFGRDRIINERHLFHGTSQDVVDGICKHNFDPRVCGKHATMFGQGSYFAKKASYSHNFSKKSSKGVHFMFLAKVLTGRYTMGSHGMRRPPPVNPGSVTSDLYDSCVDNFFEPQIFVIFNDDQSYPYFVIQYEEVSNTVSI

SEQ ID NO: 52441 - protein, 17 aa, Homo sapiens
IITNYLPRWGHFSKLLP

SEQ ID NO: 52442 - protein, 7 aa, Homo sapiens
IIFSILL

SEQ ID NO: 52443 - protein, 8 aa, Homo sapiens
LLHLSMPN

SEQ ID NO: 52444 - protein, 159 aa, Homo sapiens
TGSFIEKYDPTIEDFYRKEIEVDSSPSVLEILDTAGTEQFASMRDLYIKNGQGFILVYSLVNQQSFQDIKPMRDQIIRVKRYERVPMILVGNKVDLEGEREVSYGEGKALAEEWSCPFMETSAKNKASVDELFAEIVRQMNYAAQPNGDEGCCSACVIL

SEQ ID NO: 52445 - protein, 16 aa, Homo sapiens
LAILGDGQVRKSDGYN

SEQ ID NO: 52446 - protein, 23 aa, Homo sapiens
VRSLVGMCRLSSLQLLPNPTDFR

SEQ ID NO: 52447 - protein, 54 aa, Homo sapiens
RLALQVHFHSSLRPLPWGVMFCYRDPRYQIAPGLIWGLGICHSAVQTLIFFSSF

SEQ ID NO: 52448 - protein, 936 aa, Homo sapiens
KDALEGEKNIAIEFLTLENEIFRKKNHVCQYYIYELQKRIAEMETQKEKIHEDTKEINEKSNILSNEMKAKNKDVKDTEKKLNKITKFIEENKEKFTQLDLEDVQVREKLKHATSKAKKLEKQLQKDKEKVEEFKSIPAKSNNIINETTTRNNALEKEKEKEEKKLKEVMDSLKQETQGLQKEKESREKELMGFSKSVNEARSKMDVAQSELDIYLSRHNTAVSQLTKAKEALIAASETLKERKAAIRDIEGKLPQTEQELKEKEKELQKLTQEETNFKSLVHDLFQKVEEAKSSLAMNRSRGKVLDAIIQEKKSGRIPGIYGRLGDLGAIDEKYDVAISSCCHALDYIVVDSIDIAQECVNFLKRQNIGVATFIGLDKMAVWAKKMTEIQTPENTPRLFDLVKVKDEKIRQAFYFALRDTLVADNLDQATRVAYQKDRRWRVVTLQGQIIEQSGTMTGGGSKVMKGRMGSSLVIEISEEEVNKMESQLQNDSKKAMQIQEQKVQLEERVVKLRHSEREMRNTLEKFTASIQRLIEQEEYLNVQVKELEANVLATAPDKKKQKLLEENVSAFKTEYDAVAEKAGKVEAEVKRLHNTIVEINNHKLKAQQDKLDKINKQLDECASAITKAQVAIKTADRNLQKAQDSVLRTEKEIKDTEKEVDDLTAELKSLEDKAAEVVKNTNAAEISKISLHPIEDNPIEEISVLSPEDLEAIKNPDSITNQIALLEARCHEMKPNLGAIAEYKKKEELYLQRVAELDKITYERDSFRQAYEDLRKQRLNEFMAGFYIITNKLKENYQMLTLGGDAELELVDSLDPFSEGIMFSVRPPKKSWKKIFNLSGGEKTLSSLALVFALHHYKPTPLYFMDEIDAALDFKNVSIVAFYIYEQTKNAQFIIISLRNNMFEISDRLIGIYKTYNITKSVAVNPKEIASKGLC

SEQ ID NO: 52449 - protein, 474 aa, Homo sapiens
RNTLEKFTASIQRLIEQEEYLNVQVKELEANVLATAPDKKKQKLLEENVSAFKTEYDAVAEKAGKVEAEVKRLHNTIVEINNHKLKAQQDKLDKINKQLDECASAITKAQVAIKTADRNLQKAQDSVLRTEKEIKDTEKEVDDLTAELKSLEDKAAEVVKNTNAAEESLPEIQKEHRNLLQELKVIQENEHALQKDALSIKLKLEQIDGHIAEHNSKIKYWHKEISKISLHPIEDNPIEEISVLSPEDLEAIKNPDSITNQIALLEARCHEMKPNLGAIAEYKKKEELYLQRVAELDKITYERDSFRQAYEDLRKQRLNEFMAGFYIITNKLKENYQMLTLGGDAELELVDSLDPFSEGIMFSVRPPKKSWKKIFNLSGGEKTLSSLALVFALHHYKPTPLYFMDEIDAALDFKNVSIVAFYIYEQTKNAQFIIISLRNNMFEISDRLIGIYKTYNITKSVAVNPKEIASKGLC

SEQ ID NO: 52450 - protein, 514 aa, Homo sapiens
LEARKLKAYRTMEYMAESTDRSPGHILCCECGVPISPNPANICVACLRSKVDISQGIPKQVSISFCKQCQRYFQPPGTWIQCALESRELLALCLKKIKAPLSKVRLVDAGFVWTEPHSKRLKVKLTIQKEVMNGAILQQVFVVDYVVQSQMCGDCHRVEAKDFWKAVIQVRQKTLHKKTFYYLEQLILKYGMHQNTLRIKEIHDGLDFYYSSKQHAQKMVEFLQCTVPCRYKASQRLISQDIHSNTYNYKSTFSVEIVPICKDNVVCLSPKLAQSLGNMNQICVCIRVTSAIHLIDPNTLQVADIDGSTFWSHPFNSLCHPKQLEEFIVMECSIVQDIKRAAGAGMISKKHTLGEVWVQKTSEMNTDKQYFCRTHLGHLLNPGDLVLGFDLANCNLNDEHVNKMNSDRVPDVVLIKKSYDRTKRQRRRNWKLKELARERENMDTDDERQYQDFLEDLEEDEAIRKNVNIYRDSAIPVESDTDDEGAPRISLAEMLEDLHISQDATGEEGASMLT

SEQ ID NO: 52451 - protein, 6 aa, Homo sapiens
ILLWGI

SEQ ID NO: 52452 - protein, 111 aa, Homo sapiens
ICELCGNSYTDIKNLKKHKTKVHSGADKTLDSSAEDHTLSEQDSIQKSPLSETMDVKPSDMTLPLALPLGTEDHHMLLPVTDTQSPTSDTLLRSTVNGYSEPQLIFLQQLY

SEQ ID NO: 52453 - protein, 67 aa, Homo sapiens
IQKSPLSETMDVKPSDMTLPLALPLGTEDHHMLLPVTDTQSPTSDTLLRSTVNGYSEPQLIFLQQLY

SEQ ID NO: 52454 - protein, 62 aa, Homo sapiens
VVPPFKPNISGEFGLDNFDSQFTNEPVQLTPDDDDIVRKIDQSEFEGFEYINPLLMSAEECV

SEQ ID NO: 52455 - protein, 50 aa, Homo sapiens
IAYIRKTLALDKTEQEALEYFMKQMNDAHHGGWTTKMDWIFHTIKQHALN

SEQ ID NO: 52456 - protein, 45 aa, Homo sapiens
LDHAEADRQELQDELRQEREARQKLEMMIKELKLQILKSSKTAKE

SEQ ID NO: 52457 - protein, 44 aa, Homo sapiens
IPNLRPPDQHRLQVPRMCVSSLFRHLSGAKRSLQPLCGFCITTK

SEQ ID NO: 52458 - protein, 29 aa, Homo sapiens
ISRSWSASDPFYTNDRSILTLSTMDSSTC

SEQ ID NO: 52459 - protein, 101 aa, Homo sapiens
LPPTPGSEFIGDVTQKIGITLQPVALHRNVYASVVEDMILKATEQLVNDILRQALAVGYQTASHNRIPKEITVSNIHQAICNIPFLDFLTNKHMGILNEDQ

SEQ ID NO: 52460 - protein, 727 aa, Homo sapiens
KKAITAIFDQLLEFVTEGSHFVEATYKNPELDRIATEDDLVEMQGYKDKLSIIGEVLSRRHMKVAFFGRTSSGKSSVINAMLWDKVLPSGIGHITNCFLSVEGTDGDKAYLMTEGSDEKKSVKTVNQLAHALHMDKDLKAGCLVRVFWPKAKCALLRDDLVLVDSPGTDVTTELDSWIDKFCLDADVFVLVANSESTLMNTEKHFFHKVNERLSKPNIFILNNRWDASASEPEYMEDVRRQHMERCLHFLVEELKVVNALEAQNRIFFVSAKEVLSARKQKAQGMPESGVALAEGFHARLQEFQNFEQIFEECISQSAVKTKFEQHTIRAKQILATVKNIMDSVNLAAEDKRHYSVEEREDQIDRLDFIRNQMNLLTLDVKKKIKEVTEEVANKVSCAMTDEICRLSVLVDEFCSEFHPNPDVLKIYKSELNKHIEDGMGRNLADRCTDEVNALVLQTQQEIIENLKPLLPAGIQDKLHTLIPCKKFDLSYNLNYHKLCSDFQEDIVFRFSLGWSSLVHRFLGPRNAQRVLLGLSEPIFQLPRSLASTPTAPTTPATPDNASQEELMITLVTGLASVTSRTSMGIIIVGGVIWKTIGWKLLSVSLTMYGALYLYERLSWTTHAKERAFKQQFVNYATEKLRMIVSSTSANCSHQVKQQIATTFARLCQQVDITQKQLEEEIARLPKEIDQLEKIQNNSKLLRNKAVQLENELENFTKQFLPSSNEES

SEQ ID NO: 52461 - protein, 412 aa, Homo sapiens
IGSYTVRAGYAGEDCPKVDFPTAIGMVVERDDGSTLMEIDGDKGKQGGPTYYIDTNALRVPRENMEAISPLKNGMVEDWDSFQAILDHTYKMHVKSEASLHPVLMSEAPWNTRAKREKLTELMFEHYNIPAFFLCKTAVLTAFANGRSTGLILDSGATHTTAIPVHDGYVLQQGIVKSPLAGDFITMQCRELFQEMNIELVPPYMIASKEAVREGSPANWKRKEKLPQVTRSWHNYMCNCVIQDFQASVLQVSDSTYDEQVAAQMPTVHYEFPNGYNCDFGAERLKIPEGLFDPSNVKGLSGNTMLGVSHVVTTSVGMCDIDIRPGLYGSVIVAGGNTLIQSFTDRLNRELSQKTPPSMRLKLIANNTTVERRFSSWIGGSILASLGTFQQMWISKQEYEEGGKQCVERKCP

SEQ ID NO: 52462 - protein, 5 aa, Homo sapiens
LDPIL

SEQ ID NO: 52463 - protein, 49 aa, Homo sapiens
MGTSTMSGHYICHIKKEGRWVIYNDHKVCASERPPKDLGYMYFYRRIPS

SEQ ID NO: 52464 - protein, 113 aa, Homo sapiens
MNEYNKALEIDKQNVEALVARGALYATKGSLNKAIEDFELALENCPTHRNARKYLCQTLVERGGQLEEEEKFLNAESYYKKALALDETFKDAEDALQKLHKYMQVIPYFLLEI

SEQ ID NO: 52465 - protein, 6 aa, Homo sapiens
MKKLAF

SEQ ID NO: 52466 - protein, 45 aa, Homo sapiens
RSRVLSHPGEYCWVGSHRDPATWRSSVCFINVVKLHLKPKKETHT

SEQ ID NO: 52467 - protein, 63 aa, Homo sapiens
LTNFKGCYLTNQLPIQIFTAIFDMNTDVIILSQFMYYRLKNQKKKISEEDLRKELHFCCLHWP

SEQ ID NO: 52468 - protein, 80 aa, Homo sapiens
VEPSEVKQATSTSGPASAVADPPSTEKEIDPTSIPTAIKYQDDNSLAHPNLFIEKADAEEKWFKRLIALRQERLMGSPVA

SEQ ID NO: 52469 - protein, 726 aa, Homo sapiens
KQVNWKACRWSSSGVIPNEKIRNIGISAHIDSGKTTLTERVLYYTGRIAKMHEVKGKDGVGAVMDSMELERQRGITIQSAATYTMWKDVNINIIDTPGHVDFTIEVERALRVLDGAVLVLCAVGGVQCQTMTVNRQMKRYNVPFLTFINKLDRMGSNPARALQQMRSKLNHNAAFMQIPMGLEGNFKGIVDLIEERAIYFDGDFGQIVRYGEIPAELRAAATDHRQELIECVANSDEQLGEMFLEEKIPSISDLKLAIRRATLKRSFTPVFLGSALKNKGVQPLLDAVLEYLPNPSEVQNYAILNKEDDSKEKTKILMNSSRDNSHPFVGLAFKLEVGRFGQLTYVRSYQGELKKGDTIYNTRTRKKVRLQRLARMHADMMEDVEEVYAGDICALFGIDCASGDTFTDKANSGLSMESIHVPDPVISIAMKPSNKNDLEKFSKGIGRFTREDPTFKVYFDTENKETVISGMGELHLEIYAQRLEREYGCPCITGKPKVAFRETITAPVPFDFTHKKQSGGAGQYGKVIGVLEPLDPEDYTKLEFSDETFGSNIPKQFVPAVEKGFLDACEKGPLSGHKLSGLRFVLQDGAHHMVDSNEISFIRAGEGALKQALANATLCILEPIMAVEVVAPNEFQGQVIAGINRRHGVITGQDGVEDYFTLYADVPLNDMFGYSTELRSCTEGKGEYTMEYSRYQPCLPSTQEDVINKYLEATGQLPVKKGKAKN

SEQ ID NO: 52470 - protein, 9 aa, Homo sapiens
LCCRSPCLK

SEQ ID NO: 52471 - protein, 9 aa, Homo sapiens
RVKSCSDHY

SEQ ID NO: 52472 - protein, 61 aa, Homo sapiens
KTLRITTRKTPCGEGSKTWDRFQMRIHKRLFDLHSPSEIVKQITSISTEPGVEVEVTIADA

SEQ ID NO: 52473 - protein, 57 aa, Homo sapiens
IRVILDMEDKTLAFERGYEFLGVAFRGLPKVCLYPAVSAVYGNTEVTLVYLGKPLDG

SEQ ID NO: 52474 - protein, 120 aa, Homo sapiens
IDCFQAFLPVHCRYHRPHSEDGEASIVVNNPDLLMFCDQEFPILKCWAHSEVAAPCALENEDICQWNKMKYKSVYKNVILQVPVGLTVHTSLVCSVTLLITILCSTLILVAVFKYGHFSL

SEQ ID NO: 52475 - protein, 10 aa, Homo sapiens
MSSIWKPLCF

SEQ ID NO: 52476 - protein, 155 aa, Homo sapiens
KPRVMKEAVSTPSRMAHRDQEWYDAEIARKLQEEELLATQVDMRAAQVAQDEEIARLLMAEEKKAYKKAKEREKSSLDKRKQDPEWKPKTAKAANSKSKESDEPHHSKNERPARPPPPIMTDGEDADYTHFTNQQSSTRHFSKSESSHKGFHYKH

SEQ ID NO: 52477 - protein, 939 aa, Homo sapiens
IYHSHHPTLKLQRPQLRTSFQQFSSLTNLPLRKLKFSPIKYGYQPRRNFWPARLATRLLKLRYLILGSAVGGGYTAKKTFDQWKDMIPDLSEYKWIVPDIVWEIDEYIDFEKIRKALPSSEDLVKLAPDFDKIVESLSLLKDFFTSGHKLVSEVIGASDLLLLLGSPEETAFRATDRGSESDKHFRKVSDKEKIDQLQEELLHTQLKYQRILERLEKENKELRKLVLQKDDKGIHHRKLKKSLIDMYSEVLDVLSDYDASYNTQDHLPRVVVVGDQSAGKTSVLEMIAQARIFPRGSGEMMTRSPVKVTLSEGPHHVALFKDSSREFDLTKEEDLAALRHEIELRMRKNVKEGCTVSPETISLNVKGPGLQRMVLVDLPGVINTVTSGMAPDTKETIFSISKAYMQNPNAIILCIQDGSVDAERSIVTDLVSQMDPHGRRTIFVLTKVDLAEKNVASPSRIQQIIEGKLFPMKALGYFAVVTGKGNSSESIEAIREYEEEFFQNSKLLKTSMLKAHQVTTRNLSLAVSDCFWKMVRESVEQQADSFKATRFNLETEWKNNYPRLRELDRNELFEKAKNEILDEVISLSQVTPKHWEEILQQSLWERVSTHVIENIYLPAAQTMNSGTFNTTVDIKLKQWTDKQLPNKAVEVAWETLQEEFSRFMTEPKGKEHDDIFDKLKEAVKEESIKRHKWNDFAEDSLRVIQHNALEDRSISDKQQWDAAIYFMEEALQARLKDTENAIENMVGPDWKKRWLYWKNRTQEQCVHNETKNELEKMLKCNEEHPAYLASDEITTVRKNLESRGVEVDPSLIKDTWHQVYRRHFLKTALNHCNLCRRGFYYYQRHFVDSELECNDVVLFWRIQRMLAITANTLRQQLTNTEVRRLEKNVKEVLEDFAEDGEKKIKLLTGKRVQLAEDLKKVREIQEKLDAFIEALHQEK

SEQ ID NO: 52478 - protein, 752 aa, Homo sapiens [sequence omitted]

SEQ ID NO: 52479 - protein, 16 aa, Homo sapiens
LELAPPKQQQHQLSAV

SEQ ID NO: 52480 - protein, 21 aa, Homo sapiens
IVTSTYGWTANMERIMKAQAR

SEQ ID NO: 52481 - protein, 96 aa, Homo sapiens
KEYGARVSNLHMYSAVCADVIRRWVYPLTPEANFTDSTTQSCTHSRHNIYRGPEVSLGHGSILEENVLLGSGTVIGSNCFITNSVIGPGCHIGEHR

SEQ ID NO: 52482 - protein, 12 aa, Homo sapiens
LTLRPGSPTLQP

SEQ ID NO: 52483 - protein, 386 aa, Homo sapiens
IARTSFFHVKRSNIWLAAVTKQNVNAAMVFEFLYKMCDVMAAYFGKISEENIKNNFVLIYELLDEILDFGYPQNSETGALKTFITQQGIKSQHQTKEEQSQITSQVTGQIGWRREGIKYRRNELFLDVLESVNLLMSPQGQVLSAHVSGRVVMKSYLSGMPECKFGMNDKIVIEKQGKGTADETSKSGKQSIAIDDCTFHQCVRLSKFDSERSISFIPPDGEFELMRYRTTKDIILPFRVIPLVREVGRTKLEVKVVIKSNFKPSLLAQKIEVRIPTPLNTSGVQVICMKGKAKYKASENAIVWKIKRMAGMKESQISAEIELLPTNDKKKWARPPISMNFEVPFAPSGLKVRYLKVFEPKLNYSDHDVIKWVRYIGRSGIYETRC

SEQ ID NO: 52484 - protein, 673 aa, Homo sapiens
VDDLVEAVGELLQEVSGDSKDDAGIRAVCQRMYNTLRLAEPQSQGNSQVLLDAPIQLSKITENYDCGTKLPGLLKREQSSTVNAKKLEKAEARLKAKQEKRSEKDTLKTSNPLVLEEASASQAGSRKESRLESSGKNKSYDVRIENFDVSFGDRVLLAGADVNLAWGRRYGLVGRNGLGKTTLLKMLATRSLRVPAHISLLHVEQEVAGDDTPALQSVLESDSVREDLLRRERELTAQIAAGRAEGSEAAELAEIYAKLEEIEADKAPARASVILAGLGFTPKMQQQPTREFSGGWRMRLALARALFARPDLLLLDEPTNMLDVRAILWLENYLQTWPSTILVVSHDRNFLNAIATDIIHLHSQRLDGYRGDFETFIKSKQERLLNQQREYEAQQQYRQHIQVFIDRFRYNANRASQVQSKLKMLEKLPELKPVDKESEVVMKFPDGFEKFSPPILQLDEVDFYYDPKHVIFSRLSVSADLESRICVVGENGAGKSTMLKLLLGDLAPVRGIRHAHRNLKIGYFSQHHVEQLDLNVSAVELLARKFPGRPEEEYRHQLGRYGISGELAMRPLASLSGGQKSRVAFAQMTMPCPNFYILDEPTNHLDMETIEALGRALNNFRGGVILVSHDERFIRLVCRELWVCEGGGVTRVEGGFDQYRALLQEQFRREGFL

SEQ ID NO: 52485 - protein, 1604 aa, Homo sapiens
VAPNEMNKAPQSTGPPPAPSPGLPQPAFPPGQTAPVVFSTPQATQMNTPSQPRQHFYPSRAQPPSSAASRVQSAAPARPGPAAHVYPAGSQVMMIPSQISYPASQGAYYIPGQGRSTYVVPTQQYPVQPGAPGFYPGASPTEFGTYAGAYYPAQGVQQFPTGVAPTPVLMNQPPQIAPKRERKTIRIRDPNQGGKDITEEIMSGARTASTPTPPQTGGGLEPQANGETPQVAVIVRPDDRSQGAIIADRPGLPGPEHSPSESQPSSPSPTPSPSPVLEPGSEPNLAVLSIPGDTMTTIQMSVEESTPISRETGEPYRLSPEPTPLAEPILEVEVTLSKPVPESEFSSSPLQAPTPLASHTVEIHEPNGMVPSEDLEPEVESSPELAPPPACPSESPVPIAPTAQPEELLNGAPSPPAVDLSPVSEPEEQAKEVTASMAPPTIPSATPATAPSATSPAQEEEMEEEEEEEEGEAGEAGEAESEKGGEELLPPESTPIPANLSQNLEAAAATQVAVSVPKRRRKIKELNKKEAVGDLLDAFKEANPAVPEVENQPPAGSNPGPESEGSGVPPRPEEADETWDSKEDKIHNAENIQPGEQKYEYKSDQWKPLNLEEKKRYDREFLLGFQFIFASMQKPEGLPHISDVVLDKANKTPLRPLDPTRLQGINCGPDFTPSFANLGRTTLSTRGPPRGGPGGELPRGPAGLGPRRSQQGPRKEPRKIIATVLMTEDIKLNKAEKAWKPSSKRTAADKDRGEEDADGSKTQDLFRRVRSILNKLTPQMFQQLMKQVTQLAIDTEERLKGVIDLIFEKAISEPNFSVAYANMCRCLMALKVPTTEKPTVTVNFRKLLLNRCQKEFEKDKDDDEVFEKKQKEMDEAATAEERGRLKEELEEARDIARRRSLGNIKFIGELFKLKMLTEAIMHDCVVKLLKNHDEESLECLCRLLTTIGKDLDFEKAKPRMDQYFNQMEKIIKEKKTSSRIRFMLQDVLDLRGSNWVPRRGDQGPKTIDQIHKEAEMEEHREHIKVQQLMAKGSDKRRGGPPGPPISRGLPLVDDGGWNTVPISKGSRPIDTSRLTKITKPGSIDSNNQLFAPGGRLSWGKGSSGGSGAKPSDAASEAARPATSTLNRFSALQQAVPTESTDNRRVVQRSSLSRERGEKAGDRGDRLERSERGGDRGDRLDRARTPATKRSFSKEVEERSRERPSQPEGLRKAASLTEDRDRGRDAVKREAALPPVSPLKAALSEEELEKKSKAIIEEYLHLNDMKEAVQCVQELASPSLLFIFVRHGVESTLERSAIAREHMGQLLHQLLCAGHLSTAQYYQGLYEILELAEDMEIDIPHVWLYLAELVTPILQEGGVPMGELFREITKPLRPLGKAASLLLEILGLLCKSMGPKKVGTLWREAGLSWKEFLPEGQDIGAFVAEQKVEYTLGEESEAPGQRALPSEELNRQLEKLLKEGSSNQRVFDWIEANLSEQQIVSNTLVRALMTAVCYSAIIFETPLRVDVAVLKARAKLLQKYLCDEQKELQALYALQALVVTLEQPPNLLRMFFDALYDEDVVKEDAFYSWESSKDPAEQQGKGVALKSVTAFFKWLREAEEESDHN

SEQ ID NO: 52486 - protein, 1535 aa, Homo sapiens
VQSAAPARPGPAAHVYPAGSQVMMIPSQISYPASQGAYYIPGQGRSTYVVPTQQYPVQPGAPGFYPGASPTEFGTYAGAYYPAQGVQQFPTGVAPTPVLMNQPPQIAPKRERKTIRIRDPNQGGKDITEEIMSGARTASTPTPPQTGGGLEPQANGETPQVAVIVRPDDRSQGAIIADRPGLPGPEHSPSESQPSSPSPTPSPSPVLEPGSEPNLAVLSIPGDTMTTIQMSVEESTPISRETGEPYRLSPEPTPLAEPILEVEVTLSKPVPESEFSSSPLQAPTPLASHTVEIHEPNGMVPSEDLEPEVESSPELAPPPACPSESPVPIAPTAQPEELLNGAPSPPAVDLSPVSEPEEQAKEVTASMAPPTIPSATPATAPSATSPAQEEEMEEEEEEEEGEAGEAGEAESEKGGEELLPPESTPIPANLSQNLEAAAATQVAVSVPKRRRKIKELNKKEAVGDLLDAFKEANPAVPEVENQPPAGSNPGPESEGSGVPPRPEEADETWDSKEDKIHNAENIQPGEQKYEYKSDQWKPLNLEEKKRYDREFLLGFQFIFASMQKPEGLPHISDVVLDKANKTPLRPLDPTRLQGINCGPDFTPSFANLGRTTLSTRGPPRGGPGGELPRGPQAGLGPRRSQQGPRKEPRKIIATVLMTEDIKLNKAEKAWKPSSKRTAADKDRGEEDADGSKTQDLFRRVRSILNKLTPQMFQQLMKQVTQLAIDTEERLKGVIDLIFEKAISEPNFSVAYANMCRCLMALKVPTTEKPTVTVNFRKLLLNRCQKEFEKDKDDDEVFEKKQKEMDEAATAEERGRLKEELEEARDIARRRSLGNIKFIGELFKLKMLTEAIMHDCVVKLLKNHDEESLECLCRLLTTIGKDLDFEKAKPRMDQYFNQMEKIIKEKKTSSRIRFMLQDVLDLRGSNWVPRRGDQGPKTIDQIHKEAEMEEHREHIKVQQLMAKGSDKRRGGPPGPPISRGLPLVDDGGWNTVPISKGSRPIDTSRLTKITKPGSIDSNNQLFAPGGRLSWGKGSSGGSGAKPSDAASEAARPATSTLNRFSALQQAVPTESTDNRRVVQRSSLSRERGEKAGDRGDRLERSERGGDRGDRLDRARTPATKRSFSKEVEERSRERPSQPEGLRKAASLTEDRDRGRDAVKREAALPPVSPLKAALSEEELEKKSKAIIEEYLHLNDMKEAVQCVQELASPSLLFIFVRHGVESTLERSAIAREHMGQLLHQLLCAGHLSTAQYYQGLYEILELAEDMEIDIPHVWLYLAELVTPILQEGGVPMGELFREITKPLRPLGKAASLLLEILGLLCKSMGPKKVGTLWREAGLSWKEFLPEGQDIGAFVAEQKVEYTLGEESEAPGQRALPSEELNRQLEKLLKEGSSNQRVFDWIEANLSEQQIVSNTLVRALMTAVCYSAIIFETPLRVDVAVLKARAKLLQKYLCDEQKELQALYALQALVVTLEQPPNLLRMFFDALYDEDVVKEDAFYSWESSKDPAEQQGKGVALKSVTAFFKWLREAEEESDHN

SEQ ID NO: 52487 - protein, 71 aa, Homo sapiens
IRFPDRRDNPKPNVSEALRSAGLPSHSSVISQHSKGYITRFANVSGSTRHCRNNKNITSEIQKQTCVSRRN

SEQ ID NO: 52488 - protein, 347 aa, Homo sapiens
VAVLCLILLLALSGNACVLLALRTTRQKHSRLFFFMKHLSIADLVVAVFQVLPQLLWDITFRFYGPDLLCRLVKYLQVVGMFASTYLLLLMSLDRCLAICQPLRSLRRRTDRLAVLATWLGCLVASAPQVHIFSLREVADGVFDCWAVFIQPWGPKAYITWITLAVYIVPVIVLAACYGLISFKIWQNLRLKTAAAAAAEAPEGAAAGDGGRVALARVSSVKLISKAKIRTVKMTFIIVLAFIVCWTPFFFVQMWSVWDANAPKEASAFIIVMLLASLNSCCNPWIYMLFTGHLFHELVQRFLCCSASYLKGRRLGETSASKKSNSSSFVLSHRSSSQRSCSQPSTA

SEQ ID NO: 52489 - protein, 49 aa, Homo sapiens
IRDLLEEEEAWEASHKNDLQDTEISPRQNRRTRAAESAEIEPRNKRNRN

SEQ ID NO: 52490 - protein, 219 aa, Homo sapiens
IEDLLNWNNLYIAGRLQKPVKIISVNEDVTLRSALDRNLKSAVTAAFLMLPESFSEEDLFIEIAGLSYSGDFRMVVGEDKTKVLNIVKPNIAHFRELYGSILQENPQVVYKSQQGWLEIDKSPEGQFTQLMTLPKTLQQQINHIMDPPGKNRDVEETLFQVAHDPDCGDVVRLGLSAIVRPSSIRQSTKGIFTAGLKKSVIYSSLKLHKMWKGWLRKTS

SEQ ID NO: 52491 - protein, 396 aa, Homo sapiens
INFDTSLPTSHTYLGADMEEFHGRTLHDDDSCQVIPVLPQVMMILIPGQTLPLQLFHPQEVSMVRNLIQKDRTFAVLAYSNVQEREAQFGTTAEIYAYREEQDFGIEIVKVKAIGRQRFKVLELRTQSDGIQQAKVQILPECVLPSTMSAVQLESLNKCQIFPSKPVSREDQCSYKWWQKYQKRKFHCANLTSWPRWLYSLYDAETLMDRIKKQLREWDENLKDDSLPSNPIDFSYRVAACLPIDDVLRIQLLKIGSAIQRLRCELDIMNKCTSLCCKQCQETEITTKNEIFSLSLCGPMAAYVNPHGYVHETLTVYKACNLNLIGRPSTEHSWFPGYAWTVAQCKICASHIGWKFTATKKDMSPQKFWGLTRSALLPTIPDTEDEISPDKVILCL

SEQ ID NO: 52492 - protein, 248 aa, Homo sapiens [sequence omitted]

SEQ ID NO: 52493 - protein, 9 aa, Homo sapiens
IPTCLKILQ

SEQ ID NO: 52494 - protein, 7 aa, Homo sapiens
LFPFEQL

SEQ ID NO: 52495 - protein, 150 aa, Homo sapiens
KDSVKVMTVNYNTHGELGEGARKFVFFNIPQIQYKNPWVQIMMFKNMTPSPFLRFYLDSGEQVLVDVETKSNKEIMEHIRKILGKNEETLREEEEEKKQLSHPANFGPRKYCLRECICEVEGQVPCPSLVPLPKEMRGKYKAALKADAQD

SEQ ID NO: 52496 - protein, 10 aa, Homo sapiens
KPLPHHLCAA

SEQ ID NO: 52497 - protein, 440 aa, Homo sapiens
ILPPARDEEEEEEEGMEQGLEEEEEVDPRIQGELEKLNQSTDDINRRETELEDARQKFRSVLVEATVKLDELVKKIGKAVEDSKPYWEARRVARQAQLEAQKATQDFQRATEVLRAAKETISLAEQRLLEDDKRQFDSAWQEMLNHATQRVMEAEQTKTRSELVHKETAARYNAAMGRMRQLEKKLKRAINKSKPYFELKAKYYVQLEQLKKTVDDLQAKLTLAKGEYKMALKNLEMISDEIHERRRSSAMGPRGCGVGAEGSSTSVEDLPGSKPEPDAISVASEAFEDDSCSNFVSEDDSETQSVSSFSSGPTSPSEMPDQFPAVVRPGSLDLPSPVSLSEFGMMFPVLGPRSECSGASSPECEVERGDRAEGAENKTSDKANNNRGLSSSSGSGGSSKSQSSTSPEGQALENRMKQLSLQCSKGRDGIIADIKMVQIG

SEQ ID NO: 52498 - protein, 55 aa, Homo sapiens
ISDEMAKTAQWKALSMNTENAKVTRSNMSPDKPVSVKISFEDEPRKKYVDAETSL

SEQ ID NO: 52499 - protein, 47 aa, Homo sapiens
LPRLVPPSRTSRAPAESEEMGLPPRRARSSSLRCGSGGVFEETGSPW

SEQ ID NO: 52500 - protein, 54 aa, Homo sapiens
INRYTNTSKTVSFEALPIMRNEPSSYCSFNNIGGEQEYLYTDVDELNDSDSETY

SEQ ID NO: 52501 - protein, 34 aa, Homo sapiens
LMGPASASSSNPSSSPDDDSSKDSGFTIVSPLDI

SEQ ID NO: 52502 - protein, 193 aa, Homo sapiens
KMGKGCKVVVCGLLSVGKTAILEQLLYGNHTIGMEDCETMEDVYMASVETDRGVKEQLHLYDTRGLQEGVELPKHYFSFADGFVLVYSVNNLESFQRVELLKKEIDKFKDKKEVAIVVLGNKIDLSEQRQVDAEVAQQWAKSEKVRLWEVTVTDRKTLIEPFTLLASKLSQPQSKSSFPLPGRKNKGNSNSEN

SEQ ID NO: 52503 - protein, 1604 aa, Homo sapiens
VTLFDQNNAAKKEESETANKNDSSKKLSVERVYQKKTQLEHILLRPDTYIGSVEPLTQFMWVYDEDVGMNCREVTFVPGLYKIFDEILVNAADNKQRDKNMTCIKVSIDPESNIISIWNNGKGIPVVEHKVEKVYVPALIFGQLLTSSNYDDDEKKVTGGRNGYGAKLCNIFSTKFTVETACKEYKHSFKQTWMNNMMKTSEAKIKHFDGEDYTCITFQPDLSKFKMEKLDKDIVALMTRRAYDLAGSCRGVKVMFNGKKLPVNGFRSYVDLYVKDKLDETGVALKVIHELANERWDVCLTLSEKGFQQISFVNSIATTKGGRHVDYVVDQVVGKLIEVVKKKNKAGVSVKPFQVKNHIWVFINCLIENPTFDSQTKENMTLQPKSFGSKCQLSEKFFKAASNCGIVESILNWVKFKAQTQLNKKCSSVKYSKIKGIPKLDDANDAGGKHSLECTLILTEGDSAKSLAVSGLGVIGRDRYGVFPLRGKILNVREASHKQIMENAEINNIIKIVGLQYKKSYDDAESLKTLRYGKIMIMTDQDQDGSHIKGLLINFIHHNWPSLLKHGFLEEFITPIVKASKNKQELSFYSIPEFDEWKKHIENQKAWKIKYYKGLGTSTAKEAKEYFADMERHRILFRYAGPEDDAAITLAFSKKKIDDRKEWLTNFMEDRRQRRLHGLPEQFLYGTATKHLTYNDFINKELILFSNSDNERSIPSLVDGFKPGQRKVLFTCFKRNDKREVKVAQLAGSVAEMSAYHHGEQALMMTIVNLAQNFVGSNNINLLQPIGQFGTRLHGGKDAASPRYIFTMLSTLARLLFPAVDDNLLKFLYDDNQRVEPEWYIPIIPMVLINGAEGIGTGWACKLPNYDAREIVNNVRRMLDGLDPHPMLPNYKNFKGTIQELGQNQYAVSGEIFVVDRNTVEITELPVRTWTQVYKEQVLEPMLNGTDKTPALISDYKEYHTDTTVKFVVKMTEEKLAQAEAAGLHKVFKLQTTLTCNSMVLFDHMGCLKKYETVQDILKEFFDLRLSYYGLRKEWLVGMLGAESTKLNNQARFILEKIQGKITIENRSKKDLIQMLVQRGYESDPVKAWKEAQEKAAEEDETQNQHDDSSSDSGTPSGPDFNYILNMSLWSLTKEKVEELIKQRDAKGREVNDLKRKSPSDLWKEDLAAFVEELDKVESQEREDVLAGMSGKAIKGKVGKPKVKKLQLEETMPSPYGRRIIPEITAMKADASKKLLKKKKGDLDTAAVKVEFDEEFSGAPVEGAGEEALTPSVPINKGPKPKREKKEPGTRVRKTPTSSGKPSAKKVKKRNPWSDDESKSESDLEETEPVVIPRDSLLRRAAAERPKYTFDFSEEEDDDADDDDDDNNDLEELKVKASPITNDGEDEFVPSDGLDKDEYTFSPGKSKATPEKSLHDKKSQDFGNLFSFPSYSQKSEDDSAKFDSNEEDSASVFSPSFGLKQTDKVPSKTVAAKKGKPSSDTVPKPKRAPKQKKVVEAVNSDSDSEFGIPKKTTTPKGKGRGAKKRKASGSENEGDYNPGRKTSKTTSKKPKKTSFDQDSDVDIFPSDFPTEPPSLPRTGRARKEVKYFAESDEEEDDVDFAMFN

SEQ ID NO: 52504 - protein, 178 aa, Homo sapiens
VYSPTTEEDPGPARGPRSGLAAYFFMGRLPLLRRVLKGLQLLLSLLAFICEEVVSQCTLCGGLYFFEFVSCSAFLLSLLILIVYCTPFYERVDTTKVKSSDFYITLGTGCVFLLASIIFVSTHDRTSAEIAAIVFGFIASFMFLLDFITMLYEKRQESQLRKPENTTRAEALTEPLNA

SEQ ID NO: 52505 - protein, 55 aa, Homo sapiens
KPEPKPKKAPAKKGEKIPKGKKGKADAGEEGNNPAENGDAKTDQAQKAEGAGGAK

SEQ ID NO: 52506 - protein, 29 aa, Homo sapiens
LISILAQLNPLFGPQLTNEAVWYLKHHWP

SEQ ID NO: 52507 - protein, 178 aa, Homo sapiens
ICSCQCPAAMAFCFLETLWWEFTASYDTTCIGLASRPYAFLEFDSIIQKVKWHFNYVSSSQMECSLEKIQEELKLQPPAVLTLEDTDVANGVMNGHTPMHLEPAPNFRMEPVTALGILSLILNIMCAALNLIRGVHLAEHSLQVAHEEIGNILAFLVPFVACIFQDPRSWFCWLDQTS

SEQ ID NO: 52508 - protein, 82 aa, Homo sapiens
ITNNGFNPWWDTEFAFEVVVPDLALIRFLVEDYDASSKNDFIGQSTIPLNSLKQGYRHVHLMSKNGDQHPSATLFVKISLQD

SEQ ID NO: 52509 - protein, 52 aa, Homo sapiens
IFVFGFRTHFGGGKTTGFGMIYDSLDYAKKNEPKHRLARLGLYEKKNTSRKQ

SEQ ID NO: 52510 - protein, 95 aa, Homo sapiens
ITMSTDTGVSLPSYEEDQGSKLIRKAKEAPFVPVGIAGFAAIVAYGLYKLKSRGNTKMSIHLIHMRVAAQGFVVGAMTVGMGYSMYREFWAKPKP

SEQ ID NO: 52511 - protein, 663 aa, Homo sapiens
LLLLGPTRGLRNATQRMFEIDYSRDSFLKDGQPFRYISGSIHYSRVPRFYWKDRLLKMKMAGLNAIQTYVPWNFHEPWPGQYQFSEDHDVEYFLRLAHELGLLVILRPGPYICAEWEMGGLPAWLLEKESILLRSSDPDYLAAVDKWLGVLLPKMKPLLYQNGGPVITVQVENEYGSYFACDFDYLRFLQKRFRHHLGDDVVLFTTDGAHKTFLKCGALQGLYTTVDFGTGSNITDAFLSQRKCEPKGPLINSEFYTGWLDHWGQPHSTIKTEAVASSLYDILARGASVNLYMFIGGTNFAYWNGANSPYAAQPTSYDYDAPLSEAGDLTEKYFALRNIIQKFEKVPEGPIPPSTPKFAYGKVTLEKLKTVGAALDILCPSGPIKSLYPLTFIQVKQHYGFVLYRTTLPQDCSNPAPLSSPLNGVHDRAYVAVDGIPQGVLERNNVITLNITGKAGATLDLLVENMGRVNYGAYINDFKGLVSNLTLSSNILTDWTIFPLDTEDAVCSHLGGWGHRDSGHHDEAWAHNSSNYTLPAFYMGNFSIPSGIPDLPQDTFIQFPGWTKGQVWINGFNLGRYWPARGPQLTLFVPQHILMTSAPNTITVLELEWAPCSSDDPELCAVTFVDRPVIGSSVTYDHPSKPVEKRLMPPPPQKNKDSWLDHV

SEQ ID NO: 52512 - protein, 31 aa, Homo sapiens
VYVSPGTAYYGIPMRLGSRAEITELILQRSP

SEQ ID NO: 52513 - protein, 6 aa, Homo sapiens
IHIILK

SEQ ID NO: 52514 - protein, 29 aa, Homo sapiens
IQEIIEQLDVTTSEYEKEKLNDWQNFQMG

SEQ ID NO: 52515 - protein, 91 aa, Homo sapiens
KGDLSVEEVMKIKAEIKAAKADEEPTPADGRIIYRKPVKHPSDEKYSGLTASSKKKKPNEDEVNQDSVKKNSQKQIKNSSLLSFDNEDENE

SEQ ID NO: 52516 - protein, 658 aa, Homo sapiens
VTLSALDTSESSFTPLVVIELAQDVKEETKEWLKNRIIAKKKDGGAQLLFRPLLNKYEQETLENQNLYLVGASKIRMLLGAEAVGLVKECNDNTMRAFTYRTRQNFKGFDDNNDDFLTMAECQFIIKHELENLRAKDEKMIPGYPQAKLYPGKSLLRRLLTSGIVIQVFPLHDSEALKKLEDTWYTRFALKYQPIDSIRGYFGETIALYFGFLEYFTFALIPMAVIGLPYYLFVWEDYDKYVIFASFNLIWSTVILELWKRGCANMTYRWGTLLMKRKFEEPRPGFHGVLGINSITGKEEPLYPSYKRQLRIYLVSLPFVCLCLYFSLYVMMIYFDMEVWALGLHENSGSEWTSVLLYVPSIIYAIVIEIMNRLYRYAAEFLTSWENHRLESAYQNHLILKVLVFNFLNCFASLFYIAFVLKDMKLLRQSLATLLITSQILNQIMESFLPYWLQRKHGVRVKRKVQALKADIDATLYEQVILEKEMGTYLGTFDDYLELFLQFGYVSLFSCVYPLAAAFAVLNNFTEVNSDALKMCRVFKRPFSEPSANIGVWQLAFETMSVISVVTNCALIGMSPQVNAVFPESKADLILIVVAVEHALLALKFILAFAIPDKPRHIQMKLARLEFESLEALKQQQMKLVTENLKEEPMESGKEKAT

SEQ ID NO: 52517 - protein, 7 aa, Homo sapiens
KRPNTFF

SEQ ID NO: 52518 - protein, 61 aa, Homo sapiens
KDFIKAQDLSNLENTVAALKSEFQKTLNDKTENQKSLEENLATAKHDLLRVQEQLHMAEKI

SEQ ID NO: 52519 - protein, 66 aa, Homo sapiens
KSLEENLATAKHDLLRVQEQLHMAEKELEKKFQQTAAYRNMKEILTKKNDQIKDLRKRLAQYEPED

SEQ ID NO: 52520 - protein, 50 aa, Homo sapiens
KENIQGQLKVRTPGIYMLIFDNTFSRFVSKKVFYHLTVDRPVIYDGSDFL

SEQ ID NO: 52521 - protein, 702 aa, Homo sapiens
LFLGALGLCLAGRRRSVQWCAVSQPEATKCFQWQRNMRKVRGPPVSCIKRDSPIQCIQAIAENRADAVTLDGGFIYEAGLAPYKLRPVAAEVYGTERQPRTHYYAVAVVKKGGSFQLNELQGLKSCHTGLRRTAGWNVPIGTLRPFLNWTGPPEPIEAAVARFFSASCVPGADKGQFPNLCRLCAGTGENKCAFSSQEPYFSYSGAFKCLRDGAGDVAFIRESTVFEDLSDEAERDEYELLCPDNTRKPVDKFKDCHLARVPSHAVVARSVNGKEDAIWNLLRQAQEKFGKDKSPKFQLFGSPSGQKDLLFKDSAIGFSRVPPRIDSGLYLGSGYFTAIQNLRKSEEEVAARRARVVWCAVGEQELRKCNQWSGLSEGSVTCSSASTTEDCIALVLKGEADAMSLDGGYVYTAGKCGLVPVLAENYKSQQSSDPDPNCVDRPVEGYLAVAVVRRSDTSLTWNSVKGKKSCHTAVDRTAGWNIPMGLLFNQTGSCKFDEYFSQSCAPGSDPRSNLCALCIGDEQGENKCVPNSNERYYGYTGAFRCLAENAGDVAFVKDVTVLQNTDGNNNEAWAKDLKLADFALLCLDGKRKPVTEARSCHLAMAPNHAVVSRMDKVERLKQVLLHQQAKFGRNGSDCPDKFCLFQSETKNLLFNDNTECLARLHGKTTYEKYLGPQYVAGITNLKKCSTSPLLEACEFLRK

SEQ ID NO: 52522 - protein, 57 aa, Homo sapiens [sequence omitted]

SEQ ID NO: 52523 - protein, 73 aa, Homo sapiens
KPEPVIEEVDLANLAPRKPDWDLKRDVAKKLEKLKKRTQRAIAELIRERLKGQEDSLASAVDAATEQKTCDSD

SEQ ID NO: 52524 - protein, 18 aa, Homo sapiens
VTPTRVMLLSPDPAGPAR

SEQ ID NO: 52525 - protein, 28 aa, Homo sapiens
RNTIYSTLVTCVTFVATLPVLYMLFKAS

SEQ ID NO: 52526 - protein, 226 aa, Homo sapiens
LLLLLLTPPPGARGEVCMASRGLSLFPESCPDFCCGTCDDQYCCSDVLKKFVWSEERCAVPEASVPASVEPVEQLGSALRFRPGYNDPMSGFGATLAVGLTIFVLSVVTIIICFTCSCCCLYKTCRRPRPVVTTTTSTTVVHAPYPQPPSVPPSYPGPSYQGYHTMPPQPGMPAAPYPMQYPPPYPAQPMGPPAYHETLAGGAAAPYPASQPPYNPAYMDAPKAAL

SEQ ID NO: 52527 - protein, 75 aa, Homo sapiens
ICARRMSPAFRAMDVEPRAKGVLLEPFVHQVGGHSCVLRFNETTLCKPLVPREHQFYETLPAEMRKFTPQYKGVS

SEQ ID NO: 52528 - protein, 431 aa, Homo sapiens
ICARRMSPAFRAMDVEPRAKGVLLEPFVHQVGGHSCVLRFNETTLCKPLVPREHQFYETLPAEMRKFTPQYKGVVSVRFEEDEDRNLCLIAYPLKGDHGIVDIVDNSDCEPKSKLLRWTTNKKHHVLETEKTPKDWVRQHRKEEKMKSHKLEEEFEWLKKSEVLYYTVEKKGNISSQLKHYNPWSMKCHQQQLQRMKENAKHRNQYKFILLENLTSRYEVPCVLDLKMGTRQHGDDASEEKAANQIRKCQQSTSAVIGVRVCGMQVYQAGSGQLMFMNKYHGRKLSVQGFKEALFQFFHNGRYLRRELLGPVLKKLTELKAVLERQESYRFYSSSLLVIYDGKERPEVVLDSDAEDLEDLSEESADESAGAYAYKPIGASSVDVRMIDFAHTTCRLYGEDTVVHEGQDAGYIFGLQSLIDIVTEISEESGE

SEQ ID NO: 52529 - protein, 287 aa, Homo sapiens
VIHPKTDEQRCRLQEACKDILLFKNLDQEQLSQVLDAMFERIVKADEHVIDQGDDGDNFYVIERGTYDILVTKDNQTRSVGQYDNRGSFGELALMYNTPRAATIVATSEGSLWGLDRVTFRRIIVKNNAKKRKMFESFIESVPLLKSLEVSERMKIVDVIGEKIYKDGERIITQGEKADSFYIIESGEVSILIRSRTKSNKDGGNQEVEIARCHKGQYFGELALVTNKPRAASAYAVGDVKCLVMDVQAFERLLGPCMDIMKRNISHYEEQLVKMFGSSVDLGNLGQ

SEQ ID NO: 52530 - protein, 39 aa, Homo sapiens
IWYSVQPISREQMGQMLTRILVIREIQEAIAVANASTMH

SEQ ID NO: 52531 - protein, 23 aa, Homo sapiens
LAKSQRSAPAGVSLAWSPHPPGP

SEQ ID NO: 52532 - protein, 56 aa, Homo sapiens
IDHLQTHFRCQCYLGWSGEQCQWDHRQAAGGASEAWAGSHLTSLLALAALAFTWTL

SEQ ID NO: 52533 - protein, 142 aa, Homo sapiens
RRRTSFYLPKDAVKHLHVLSRTRAREVIEALLRKFLVVDDPRKFALFERAERHGQVYLRKLLDDEQPLRLRLLAGPSDKALSFVLKENDSGEVNWDAFSMPELHNFLRILQREEEEHLRQILQKYSYCRQKIQEALHACPLG

SEQ ID NO: 52534 - protein, 340 aa, Homo sapiens
LGAILASASVVVKALCAAVLFLYLLSFAVDTGCLAVTPGYLFPPNFWIWTLATHGLMEQHVWDVAISLTTVVVAGRLLEPLWGALELLIFFSVVNVSVGLLGAFAYLLTYMASFNLVYLFTVRIHGALGFLGGVLVALKQTMGDCVVLRVPQVRVSVMPMLLLALLLLLRLATLLQSPALASYGFGLLSSWVYLRFYQRHSRGRGDMADHFAFATFFPEILQPVVGLLANLVHSLLVKVKICQKTVKRYDVGAPSSITISLPGTDPQDAERRRQLALKALNERLKRVEDQSIWPSMDDDEEESGAKVDSPLPSDKAPTPPGKGAAPESSLITFEAAPPTL

SEQ ID NO: 52535 - protein, 22 aa, Homo sapiens
LGDTDSSDNSDLEDDIILSLNE

SEQ ID NO: 52536 - protein, 146 aa, Homo sapiens
IHLINEEHMVSGADDGSVALWGLSKKRPLALQREAHGLRGEPGLEQPFWISSVAALLNTDLVATGSHSSCVRLWQCGEGFRQLDLLCDIPLVGFINSLKFSSSGDFLVAGVGQEHRLGRWWRIKEARNSVCIIPLRRVPVPPAAGS

SEQ ID NO: 52537 - protein, 38 aa, Homo sapiens
LALPPASPGPPPGLAAYTAKMAAANGSKKAERQKFSPY

SEQ ID NO: 52538 - protein, 155 aa, Homo sapiens
KNHTTHNQSRKWHRNGIKKPRSQRYESLKGVDPKFLRNMRFAKKHNKKGLKKMQANNAKAMSARAEAIKALVKPKEVKPKIPKGVSRKLDRLAYIAHPKLGKRARARIAKGLRLCRPKAKAKAKAKDQTKAQAAAPASVPAQAPKRTQAPTKASE

SEQ ID NO: 52539 - protein, 122 aa, Homo sapiens
ISDHWSQNLSQFFPEAISFIDEARSKKCGVLVHCLAGISRSVTVTVAYLMQKMNLSLNDAYDFVKRKKSNISPNFNFMGQLLDFERTLGLSSPCDNHASSEQLYFSTPTNHNLFPLNTLEST

SEQ ID NO: 52540 - protein, 117 aa, Homo sapiens
LSLGMGAVAVLDFIHYCRATVCWELKGNMVVLVHDSGDAEDEENDILLNGLSHQSHLILRAEGLATGFCRDVHGQLRILWRRPSQPAVHRDQSFTYQYKIQDKSVSFFAKGMSPAVL

SEQ ID NO: 52541 - protein, 50 aa, Homo sapiens
MPGNILGPRVPLTAPNGMYPPPPQQQPPPPPPADGVPPPPAPGPPASAAP

SEQ ID NO: 52542 - protein, 36 aa, Homo sapiens
TALPGALLAPFCPSSVSAAAGSCSGAEWLTSVLQMH

SEQ ID NO: 52543 - protein, 92 aa, Homo sapiens
LDRRSEMRLKHLDMVLPEVASSCGPSTSPSNTSPEAGPSSQPKVDVRMIDFAHSTFKGFRDDPTVHDGPDRGYVFGLENLISIMEQMRDENQ

SEQ ID NO: 52544 - protein, 42 aa, Homo sapiens
LANLVEQNISVRRRQGVSIGRLHKQRKPDRRKRSRPYKAKRQ

SEQ ID NO: 52545 - protein, 101 aa, Homo sapiens
RQVLAAWMKERQELRCITKALFNAQFGSIFRTFHNPTYFSRRLVRFSDLYMASLSCLLNYRVDFTFYPRRTPLQHEAPLWMDQLCTGCMKTPFLGDMAHIR

SEQ ID NO: 52546 - protein, 45 aa, Homo sapiens
LLNYRVDFTFYPRRTPLQHEAPLWMDQLCTGCMKTPFLGDMAHIR

SEQ ID NO: 52547 - protein, 28 aa, Homo sapiens
MADALWRLRDLMLRDTLNIRQAYNLENV

SEQ ID NO: 52548 - protein, 532 aa, Homo sapiens
VVTPHTMNLLKQHLEITGGQVRTRFPPEPNGILHIGHAKAINFNFGYAKANNGICFLRFDDTNPEKEEAKFFTAICDMVAWLGYTPYKVTYASDYFDQLYAWAVELIRRGLAYVCHQRGEELKGHNTLPSPWRDRPMEESLLLFEAMRKGKFSEGEATLRMKLVMEDGKMDPVAYRVKYTPHHRTGDKWCIYPTYDYTHCLCDSIEHITHSLCTKEFQARRSSYFWLCNALDVYCPVQWEYGRLNLHYAVVSKRKILQLVATGAVRDWDDPRLFTLTALRRRGFPPEAINNFCARVGVTVAQTTMEPHLLEACVRDVLNDTAPRAMAVLESLRVIITNFPAAKSLDIQVPNFPADETKGFHQVPFAPIVFIERTDFKEEPEPGFKRLAWGQPVGLRHTGYVIELQHVVKGPSGCVESLEVTCRRADAGEKPKAFIHWVSQPLMCEVRLYERLFQHKNPEDPTEVPGGFLSDLNLASLHVVDAALVDCSVALAKPFDKFQFERLGYFSVDPDSHQGKLVFNRTVTLKEDPGKV

SEQ ID NO: 52549 - protein, 9 aa, Homo sapiens
RKMAMESPL

SEQ ID NO: 52550 - protein, 21 aa, Homo sapiens
VKQNNRCPLCQQDWVAQRIGK

SEQ ID NO: 52551 - protein, 178 aa, Homo sapiens
INLLVKSFIKWCNSGSQEEGYSQYQRMLSTLSQCEFSMGKTLLVYDMNLREMENYEKIYKEIECSIAGAHEKIAECKKQILQAKRIRKNRQEYDALAKVIQHHPDRHETLKELEALGKELEHLSHIKESVEDKLELRRKQFHVLLSTIHELQQTLENDEKLSEVEEAQEASMETDPKP

SEQ ID NO: 52552 - protein, 340 aa, Homo sapiens
MAPYYEALCKSLDWQIDVDLLNKMKKANEDELKRLDEELEDAEKNLGESEIRDAMMAKAEYLCRIGDKEGALTAFRKTYDKTVALGHRLDIVFYLLRIGLFYMDNDLITRNTEKAKSLIEEGGDWDRRNRLKVYQGLYCVAIRDFKQAAELFLDTVSTFTSYELMDYKTFVTYTVYVSMIALERPDLREKVIKGAEILEVLHSLPAVRQYLFSLYECRYSVFFQSLAVVEQEMKKDWLFAPHYRYYVREMRIHAYSQLLESYRSLTLGYMAEAFGVGVEFIDQELSRFIAAGRLHCKIDKVNEIVETNRPDSKNWQYQETIKKGDLLLNRVQKLSRVINM

SEQ ID NO: 52553 - protein, 135 aa, Homo sapiens
VMLALSSSFLVLSYLLTRWCGSVGFILANCFNMGIRITQSLCFIHRYYRRSPHRPLAGLHLSPVLLGTFALSGGVTAVSEVFLCCEQGWPARLAHIAVGAFCLGATLGTAFLTETKLIHFLRTQLGVPRRTDKMT

SEQ ID NO: 52554 - protein, 24 aa, Homo sapiens
LGPAIKLCHHIERIKFAFYEQFAN

SEQ ID NO: 52555 - protein, 128 aa, Homo sapiens
RKTAISLFEGKALGLDKAILHSIDCCSSDDTKKKMYSSILVVGGGLMFHKAQEFLQHRILNKMPPSFRRIIENVDVITRPKDMDPRLIAWKGGAVLACLDTTQELWIYQREWQRFGVRMLRERAAFVW

SEQ ID NO: 52556 - protein, 82 aa, Homo sapiens
LDSRSQSPWRLSLITDFFWGIAEFVVLFFKTLLQQDVKKRRSYGNSSDSRYDDGRGPPGNPPRRMGRINHLRGPSPPPMAGG

SEQ ID NO: 52557 - protein, 194 aa, Homo sapiens
KRRKFLETVELQISLKNYDPQKDKCFSGTVRLKSTPRPKLCVCVLGDQQHCDEAKAVDIPHMDIEALKKLKKNKKLVKKLAKKYDAFLASESLIKQIPRILGPGLNKAGKFPSLLTHNENMVAKVGEVKSTIKFQMKKVLCLAVAVGHVKMTADELVYNIHLAVNFLVSLLKKNWQNVRALYIESTMGKPQRLY

SEQ ID NO: 52558 - protein, 90 aa, Homo sapiens
KLKELVPSIPQNKNVSKMEILQHVIDYILDLQITLDLHPTIVSLHHQRPGQNQASRMPLTTLNTDISILSLQASEFPSELMSNDRKALCG

SEQ ID NO: 52559 - protein, 1808 aa, Homo sapiens
LEGNRPKTHRMELTSRERGRGQPLPWELRLGLLLSVLAATLAQAPAPDVPGCSRGSCYPATGDLLVGRADRLTASSTCGLNGPQPYCIVSHLQDEKKCFLCDSRRPFSARDNPHSHRIQNVVTSFAPQRRAAWWQSENGIPAVTIQLDLEAEFHFTHLIMTFKTFRPAAMLVERSADFGRTWHVYRYFSYDCGADFPGVPLAPPRHWDDVVCESRYSEIEPSTEGEVIYRVLDPAIPIPDPYSSRIQNLLKITNLRVNLTRLHTLGDNLLDPRREIREKYYYALYELVVRGNCFCYGHASECAPAPGAPAHAEGMVHGACICKHNTRGLNCEQCQDFYRDLPWRPAEDGHSHACRKCECHGHTHSCHFDMAVYLASGNVSGGVCDGCQHNTAGRHCELCRPFFYRDPTKDLRDPAVCRSCDCDPMGSQDGGRCDSHDDPALGLVSGQCRCKEHVVGTRCQQCRDGFFGLSISDRLGCRRCQCNARGTVPGSTPCDPNSGSCYCKRLVTGRGCDRCLPGHWGLSHDLLGCRPCDCDVGGALDPQCDEGTGQCHCRQHMVGRRCEQVQPGYFRPFLDHLIWEAEDTRGQVLDVVERLVTPGETPSWTGSGFVRLQEGQTLEFLVASVPKAMDYDLLLRLEPQVPEQWAELELIVQRPGPVPAHSLCGHLVPKDDRIQGTLQPHARYLIFPNPVCLEPGISYKLHLKLVRTGGSAQPETPYSGPGLLIDSLVLLPRVLVLEMFSGGDAAALERQATFERYQCHEEGLVPSKTSPSEACAPLLISLSTLIYNGALPCQCNPQGSLSSECNPHGGQCLCKPGVVGRRCDLCAPGYYGFGPTGCQACQCSHEGALSSLCEKTSGQCLCRTGAFGLRCDRCQRGQWGFPSCRPCVCNGHADECNTHTGACLGCRDHTGGEHCERCIAGFHGDPRLPYGGQCRPCPCPEGPGSQRHFATSCHQDEYSQQIVCHCRAGYTGLRCEACAPGHFGDPSRPGGRCQLCECSGNIDPMDPDACDPHTGQCLRCLHHTEGPHCAHCKPGFHGQAARQSCHRCTCNLLGTNPQQCPSPDQCHCDPSSGQCPCLPNVQGPSCDRCAPNFWNLTSGHGCQPCACHPSRARGPTCNEFTGQCHCRAGFGGRTCSECQELHWGDPGLQCHACDCDSRGIDTPQCHRFTGHCSCRPGVSGVRCDQCARGFSGIFPACHPCHACFGDWDRVVQDLAARTQRLEQRAQELQQTGVLGAFESSFWHMQEKLGIVQGIVGARNTSAASTAQLVEATEELRREIGEATEHLTQLEADLTDVQDENFNANHALSGLERDRLALNLTLRQLDQHLDLLKHSNFLGAYDSIRHAHSQSAEAERRANTSALAVPSPVSNSASARHRTEALMDAQKEDFNSKHMANQRALGKLSAHTHTLSLTDINELVCGAPGDAPCATSPCGGAGCRDEDGQPRCGGLSCNGAAATADLALGRARHTQAELQRALAEGGSILSRVAETRRQASEAQQRAQAALDKANASRGQVEQANQELQELIQSVKDFLNQEGADPDSIEMVATRVLELSIPASAEQIQHLAGAIAERVRSLADVDAILARTVGDVRRAEQLLQDARRARSWAEDEKQKAETVQAALEEAQRAQGIAQGAIRGAVADTRDTEQTLYQVQERMAGAERALSSAGERARQLDALLEALKLKRAGNSLAASTAEETAGSAQGRAQEAEQLLRGPLGDQYQTVKALAERKAQGVLAAQARAEQLRDEARDLLQAAQDKLQRLQELEGTYEENERALESKAAQLDGLEARMRSVLQAINLQVQIYNTCQ

SEQ ID NO: 52560 - protein, 153 aa, Homo sapiens
KFDLWSLPKILVVHLKRFSYNRYWRDKLDTVVEFPIRGLNMSEFVCNLSARPYVYDLIAVSNHYGAMGVGHYTAYAKNKLNGKWYYFDDSNVSLASEDQIVTKAAYVLFYQRRDDEFYKTPSLSSSGSSDGGTRPSSSQQGFGDDEACSMDTN

SEQ ID NO: 52561 - protein, 33 aa, Homo sapiens
VYAFSARPLAGGEPVSLGSLRGKVLLIENVASL

SEQ ID NO: 52562 - protein, 54 aa, Homo sapiens
ITWSPVCRNDVAWNFEKFLVGPDGVPLRRYSRRFQTIDIEPDIEALLSQGPSCA

SEQ ID NO: 52563 - protein, 19 aa, Homo sapiens
KRLDSDSLPEQWLPSGRNW

SEQ ID NO: 52564 - protein, 28 aa, Homo sapiens
MIRASHTSARIGRFDVDGCYDLNLLSYT

SEQ ID NO: 52565 - protein, 36 aa, Homo sapiens
TRLRPLTLSTPKPLVDFCNKPILLHQVEALAAAWTT

SEQ ID NO: 52566 - protein, 151 aa, Homo sapiens [sequence omitted]

SEQ ID NO: 52567 - protein, 23 aa, Homo sapiens
LCGAPAGPPSAPGSWLPTPRWVP

SEQ ID NO: 52568 - protein, 8 aa, Homo sapiens
KSKNCIIS

SEQ ID NO: 52569 - protein, 48 aa, Homo sapiens
LKNKLLQADREHLPVKPDTMEKLRTHIDAIILALPEDLQGILLKTGMT

SEQ ID NO: 52570 - protein, 37 aa, Homo sapiens
LDVSDHFPVEFKLQSSRAFTNSKKSVTLRKKTKSKRS

SEQ ID NO: 52571 - protein, 341 aa, Homo sapiens
LKRRFHWTAPAALQVTVRDAINQGMDEELERDEKVFLLGEEVAQYDGAYKVSRGLWKKYGDKRIIDTPISEMGFAGIAVGAAMAGLRPICEFMTFNFSMQAIDQVINSAAKTYYMSGGLQPVPIVFRGPNGASAGVAAQHSQCFAAWYGHCPGLKVVSPWNSEDAKGLIKSAIRDNNPVVVLENELMYGVPFEFPPEAQSKDFLIPIGKAKIERQGTHITVVSHSRPVGHCLEAAAVLSKEGVECEVINMRTIRPMDMETIEASVMKTNHLVTVEGGWPQFGVGAEICARIMEGPAFNFLDAPAVRVTGADVPMPYAKILEDNSIPQVKDIIFAIKKTLNI

SEQ ID NO: 52572 - protein, 182 aa, Homo sapiens
RKGTSTRKPRINSQLVAQQVAQQYATPPPPKKEKKEKVEKQDKEKPEKDKEISPSVTKKNTNKKTKPKSDILKDPPSEANSIQSANATTKTSETNHTSRPRLKNVDRSTAQQLAVTVGNVTVIITDFKEKTRSSSTSSSTVTSSAGSEQQNQSSSGSESTDKGSSRSSTPKGDMSAVNDESF

SEQ ID NO: 52573 - protein, 450 aa, Homo sapiens
IEELLAEKMAVDGGCGDTGDWEGRWNHVKKFLERSGPFTHPDFEPSTESLQFLLDTCKVLVIGAGGLGCELLKNLALSGFRQIHVIDMDTIDVSNLNRQFLFRPKDIGRPKAEVAAEFLNDRVPNCNVVPHFNKIQDFNDTFYRQFHIIVCGLDSIIARRWINGMLISLLNYEDGVLDPSSIVPLIDGGTEGFKGNARVILPGMTACIECTLELYPPQVNFPMCTIASMPRLPEHCIEYVRMLQWPKEQPFGEGVPLDGDDPEHIQWIFQKSLERASQYNIRGVTYRLTQGVVKRIIPAVASTNAVIAAVCATEVFKIATSAYIPLNNYLVFNDVDGLYTYTFEAERKENCPACSQLPQNIQFSPSAKLQEVLDYLTNSASLQMKSPAITATLEGKNRTLYLQSVTSIEERTRPNLSKTLKELGLVDGQELAVADVTTPQTVLFKLHFTS

SEQ ID NO: 52574 - protein, 35 aa, Homo sapiens
KCFINNKTIASTNRKFASNPGIPDIVVGEIREESF

SEQ ID NO: 52575 - protein, 130 aa, Homo sapiens [sequence omitted]

SEQ ID NO: 52576 - protein, 249 aa, Homo sapiens
MHTVGPIRRRYSDKYNVPISSADIAQNQEFYKNAEVRPPFTYASLIRQAILESPEKQLTLNEIYNWFTRMFAYFRRNAATWKNAVRHNLSLHKCFVRVENVKGAVWTVDEVEFQKRRPQKISGNPSLIKNMQSSHAYCTPLNAALQASMAENSIPLYTTASMGNPTLGNLASAIREELNGAMEHTNSNESDSSPGRSPMQAVHPVHVKEEPLDPEEAEGPLSLVTTANHSPDFDHDRDYEDEPVNEDME

SEQ ID NO: 52577 - protein, 12 aa, Homo sapiens
VLMVVVVTAMGP

SEQ ID NO: 52578 - protein, 43 aa, Homo sapiens
LDLSVDESEAFLSNLVVNKTIFAKVDRLAGINNFQRPKDPNNL

SEQ ID NO: 52579 - protein, 4 aa, Homo sapiens
VTTV

SEQ ID NO: 52580 - protein, 156 aa, Homo sapiens
LAYYTAVRAYNSAGAGPFSATVNVTTKKTPPSQPPGNVVWNATDTKVLLNWEQVKAMENESEVTGYKVFYRTSSQNNVQVLNTNKTSAELVLPIKEDYIIEVKATTDGGDGTSSEQIRIPRITSMDARGSTSAISNVHPMSSYMPIVLFLIVYVLW

SEQ ID NO: 52581 - protein, 30 aa, Homo sapiens
ILRKGMTSWHHRENRVQAQKLFPHHHLLKN

SEQ ID NO: 52582 - protein, 45 aa, Homo sapiens
MGTGVMLALVSGNNTVPFAVSLVDSTSEKSQDILLSVENTVIYRK

SEQ ID NO: 52583 - protein, 102 aa, Homo sapiens
LEFRVNRNNLELLIPLKIETISHEDLQRQLAILDKAMKAKVVTYLCGLPDVPFSATPVNAFYNGCMEVNINGVQLDLDEAISKHNDIRAHSCPSFWKKTKNS

SEQ ID NO: 52584 - protein, 659 aa, Homo sapiens
VLPVSEANFLSKQQASQVLVRKRRANSLLEETKQGNLERECIEELCNKEEAREVFENDPETDYFYPKYLVCLRSFQTGLFTAARQSTNAYPDLRSCVNAIPDQCSPLPCNEDGYMSCKDGKASFTCTCKPGWQGEKCEFDINECKDPSNINGGCSQICDNTPGSYHCSCKNGFVMLSNKKDCKDVDECSLKPSICGTAVCKNIPGDFECECPEGYRYNLKSKSCEDIDECSENMCAQLCVNYPGGYTCYCDGKKGFKLAQDQKSCEVVSVCLPLNLDTKYELLYLAEQFAGVVLYLKFRLPEISRFSAEFDFRTYDSEGVILYAESIDHSAWLLIALRGGKIEVQLKNEHTSKITTGGDVINNGLWNMVSVEELEHSISIKIAKEAVMDINKPGPLFKPENGLLETKVYFAGFPRKVESELIKPINPRLDGCIRSWNLMKQGASGIKEIIQEKQNKHCLVTVEKGSYYPGSGIAQFHIDYNNVSSAEGWHVNVTLNIRPSTGTGVMLALVSGNNTVPFAVSLVDSTSEKSQDILLSVENTVIYRIQALSLCSDQQSHLEFRVNRNNLELSTPLKIETISHEDLQRQLAVLDKAMKAKVATYLGGLPDVPFSATPVNAFYNGCMEVNINGVQLDLDEAISKHNDIRAHSCPSVWKKTKNS

SEQ ID NO: 52585 - protein, 150 aa, Homo sapiens [sequence omitted]

SEQ ID NO: 52586 - protein, 30 aa, Homo sapiens
ILATGSADKTVALWDLRNLKLMLHSSESHG

SEQ ID NO: 52587 - skipped

SEQ ID NO: 52588 - protein, 219 aa, Homo sapiens
LPFCAMGVSSVIHPKNPHAPTIHFNYRYFEVEEADGNKQWWFGGGCDLTPTYLNQEDAVHFHRTLKEACDQHGPDLYPKFKKWCDDYFFIAHRGERRGIGGIFFDDLDSPSKEEVFRFVQSCARAVVPSYIPLVKKHCDDSFTPQEKLWQQLRRGRYVEFNLLYDRGTKFGLFTPGSRIESILMSLPLTARWEYMHSPSENSKEAEILEVLRHPRDWVR

SEQ ID NO: 52589 - protein, 8 aa, Homo sapiens
LAEQEDGR

SEQ ID NO: 52590 - protein, 257 aa, Homo sapiens
LNARMDNRFATAFVIACVLSLISTIYMAASIGTDFWYEYRSPVQENSSDLNKSIWDEFISDEADEKTYNDALFRYNGTVGLWRRCITIPKNMHWYSPPERTESFDVVTKCVSFTLTEQFMEKFVDPGNHNSGIDLLRTYLWRCQFLLPFVSLGLMCFGALIGLCACICRSLYPTIATGILHLLAGLCTLGSVSCYVAGIELLHQKLELPDNVSGEFGWSFCLACVSAPLQFMASALFIWAAHTNRKEYTLMKAYRVA

SEQ ID NO: 52591 - protein, 230 aa, Homo sapiens
IKVTPDHVQNTATLEITSPTTESPHSYTSTAVIPNCGTPKQRITILQNASITPVKSKTSTEDLMNLEQGMSPITMATFARAQTPESCGSLTPERTMSPIQVLAVTGSASSPEQGRSPEPTEISAKHAIFRVSPDRQSSWQFQRSNSNSSSVITTEDNKIHIHLGSPYMQAVASPVRPASPSAPLQDNRTQGLINGALNKTTNKVTSSITITPTATPLPRQSQITVSNIYN

SEQ ID NO: 52592 - protein, 109 aa, Homo sapiens
RLPGENVKTNRTSQDYDQLPSCSDGSQAPARPPKPRPRRTAPEIHHRKPHGPEAALENVDAKIAKLMGEGYAFEEVKRALEIAQNNVEVARSILREFAFPPPVSPRLNL

SEQ ID NO: 52593 - protein, 25 aa, Homo sapiens
LLFNSKNEVLNAEDVYSRLTTPVFG

SEQ ID NO: 52594 - protein, 99 aa, Homo sapiens
KVAQLYADLDGGFSHAAWLLPGWLPLPSFRRRDRAHQEIKDIFYKAIQKRRQSQEKIDDILQTLLDATYKDGRPLTDDEVAGMLTGLLLAEQHTSSTSA

SEQ ID NO: 52595 - protein, 213 aa, Homo sapiens
ITLHPESAISKSKMGLTPLWRDSSALSSQRNSFPTSFWTSSYQPPPAPCLGGVHPDFQVTGPPGTFSAADPSPWPGHNLHQTGPAPPPAVSESWPYPLTSQVSPSYSHMHDVYMRHHHPHAHMHHRHRHHHHHHHPPAGSALDPSYGPLLMPSVHAARIPAPQCDITKTEPTTVTSATSAWAGAFHGTVDIVPSVGFDTGLQHQDKSKESPWY

SEQ ID NO: 52596 - protein, 147 aa, Homo sapiens
IVGTLHQRSTFKPEEGKEAGYADLDPYNSPGQEVYHAYAEPLPITGPEYATPIIMDMSGHPTTSVGQPSTSTFKATGNQPPPLVGTYNTLLSRTDSCSSAQAQYDTPKAGKPGLPAPDELVYQVPQSTQEVSGAGRDGECDVFKEIL

SEQ ID NO: 52597 - protein, 148 aa, Homo sapiens
IPEKFQHILRVLNTNIDGQRKIAFAITAIKGVGRRYAHVVLRKADTDLTKRAGELTDDEVERVITVMQNPRQYKIPDWFLNRQKDVKDGKYSQVLANGLDNKLREDLERLKKIRAHRGLRHFWGLRVRGQHTKTTGRRGRTVGVSKKK

SEQ ID NO: 52598 - protein, 40 aa, Homo sapiens
KNRIAIYELLFKEGVMVAKKDVHMPKHPSWQTRMCPTFMS

SEQ ID NO: 52599 - protein, 13 aa, Homo sapiens
ITTHTVLPGRHRL

SEQ ID NO: 52600 - protein, 157 aa, Homo sapiens
KTFTAKQNYVKHMFVHTGEKPHQCSICWRSFSLKDYLIKHMVTHTGVRAYQCSICNKRFTQKSSLNVHMRLHRGEKSYECYICKKKFSHKTLLERHVALHSASNGTPPAGTPPGARAGPPGVVACTEGTTYVCSVCPAKFDQIEQFNDHMRMHVSDG

SEQ ID NO: 52601 - protein, 96 aa, Homo sapiens
KSSLNVHMRLHRGEKSYECYICKKKFSHKTLLERHVALHSASNGTPPAGTPPGARAGPPGVVACTEGTTYVCSVCPAKFDQIEQFNDHMRMHVSDG

SEQ ID NO: 52602 - protein, 350 aa, Homo sapiens
IHVIKNMGFNLTFHLSYKFRLLLLLTLCLTVVGWATSNYFVGAIQEIPKAKEFMANFHKTLILGKGKTLTNEASTKKVELDNCPSVSPYLRGQSKLIFKPDLTLEEVQAENPKVSRGRYRPQECKALQRVAILVPHRNREKHLMYLLEHLHPFLQRQQLDYGIYVIHQAEGKKFNRAKLLNVGYLEALKEENWDCFIFHDVDLVPENDFNLYKCEEHPKHLVVGRNSTGYRLRYSGYFGGVTALSREQFFKVNGFSNNYWGWGGEDDDLRLRVELQRMKISRPLPEVGKYTMVFHTRDKGNEVNAERMKLLHQVSRVWRTDGLSSCSYKLVSVEHNPLYINITVDFWFGA

SEQ ID NO: 52603 - protein, 483 aa, Homo sapiens
RGPSRQQLSRSALPSLQTLVGGGCGNGTGLRNRNGSAIGLPVPPITALITPGPVRHCQIPDLPVDGSLLFEFLFFIYLLVALFIQYINIYKTVWWYPYNHPASCTSLNFHLIDYHLAAFITVMLARRLVWALISEATKAGAASMIHYMVLISARLVLLTLCGWVLCWTLVNLFRSHSVLNLLFLGYPFGVYVPLCCFHQDSRAHLLLTDYNYVVQHEAVEESASTVGGLAKSKDFLSLLLESLKEQFNNATPIPTHSCPLSPDLIRNEVECLKADFNHRIKEVLFNSLFSAYYVAFLPLCFVKSTQYYDMRWSCEHLIMVWINAFVMLTTQLLPSKYCDLLHKSAAHLGKWQKLEHGSYSNAPQHIWSENTIWPQGVLVRHSRCLYRAMGPYNVAVPSDVSHARFYFLFHRPLRLLNLLILIEGSVVFYQLYSLLRSEKWNHTLSMALILFCNYYVLFKLLRDRIVLGRAYSYPLNSYELKAN

SEQ ID NO: 52604 - protein, 16 aa, Homo sapiens
VSDEYEQLSSEALEAA

SEQ ID NO: 52605 - protein, 404 aa, Homo sapiens
VQQPSAFGSMKVSRDKDGSKVTTVVATPGQGPDRPQEVSYTDTKVIGNGSFGVVYQAKLCDSGELVAIKKVLQDKRFKNRELQIMRKLDHCNIVRLRYFFYSSGEKKDEVYLNLVLDYVPETVYRVARHYSRAKQTLPVIYVKLYMYQLFRSLAYIHSFGICHRDIKPQNLLLDPDTAVLKLCDFGSAKQLVRGEPNVSYICSRYYRAPELIFGATDYTSSIDVWSAGCVLAELLLGQPIFPGDSGVDQLVEIIKVLGTPTREQIREMNPNYTEFKFPQIKAHPWTKVFRPRTPPEAIALCSRLLEYTPTARLTPLEACAHSFFDELRDPNVKLPNGRDTPALFNFTTQELSSNPPLATILIPPHARIQAAASTPTNATAASDANTGDRGQTNNAASASASNST

SEQ ID NO: 52606 - protein, 292 aa, Homo sapiens
LTALGPELLALRGLRTLLAKNNRLGGPSALPKGLAQSPLCRSLQVLNLSGNCFQEVPASLLELRALQTLSLGGNQLQSIPAEIENLQSLECLYLGGNFIKEIPPELGNLPSLNYLVLCDNKIQSIPPQLSQLHSLRSLSLHNNLLTYLPREILNLIHLEELSLRGNPLVVRFVRDLTYDPPTLLELAARTIKIRNISYTPYDLPGNLLRYLGSASNCPNPKCGGVYFDCCVRQIKFVDFCGKYRLPLMHYLCSPECSSPCSSASHSSTSQSESDSEDEASVAARRMQKVLLG

SEQ ID NO: 52607 - protein, 30 aa, Homo sapiens
LDQTTMWKRWLALALALVAVAWVRAEAFIK

SEQ ID NO: 52608 - protein, 284 aa, Homo sapiens
RSKSKICANVFCGAGRECAVTEKGEPTCLCIEQCKPHKRPVCGSNGKTYLNHCELHRDACLTGSKIQVDYDGHCKEKKSVSPSASPVVCYQSNRDELRRRIIQWLEAEIIPDGWFSKGSNYSEILDKYFKNFDNGDSRLDSSEFLKFVEQNETAINITTYPDQENNKLLRGLCVDALIELSDENADWKLSFQEFLKCLNPSFNPPEKKCALEDETYADGAETEVDCNRCVCACGNWVCTAMTCDGKNQKGAQTQTEEEMTRYVQELQKHQETAEKTKRVSTKEI

SEQ ID NO: 52609 - protein, 34 aa, Homo sapiens
LRSLCHSRTRVPLLAAIYFLMIHVLLILCFTGHL

SEQ ID NO: 52610 - protein, 109 aa, Homo sapiens
MKENIIFLKCPVPPTQELLDQKKQFEKCGLQVLKVEKIDNEVLMAAFQRKKKMMEEKLHRQPVSHRLFQQVPYQFCNVVCRVGFQRMYSTPCGRCQCLIIGATLWNLVS

SEQ ID NO: 52611 - protein, 44 aa, Homo sapiens
MQAIPQYLWTCTQEYVQSQDYSSGPMRPFAQHPWRGFASGSPVD

SEQ ID NO: 52612 - protein, 27 aa, Homo sapiens
TDDLLDCLVNPQVTRIVAQLLIQGRSL

SEQ ID NO: 52613 - protein, 90 aa, Homo sapiens
TERTRLLSEVMEELEKVKQEMEEKGSSMTDGAPLVKIKQSLTKLKQETVEMDIRIGIVEHTLLQSKLKEKSNMTRNMHATVIPEPATGFY

SEQ ID NO: 52614 - protein, 18 aa, Homo sapiens
KSRSVIHHTCSKRCAPSS

SEQ ID NO: 52615 - protein, 651 aa, Homo sapiens
KKRKQRSPAKILTINEDGSLGLKTPKSHVCEHCNAAFRTNYHLQRHVFIHTGEKPFQCSQCDMRFIQKYLLQRHEKIHTGEKPFRCDECGMRFIQKYHMERHKRTHSGEKPYQCEYCLQYFSRTDRVLKHKRMCHENHDKKLNRCAIKGGLLTSEEDSGFSTSPKDNSLPKKKRQKTEKKSSGMDKESALDKSDLKKDKNDYLPLYSSSTKVKDEYMVAEYAVEMPHSSVGGSHLEDASGEIHPPKLVLKKINSKRSLKQPLEQNQTISPLSTYEESKVSKYAFELVDKQALLDSEGNADIDQVDNLQEGPSKPVHSSTNYDDAMQFLKKKRYLQAASNNSREYALNVGTIASQPSVTQAAVASVIDESTTASILESQALNVEIKSNHDKNVIPDEVLQTLLDHYSHKANGQHEISFSVADTEVTSSISINSSEVPEVTPSENVGSSSQASSSDKANMLQEYSKFLQQALDRTSQNDAYLNSPSLNFVTDNQTLPNQPAFSSIDKQVYATMPINSFRSGMNSPLRTTPDKSHFGLIVGDSQHSFPFSGDETNHASATSTQDFLDQVTSQKKAEAQPVHQAYQMSSFEQPFRAPYHGSRAGIATQFSTANGQVNLRGPGTSAEFSEFPLVNVNDNRAGMTSSPDATTGQTFG

SEQ ID NO: 52616 - protein, 132 aa, Homo sapiens
RKHELMQYDLEMAAQDLASKKQQCEELVTGTVRTFSLKGMTTKLFGQETPEQREARIKVLEEQINEGEQQLKSKNLEGREFVKNAWADIERFKEQKNRDLKEALISYAVMQISMCKKGIQVWTNAKECFSKM

SEQ ID NO: 52617 - protein, 67 aa, Homo sapiens
VTDSLRESEIDKATEHKHTLEERQRTEERHRTETGTPWKTKYFIKEGDGWVYHKPLWKIIPTTQPAE

SEQ ID NO: 52618 - protein, 14 aa, Homo sapiens
LNEYLRVKTVTFEY

SEQ ID NO: 52619 - protein, 27 aa, Homo sapiens
IHPTCGEVFTTLEITKSSGLDITQKGC

SEQ ID NO: 52620 - protein, 84 aa, Homo sapiens
ILFSYKCQVDETEEPDVHLPQPYAVARREGLEAAGAAGASAASYSSTQFDSAGGVAYLDDIASMPCHTGSINSTDSERWKAINA

SEQ ID NO: 52621 - protein, 262 aa, Homo sapiens
KALIFVSHGAGEHSGRYEELARMLMGLDLLVFAHDHVGHGQSEGERMVVSDFHVFVRDVLQHVDSMQKDYPGLPVFLLGHSMGGAIAILTAAERPGHFAGMVLISPLVLANPESATTFKVLAAKVLNLVLPNLSLGPIDSSVLSRNKTEVDIYNSDPLICRAGLKVCFGIQLLNAVSRVERALPKLTVPFLLLQGSADRLCDSKGAYLLMELAKSQDKTLKIYEGAYHVLHKELPEVTNSVFHEINMWVSQRTATAGTASPP

SEQ ID NO: 52622 - protein, 1352 aa, Homo sapiens
TRDPPPSPARRALSLAPLAGAGLELQLERRPEREPPPTPPRERRGPATPGPSYRAPEPGAATQRGPSGRAPRGGSADAAWKHWPESNTEAHVENITFYQNQEDFSTVSSKEGVMVQTSGKSHAASDAPENLTLLAETADARGRSGSSSRTNFTILPVGYSLEIATALTSQSGNLASESLHLPSSSSEFDERIAAFQTKSGTASEMGTERAMGLSEEWTVHSQEATTSAWSPSFLPALEMGELTTPSRKRNSSGPDLSWLHFYRTAASSPLLDLSSSSESTEKLNNSTGLQSSSVSQTKTMHVATVFTDGGPRTLRSLTVSLGPVSKTEGFPKDSRIATTSSSVLLSPSAVESRRNSRVTGNPGDEEFIEPSTENEFGLTSLRWQNDSPTFGEHQLASSSEVQNGSPMSQTETVSRSVAPMRGGEITAHWLLTNSTTSADVTGSSASYPEGVNASVLTQFSDSTVQSGGSHTALGDRSYSESSSTSSSESLNSSAPRGERSIAGISYGQVRGTAIEQRTSSDHTDHTYLSSTFTKGERALLSITDNSSSSDIVESSTSYIKISNSSHSEYSSFFHAQTERSNISSYDGEYAQPSTESPVLHTSNLPSYTPTINMPNTSVVLDTDAEFVSDSSSSSSSSSSSSSSGPPLPLPSVSQSHHLFSSILPSTRASVHLLKSTSDASTPWSSSPSPLPVSLTTSTSAPLSVSQTTLPQSSSTPVLPRARETPVTSFQTSTMTSFMTMLHSSQTADLKSQSTPHQEKVITESKSPSLVSLPTESTKAVTTNSPLPPSLTESSTEQTLPATSTNLAQMSPTFTTTILKTSQPLMTTPGTLSSTASLVTGPIAVQTTAGKQLSLTHPEILVPQISTEGGISTERNRVIVDATTGLIPLTSVPTSAKEMTTKLGVTAEYSPASRSLGTSPSPQTTVVSTAEDLAPKSATFAVQSSTQSPTTVSSSASVNSCAVNPCLHNGECVADNTSRGYHCRCPPSWQGDDCSVDVNECLSNPCPSTAMCNNTQGSFICKCPVGYQLEKGICNLVRTFVTEFKLKRTFLNTTVEKHSDLQEVENEITKTLNMCFSALPSYIRSTVHASRESNAVVISLQTTFSLASNVTLFDLADRMQKCVNSCKSSAEVCQLLGSQRRIFRAGSLCKRKSPECDKDTSICTDLDGVALCQCKSGYFQFNKMDHSCRACEDGYRLENETCMSCPFGLGGLNCGNPYQLITVVIAAAGGGLLLILGIALIVTCCRKNKNDISKLIFKSGDFQMSPYAEYPKNPRSQEWGREAIEMHENGSTKNLLQMTDVYYSPTSVRNPELERNGLYPAYTGLPGSRHSCIFPGQYNPSFISDESRRRDYF

SEQ ID NO: 52623 - protein, 860 aa, Homo sapiens
LAASSALGVAGISYGQVRGTAIEQRTSSDHTDHTYLSSTFTKGERALLSITDNSSSSDIVESSTSYIKISNSSHSEYSSFFHAQTERSNISSYDGEYAQPSTESPVLHTSNLPSYTPTINMPNTSVVLDTDAEFVSDSSSSSSSSSSSSSSGPPLPLPSVSQSHHLFSSILPSTRASVHLLKSTSDASTPWSSSPSPLPVSLTTSTSAPLSVSQTTLPQSSSTPVLPRARETPVTSFQTSTMTSFMTMLHSSQTADLKSQSTPHQEKVITESKSPSLVSLPTESTKAVTTNSPLPPSLTESSTEQTLPATSTNLAQMSPTFTTTILKTSQPLMTTPGTLSSTASLVTGPIAVQTTAGKQLSLTHPEILVPQISTEGGISTERNRVIVDATTGLIPLTSVPTSAKEMTTKLGVTAEYSPASRSLGTSPSPQTTVVSTAEDLAPKSATFAVQSSTQSPTTVSSSASVNSCAVNPCLHNGECVADNTSRGYHCRCPPSWQGDDCSVDVNECLSNPCPSTAMCNNTQGSFICKCPVGYQLEKGICNLVRTFVTEFKLKRTFLNTTVEKHSDLQEVENEITKTLNMCFSALPSYIRSTVHASRESNAVVISLQTTFSLASNVTLFDLADRMQKCVNSCKSSAEVCQLLGSQRRIFRAGSLCKRKSPECDKDTSICTDLDGVALCQCKSGYFQFNKMDHSCRACEDGYRLENETCMSCPFGLGGLNCGNPYQLITVVIAAAGGGLLLILGIALIVTCCRKNKNDISKLIFKSGDFQMSPYAEYPKNPRSQEWGREAIEMHENGSTKNLLQMTDVYYSPTSVRNPELERNGLYPAYTGLPGSRHSCIFPGQYNPSFISDESRRRDYF

SEQ ID NO: 52624 - protein, 521 aa, Homo sapiens
MIKRSSECNPLLQEPIASAQFGATAGTECRKSVPCGWERVVKQRLFGKTAGRFDVYFISPQGLKFRSKSSLANYLHKNGETSLKPEDFDFTVLSKRGIKSRYKDCSMAALTSHLQNQSNNSNWNLRTRSKCKKDVFMPPSSSSELQESRGLSNFTSTHLLLKEDEGVDDVNFRKVRKPKGKVTILKGIPIKKTKKGCRKSCSGFVQSDSKRESVCNKADAESEPVAQKSQLDRTVCISDAGACGETLSVTSEENSLVKKKERSLSSGSNFCSEQKTSGIINKFCSAKDSEHNEKYEDTFLESEEIGTKVEVVERKEHLHTDILKRGSEMDNNCSPTRKDFTEDTIPRTQIERRKTSLYFSSKYNKEALSPPRRKAFKKWTPPRSPFNLVQETLFHDPWKLLIATIFLNRTSGKMAIPVLWKFLEKYPSAEVARTADWRDVSELLKPLGLYDLRAKTIVKFSDEYLTKQWKYPIELHGIGKYGNDSYRIFCVNEWKQVHPEDHKLNKYHDWLWENHEKLSLS

SEQ ID NO: 52625 - protein, 15 aa, Homo sapiens
ISGEDTSTVSTFFRC

SEQ ID NO: 52626 - protein, 120 aa, Homo sapiens
KYIDQGIAELVPGVLFVDEVHMLDIECFTYLHRALESSIAPIVIFASNRGNCVIRGTEDITSPHGIPLDLLDRVMIIRTMLYTPQEMKQIIKIRAQTEGINISEEALNHLGEIGTKTTLR

SEQ ID NO: 52627 - protein, 21 aa, Homo sapiens
MRSRGRGGFTSDRGILSNRKI

SEQ ID NO: 52628 - protein, 5 aa, Homo sapiens
IEATA

SEQ ID NO: 52629 - protein, 26 aa, Homo sapiens
KELGTGLSQKRKAPTEKNKIKRPRVH

SEQ ID NO: 52630 - protein, 224 aa, Homo sapiens
KKGPGPLATAYLVIYNVVMTAGWLVIAVGLVRAYLAKGSYHSLYYSIEKPLKFFQTGALLEILHCAIGIVPSSVVLTSFQVMSRVFLIWAVTHSVKEVQSEDSVLLFVIAWTITEIIRYSFYTFSLLNHLPYLIKWARYTLFIVLYPMGVSGELLTIYAALPFVRQAGLYSISLPNKYNFSFDYYAFLILIMISYIPIFPQLYFHMIHQRRKILSHTEEHKKFE

SEQ ID NO: 52631 - protein, 1046 aa, Homo sapiens
VRGVLKRRVETRQHTEEAIRQQEVEQLDFRDLLGKKVSTKTLSEDDLKEIPAEQMDFRANLQRQVKPKTVSEEERKVHSPQQVDFRSVLAKKGTSKTPVPEKVPPPKPATPDFRSVLGGKKKLPAENGSSSAETLNAKAVESSKPLSNAQPSGPLKPVGNAKPAETLKPMGNAKPAETLKPMGNAKPDENLKSASKEELKKDVKNDVNCKRGHAGTTDNEKRSESQGTAPAFKQKLQDVHVAEGKKLLLQCQVSSDPPATIIWTLNGKTLKTTKFIILSQEGSLCSVSIEKALPEDRGLYKCVAKNDAGQAECSCQVTVDDAPASENTKAPEMKSRRPKSSLPPVLGTESDATVKKKPAPKTPPKAAMPPQIIQFPEDQKVRAGESVELFGKVTGTQPITCTWMKFRKQIQESEHMKVENSENGSKLTILAARQEHCGCYTLLVENKLGSRQAQVNLTVVDKPDPPAGTPCASDIRSSSLTLSWYGSSYDGGSAVQSYSIEIWDSANKTWKELATCRSTSFNVQDLLPDHEYKFRVRAINVYGTSEPSQESELTTVGEKPEEPKDEVEVSDDDEKEPEVDYRTVTINTEQKVSDFYDIEERLGSGKFGQVFRLVEKKTRKVWAGKFFKAYSAKEKENIRQEISIMNCLHHPKLVQCVDAFEEKANIVMVLEIVSGGELFERIIDEDFELTERECIKYMRQISEGVEYIHKQGIVHLDLKPENIMCVNKTGTRIKLIDFGLARRLENAGSLKVLFGTPEFVAPEVINYEPIGYATDMWSIGVICYILVSGLSPFMGDNDNETLANVTSATWDFDDEAFDEISDDAKDFISNLLKKDMKNRLDCTQCLQHPWLMKDTKNMEAKKLSKDRMKKYMARRKWQKTGNAVRAIGRLSSMAMISGLSGRKSSTGSPTSPLNAEKLESEEDVSQAFLEAVAEEKPHVKPYFSKTIRDLEVVEGSAARFDCKIEGYPDPEVVWFKDDQSIRESRHFQIDYDEDGNCSLIISDVCGDDDAKYTCKAVNSLGEATCTAELIVETMEEGEGEGEEEEE

SEQ ID NO: 52632 - protein, 760 aa, Homo sapiens
LLIHPKCAWCSKEDFGSPRSITSRCDLRANLVKNGCGGEIESPASSFHVLRSLPLSSKGSGSAGWDVIQMTPQEIAVNLRPGDKTTFQLQVRQVEDYPVDLYYLMDLSLSMKDDLDNIRSLGTKLAEEMRKLTSNFRLGFGSFVDKDISPFSYTAPRYQTNPCIGYKLFPNCVPSFGFRHLLPLTDRVDSFNEEVRKQRVSRNRDAPEGGFDAVLQAAVCKEKIGWRKDALHLLVFTTDDVPHIALDGKLGGLVQPHDGQCHLNEANEYTASNQMDYPSLALLGEKLAENNINLIFAVTKNHYMLYKNFTALIPGTTVEILDGDSKNIIQLIINAYNSIRSKVELSVWDQPEDLNLFFTATCQDGVSYPGQRKCEGLKIGDTASFEVSLEARSCPSRHTEHVFALRPVGFRDSLEVGVTYNCTCGCSVGLEPNSARCNGSGTYVCGLCECSPGYLGTRCECQDGENQSVYQNLCREAEGKPLCSGRGDCSCNQCSCFESEFGKIYGPFCECDNFSCARNKGVLCSGHGECHCGECKCHAGYIGDNCNCSTDISTCRGRDGQICSERGHCLCGQCQCTEPGAFGEMCEKCPTCPDACSTKRDCVECLLLHSGKPDNQTCHSLCRDEVITWVDTIVKDDQEAVLCFYKTAKDCVMMFTYVELPSGKSNLTVLREPECGNTPNAMTILLAVVGSILLVGLALLAIWKLLVTIHDRREFAKFQSERSRARYEMASNPLYRKPISTHTVDFTFNKFNKSYNGTVD

SEQ ID NO: 52633 - protein, 57 aa, Homo sapiens
KRLTSFHNAHDLTKWDLFGNCYRLLKTGIEHGAMPEQVGVYWYSFCMTLESCFSEVI

SEQ ID NO: 52634 - protein, 47 aa, Homo sapiens
MNEEFEDTMVIDLPPSRNRRERAELRPDFFDSAAIIEDDSGFGMPMF

SEQ ID NO: 52635 - protein, 33 aa, Homo sapiens
VVFKPQKKCQEYEMSLENWAKAVKRSMNWYNKT

SEQ ID NO: 52636 - protein, 6 aa, Homo sapiens
IGKIES

SEQ ID NO: 52637 - protein, 105 aa, Homo sapiens
IVSAHSGMNTPSVEPSDQASEFSASFSDVRILPGSMIVSSDDTVDSTIDREGKPGGTVESGNGEDLTKVPLKRLSDEHEPEQRKKIKRRNQAIYAAVDDDDDDAA

SEQ ID NO: 52638 - skipped

SEQ ID NO: 52639 - protein, 424 aa, Homo sapiens
VQTPSVYAAMRGANAWAPLCLLLAAATQLSRQQSPERPVFTCGGILTGESGFIGSEGFPGVYPPNSKCTWKITVPEGKVVVLNFRFIDLESDNLCRYDFVDVYNGHANGQRIGRFCGTFRPGALVSSGNKMMVQMISDANTAGNGFMAMFSAAEPNERGDQYCGGLLDRPSGSFKTPNWPDRDYPAGVTCVWHIVAPKNQLIELKFEKFDVERDNYCRYDYVAVFNGGEVNDARRIGKYCGDSPPAPIVSERNELLIQFLSDLSLTADGFIGHYIFRPKKLPTTTEQPVTTTFPVTTGLKPTVALCQQKCRRTGTLEGNYCSSDFVLAGTVITTITRDGSLHATVSIINIYKEGNLAIQQAGKNMSARLTVVCKQCPLLRRGLNYIIMGQVGEDGRGKIMPNSFIMMFKTKNQKLLDALKNKQC

SEQ ID NO: 52640 - protein, 142 aa, Homo sapiens
IGFLMGLWRFYGAALTDSGQATRSLETHRAPYNKLQLQRINWNSSKCQVWYPQPLNSLQVKWKIKQNHQIQGLMLLLNTILIFYQDPLEQLSLHLLATQEACLWDTTVHSNPVPSLCTSQLVVSILSGISLANILCQISLFQ

SEQ ID NO: 52641 - protein, 141 aa, Homo sapiens
KMAGWQSYVDNLMCDGCCQEAAIVGYCDAKYVWAATAGGVFQSITPIEIDMIVGKDREGFFTNGLTLGAKKCSVIRDSLYVDGDCTMDIRTKSQGGEPTYNVAVGRAGRALVIVMGKEGVHGGTLNKKAYELALYLRRSDV

SEQ ID NO: 52642 - protein, 61 aa, Homo sapiens
RIRMANEKHSKNITQRGNVAKTSRNAPEEKASVGPWLLALFIFVVCGSAIFQIIQSIRMGM

SEQ ID NO: 52643 - protein, 18 aa, Homo sapiens
LGAVALPRSSLPAGRAPP

SEQ ID NO: 52644 - protein, 173 aa, Homo sapiens
TEKPEHEDICEYRPYSCPCPGASCKWQGSLEAVMSHLMHAHKSITTLQGEDIVFLATDINLPGAVDWVMMQSCFGHHFMLVLEKQEKYEGHQQFFAIVLLIGTRKQAENFAYRLELNGNRRRLTWEATPRSIHDGVAAAIMNSDCLVFDTAIAHLFADNGNLGINVTISTCCP

SEQ ID NO: 52645 - protein, 129 aa, Homo sapiens
MATGQVLFHRFFYSKSFVKHSFEIVAMACINLASKIEEAPRRIRDVINVFHHLRQLRGKRTPSPLILDQNYINTKNQVIKAERRVLKELGFCVHVKHPHKIIVMYLQVLECERNQTLVQTAWVVHDGKS

SEQ ID NO: 52646 - protein, 635 aa, Homo sapiens
KDEYQFQHQGAVELLVFNFLLILTILTIWLFKNHRFRFLHETGGAMVYGLIMGLILRYATAPTDIESGTVYDCVKLTFSPSTLLVNITDQVYEYKYKREISQHNINPHQGNAILEKMTFDPEIFFNVLLPPIIFHAGYSLKKRHFFQNLGSILTYAFLGTAISCIVIGLIMYGFVKAMIHAGQLKNGDFHFTDCLFFGSLMSATDPVTVLAIFHELHVDPDLYTLLFGESVLNDAVAIVLTYSISIYSPKENPNAFDAAAFFQSVGNFLGIFAGSFAMGSAYAIITALLTKFTKLCEFPMLETGLFFLLSWSAFLSAEAAGLTGIVAVLFCGVTQAHYTYNNLSSDSKIRTKQLFEFMNFLAENVIFCYMGLALFTFQNHIFNALFILGAFLAIFVARACNIYPLSFLLNLGRKQKIPWNFQHMMMFSGLRGAIAFALAIRNTESQPKQMMFTTTLLLVFFTVWVFGGGTTPMLTWLQIRVGVDLDENLKEDPSSQHQEANNLDKNMTKAESARLFRMWYSFDHKYLKPILTHSGPPLTTTLPEWCGPISRLLTSPQAYGEQLKEDDVECIVNQDELAINYQEQASSPCSPPARLGLDQKASPQTPGKENIYEGDLGLGGYELKLEQTLGQSQLN

SEQ ID NO: 52647 - protein, 753 aa, Homo sapiens
VKPQLLLLALVLHPWNPCLGADSEKPSSIPTDKLLVITVATKESDGFHRFMQSAKYFNYTVKVLGQGEEWRGGDGINSIGGGQKVRLMKEVMEHYADQDDLVVMFTECFDVIFAGGPEEVLKKFQKANHKVVFAADGILWPDKRLADKYPVVHIGKRYLNSGGFIGYAPYVNRIVQQWNLQDNDDDQLFYTKVYIDPLKREAINITLDHKCKIFQTLNGAVDEVVLKFENGKARAKNTFYETLPVAINGNGPTKILLNYFGNYVPNSWTQDNGCTLCEFDTVDLSAVDVHPNVSIGVFIEQPTPFLPRFLDILLTLDYPKEALKLFIHNKEVYHEKDIKVFFDKAKHEIKTIKIVGPEENLSQAEARNMGMDFCRQDEKCDYYFSVDADVVLTNPRTLKILIEQNRKIIAPLVTRHGKLWSNFWGALSPDGYYARSEDYVDIVQGNRVGVWNVPYMANVYLIKGKTLRSEMNERNYFVRDKLDPDMALCRNAREMTLQREKDSPTPETFQMLSPPKGVFMYISNRHEFGRLLSTANYNTSHYNNDLWQIFENPVDWKEKYINRDYSKIFTENIVEQPCPDVFWFPIFSEKACDELVEEMEHYGKWSGGKHHDSRISGGYENVPTDDIHMKQVDLENVWLHFIREFIAPVTLKVFAGYYTKGFALLNFVVKYSPERQRSLRPHHDASTFTINIALNNVGEDFQGGGCKFLRYNCSIESPRKGWSFMHPGRLTHLHEGLPVKNGTRYIAVSFIDP

SEQ ID NO: 52648 - protein, 32 aa, Homo sapiens
IQNPQTSDSGIYKCTAKNPLGSDYAATYIQVI

SEQ ID NO: 52649 - protein, 707 aa, Homo sapiens
RKQGSILYCTTGIILQWLQSDPYLSSVSHIVLDEIHERNLQSDVLMTVVKDLLNFRSDLKVILMSATLNAEKFSEYFGNCPMIHIPGFTFPVVEYLLEDVIEKIRYVPEQKEHRSQFKRGFMQGHVNRQEKEEKEAIYKERWPDYVRELRRRYSASTVDVIEMMEDDKVDLNLIVALIRYIVLEEEDGAILVFLPGWDNISTLHDLLMSQVMFKSDKFLIIPLHSLMPTVNQTQVFKRTPPGVRKIVIATNIAETSITIDDVVYVIDGGKIKETHFDTQNNISTMSAEWVSKANAKQRKGRAGRVQPGHCYHLYNGLRASLLDDYQLPEILRTPLEELCLQIKILRLGGIAYFLSRLMDPPSNEAVLLSIRHLMELNALDKQEELTPLGVHLARLPVEPHIGKMILFGALFCCLDPVLTIAASLSFKDPFVIPLGKEKIADARRKELAKDTRSDHLTVVNAFEGWEEARRRGFRYEKDYCWEYFLSSNTLQMLHNMKGQFAEHLLGAGFVSSRNPKDPESNINSDNEKIIKAVICAGLYPKVAKIRLNLGKKRKMVKVYTKTDGLVAVHPKSVNVEQTDFHYNWLIYHLKMRTSSIYLYDCTEVSPYCLLFFGGDISIQKDNDQETIAVDEWIVFQSPARIAHLVKELRKELDILLQEKIESPHPVDWNDTKSRDCAVLSAIIDLIKTQEKATPRNFPPRFQDGYYS

SEQ ID NO: 52650 - protein, 14 aa, Homo sapiens
LGIFSVFKHTADAA

SEQ ID NO: 52651 - protein, 118 aa, Homo sapiens
ICITRITTAIRETESIEKHAKALVGLWDSCLEHNLRPFGKDEDTPHAKIASDIMSCILQNYNRPPVMALAIPIAVKFLHRGNKELCRNMSNYLSLAAITKADLLADHTEVIVKSILQV

SEQ ID NO: 52652 - protein, 169 aa, Homo sapiens
ILTHVIEGFVIQEGLEPFPVSRSSLLIEQPVKKRPLLDNQVINSVCVQPELQNNTKHADNSSDTEMEDMIAEETLEEMDSELLKCEFCGKMGYANEFLRSKRFCTMSCAKRYNVSCSKKFALSRWNRKPDNQSLGHRGRRPSGPDGAAREHILRQKKTWLLMKILCHLL

SEQ ID NO: 52653 - protein, 4 aa, Homo sapiens
LKES

SEQ ID NO: 52654 - protein, 115 aa, Homo sapiens
KPKRSTWRFNLDLTHPVEDGIFDSGNFEQFLREKVKVNGKTGNLGNVVHIERFKNKITVVSEKQFSKRYLKYLTKKYLKKNNLRDWLRVVASDKETYELRYFQISQDEDESESED

SEQ ID NO: 52655 - protein, 111 aa, Homo sapiens
MSTSKTGKHGHAKVHLVGIDIFTGKKYEDICPSTHNMDVPNIKRNDYQLICIQDGYLSLLTETGEVREDLKLPEGELGKEIEGKYNAGEDVQVSVMCAMSEEYAVAIKPCK

SEQ ID NO: 52656 - protein, 21 aa, Homo sapiens
KKTKGPDAASKLPLVTSHTQC

SEQ ID NO: 52657 - protein, 25 aa, Homo sapiens
IQEYCYDNIHFMKAFRKIVVLFIKL

SEQ ID NO: 52658 - protein, 293 aa, Homo sapiens
LADLQQSDSDRIMAMMEVQGGPSLGQTCVLIVIFTVLLQSLCVAVTYVYFTNELKQMQDKYSKSGIACFLKEDDSYWDPNDEESMNSPCWQVKWQLRQLVRKMILRTSEETISTVQEKQQNISPLVRERGPQRVAAHITGTRGRSNTLSSPNSKNEKALGRKINSWESSRSGHSFLSNLHLRNGELVIHEKGFYYIYSQTYFRFQEEIKENTKNDKQMVQYIYKYTSYPDPILLMKSARNSCWSKDAEYGLYSIYQGGIFELKENDRIFVSVTNEHLIDMDHEASFFGAFLVG

SEQ ID NO: 52659 - protein, 54 aa, Homo sapiens
MMMPMTFYFGFKNVELLFSSLVINTAGEMAGAFVAVIILAVFYEGLDSPREPAV

SEQ ID NO: 52660 - protein, 12 aa, Homo sapiens
MPVPGPNGTILM

SEQ ID NO: 52661 - protein, 63 aa, Homo sapiens
TKLRAQQCRFWTSFFPKVLEMTGNIDEAEWEWKAGFHRWNNYMMDWKNQFNDYTSKKESCVGL

SEQ ID NO: 52662 - protein, 149 aa, Homo sapiens
INPADDPNNQGEDEFEEAEQVREENLPDENEEQKQSNQKQENTEVEEHLVMAGNPDQQEDNVDEQYQEEAEEEVQEDLTEEKKRELEHNAEETYGENDENTDDKNNDGEEQEVRDDNRPKGREEHYEEEEEEEEDGAAVAEKSHRRAEM

SEQ ID NO: 52663 - protein, 95 aa, Homo sapiens
MDAANFEQFLQERIKVNGKAGNLGGGVVTIERSKSKITVTSEVPFSKRYLKYLTKKYLKKNNLRDWLRVVANSKESYELRYFQINQDEEEEEDED

SEQ ID NO: 52664 - protein, 504 aa, Homo sapiens
LVYRYLQESGFSHSAFTFGIESHISQSNINGALVPPAALISIIQKGLQYVEAEVSINEDGTLFDGRPIESLSLIDAVMPDVVQTRQQAYRDKLAQQQAAAAAAAAAAASQQGSAKNGENTANGEENGAHTIANNHTDMMEVDGDVEIPPNKAVVLRGHESEVFICAWNPVSDLLASGSGDSTARIWNLSENSTSGSTQLVLRHCIREGGQDVPSNKDVTSLDWNSEGTLLATGSYDGFARIWTKDGNLASTLGQHKGPIFALKWNKKGNFILSAGVDKTTIIWDAHTGEAKQQFPFHSAPALDVDWQSNNTFASCSTDMCIHVCKLGQDRPIKTFQGHTNEVNAIKWDPTGNLLASCSDDMTLKIWSMKQDNCVHDLQAHNKEIYTIKWSPTGPGTNNPNANLMLASASFDSTVRLWDVDRGICIHTLTKHQEPVYSVAFSPDGRYLASGSFDKCVHIWNTQTGALVHSYRGTGGIFEVCWNAAGDKVGASASDGSVCVLDLRK

SEQ ID NO: 52665 - protein, 46 aa, Homo sapiens
LPVEADILAYNFENTSQSFGDLPARFGYRLPAEGLKGFLIKTRECL

SEQ ID NO: 52666 - protein, 293 aa, Homo sapiens
RLPYPMILLQHAVLPPPKQPSPSPPMSVATRSTGTLQLPPQKPFGQEASLPLAGEEELSKGGEQDCALEELCKPLYCKLCNVTLNSAQQAQAHYQGKNHGKKLRNYYAANSCPPPARMSNVVEPAATPVVPVPPQMGSFKPGGRVILATENDYCKLCDASFSSPAVAQAHYQGKNHAKRLRLAEAQSNSFSESSELGQRRARKEGNEFKMMPNRRNMYTVQNNSGPYFNPRSRQRIPRDLAMCVTPSGQFYCSMCNVGAGEEMEFRQHLESKQHKSKVSEQRYRNEMENLGYV

SEQ ID NO: 52667 - protein, 181 aa, Homo sapiens
LNISYTRNMTLKDGKNNVAIAVTYNHDGSYSMQIEDKTFQVLGNLYSEGDCTYLKCSVNGVASKAKLIILENTIYLFSKEGSIEIDIPVPKYLSSVSSQETQGGPLAPMTGTIEKVFVKAGDKVKAGDSLMVMIAMKMEHTIKSPKDGTVKKVFYREGAQANRHTPLVEFEEEESDKRESE

SEQ ID NO: 52668 - protein, 108 aa, Homo sapiens
IYLFSKEGSIEIDIPVPKYLSSVSSQETQGGPLAPMTGTIEKVFVKAGDKVKAGDSLMVMIAMKMEHTIKSPKDGTVKKVFYREGAQANRHTPLVEFEEEESDKRESE

SEQ ID NO: 52669 - protein, 158 aa, Homo sapiens [sequence omitted]

SEQ ID NO: 52670 - protein, 201 aa, Homo sapiens
IGDLKILFPDIIARAAEHLRYVFGFELKQFDRKHHTYILINKLKPLEEEEEEDLGGDGPRLGLLMMILGLIYMRGNSAREAQVWEMLRRLGVQPSKYHFLFGYPKRLIMEDFVQQRYLSYRRVPHTNPPEYEFSWGPRSNLEISKMEVLGFVAKLHKKEPQHWPVQYREALADEADRARAKARAEASMRARASARAGIHLW

SEQ ID NO: 52671 - protein, 19 aa, Homo sapiens
ISFSNQTGPAWAGSEGDYT

SEQ ID NO: 52672 - protein, 227 aa, Homo sapiens
IPRVRGGGTHRSGQGAFGNMCRGGRRFAPTKTWRRWHRRVNTTQKRYAICSALAASALPALVMSKGHRIEEVPELPLVFEDKVEGYKKTKEAVLLLKKLKAWNDIEKVYASQRMRAGKGKMRNRRRIQRRGLCIIYNEDNGIIKAFRNIPGITLLNVSKLNILKLAPGGHVGRFCIWTESAFRKLDELYGTWRKAASLKSNYNLPMHKLINTDLSRILKSPEIQRAL

SEQ ID NO: 52673 - protein, 37 aa, Homo sapiens
IAMVALIPGTLIKKFSQKHLQLNETSTANHIHSRKDT

SEQ ID NO: 52674 - protein, 570 aa, Homo sapiens
LAGQVLLKSGYAFVDYPDQNWAIRAIETLSGKVELHGKIMEVDYSVSKKLRSRKIQIRNIPPHLQWEVLDGLLAQYGTVENVEQVNTDTETAVVNVTYATREEAKIAMEKLSGHQFENYSFKISYIPDEEVSSPSPPQRAQRGDHSSREQGHAPGGTSQARQIDFPLRILVPTQFVGAIIGKEGLTIKNITKQTQSRVDIHRKENSGAAEKPVTIHATPEGTSEACRMILEIMQKEADETKLAEEIPLKILAHNGLVGRLIGKEGRNLKKIEHETGTKITISSLQDLSIYNPERTITVKGTVEACASAEIEIMKKLREAFENDMLAVNQQANLIPGLNLSALGIFSTGLSVLSPPAGPRGAPPAAPYHPFTTHSGYFSSLYPHHQFGPFPHHHSYPEQEIVNLFIPTQAVGAIIGKKGAHIKQLARFAGASIKIAPAEGPDVSERMVIITGPPEAQFKAQGRIFGKLKEENFFNPKEEVKLEAHIRVPSSTAGRVIGKGGKTVNELQNLTSAEVIVPRDQTPDENEEVIVRIIGHFFASQTAQRKIREIVQQVKQQEQKYPQGVASQRSK

SEQ ID NO: 52675 - protein, 7 aa, Homo sapiens
RICLCIF

SEQ ID NO: 52676 - protein, 40 aa, Homo sapiens
LKPLKVVLETLKAPWTGFMISKSLLWSQGNLDLRNAEGGL

SEQ ID NO: 52677 - protein, 40 aa, Homo sapiens
KSIITEKLAEVDKCLADGADEHLQLISLCATVMQQLSQNC

SEQ ID NO: 52678 - protein, 11 aa, Homo sapiens
RRHWRRTKLGL

SEQ ID NO: 52679 - protein, 61 aa, Homo sapiens
RQVKLGGPRPGSREHPRQENEVAASLLCSVLLPVKGFSPHRGAKQYVWPDPVAWLSRLLSQ

SEQ ID NO: 52680 - protein, 343 aa, Homo sapiens
KTPSISCVPNLIREGRAALITSFCVFKFMALYSIIQYFSVTLLYSILSNLGDFQFLFIDLAIILVVVFTMSLNPAWKELVAQRPPSGLISGALLFSVLSQIIICIGFQSLGFFWVKQQPWYEVWHPKSDACNTTGSGFWNSSHVDNETELDEHNIQNYENTTVFFISSFQYLIVAIAFSKGKPFRQPCYKNYFFVFSVIFLYIFILFIMLYPVASVDQVLQIVCVPYQWRVTMLIIVLVNAFVSITVENFFLDMVLWKVVFNRDKQGEYRFSTTQPPQESVDRWGKCCLPWALGCRKKTPKAKYMYLAQELLVDPEWPPKPQTTTEAKALVKENGSCQIITIT

SEQ ID NO: 52681 - protein, 122 aa, Homo sapiens
KDYVSGKLLYCHPPPGRDPVTFQHQHQRLLENKMNSDEIKMQLGRNKKAKQIENIVDKTFFHQENVRALTKGVQAVMGYKPGSGVVTASTASSENGAGKPWKKHGNRNKKEKSRRLYKHLDM

SEQ ID NO: 52682 - protein, 73 aa, Homo sapiens
KYHFRGHLGDQDFFTMIGMEHPKLFHVLDCTWNRQLCTWWRDHGYSDVFEAYFRCEGHVKIYHGNCNTPIPED

SEQ ID NO: 52683 - protein, 20 aa, Homo sapiens
LRMQIMTHLPGAISDMIYIR

SEQ ID NO: 52684 - protein, 208 aa, Homo sapiens
IDASEDSQLEAAIRASLQETHFDSTQTKQDSRSDEESESELFSGSEEFISVCGSDEEEEVENLAKSRKSPHKDLGHRKEENRRPLTEPPVRTDPGTATNHQGLPAVDSEILEMPPEKADGVVEGIDVNGPKAQLMLRYPDGKREQITLPEQAKLLALVKHVQSKGYPNERFELLTNFPRRKLSHLDYDITLQEAGLCPQETVFVQERN

SEQ ID NO: 52685 - protein, 71 aa, Homo sapiens
RQTHTKHPTPERGSRDKNRQVSLKMQLKQSVNRRKMPNSTRDHCKVSKSAHSLQPSISQKSVFQMFQRCTK

SEQ ID NO: 52686 - protein, 151 aa, Homo sapiens
LKALRSDSYVELSQYRDQHFRGDNEEQEKLLKKSCTLYVGNLSFYTTEEQIYELFSKSGDIKKIIMGLDKMKKTACGFCFVEYYSRADAENAMRYINGTRLDDRIIRTDWDAGFKEGRQYGRGRSGGQVRDEYRQDYDAGRGGYGKLAQNQ

SEQ ID NO: 52687 - protein, 47 aa, Homo sapiens
KCSFPFKNETLLFPHLTLEDPPALSSLLSGAWRDHLSLHIVELGEET

SEQ ID NO: 52688 - protein, 103 aa, Homo sapiens
KGKHCILDVSGNAIKRLQIAQLYPISIFIKPKSMENIMEMNKRLTEEQARKTFERAMKLEQEFTEHFTAIVQGDTLEDIYNQVKQIIEEQSGSYIWVPAKEKL

SEQ ID NO: 52689 - protein, 768 aa, Homo sapiens
LKDSPRFRAALEEVEGDVAELELKLDKLVKLCIAMIDTGKAFCVANKQFMNGIRDLAQYSSNDAVVETSLTKFSDSLQEMINFHTILFDQTQRSIKAQLQNFVKEDLRKFKDAKKQFEKVSEEKENALVKNAQVQRNKQHEVEEATNILTATRKCFRHIALDYVLQINVLQSKRRSEILKSMLSFMYAHLAFFHQGYDLFSELGPYMKDLGAQLDRLVVDAAKEKREMEQKHSTIQQKDFSSDDSKLEYNVDAANGIVMEGYLFKRASNAFKTWNRRWFSIQNNQLVYQKKFKDNPTVVVEDLRLCTVKHCEDIERRFCFEVVSPTKSCMLQADSEKLRQAWIKAVQTSIATAYREKGDESEKLDKKSSPSTGSLDSGNESKEKLLKGESALQRVQCIPGNASCCDCGLADPRWASINLGITLCIECSGIHRSLGVHFSKVRSLTLDTWEPELLKLMCELGNDVINRVYEANVEKMGIKKPQPGQRQEKEAYIRAKYVERKFVDKYSISLSPPEQQKKFVSKSSEEKRLSISKFGPGDQVRASAQSSVRSNDSGIQQSSDDGRESLPSTVSANSLYEPEGERQDSSMFLDSKHLNPGLQLYRASYEKNLPKMAEALAHGADVNWANSEENKATPLIQAVLGGSLVTCEFLLQNGANVNQRDVQGRGPLHHATVLGHTGQVCLFLKRGANQHATDEEGKDPLSIAVEAANADIVTLLRLARMNEEMRESEGLYGQPGDETYQDIFRDFSQMASNNPEKLNRFQQDSQKF

SEQ ID NO: 52690 - protein, 52 aa, Homo sapiens
LASGSLCRDNRCGSRFRGSSCGRFSPERDLRLPASLCCADPSLRGPHAKQRP

SEQ ID NO: 52691 - protein, 27 aa, Homo sapiens
ISNRLILHLETAFILKEKMEFLLCCPS

SEQ ID NO: 52692 - protein, 4 aa, Homo sapiens
LPSS

SEQ ID NO: 52693 - protein, 15 aa, Homo sapiens
ISSWEVPQSSGAGEF

SEQ ID NO: 52694 - protein, 291 aa, Homo sapiens
KESKFKETGVITPEEFVAAGDHLVHHCPTWQWATGEELKVKAYLPTGKQFLVTKNVPCYKRCKQMEYSDELEAIIEEDDGDGGWVDTYHNTGITGITEAVKEITLENKDNIRLQDCSALCEEEEDEDEGEAADMEEYEESGLLETDEATLDTRKIVEACKAKTDAGGEDAILQTRTYDLYITYDKYYQTPRLWLFGYDEQRQPLTVEHMYEDISQDHVKKTVTIENHPHLPPPPMCSVHPCRHAEVMKKIIETVAEGGGELGVHMYLLIFLKFVQAVIPTIEYDYTRHFTM

SEQ ID NO: 52695 - protein, 31 aa, Homo sapiens
LGLNPGKRKKKKKKKKRRKKVGRNKGRREAQ

SEQ ID NO: 52696 - protein, 5 aa, Homo sapiens
KWITQ

SEQ ID NO: 52697 - protein, 39 aa, Homo sapiens
IPVFSLSLENILIPVLLRPETKRLSQTMGEREIRRILEL

SEQ ID NO: 52698 - protein, 27 aa, Homo sapiens
IKEPCNLKIHETAAKPPVVQHFWSLQF

SEQ ID NO: 52699 - protein, 228 aa, Homo sapiens
IIEARFVYVFVLGILFTGTKDLLKSQVIAADFKLKTVGLWEIYSGLVLLAALLFRPHNLPVLAFSLLIQTLMTKFIWKPLRHDAAEITVMHYWFGQAFFYFQGNSNNIATVDISAGFVGLDTYVEIPAVLLTAFGTYAGPVLWASHLVHFLSSETRSGSALSHACFCYALICSIPVFTYIVLVTSLRYHLFIWSVFSPKLLYEGMHLLITAAVCVFFTAMDQTRLTQS

SEQ ID NO: 52700 - protein, 32 aa, Homo sapiens
LRVLRGLARPEHPPPAPTGQDDPQSQLLPAPC

SEQ ID NO: 52701 - protein, 117 aa, Homo sapiens
LVHVCARPEKPPGQVTRLRALPLTQGQLVLVWSDEHVGSKCLWTYEIQFSQDGKAYTPVSRKPSTFNLFVFSPDTGAVSGSYRVRALDYWARPGPFSDPVPYLEVPVPRGPPSPGNP

SEQ ID NO: 52702 - protein, 373 aa, Homo sapiens
VPYETLNKRFRAAQKNIDRETSHVTMVVAELEKTLSGCPAVDSVVSLLDGVVEKLSVLKRKAVESIQAEDESAKLCKRRIEHLKEHSSDQPAAASVWKRKRMDRMMVEHLLRCGYYNTAVKLARQSGIEDLVNIEMFLTAKEVEESLERRETATCLAWCHDNKSRLRKMKSCLEFSLRIQEFIELIRQNKRLDAVRHARKHFSQAEGSQLDEVRQAMGMLAFPPDTHISPYKDLLDPARWRMLIQQFRYDNYRLHQLGNNSVFTLTLQAGLSAIKTPQCYKEDGSSKSPDCPVCSRSLNKLAQPLPMAHCANSRLVCKISGDVMNENNPPMMLPNGYVYGYNSLLSIRQDDKVVCPRTKEVFHFSQAEKVYIM

SEQ ID NO: 52703 - protein, 28 aa, Homo sapiens
LDSARQTRQRLSINWSNFSLKKATFAAH

SEQ ID NO: 52704 - protein, 9 aa, Homo sapiens
VGYSMYHLT

SEQ ID NO: 52705 - protein, 10 aa, Homo sapiens
LASPRKSVTT

SEQ ID NO: 52706 - protein, 601 aa, Homo sapiens
KYPLHAIMEIKEYLIDMASRAGMHWLSTIIPTHHINALIFFFIVSNLTIDFFAFFIPLVIFYLSFISMVICTLKVFQDSKAWENFRTLTDLLLRFEPNLDVEQAEVNFGWNHLEPYAHFLLSVFFVIFSFPIASKDCIPCSELAVITGFFTVTSYLSLSTHAEPYTRRALATEVTAGLLSLLPSMPLNWPYLKVLGQTFITVPVGHLVVLNVSVPCLLYVYLLYLFFRMAQLRNFKGTYCYLVPYLVCFMWCELSVVILLESTGLGLLRASIGYFLFLFALPILVAGLALVGVLQFARWFTSLELTKIAVTVAVCSVPLLLRWWTKASFSVVGMVKSLTRSSMVKLILVWLTAIVLFCWFYVYRSEGMKVYNSTLTWQQYGALCGPRAWKETNMARTQILCSHLEGHRVTWTGRFKYVRVTDIDNSAESAINMLPFFIGDWMRCLYGEAYPACSPGNTSTAEEELCRLKLLAKHPCHIKKFDRYKFEITVGMPFSSGADGSRSREEDDVTKDIVLRASSEFKSVLLSLRQGSLIEFSTILEGRLGSKWPVFELKAISCLNCMAQLSPTRRHVKIEHDWRSTVHGAVKFAFDFFFFPFLSAA

SEQ ID NO: 52707 - protein, 1001 aa, Homo sapiens
LLAPLLLLRPPGVQSAGPIRAFVVPHSHMDVGWVYTVQESMRAYAANVYTSVVEELARGQQRRFIAVEQEFFRLWWDGVASDQQKYQVRQLLEEGRLEFVIGGQVMHDEAVTHLDDQILQLTEGHGFLYETFGIRPQFSWHVDPFGASATTPTLFALAGFNAHLGSRIDYDLKAAMQEARGLQFVWRGSPSLSERQEIFTHIMDQYSYCTPSHIPFSNRSGFYWNGVAVFPKPPQDGVYPNMSEPVTPANINLYAEALVANVKQRAAWFRTPHVLWPWGCDKQFFNASVQFANMDPLLDHINSHAAELGVSVQYATLGDYFRALHALNVTWRVRDHHDFLPYSTEPFQAWTGFYTSRSSLKGLARRASALLYAGESMFTRYLWPAPRGHLDPTWALQQLQQLRWAVSEVQHHDAITGTESPKVRDMYATHLASGMLGMRKLMASIVLDELQPQAPMAASSDAGPAGHFASVYNPLAWTVTTIVTLTVGFPGVRVTDEAGHPVPSQIQNSTETPSAYDLLILTTIPGLSYRHYNIRPTAGAQEGTQEPAATVASTLQFGRRLRRRTSHAGRYLVPVANDCYIVLLDQDTNLMHSIWERQSNRTVRVTQEFLEYHVNGDVKQGPISDNYLFTPGKAAVPAWEAVEMEIVAGQLVTEIRQYFYRNMTAQNYTYAIRSRLTHVPQGHDGELLCHRIEQEYQAGPLELNREAVLRTSTNLNSQQVIYSDNNGYQMQRRPYVSYVNNSIARNYYPMVQSAFMEDGKSRLVLLSERAHGISSQGNGQVEVMLHRRLWNNFDWDLGYNLTLNDTSVVHPVLWLLLGSWSLTTALRQRSALALQHRPVVLFGDLAGTAPKLPGPQQQEAVTLPPNLHLQILSIPGWRYSSNHTEHSQNLRKGHRGEAQADLRRVLLRLYHLYEVGEDPVLSQPVTVNLEAVLQALGSVVAVEERSLTGTWDLSMLHRWSWRTGPGRHRGDTTSPSRPPGGPIITVHPKEIRTFFIHFQQQ

SEQ ID NO: 52708 - protein, 83 aa, Homo sapiens
IDRLEAFVRMVGGRVARMEEQVTKAEAELGTFPRAFKKLLHTMNVPSLFSKSAPSRPQQAGYEAPVLFRTEDYFPCCSERPQL

SEQ ID NO: 52709 - protein, 31 aa, Homo sapiens
MQSRNKKWAQVLTALQKDSREMEKGSPSLRH

SEQ ID NO: 52710 - protein, 57 aa, Homo sapiens
LSPARYVTVKTIIIKDHLQKRQGIPSKSRLPSYLDKVLKKRILNFLTESGWISRDAS

SEQ ID NO: 52711 - protein, 75 aa, Homo sapiens
VLFVIGLFAAGAFILYKFKRKRPGRTVYAQMHNEKEQEMTSPVSHSEDVQGAVQGNHSGVVLSINSREMHSYLVS

SEQ ID NO: 52712 - protein, 366 aa, Homo sapiens
LPPAAGPAAMQARALLLAALAALALAREPPAAPCPARCDVSRCPSPRCPGGYVPDLCNCCLVCAASEGEPCGGPLDSPCGESLECVRGLCRCRWSHAVCGTDGHTYANVCALQAASRRALQLSGTPVRQLQKGACPLGLHQLSSPRYKFNFIADVVEKIAPAVVHIELFLRHPLFGRNVPLSSGSGFIMSEAGLIITNAHVVSSNSAAPGRQQLKVQLQNGDSYEATIKDIDKKSDIATIKIHPKKKLPVLLLGHSADLRPGEFVVAIGSPFALQNTVTTGIVSTAQREGRELGLRDSDMDYIQTDAIINYGNSGGPLVNLDGEVIGINTLKVTAGISFAIPSDRITRFLTEFQDKQIKAPSLAVH

SEQ ID NO: 52713 - protein, 462 aa, Homo sapiens
LPPAAGPAAMQARALLLAALAALALAREPPAAPCPARCDVSRCPSPRCPGGYVPDLCNCCLVCAASEGEPCGGPLDSPCGESLECVRGLCRCRWSHAVCGTDGHTYANVCALQAASRRALQLSGTPVRQLQKGACPLGLHQLSSPRYKFNFIADVVEKIAPAVVHIELFLRHPLFGRNVPLSSGSGFIMSEAGLIITNAHVVSSNSAAPGRQQLKVQLQNGDSYEATIKDIDKKSDIATIKIHPKKKLPVLLLGHSADLRPGEFVVAIGSPFALQNTVTTGIVSTAQREGRELGLRDSDMDYIQTDAIINYGNSGGPLVNLDGEVIGINTLKVTAGISFAIPSDRITRFLTEFQDKQIKDWKKRFIGIRMRTITPSLVDELKASNPDFPEVSSGIYVQEVAPNSPSQRGGIQDGDIIVKVNGRPLVDSSELQEAVLTESPLLLEVRRGNDDLLFSIAPEVVM

SEQ ID NO: 52714 - protein, 241 aa, Homo sapiens
KLLSRAYADVHPMMMDRSENRCGGNFLKRGSIINGADWYSFTGGMSDFNYLHTNCFEITVELGCVKFPPEEALYILWQHNKESLLNFVETVHRGIKGVVTDKFGKPVKNARISVKGIRHDITTAPDGDYWRLLPPGIHIVIAQAPGYAKVIKKVIIPARMKRAGRVDFILQPLGMGPKNFIHGLRRTGPHDPLGGASSLGEATEPDPLRARRQPSADGSKPWWWSYFTSLSTHRPRWLLKY

SEQ ID NO: 52715 - protein, 137 aa, Homo sapiens
KPVKNARISVKGIRHDITTAPDGDYWRLLPPGIHIVIAQAPGYAKVIKKVIIPARMKRAGRVDFILQPLGMGPKNFIHGLRRTGPHDPLGGASSLGEATEPDPLRARRQPSADGSKPWWWSYFTSLSTHRPRWLLKY

SEQ ID NO: 52716 - protein, 53 aa, Homo sapiens
LDSGKELKIDIIPNTQEHTLTLVDTGIGMTKADLINNLGTIAKFRTKAFMEAF

SEQ ID NO: 52717 - protein, 271 aa, Homo sapiens
LGRCAEYRALLSPEQRNKNCTAIWEAFKVALDKDPCSVLPSDYDLFINLSRHSIPRDKSLFWENSHLLVNSFADNTRRFMPLSDVLYGRVADFLSWCRQKNDSGLDYQSCPTSEDCENNPVDSFWKRASIQYSKDSSGVIHVMLNGSEPTGAYPIKGFFADYEIPNLQKEKITRIEIWVMHEIGGPNVESCGEGSMKVLEKRLKDMGFQYSCINDYRPVKLLQCVDHSTHPDCALKSAAAATQRKAPSLYTEQRAGLIIPLFLVLASRTQL

SEQ ID NO: 52718 - protein, 84 aa, Homo sapiens
MPLAKDLLHPSPEQEKRKHKKKRLVQSPNSYFMDVKCPGCYIITTVFSHAQTVVLCVGCSTVLCQPTGGKARLTEGYSFTRKQH

SEQ ID NO: 52719 - protein, 19 aa, Homo sapiens
LSNSFTQTVNCRKPFFSSW

SEQ ID NO: 52720 - protein, 29 aa, Homo sapiens
IFQRQKRRKFWKAKNLQHIPLKKGKRVVS

SEQ ID NO: 52721 - protein, 6 aa, Homo sapiens
RMLSSS

SEQ ID NO: 52722 - protein, 37 aa, Homo sapiens
IMLNTESTCPMCSERLNAAQLKKISDCTQYLRTEEEL

SEQ ID NO: 52723 - protein, 53 aa, Homo sapiens
ISLIGAAFYPIYFRPLMRLEEYKKEQAINRAGIVQEDVQPPGLKVWSDPFGRK

SEQ ID NO: 52724 - protein, 4 aa, Homo sapiens
IFQK

SEQ ID NO: 52725 - protein, 81 aa, Homo sapiens
KWMVRAFSGYLATDQLLLLWDRILGYNSLEILAVLAAAVFAFRAVNLMEVTSLAAAEAVLADLSTLKVMPLLQIFLFATVT

SEQ ID NO: 52726 - protein, 1514 aa, Homo sapiens
VLAILNKVAPQACPAQCSCSGSTVDCHGLALRSVPRNIPRNTERLDLNGNNITRITKTDFAGLRHLRVLQLMENKISTIERGAFQDLKELERLRLNRNHLQLFPELLFLGTAKLYRLDLSENQIQAIPRKAFRGAVDIKNLQLDYNQISCIEDGAFRALRDLEVLTLNNNNITRLSVASFNHMPKLRTFRLHSNNLYCDCHLAWLSDWLRQRPRVGLYTQCMGPSHLRGHNVAEVQKREFVCSGHQSFMAPSCSVLHCPAACTCSNNIVDCRGKGLTEIPTNLPETITEIRLEQNTIKVIPPGAFSPYKKLRRIDLSNNQISELAPDAFQGLRSLNSLVLYGNKITELPKSLFEGLFSLQLLLLNANKINCLRVDAFQDLHNLNLLSLYDNKLQTIAKGTFSPLRAIQTMHLAQNPFICDCHLKWLADYLHTNPIETSGARCTSPRRLANKRIGQIKSKKFRCSAKEQYFIPGTEDYRSKLSGDCFADLACPEKCRCEGTTVDCSNQKLNKIPEHIPQYTAELRLNNNEFTVLEATGIFKKLPQLRKINFSNNKITDIEEGAFEGASGVNEILLTSNRLENVQHKMFKGLESLKTLMLRSNRITCVGNDSFIGLSSVRLLSLYDNQITTVAPGAFDTLHSLSTLNLLANPFNCNCYLAWLGEWLRKKRIVTGNPRCQKPYFLKEIPIQDVAIQDFTCDDGNDDNSCSPLSRCPTECTCLDTVVRCSNKGLKVLPKGIPRDVTELYLDGNQFTLVPKELSNYKHLTLIDLSNNRISTLSNQSFSNMTQLLTLILSYNRLRCIPPRTFDGLKSLRLLSLHGNDISVVPEGAFNDLSALSHLAIGANPLYCDCNMQWLSDWVKSEYKEPGIARCAGPGEMADKLLLTTPSKKFTCQGPVDVNILAKCNPCLSNPCKNDGTCNSDPVDFYRCTCPYGFKGQDCDVPIHACISNPCKHGGTCHLKEGEEDGFWCICADGFEGENCEVNVDDCEDNDCENNSTCVDGINNYTCLCPPEYTGELCEEKLDFCAQDLNPCQHDSKCILTPKGFKCDCTPGYVGEHCDIDFDDCQDNKCKNGAHCTDAVNGYTCICPEGYSGLFCEFSPPMVLPRTSPCDNFDCQNGAQCIVRINEPICQCLPGYQGEKCEKLVSVNFINKESYLQIPSAKVRPQTNITLQIATDEDSGILLYKGDKDHIAVELYRGRVRASYDTGSHPASAIYSVETINDGNFHIVELLALDQSLSLSVDGGNPKIITNLSKQSTLNFDSPLYVGGMPGKSNVASLRQAPGQNGTSFHGCIRNLYINSELQDFQKVPMQTGILPGCEPCHKKVCAHGTCQPSSQAGFTCECQEGWMGPLCDQRTNDPCLGNKCVHGTCLPINAFSYSCKCLEGHGGVLCDEEEDLFNPCQAIKCKHGKCRLSGLGQPYCECSSGYTGDSCDREISCRGERIRDYYQKQQGYAACQTTKKVSRLECRGGCAGGQCCGPLRSKRRKYSFECTDGSSFVDEVEKVVKCGCTRCVS

SEQ ID NO: 52727 - protein, 108 aa, Homo sapiens
THSSEDVKPKTLPLDKSINHQIESPSERRKSISGKKLCSSCGLPLGKGAAMIIETLNLYFHIQCFRCGICKGQLGDAVSGTDVRIRNGLLNCNDCYMRSRSAGQPTTL

SEQ ID NO: 52728 - protein, 5 aa, Homo sapiens
IEVKS

SEQ ID NO: 52729 - protein, 51 aa, Homo sapiens [sequence omitted]

SEQ ID NO: 52730 - protein, 72 aa, Homo sapiens
LGYKAKQGYVIHRICVSRGGRKRPVPKGATYGKPVHHGVNQLKFCSKPSVRCGGASWTPLWGSGSPEFLLGW

SEQ ID NO: 52731 - protein, 89 aa, Homo sapiens
LNSYWVGEDSTYKFFEVILIDPFHKAIRRNPDTPWITKPVHKHREMRGLTSAGRKSRGLGKGHKFHHTICGSRRAAWRRRNTLQLHRYR

SEQ ID NO: 52732 - protein, 328 aa, Homo sapiens
ILARMQEESLRQEYAATTSRRSSGSSCNSTRRGTFSDQELDAQSLDDEDDNMHHAVYPAVNRFSPSPRNSPRPSPKQSPRNSPRSRSPARGIEYSRVSPQPMISRLQQPRLSLQGHPTDLQTSNVKNEEKLRRSLPNLSRTSNTQVDSVKSSRSDSNFQVPNGGIPRMQPQASATSQRLKNLPRTSLKAKQLLQTSSTKRVPSPGKFRSPAAPSPLALRQPVKAFSNHGSGSPGSQEITQLTQTTSSPGPPMVQSTVSANPPSNINSATLTRPAGTTAMRSGLPRPSAPSAGGIPVPRSKLAQPVRRSLPAPKTYGSMKDDSWKDGCY

SEQ ID NO: 52733 - protein, 241 aa, Homo sapiens
RFSPSPRNSPRPSPKQSPRNSPRSRSPARGIEYSRVSPQPMISRLQQPRLSLQGHPTDLQTSNVKNEEKLRRSLPNLSRTSNTQVDSVKSSRSDSNFQVPNGGIPRMQPQASAIPSPGKFRSPAAPSPLALRQPVKAFSNHGSGSPGSQEITQLTQTTSSPGPPMVQSTVSANPPSNINSATLTRPAGTTAMRSGLPRPSAPSAGGIPVPRSKLAQPVRRSLPAPKTYGSMKDDSWKDGCY

SEQ ID NO: 52734 - protein, 5 aa, Homo sapiens
VLTAP

SEQ ID NO: 52735 - protein, 309 aa, Homo sapiens
LLLLFLVPLLWAPAAVRAGPDEDLSHRNKEPPAPAQQLQPQPVAVQGPEPARVEKIFTPAAPVHTNKEDPATQTNLGFIHAFVAAISVIIVSELGDKTFFIAAIMAMRYNRLTVLAGAMLALGLMTCLSVLFGYATTVIPRVYTYYVSTVLFAIFGIRMLREGLKMSPDEGQEELEEVQAELKKKDEEFQRTKLLNGPGDVETGTSITVPQKKWLHFISPIFVQALTLTFLAEWGDRSQLTTIVLAAREDPYGVAVGGTVGHCLCTGLAVIGGRMIAQKISVRTVTIIGGIVFLAFAFSALFISPDSGF

SEQ ID NO: 52736 - protein, 876 aa, Homo sapiens
IKHALQRDIFTPNDERLLSIVNVCKAGKKKKNCFLCATVTTERPVQVKVVKVKKSDKGDFYKRQIAWALRDLAVVDAKDAIKENPEFDLHFEKIYKWVASSTAEKNAFISCIWKLNQRYLRKKIDFVNVSSQLLEESVPSGENQSVTGGDEEVVDEYQELNAREEQDIEIMMEGCEYAISNAEAFAEKLSRELQVLDGANIQSIMASEKQVNILMKLLDEALKEVDQIELKLSSYEEMLQSVKEQMDQISESNHLIHLSNTNNVKLLSEIEFLVNHMDLAKGHIKALQEGDLASSRGIEACTNAADALLQCMNVALRPGHDLLLAVKQQQQRFSDLRELFARRLASHLNNVFVQQGHDQSSTLAQHSVELTLPNHHPFHRDLLRYAKLMEWLKSTDYGKYEGLTKNYMDYLSRLYEREIKDFFEVAKIKMTGTTKESKKFGLHGSSGKLTGSTSSLNKLSVQSSGNRRSQSSSLLDMGNMSASDLDVADRTKFDKIFEQVLSELEPLCLAEQDFISKFFKLQQHQSMPGTMAEAEDLDGGTLSRQHNCGTPLPVSSEKDMIRQMMIKIFRCIEPELNNLIALGDKIDSFNSLYMLVKMSHHVWTAQNVDPASFLSTTLGNVLVTVKRNFDKCISNQIRQMEEVKISKKSKVGILPFVAEFEEFAGLAESIFKNAERRGDLDKAYTKLIRGVFVNVEKVANESQKTPRDVVMMENFHHIFATLSRLKISCLEAEKKEAKQKYTDHLQSYVIYSLGQPLEKLNHFFEGVEARVAQGIREEEVSYQLAFNKQELRKVIKEYPGKEVKKGLDNLYKKVDKHLCEEENLLQVVWHSMQDEFIRQYKHFEGLIARCYPGSGVTMEFTIQDILDYCSSIAQSH

SEQ ID NO: 52737 - protein, 162 aa, Homo sapiens
KVKKGNLKAKKPKKGKPRCSRNPVLVRGIGRYSRSAMYSRKAMYKRKYSAAKSKVEKKKKEKVLATVTKPVGGDKNGGTRVVKLRKMPRYYPTEDVPRKLLSHGKKKPFSQHVRKLRASITPGTILIILTGRHRGKRVVFLKQLASGLLLVTGPLVLNRVPL

SEQ ID NO: 52738 - protein, 75 aa, Homo sapiens
IATSTKIDISNVKIPKHLTDAYFKKKQLRKPRHQEGEIFDTEKGKYEITEQRKIDQKAVDSQILSKIKAIPQLQG

SEQ ID NO: 52739 - protein, 8 aa, Homo sapiens
IYPHKLVF

SEQ ID NO: 52740 - protein, 663 aa, Homo sapiens
VSVPALWSEVNRYGQNGDFTRALKTVNKILQINKDDVTALHCKVVCLIQNGSFKEALNVINTHTKVLANNSLSFEKAYCEYRLNRIENALKTIESANQQTDKLKELYGQVLYRLERYDECLAVYRDLVRNSQDDYDEERKTNLSAVVAAQSNWEKVVPENLGLQEGTHELCYNTACALIGQGQLNQAMKILQKAEDLCRRSLSEDTDGTEEDPQAELAIIHGQMAYILQLQGRTEEALQLYNQIIKLKPTDVGLLAVIANNIITINKDQNVFDSKKKVKLTNAEGVEFKLSKKQLQAIEFNKALLAMYTNQAEQCRKISASLQSQSPEHLLPVLIQAAQLCREKQHTKAIELLQEFSDQHPENAAEIKLTMAQLKISQGNISKACLILRSIEELKHKPGMVSALVTMYSHEEDIDSAIEVFTQAIQWYQNHQPKSPAHLSLIREAANFKLKYGRKKEAISDLQQLWKQNPKDIHTLAQLISAYSLVDPEKAKALSKHLPSSDSMSLKVDVEALENSAGATYIRKKGGKVTGDSQPKEQGQGDLKKKKKKKKGKLPKNYDPKVTPDPERWLPMRERSYYRGRKKGKKKDQIGKGTQGATAGASSELDASKTVSSPPTSPRPGSAATVSASTSNIIPPRHQKPAGAPATKKKQQQKKKKGGKGGW

SEQ ID NO: 52741 - protein, 398 aa, Homo sapiens
VLALDMDDEDDEDGGNAGEEEEEENADDDGGSSVQSEAEASVDPSLSWGQRKKLYYDTDYGSKSRGRQSQQEAEEEEREEEEEAQIIQRRLAQALQEDDFGVAWVEAFAKPVPQVDEAETRVVKDLAKVSVKEKLKMLRKESPELLELIEDLKVKLTEVKDELEPLLELVEQGIIPPGKGSQYLRTKYNLYLNYCSNISFYLILKARRVPAHGHPVIERLVTYRNLINKLSVVDQKLSSEIRHLLTLKDDAVKKELIPKAKSTKPKPKSVSKTSAAACAVTDLSDDSDFDEKAKLKYYKEIEDRQKLKRKKEENSTEEQALEDQNAKRAITYQIAKNRGLTPRRKKIDRNPRVKHREKFRRAKIRRRGQVREVRKEEQRYSGELSGIRAGVKKSIKLK

SEQ ID NO: 52742 - protein, 60 aa, Homo sapiens
KQDALVSLRQQLDDLRALKHELAFKLQSSDLGVKQKSELNSRLEEKTNQMAATIKQLEQR

SEQ ID NO: 52743 - protein, 44 aa, Homo sapiens
KNCSGTFCDACSTNELPLPSSIKLERVCNPCHKHLMKQYSTSPS

SEQ ID NO: 52744 - protein, 30 aa, Homo sapiens
VPILTLDVNEDFKDKYESLVEKVKEFLSTL

SEQ ID NO: 52745 - protein, 40 aa, Homo sapiens
VEWKFVLVENGGVTRWEECSNRFLETGHEDKVVHAWWGIH

SEQ ID NO: 52746 - protein, 22 aa, Homo sapiens
VPQLRWPWPWGDRLSEASVLLK

SEQ ID NO: 52747 - protein, 416 aa, Homo sapiens
LRRGGGWARGERDGAGAVRPRRRCLGGRVGCRTGGTAEAVGPRPARQVWKPPLRPVRADREAAGGWRRVSGTMKDLGAEHLAGHEGVQLLGLLNVYLEQEERFQPREKGLSLIEATPENDNTLCPGLRNAKVEDLRSLANFFGSCTETFVLAVNILDRFLALMKVKPKHLSCIGVCSFLLAARIVEEDCNIPSTHDVIRISQCKCTASDIKRMEKIISEKLHYELEATTALNFLHLYHTIILCHTSERKEILSLDKLEAQLKACNCRLIFSKAKPSVLALCLLNLEVETLKSVELLEILLLVKKHSKINDTEFFYWRELVSKCLAEYSSPECCKPDLKKLVWIVSRRTAQNLHNSYYSVPELPTIPEGGCFDESESEDSCEDMSCGEESLSSSPPSDQECTFFFNFKVAQTLCFPS

SEQ ID NO: 52748 - protein, 134 aa, Homo sapiens
IVADFYVAVPEIMPELNRLRKKLNKKYPKLSRNSIGRDIPKMLELFKNGHEIKVDEERENFLQTKIATLDMSSDQIAANLQAVINEVCRHRPLNLGPFVVRAFLRSSTSEGLLLKIDPLLPKEVKNEESEKEDA

SEQ ID NO: 52749 - protein, 90 aa, Homo sapiens
ILELVDGHFDTKIGHKVESESYRKIADSIGCSTNNILFLTDVTREASAAEEADVHVAVVVRPGNAGLTDDEKTYYSLITSFSELYLPSST

SEQ ID NO: 52750 - protein, 70 aa, Homo sapiens
LEEYPLNTKVEVPKRHPDRVEKNVNRHYCTVRNVNILSEPEAAYTFKGAKVKRLNLEVRVHNNLQDGTEV

SEQ ID NO: 52751 - protein, 29 aa, Homo sapiens
KLTEEELLDREFDLLRSSKGHLKAYFASQ

SEQ ID NO: 52752 - protein, 33 aa, Homo sapiens
LALKEMDLEDAEPDVLNYFSKIHQLELLLAAAI

SEQ ID NO: 52753 - protein, 26 aa, Homo sapiens
LGRTDCSPIQFESAWALANIASGTSE

SEQ ID NO: 52754 - protein, 284 aa, Homo sapiens
LKVSGTKMGTHSVQNGTVRMGILNSDTLGNPTNVRNMSWLPNGYVTLRDNKQKEQAGELGQHNRLSTYDNVHQQFSMMNLDDKQSIDSATWSTSSCEISLPENSNSCRSSTTTCPEQDFFGGNFEDPVLDGPPQDDLSHPRDYESKSDHRSVGGRSSRATSSSDNSETFVGNSSSNHSALHSLVSSLKQEMTKQKIEYESRIKSLEQRNLTLETEMMSLHDELDQERKKFTMIEIKMRNAERAKEDAEKRNDMLQKEMEQFFSTFGELTVEPRRTERGNTIWIQ

SEQ ID NO: 52755 - protein, 82 aa, Homo sapiens
KSLEQRNLTLETEMMSLHDELDQERKKFTMIEIKMRNAERAKEDAEKRNDMLQKEMEQFFSTFGELTVEPRRTERGNTIWIQ

SEQ ID NO: 52756 - protein, 28 aa, Homo sapiens
IFCYQVILYVLTRLQAEEEQKQQPQLLK

SEQ ID NO: 52757 - protein, 22 aa, Homo sapiens
ISASQYGPSPGLRRGRPGLESR

SEQ ID NO: 52758 - protein, 343 aa, Homo sapiens
KALAAVSLSLALASVTIRSSRCRGIQAFRNSFSSSWFHLNTNVMSGSNGSKENSHNKARTSPYPGSKVERSQVPNEKVGWLVEWQDYKPVEYTAVSVLAGPRWADPQISESNFSPKFNEKDGHVERKSKNGLYEIENGRPRNPAGRTGLVGRGLLGRWGPNHAADPIITRWKRDSSGNKIMHPVSGKHILQFVAIKRKDCGEWAIPGGMVDPGEKISATLKREFGEEALNSLQKTSAEKREIEEKLHKLFSQDHLVIYKGYVDDPRNTDNAWMETEAVNYHDETGEIMDNLMLEAGDDAGKVKWVDINDKLKLYASHSQFIKLVAEKRDAHWSEDSEADCHAL

SEQ ID NO: 52759 - protein, 101 aa, Homo sapiens
ISNASDALDKIRYESLTDPSKLDSGKELKIDIIPNPQERTLALVDTGIGMTKADLINNLRTIAKSGTKACMEALQAGADISMIGQFGVGFFLPTWWQRNWL

SEQ ID NO: 52760 - protein, 13 aa, Homo sapiens
KKKTKKIKEKYID

SEQ ID NO: 52761 - protein, 368 aa, Homo sapiens
KLQCPTCIKLGIQGSYFCSQECFKGSWATHKLLHKKAKDEKAKREVSSWTVEGDINTDPWAGYRYTGKLRPHYPLMPTRPVPSYIQRPDYADHPLGMSESEQALKGTSQIKLLSSEDIEGMRLVCRLAREVLDVAAGMIKPGVTTEEIDHAVHLACIARNCYPSPLNYYNFPKSCCTSVNEVICHGIPDRRPLQEGDIVNVDITLYRNGYHGDLNETFFVGEVDDGARKLVQTTYECLMQAIDAVKPGVRYRELGNIIQKHAQANGFSVVRSYCGHGIHKLFHTAPNVPHYAKNKAVGVMKSGHVFTIEPMICEGGWQDETWPDGWTAVTRDGKRSAQFEHTLLVTDTGCEILTRRLDSARPHFMSQF

SEQ ID NO: 52762 - protein, 789 aa, Homo sapiens
LEGQPPRVAWAERLVRGLRGLWGTRLMEESSTNREKYLKSVLRELVTYLLFLIVLCILTYGMMSSNVYYYTRMMSQLFLDTPVSKTEKTNFKTLSSMEDFWKFTEGSLLDGLYWKMQPSNQTEADNRSFIFYENLLLGVPRIRQLRVRNGSCSIPQDLRDEIKECYDVYSVSSEDRAPFGPRNGTAWIYTSEKDLNGSSHWGIIATYSGAGYYLDLSRTREETAAQVASLKKNVWLDRGTRATFIDFSVYNANINLFCVVRLLVEFPATGGVIPSWQFQPLKLIRYVTTFDFFLAACEIIFCFFIFYYVVEEILEIRIHKLHYFRSFWNCLDVVIVVLSVVAIGINIYRTSNVEVLLQFLEDQNTFPNFEHLAYWQIQFNNIAAVTVFFVWIKLFKFINFNRTMSQLSTTMSRCAKDLFGFAIMFFIIFLAYAQLAYLVFGTQVDDFSTFQECIFTQFRIILGDINFAEIEEANRVLGPIYFTTFVFFMFFILLNMFLAIINDTYSEVKSDLAQQKAEMELSDLIRKGYHKALVKLKLKKNTVDDISESLRQGGGKLNFDELRQDLKGKGHTDAEIEAIFTKYDQDGDQELTEHEHQQMRDDLEKEREDLDLDHSSLPRPMSSRSFPRSLDDSEEDDDEDSGHSSRRRGSISSGVSYEEFQVLVRRVDRMEHSIGSIVSKIDAVIVKLEIMERAKLKRREVLGRLLDGVAEDERLGRDSEIHREQMERLVREELERWESDDAASQISHGLGTPVGLNGQPRPRSSRPSSSQSTEGMEGAGGNGSSNVHV

SEQ ID NO: 52763 - protein, 37 aa, Homo sapiens
VAHTCYNLLDLPKYSSKEILSARLTQALDNYEGFSLA

SEQ ID NO: 52764 - protein, 578 aa, Homo sapiens
LLQALAQNNTETSEKIQASGILQLFASLLTPQSSCKAKVANIIAEVAKNEFMRIPCVDAGLISPLVQLLNSKDQEVLLQTGRALGNICYDSHEGRSAVDQAGGAQIVIDHLRSLCSITDPANEKLLTVFCGMLMNYSNENDSLQAQLINMGVIPTLVKLLGIHCQNAALTEMCLVAFGNLAELESSKEQFASTNIAEELVKLFKKQIEHDKREMIFEVLAPLAENDAIKLQLVEAGLVECLLEIVQQKVDSDKEDDITELKTGSDLMVLLLLGDESMQKLFEGGKGSVFQRVLSWIPSNNHQLQLAGALAIANFARNDANCIHMVDNGIVEKLMDLLDRHVEDGNVTVQHAALSALRNLAIPVINKAKMLSAGVTEAVLKFLKSEMPPVQFKLLGTLRMLIDAQAEAAEQLGKNVKLVERLVEWCEAKDHAGVMGESNRLLSALIRHSKSKDVIKTIVQSGGIKHLVTMATSEHVIMQNEALVALALIAALELGTAEKDLESAKLVQILHRLLADERSAPEIKYNSMVLICALMGSECLHKEVQDLAFLDVVSKLRSHENKSVAQQASLTEQRLTVES

SEQ ID NO: 52765 - protein, 309 aa, Homo sapiens
MSNSLPCLLLLVAAGADVNAQEQKSGRTALHLAVEHDNISLAGCLLLEGDAHVDSTTYDGTTPLHIAAGRGSTRLAALLKAAGADPLVENFEPLYDLDDSWENAGEDEGVVPGTTPLDMATSWQVFDILNGKPYEPEFTSDDLLAQGDMKQLAEDVKLQLYKLLEIPDPDKNWATLAQKLGLGILNNAFRLSPAPSKTLMDNYEVSGGTVRELVEALRQMGYTEAIEVIQAASSPVKTTSQAHSLPLSPASTRQQIDELRDSDSVCDSGVETSFRKLSFTESLTSGASLLTLNKMPHDYGQEGPLEGKI

SEQ ID NO: 52766 - protein, 117 aa, Homo sapiens
KRLPVPESITGFARLTVSEWLRLLPFLGVLALLGYLAVRPFLPKKKQQKDSLINLKIQKENPKVVNEINIEDLCLTKAAYCRCWRSKTFPACDGSHNKHNELTGDNVGPLILKKKEV

SEQ ID NO: 52767 - protein, 26 aa, Homo sapiens
IRKEKRDLMACAQTGSGKLQHFSCPC

SEQ ID NO: 52768 - protein, 271 aa, Homo sapiens
IHKIYHTLNKLNLTEDIGQDDHQTGSLRSCSSSDCFNKVMPPRKKRRPASGDDLSAKKSRHDSMYRKYDSTRIKTEEEAFSSKRCLEWFYEYAGTDDVVGPEGMEKFCEDIGVEPENVVMLVLAWKLDAQNMGYFTLQEWLKGMTSLQCDTTEKLRNTLDYLRSFLNDSTNFKLIYRYAFDFAREKDQRSLDINTAKCMLGLLLGKIWPLFPVFHQFLEQSKYKVINKDQWCNVLEFSRTINLDLSNYDEDGAWPVLLDEFVEWYKDKQMS

SEQ ID NO: 52769 - protein, 326 aa, Homo sapiens
VVLRFMIFCRLLAKMANNDAVLKRLEQKGAEADQIIEYLKQQVSLLKEKAILQATLREEKKLRVENAKLKKEIEELKQELIQAEIQNGVKQIPFPSGTPLHANSMVSENVIQSTAVTTVSSGTKEQIKGGTGDEKKAKEKIEKKGEKKEKKQQSIAGSADSKPIDVSRLDLRIGCIITARKHPDADSLYVEEVDVGEIAPRTVVSGLVNHVPLEQMQNRMVILLCNLKPAKMRGVLSQAMVMCASSPEKIEILAPPNGSVPGDRITFDAFPGEPDKELNPKKKIWEQIQPDLHTNDECVATYKGVPFEVKGKGVCRAQTMSNSGIK

SEQ ID NO: 52770 - protein, 8 aa, Homo sapiens
INSWKCRL

SEQ ID NO: 52771 - protein, 47 aa, Homo sapiens
MELFLMFVSLMQSFAFALPEDSKKPLLTGRFGLTLAPHPFNITISRR

SEQ ID NO: 52772 - protein, 19 aa, Homo sapiens
ILQQPPPLQAMQQPPPQKV

SEQ ID NO: 52773 - protein, 29 aa, Homo sapiens
VKKPHRYRPGTVALREIRCYQKSTELLIR

SEQ ID NO: 52774 - protein, 125 aa, Homo sapiens
KIISTEPLPGRKQVRDTLAAISEVLYVDLLEGDTECHARFKTPEDAQAVINAYTEINKKHCWKLEILSGDHEQRYWQKILVDRQAKLNQPREKKRGTEKLITKAEKIRLAKTQQASKHIRFSEYD

SEQ ID NO: 52775 - protein, 11 aa, Homo sapiens
MRMKLPGYLMG

SEQ ID NO: 52776 - protein, 340 aa, Homo sapiens
MFSSKTKSADEQSIYEKERIAHAKQIIKPFILRRVKEEVLKQLPPKKDRIELCAMSEKQEQLYLGLFNRLKKSINNLVTEKNTEMCNVMMQLRKMANHPLLHRQYYTAEKLKEMSQLMLKEPTHCEANPDLIFEDMEVMTDFELHVLCKQYRHINNFQLDMDLILDSGKFRVLGCILSELKQKGDRVVLFSQFTMMLDILEVLLKHHQHRYLRLDGKTQISERIHLIDEFNTDMDIFVFLLSTKAGGLGINLTSANVVILHDIDCNPYNDKQAEDRCHRVGQTKEVLVIKLISQGTIEESMLKINQQKLKLEQDMTTVDEGDEGSMPADIATLLKTSMGL

SEQ ID NO: 52777 - protein, 17 aa, Homo sapiens
LSLFPYQSAAIRGAEEA

SEQ ID NO: 52778 - protein, 7 aa, Homo sapiens
METPAAL

SEQ ID NO: 52779 - protein, 378 aa, Homo sapiens
IQDGRFNLFKVQQGRTGNSEKETALPSTKAEFTSPPSLFKTGLPPSRNSTSSQSQTSTASRKANSSVGKWQDRYGRAESPDLRRLPGAIDVIGQTITISRVEGRRRANENSNIQVLSERSATEVDNNFSKPPPFFPPGAPPTHLPPPPFLPPPPTVSTAPPLIPPPGIPITVPPPGFPPPPGAPPPSLIPTIESGHSSGYDSRSARAFPYGNVAFPHLPGSAPSWPSLVDTSKQWDYYARREKDRDRERDRDRERDRDRDRERERTRERERERDHSPTPSVFNSDEERYRYREYAERGYERHRASREKEERHRERRHREKEETRHKSSRSNSRRRHESEEGDSHRRHKHKKSKRSKEGKEAGSEPAPEQESTEATPAE

SEQ ID NO: 52780 - protein, 332 aa, Homo sapiens
LFKTGLPPSRNSTSSQSQTSTASRKANSSVGKWQDRYGRAESPDLRRLPGAIDVIGQTITISRVEGRRRANENSNIQVLSERSATEVDNNFSKPPPFFPPGAPPTHLPPPPFLPPPPTVSTAPPLIPPPGFPPPPGAPPPSLIPTIESGHSSGYDSRSARAFPYGNVAFPHLPGSAPSWPSLVDTSKQWDYYARREKDRDRERDRDRERDRDRDRERERTRERERERDHSPTPSVFNSDEERYRYREYAERGYERHRASREKEERHRERRHREKEETRHKSSRSNSRRRHESEEGDSHRRHKHKKSKRSKEGKEAGSEPAPEQESTEATPAE

SEQ ID NO: 52781 - protein, 19 aa, Homo sapiens
LVLKEMADLEKRCEGSLQD

SEQ ID NO: 52782 - protein, 8 aa, Homo sapiens
MCGTFIAE

SEQ ID NO: 52783 - protein, 7 aa, Homo sapiens
VDDMQRY

SEQ ID NO: 52784 - protein, 64 aa, Homo sapiens
LEPSANMPWFKGWKVTRKDGNASGTTLLEALDCILPPTRPTDKPLCLPLQDVYKIGGIGTVPVG

SEQ ID NO: 52785 - protein, 164 aa, Homo sapiens
LSEVLPGDNVGFNVKNVSVKDVRRGNVAGDSKKDPPMEAAGFTAQVIILNHPGQISAGYAPVLDCHTAHIACKFAELKEKTDRHSGKKLEDGPKFLKSGDAAIVDMVPGKPVYVESFSDYPPLGRFAVHDIRQTVAVGVIKAVDKKAAGAGKVTKSAQKAQKAK

SEQ ID NO: 52786 - protein, 86 aa, Homo sapiens
VDEIFGQLRDFYFSVKLSENMKASSFKKLQKFYIDPYKLLPLQRFLPRPPGEKGPPRGGGRGGRGGGRGGGGRGGGRGGKLLGENF

SEQ ID NO: 52787 - protein, 5 aa, Homo sapiens
MYLRR

SEQ ID NO: 52788 - protein, 121 aa, Homo sapiens
KVTRKIIRRYVSSEGTEKEEIMVQGMPQEPVNIEEGDGYSKVIKRVVLKSDTEQSEVTLCEPSILSSTSQFQAEPVEGRRVSKVVKTTVVLGERMEKHLGDSSLATDLPSAKDDFEEDNNE

SEQ ID NO: 52789 - protein, 771 aa, Homo sapiens
LVSFAVSSEGTEQGEDPRSEKDHSRPHKHRARHARLRRSESLSEKQVKEAKSKCKSIALLLTDAPNPNSKGVLMFKKRRRRARKYTLVSYGTGELEREADEEEEGDKEDTCEVAFLGASESEVDEELLSDVDDNTQVVNFDWDSGLVDIEKKLNRGDKMEMLPDTTGKGALMFAKRRERMDQITAQKEEDKVGGTPSREQDAAQTDGLRTTTSYQRKEEESVRTQSSVSKSYIEVSHGLGHVPQQNGFSGTSETANIQRMVPMNRTAKPFPGSVNQPATPFSPTRNMTSPIADFPAPPPYSAVTPPPDAFSRGVSSPIAGPAQPPPWPQPAPWSQPAFYDSSERIASRDERISVPAKRTGILQEAKRRSTTKPMFTFKEPKVSPNPELLSLLQNSEGKRGTGAGGDSGPEEDYLSLGAEACNFMQSSSAKQKTPPPVAPKPAVKSSSSQPVTPVSPVWSPGVAPTQPPAFPTSNPSKGTVVSSIKIAQPSYPPARPASTLNVAGPFKGPQAAVASQNYTPKPTVSTPTVNAVQPGAVGPSNELPGMSGRGAQLFAKRQSRMEKYVVDSDTVQAHAARAQSPTPSLPASWKYSSNVRAPPPVAYNPIHSPSYPLAALKSQPSAAQPSKMGKKKGKKPLNALDVMKHQPYQLNASLFTFQPPDAKDGLPQKSSVKVNSALAMKQALPPRPVNAASPTNVQASSVYSVPAYTSPPSFFAEASSPVSASPVPVGIPTSPKQESASSSYFVAPRPKFSAKKSGVTIQVWKPSVVEE

SEQ ID NO: 52790 - protein, 64 aa, Homo sapiens
LASKCVTDECFFFERLESNNYNTYRSRKYTSWYVALKRTGQYKLGSKTGPGQKAILFLPMSAKS

SEQ ID NO: 52791 - protein, 50 aa, Homo sapiens
IMKRGRLPSSSEDSDDNGSLSTTWSQNSRSQHRRSSCSRHEDRKPSEGCV

SEQ ID NO: 52792 - protein, 491 aa, Homo sapiens
ILAENDEVKFKSYCPKHSSHRKPEESLGKGAAQENGAPECSPRNPLEPFASLEQNREEAHRVSVRKQKLQQLEDEFYTFVNLLDVARALRLPEEVVDFLYQYWKLKRKVNFNKPLITPKKDEEDNLAKREQDVLFRRLQLFTHLRQDLERVRNLTYMVTRREKIKRSVCKVQEQIFNLYTKLLEQERVSGVPSSCSSSSLENMLLFNSPSVGPDAPKIEDLKWHSAFFRKQMGTSLVHSLKKPHKRDPLQNSPGSEGKTLLKQPDLCGRREGMVVPESFLGLEKTFAEARLISAQQKNGVVMPDHGKRRDNRFHCDLIKGDLKDKSFKQSHKPLRSTDVSQRHLDNTRAATSPGVGQSAPGTRKEIVPKCNGSLIKVNYNQTAVKVPTTPASPVKNWGGFRIPKKGERQQQGEAHDGACHQHSDYPYLGLGRVPAKERAKSKLKSDNENDGYVPDVEMSDSESEASEKKCIHTSSTISRRTDIIRRSILAS

SEQ ID NO: 52793 - protein, 57 aa, Homo sapiens
RQKTNVFAPDYIAGMSPFVENDISSRSATLQVRDSTLGAGRRRLNPNASRKKFVKKR

SEQ ID NO: 52794 - protein, 38 aa, Homo sapiens
LLTEEQIGPNRLPSFNYPSDHLSLVCDFSFTEESDGLS

SEQ ID NO: 52795 - protein, 37 aa, Homo sapiens
IMKRHFTQALSTVTPRIPESLRRFYEDYQEKSGLHTL

SEQ ID NO: 52796 - protein, 51 aa, Homo sapiens
IILSDSEEEEMIILEPDKNPKKIRTQTTSAKQEKAPSKKPVKRRKKKRAAN

SEQ ID NO: 52797 - protein, 858 aa, Homo sapiens
KENALFKRILRCYEHKQYRNGLKFCKQILSNPKFAEHGETLAMKGLTLNCLGKKEEAYELVRRGLRNDLKSHVCWHVYGLLQRSDKKYDEAIKCYRNALKWDKDNLQILRDLSLLQIQMRDLEGYRETRYQLLQLRPAQRASWIGYAIAYHLLEDYEMAAKILEEFRKTQQTSPDKVDYEYSELLLYQNQVLREAGLYREALEHLCTYEKQICDKLAVEETKGELLLQLCRLEDAADVYRGLQERNPENWAYYKGLEKALKPANMLERLKIYEEAWTKYPRGLVPRRLPLNFLSGEKFKECLDKFLRMNFSKGCPPVFNTLRSLYKDKEKVAIIEELVVGYETSLKSCRLFNPNDDGKEEPPTTLLWVQYYLAQHYDKIGQPSIALEYINTAIESTPTLIELFLVKAKIYKHAGNIKEAARWMDEAQALDTADRFINSKCAKYMLKANLIKEAEEMCSKFTREGTSAVENLNEMQCMWFQTECAQAYKAMNKFGEALKKCHEIERHFIEITDDQFDFHTYCMRKITLRSYVDLLKLEDVLRQHPFYFKAARIAIEIYLKLHDNPLTDENKEHEADTANMSDKELKKLRNKQRRAQKKAQIEEEKKNAEKEKQQRNQKKKKDDDDEEIGGPKEELIPEKLAKVETPLEEAIKFLTPLKNLVKNKIETHLFAFEIYFRKEKFLLMLQSVKRAFAIDSSHPWLHECMIRLFNTAVCESKDLSDTVRTVLKQEMNRLFGATNPKNFNETFLKRNSDSLPHRLSAAKMVYYLDPSSQKRAIELATTLDESLTNRNLQTCMEVLEALYDGSLGDCKEAAEIYRANCHKLFPYALAFMPPGYEEDMKITVNGDSSAEAEELANEI

SEQ ID NO: 52798 - protein, 162 aa, Homo sapiens
VDFRERAVEIDGERIKIQLWDTAGQERFRKSMVQHYYRNVHAVVFVYDMTNMASFHSLPSWIEECKQHLLANDIPRILVGNKCDLRSAIQVPTDLAQKFADTHSMPLFETSAKNPNDNDHVEAIFMTLAHKLKSHKPLMLSQPPDNGIILKPEPKPAMTCWC

SEQ ID NO: 52799 - protein, 91 aa, Homo sapiens
IYLPVRSTNSSVRKMAGNSILLAAVSILSACQQSYFALQVGKARLKYKVTPPAVTGSPEFERVFRAHFCYLSGSGVHIWPSPILLGIFRSC

SEQ ID NO: 52800 - skipped

SEQ ID NO: 52801 - protein, 14 aa, Homo sapiens
IFNALFKIAFFFSA

SEQ ID NO: 52802 - protein, 10 aa, Homo sapiens
MHPIVTCQSL

SEQ ID NO: 52803 - protein, 26 aa, Homo sapiens
IEQLDVTTSEYEKEKLNEHWQNFQME

SEQ ID NO: 52804 - protein, 605 aa, Homo sapiens
IFFRPVMADKLTRIAIVNHDKCKPKKCRQECKKSCPVVRMGKLCIEVTPQSKIAWISETLCIGCGICIKKCPFGALSIVNLPSNLEKETTHRYCANAFKLHRLPIPRPGEVLGLVGTNGIGKSTALKILAGKQKPNLGKYDDPPDWQEILTYFRGSELQNYFTKILEDDLKAIIKPQYVDQIPKAAKGTVGSILDRKDETKTQAIVCQQLDLTHLKERNVEDLSGGELQRFACAVVCIQKADIFMFDEPSSYLDVKQRLKAAITIRSLINPDRYIIVVEHDLSVLDYLSDFICCLYGVPSAYGVVTMPFSVREGINIFLDGYVPTENLRFRDASLVFKVAETANEEEVKKMCMYKYPGMKKKMGEFELAIVAGEFTDSEIMVMLGENGTGKTTFIRMLAGRLKPDEGGEVPVLNVSYKPQKISPKSTGSVRQLLHEKIRDAYTHPQFVTDVMKPLQIENIIDQEVQTLSGGELQRVALALCLGKPADVYLIDEPSAYLDSEQRLMAARVVKRFILHAKKTAFVVEHDFIMATYLADRVIVFDGVPSKNTVANSPQTLLAGMNKFLSQLEITFRRDPNNYRPRINKLNSIKDVEQKKSGNYFFLDD

SEQ ID NO: 52805 - protein, 168 aa, Homo sapiens
IMLLSLAAFSVISVVSYLILALLSVTISFRIYKSVIQAVQKSEEGHPIKAYLDVDITLSSEAFHNYMNAAVVHINRALKLIILLFLVEDLVDSLKQAVFMWLMTYVGAFFNGITLLILAELLIFSVPIVYEKYKTQIDHYVGIARHQTKSIVEKIQAKLPGIAKKKAE

SEQ ID NO: 52806 - protein, 30 aa, Homo sapiens
IEIHLHGPLQWLDKVLTQMGSPHNPISSVS

SEQ ID NO: 52807 - protein, 22 aa, Homo sapiens
MLFVRGLAVVPGLKMLRAPGDI

SEQ ID NO: 52808 - protein, 52 aa, Homo sapiens
IQVFDGSGSFLSYINTSADPLYGPQGLALTSDGHVVVADSGNHCFKVYRYLQ

SEQ ID NO: 52809 - protein, 43 aa, Homo sapiens
LGFCFLLVEVSACRKFMFWDLQLQGDKGNSSSSPTSLIERTIF

SEQ ID NO: 52810 - protein, 38 aa, Homo sapiens
LICSRSKARVVESSPDISFIVKHSSVFPSIKENNYKFI

SEQ ID NO: 52811 - protein, 388 aa, Homo sapiens
IAGIFLLLTIPISLWVILQHLVHYTQPELQKPIIRILWMVPIYSLDSWIALKYPGIAIYVDTCRECYEAYVIYNFMGFLTNYLTNRYPNLVLILEAKDQQKHFPPLCCCPPWAMGEVLLFRCKLGVLQYTVVRPFTTIVALICELLGIYDEGNFSFSNAWTYLVIINNMSQLFAMYCLLLFYKVLKEELSPIQPVGKFLCVKLVVFVSFWQAVVIALLVKVGVISEKHTWEWQTVEAVATGLQDFIICIEMFLAAIAHHYTFSYKPYVQEAEEGSCFDSFLAMWDVSDIRDDISEQVRHVGRTVRGHPRKKLFPEDQDQNEHTSLLSSSSQDAISIASSMPPSPMGHYQGFGHTVTPQTTPTTAKISDEILSDTIGEKKEPSDKSVDS

SEQ ID NO: 52812 - protein, 675 aa, Homo sapiens
LIKPLEKFRKEQLGAVKEEKKKFDKETEKNYSLIDKHLNLSAKKKDSHLQEADIQVEQNRQHFYELSLEYVCKLQEIQERKKFEFVEPMLSFFQGMFTFYHQGHELAKDFNHYKMELQINIQNTRNRFEGTRSEVEELMNKIRQNPKDHKRASQFTAEGYLYVQEKRPAPFGSSWVKHYCMYRKAAKKFNMIPFEHRSGGKLGDGEVFFLKECTKRHTDSIDRRFCFDIEAADRPGVSLTMQAFSEEERKQWLEALGGKEALSHSFNTAIIPRPEGNAQLDKMGFTIIRKCISAVETRGINDQGLYRVVGVSSKVQRLLSMLMDVKTCNEVDLENSADWEVKTITSALKQYLRSLPEPLMTYELHGDFIVPAKSGSPESRVNAIHFLVHKLPEKNKEMLDILVKHLTNVSNHSKQNLMTVANLGVVFGPTLMRPQEETVAALMDLKFQNIVVEILIENHEKIFRTPPDTTFPEPTCLSASPPNAPPRQSKRQGQRTKRPVAVYNLCLELEDGDNPYPSKEDTPTSSLDSLSSPSPVTTAVPGPPGPDKNHLLADGGSFGDWASTIPGQTRSSMVQWLNPQSPTTTSSNSAVTPLSPGSSPFPFSPPATVADKPPESIRSRKARAVYPCEAEHSSELSFEIGAIFEDVQTSREPGWLEGTLNGKRGLIPQNYVKLL

SEQ ID NO: 52813 - protein, 377 aa, Homo sapiens
KESTMAQESPKNSAAEIPVTSNGEVDDSREHSFNRDLKHSLPSGLGLSETQITSHGFDNTKEGVIEAGAFQGSPAPPLPSVMSPSRVAASRLAQQGSDLIVPAGGQRTQTKSGPVILADEIKNPAMEKLELVRKWSLNTYKCTRQIISEKLGRGSRTVDLELEAQIDILRDNKKKYENILKLAQTLSTQLFQMVHTQRQLGDAFADLSLKSLELHEEFGYNADTQKLLAKNGETLLGAINFFIASVNTLVNKTIEDTLMTVKQYESARIEYDAYRTDLEELNLGPRDANTLPKIEQSQHLFQAHKEKYDKMRNDVSVKLKFLEENKVKVLHNQLVLFHNAIAAYFAGNQKQLEQTLKQFHIKLKTPGVDAPSWLEEQ

SEQ ID NO: 52814 - protein, 86 aa, Homo sapiens
LLPKMMNADMDAVDAENQVELEEKTRLINQVLELQHTLEDLSARVDAVKEENLKLKSENQVLGQYIENLMSASSVFQTTDTKSKRK

SEQ ID NO: 52815 - protein, 12 aa, Homo sapiens
LFFNVIYWSIYL

SEQ ID NO: 52816 - protein, 5 aa, Homo sapiens
MLNGV

SEQ ID NO: 52817 - protein, 136 aa, Homo sapiens
IRIEKIGLKDAGQCIDPYITVRVKDLNGIDLTPVQDTPVASRKEDTYVHFNVDIELQKHVEKLIKGAAIFFEFKHYKPKKRFTSTKCFAFMEMDEIKPGPIVIELYKKPTDFKRKKLQLLTKKTLYLRLHQTLHKE

SEQ ID NO: 52818 - protein, 24 aa, Homo sapiens
VTLNMLVPLAKLSCLGTIIKMNRA

SEQ ID NO: 52819 - protein, 269 aa, Homo sapiens
IRPTLEGGKRIAYGARALNEGGFQSIPKLTFPGGLLIGCSPGFMNVPKIKGTHTAMKSGILAAESIFNQLTSENLQSKTIGLHVTEYEDNLKNSWVWKELYSVRNIRPSCHGVLGVYGGMIYTGIFYWILRGMEPWTLKHKGSDFERLKPAKDCTPIEYPKPDGQISFDLLSSVALSGTNHEHDQPAHLTLRDDSIPVNRNLSIYDGPEQRFCPAGVYEFVPVEQGDGFRLQINAQNCVHCKTCDIKDPSQNINWVVPEGGGGPAYNGM

SEQ ID NO: 52820 - protein, 198 aa, Homo sapiens
KGKSAGREKKVIHPYSRKAAQITREAHKQEKKEKLKNEKALRLNLVGEKLQWFQNHLDPQKKRYSKKDACELIERYLNRFSSELEQIELHNSIRDRQGRRHCSRETVIKQTMERERQQFEGYGLEIPDILNASNLKTFREWDFDLKKLPNIKMRKICANDAIPKTCKRKTIITVDQDLGELELNDESSDSDEEMTAVA

SEQ ID NO: 52821 - protein, 130 aa, Homo sapiens
KSISQKKVKIELDKSARHLYICDYHKNLIQSVRNRRKRKGSDDDGGDSPVQDIDTPEVDLYQLQVNTLRRYKRHFKLPTRPGLNKAQLVEIVGCHFRSIPVNEKDTLTYFIYSVKNDKNKSDLKVDSGVH

SEQ ID NO: 52822 - protein, 24 aa, Homo sapiens
LVHELDLLLSRVGLTPFPVPRPPE

SEQ ID NO: 52823 - protein, 24 aa, Homo sapiens
KSTREAWTDGRQSTESETPAKSVK

SEQ ID NO: 52824 - protein, 182 aa, Homo sapiens
LASGGAAGATSLCFVYPLDFARTRLAADVGKGAAQREFHGLGDCIIKIFKSDGLRGLYQGFNVSVQGIIIYRAAYFGVYDTAKGMLPDPKNVHIFVSWMIAQSVTAVAGLVSYPFDTVRRRMMMQSGRKGADIMYTGTVDCWRKIAKDEGAKAFFKGAWSNVLRGMGGAFVLVLYDEIKKYV

SEQ ID NO: 52825 - protein, 265 aa, Homo sapiens
LQEPFKNAWNYMLNNYTKFQIATWGSLIVHEALYFLFCLPGFLFQFIPYMKKYKIQKDKPETWENQWKCFKVLLFNHFCIQLPLICGTYYFTEYFNIPYDWERMPRWYFLLARCFGCAVIEDTWHYFLHRLLHHKRIYKYIHKVHHEFQAPFGMEAEYAHPLETLILGTGFFIGIVLLCDHVILLWAWVTIRLLETIDVHSGYDIPLNPLNLIPFYAGSRHHDFHHMNFIGNYASTFTWWDRIFGTDSQYNAYNEKRKKFEKKTE

SEQ ID NO: 52826 - protein, 146 aa, Homo sapiens
RTSAMENIPIITTVITLPHVIVENIPLHVNADLPSFGRVRESLPVKYHLQNKTDLVQDVEISVEPSDAFMFSGLKQIRLRILPGTEQEMLYNFYPLMAGYQQLPSLNINLLRFPNFTNQLLRRFIPTSIFVKPQGRLMDDTSIAAA

SEQ ID NO: 52827 - protein, 36 aa, Homo sapiens
MSPKLPWKWRMRFWNLPLFSRISGSGLFKSRLSSVM

SEQ ID NO: 52828 - protein, 41 aa, Homo sapiens
LSAGKVQGYDGYYVLSVEQYPELADSANNIQFLRQSEIGRR

SEQ ID NO: 52829 - protein, 26 aa, Homo sapiens
VQSFREKIAYFTRAKISIPSLPADDV

SEQ ID NO: 52830 - protein, 207 aa, Homo sapiens
KSSSQTSGSLVSKSTSLASVSQLASKSSSQTSTSQLPSKSTSQSSESSVKFSCKLTNEDVKQKQPFFNRLYKTVAWKLVAVGGFSPNVNHGELLNAAIEALKATLDVFFVPLKELADLPQNKSSQESIVCELRCKSVYLGTGCGKSKENAKAVASREALKLFLKKKVVVKICKRKYRGSEIEDLVLLDEESRPVNLPPALKHPQELL

SEQ ID NO: 52831 - protein, 171 aa, Homo sapiens
VDHELDDVFGKSDRPATVEDLKKLRYLECVIKETLRLFPSVPLFARSVSEDCEVAGYRVLKGTEAVIIPYALHRDPRYFPNPEEFQPERFFPENAQGRHPYAYVPFSAGPRNCIGQKFAVMEEKTILSCILRHFWIESNQKREELGLEGQLILRPSNGIWIKLKRRNADER

SEQ ID NO: 52832 - protein, 434 aa, Homo sapiens
LQQEDGISFEYHRYPELREALVSVWLQCTAISRIYTVGRSFEGRELLVIELSDNPGVHEPGEPEFKYIGNMHGNEAVGRELLIFLAQYLCNEYQKGNETIVNLIHSTRIHIMPSLNPDGFEKAASQPGELKDWFVGRSNAQGIDLNRNFPDLDRIVYVNEKEGGPNNHLLKNMKKIVDQNTKLAPETKAVIHWIMDIPFVLSANLHGGDLVANYPYDETRSGSAHEYSSSPDDAIFQSLARAYSSFNPAMSDPNRPPCRKNDDDSSFVDGTTNGGAWYSVPGGMQDFNYLSSNCFEITVELSCEKFPPEETLKTYWEDNKNSLISYLEQIHRGVKGFVRDLQGNPIANATISVEGIDHDVTSAKDGDYWRLLIPGNYKLTASAPGYLAITKKVAVPYSPAAGVDFELESFSERKEEEKEELMEWWKMMSETLNF

SEQ ID NO: 52833 - protein, 42 aa, Homo sapiens
ISRARGFNFMLLPCLKEDNKSPTGQNFRNLCGRKRQVSFKSR

SEQ ID NO: 52834 - protein, 38 aa, Homo sapiens
RQCLVTHNGRLLGIITKKDILRHMAQTANQDPASIMFN

SEQ ID NO: 52835 - protein, 230 aa, Homo sapiens
RPEDAEEAEHRGAERRPESFTTPEGPKPRSRCSDWASAVEEDEMRTRVNKEMARYKRKLLINDFGRERKSSSGSSDSKESMSTVPADFETDESVLMRRQKQINYGKNTIAYDRYIKEVPRHLRQPGIHPKTPNKFKKYSRRSWDQQIKLWKVALHFWDPPAEEGCDLQEIHPVDLESAESSSEPQTSSQDDFDVYSGTPTKVRHMDSQVEDEFDLEACLTEPLRDFSAMS

SEQ ID NO: 52836 - protein, 46 aa, Homo sapiens
MWCLTCMGKWFASRQDPLRPDTWLASRVPCPTCRARFCILDVCTVR

SEQ ID NO: 52837 - protein, 274 aa, Homo sapiens
LEATLQEEAAIQQEHREKELQKRSEVAKDFEPERVVAAPQRPGTEPQPEMPDTVLQSETLKDTAPVLEGLKEEEITKEEIDILSDACSKLQEQKKSLTKEKEELELLKEDVQDYSEDLQEIKKELSKTGEEKYVEESKASKRLTKRVQQMIGQIDGLISQLEMDQQAGKLAPANGMPTGENVISVAELINAMKQVKHIPESKLTSLAAALDENKDGKVNIDDLVKVIELVDKEDVHISTSQVAEIVATLEKEEKVEEKEKAKEKAEKEVAEVKS

SEQ ID NO: 52838 - protein, 9 aa, Homo sapiens
KYKPMTNVS

SEQ ID NO: 52839 - protein, 50 aa, Homo sapiens
KTKRKTLANNKLHQMEREFYVYFLKDEDYLKDIVENLETQSKIKAVSLED

SEQ ID NO: 52840 - protein, 320 aa, Homo sapiens
KALCALLLATLGAAGQPLGGESICSARALAKYSITFTGKWSQTAFPKQYPLFRPPAQWSSLLGAAHSSDYSMWRKNQYVSNGLRDFAERGEAWALMKEIEAAGEALQSVHAVFSAPAVPSGTGQTSAELEVQRRHSLVSFVVRIVPSPDWFVGVDSLDLCDGDRWREQAALDLYPYDAGTDSGFTFSSPNFATIPQDTVTEITSSSPSHPANSFYYPRLKALPPIARVTLVRLRQSPRAFIPPAPVLPSRDNEIVDSASVPETPLDCEVSLWSSWGLCGGHCGRLGTKSRTRYVRVQPANNGSPCPELEEEAECVPDNCV

SEQ ID NO: 52841 - protein, 215 aa, Homo sapiens
LLFHSDCVTLHCGLNEHNHHLINDFTVKQMRQGAFLVNTARGGLVDEKALAQALKEGRIRGAALDVHESEPFSFSQGPLKDAPNLICTPHAAWYSEQASIEMREEAAREIRRAITGRIPDSLKNCVNKDHLTAATHWASMDPAVVHPELNGAAYRYPPGVVGVAPTGIPAAVEGIVPSAMSLSHGLPPVAHPPHAPSPGQTVKPEADRDHASDQL

SEQ ID NO: 52842 - protein, 210 aa, Homo sapiens
LARRSLPALALSLRPSPRLLCTATKQKNSGQNLEEDMGQSEQKADPPATEKTLLEEKVKLEEQLKETVEKYKRALADTENLRQRSQKLVEEAKLYGIQAFCKDLLEVADVLEKATQCVPKEEIKDDNPHLKNLYEGLVMTEVQIQKVFTKHGLLKLNPVGAKFDPYEHEALFHTPVEGKEPGTVALVSKVGYKLHGRTLRPALVGVVKEA

SEQ ID NO: 52843 - protein, 76 aa, Homo sapiens
LAIEPKSGTSSPQSPVFRHRTLENSPISSCDTSDTEGPVPVNSAAVLKKSQAAPGSSPCRGHVLRKAKEWELKNGT

SEQ ID NO: 52844 - protein, 24 aa, Homo sapiens
LERASWWPEFSVNKPVIGSLKSKL

SEQ ID NO: 52845 - protein, 387 aa, Homo sapiens
IAISIAQMEKRLLHGLIHNVLPYVGTSVKTLVLAYSSAVSSKMVRQILELCPNLEHLDLTQTDISDSAFDSWSWLGCCQSLRHLDLSGCEKITDVALEKISRALGILTSHQSGFLKTSTSKITSTAWKNKDITMQSTKQYACLHDLTNKGIGEEIDNEHPWTKPVSSENFTSPYVWMLDAEDLADIEDTVEWRHRNVESLCVMETASNFSCSTSGCFSKDIVGLRTSVCWQQHCASPAFAYCGHSFCCTGTALRTMSSLPESSAMCRKAARTRLPRGKDLIYFGSEKSDQETGRVLLFLSLSGCYQITDHGLRVLTLGGGLPYLEHLNLSGCLTITGAGLQDLVSACPSLNDEYFYYCDNINGPHADTASGCQNLQCGFRACCRSGE

SEQ ID NO: 52846 - protein, 441 aa, Homo sapiens
IHQQPPERRVVTVVFLGLLLDLLAFTLLLPLLPGLLESHGRAHDPLYGSWQGGVDWFATAIGMPVEKRYNSVLFGGLIGSAFSVLQFLCAPLTGATSDCLGRRPVMLLCLMGVATSYAVWATSRSFAAFLASRLIGGISKGNVSLSTAIVADLGSPLARSQGMAVIGVAFSLGFTLGPMLGASLPLEMAPWFALLFAASDLLFIFCFLPETLPLEKRAPSIALGFRDAADLLSPLALLRFSAVARGQDPPSGDRLSSLRRLGLVYFLYLFLFSGLEYTLSFLTHQRFQFSSLQQGKMFFLIGLTMATIQGAYARRIHPGGEVAAVKRALLLLVPAFLLIGWGRSLPVLGLGLLLYSFAAAVVVPCLSSVVAGYGSPGQKGTVMGTLRSLGALARAAGPLVAASVYWLAGAQACFTTWSGLFLLPFFLLQKLSYPAQTLKAE

SEQ ID NO: 52847 - protein, 8 aa, Homo sapiens
LKRKKFKK

SEQ ID NO: 52848 - protein, 351 aa, Homo sapiens
RSFLRGLPALLLLLLFLGPWPAASHGGKYSREKNQPKPSPKRESGEEFRMEKLNQLWEKAQRLHLPPVRLAELHADLKIQERDELAWKKLKLDGLDEDGEKEARLIRNLNVILAKYGLDGKKDARQVTSNSLSGTQEDGLDDPRLEKLWHKAKTSGKFSGEELDKLWREFLHHKEKVHEYNVLLETLSRTEEIHENVISPSDLSDIKGSVLHSRHTELKEKLRSINQGLDRLRRVSHQGYSTEAEFEEPRVIDLWDLAQSANLTDKELEAFREELKHFEAKIEKHNHYQKQLEIAHEKLRHAESVGDGERVSRSREKHALLEGRTKELGYTVKKHLQDLSGRISRARHNEL

SEQ ID NO: 52849 - protein, 106 aa, Homo sapiens
RHSEVETDSKKKKMKLPEHPEGGEPEDDEAPAKGKFNWKGTIKAILKQAPDNEITIKKLRKKVLAQYYTVTDEHHRSEEELLVIFNKKISKNPTFKLLKDKVKLVK

SEQ ID NO: 52850 - protein, 119 aa, Homo sapiens
TWGDGKGEDELSPEEIQMFEQENQRLIGEMNSLFDEVRQIEGRVVEISRLQEIFTEKVLQQEAEIDSIHQLVVGATENIKEGNEDIREAIKNNAGFRVWILFFLVMCSFSLLFLDWYDS

SEQ ID NO: 52851 - protein, 128 aa, Homo sapiens
ILREIGLRLSHCSHCVPKLEPIPEWPPLASCGVPPFQKPLTSPSRLSRDHATLNGALQFATKQLSRTLSRATPIPEYLKQIPNSCVSGCCCGWLTKTVKETTRTEPINTTYSYTDFQKAVNKLLTASL

SEQ ID NO: 52852 - protein, 35 aa, Homo sapiens
IQNGPIKSNGQEGPLLGTDSTGNVRTGLWKHETTV

SEQ ID NO: 52853 - protein, 152 aa, Homo sapiens
IVHYIMKNEANADVLKAMVADNSLYDPESPVTPSTPGSPPVSPGPLSPGGTPGKHVCGHHLHTVGGVVERDVCHRCRHKRWHFIKPTNKSRESRPRRQGEVTVLSVGRFRVTKVEHKSNQKERRSLMSVSGAETVNGEVPATPVKRERSGTE

SEQ ID NO: 52854 - protein, 681 aa, Homo sapiens
INPFTNLPHTPRYYDILKKRLQLPVWEYKDRFTDILVRHQSFVLVGETGSGKTTQIPQWCVEYMRSLPGPKRGVACTQPRRVAAMSVAQRVADEMDVMLGQEVGYSIRFEDCSSAKTILKYMTDGMLLREAMNDPLLERYGVIILDEAHERTLATDILMGVLKEVVRQRSDLKVIVMSATLDAGKFQIYFDNCPLLTIPGRTHPVEIFYTPEPERDYLEAAIRTVIQIHMCEEEEGDLLLFLTGQEEIDEACKRIKREVDDLGPEVGDIKIIPLYSTLPPQQQQRIFEPPPPKKQNGAIGRKVVVSTNIAETSLTIDGVVFVIDPGFAKQKVYNPRIRVESLLVTAISKASAQQRAGRAGRTRPGKCFRLYTEKAYKTEMQDNTYPEILRSNLGSVVLQLKKLGIDDLVHFDFMDPPAPETLMRALELLNYLAALNDDGDLTELGSMMAEFPLDPQLAKMVIASCDYNCSNEVLSITAMLSVPQCFVRPTEAKKAADEAKMRFAHIDGDHLTLLNVYHAFKQNHESVQWCYDNFINYRSLMSADNVRQQLSRIMDRFNLPRRSTDFTSRDYYINIRKALVTGYFMQVAHLERTGHYLTVKDNQVVQLHPSTVLDHKPEWVLYNEFVLTTKNYIRTCTDIKPEWLVKIAPQYYDMSNFPQCEAKRQLDRIIAKLQSKEYSQY

SEQ ID NO: 52855 - protein, 34 aa, Homo sapiens
IVNSAQTGSFKQLTVKEAVLNGFVVAEVWMWFCV

SEQ ID NO: 52856 - protein, 7 aa, Homo sapiens
IHKRKLL

SEQ ID NO: 52857 - protein, 25 aa, Homo sapiens
LTVAMGSLLSRQLIFQIITYFLHHC

SEQ ID NO: 52858 - protein, 744 aa, Homo sapiens
VFMASSGTTDVTNRNSPATPPNTLNLRSSHNELLNAEIKHTETKNSTPPKCRKKYALTNIQAAMGLSDPAAQPLLGNGSANIKLVKNGENQLRKAAEQGQQDPNKNLSPTAVINITSEKLEGKEPHPQDSSSCEILPSQPRRTKSFLNYYADLETSARELEQNRGNHHGTAEEKSQPVQGQASTIIGNGDLLLQKPNRPQSSPEDGQVATVSSSPETKKDHPKTGAKTDCALHRIQNLAPSDEESSWTTLSQDSASPSSPDETADIWSDHSFQTDPDLPPGWKRVSDIAGTYYWHIPTGTTQWERPVSIPADLQGSRKGSLSSVTPSPTPENEKQPWSDFAVLNGGKINSDIWKDLHAATVNPDPSLKEFEGATLRYASLKLRNAPHPDDDDSCSINSDPEAKCFAVRSLGWVEMAEEDLAPGKSSVAVNNCIRQLSYCKNDIRDTVGIWGEGKDMYLILENDMLSLVDPMDRSVLHSQPIVSIRVWGVGRDNGRDFAYVARDKDTRILKCHVFRCDTPAKAIATSLHEICSKIMAERKNAKALACSSLQERANVNLDVPLQVDFPTPKTELVQKFHVQYLGMLPVDKPVGMDILNSAIENLMTSSNKEDWLSVNMNVADATVTVISEKNEEEVLVECRVRFLSFMGVGKDVHTFAFIMDTGNQRFECHVFWCEPNAGNVSEAVQAACMLRYQKCLVARPPSQKVRPPPPPADSVTRRVTTNVKRGVLSLIDTLKQKRPVTEMP

SEQ ID NO: 52859 - protein, 287 aa, Homo sapiens
LNLFWKLCVTVMRLVILDNYDLASEWAAKYICNRIIQFKPGQDRYFTLGLPTGSTPLGCYKKLIEYHKNGHLSFKYVKTFNMDEYVGLPRNHPESYHSYMWNNFFKHIDIDPNNAHILDGNAADLQAECDAFENKIKEAGGIDLFVGGIGPDGHIAFNEPGSSLVSRTRLKTLAMDTILANAKYFDGDLSKVPTMALTVGVGTVMDAREVMILITGAHKAFALYKAIEEGVNHMWTVSAFQQHPRTIFVCDEDATLELRVKTVKYFKGLMHVHNKLVDPLFSMKDGN

SEQ ID NO: 52860 - protein, 184 aa, Homo sapiens
VGDGAVGKTCLLISYTTNAFPGEYIPTVFDNYSANVMVDGKPVNLGLWDTAGQEDYDRLRPLSYPQTDVFLICFSLVSPASFENVRAKWYPEVRHHCPNTPIILVGTKLDLRDDKDPIEKLKEKKLTPITYPQGLAMAKEIGAVKYLERSALTQRGIKTVFDEAIRAVLCPPPVKKRKRKCLLL

SEQ ID NO: 52861 - protein, 175 aa, Homo sapiens
LWRLQKLPAELGPQLLHKIIDGICGRAYPVYQDYHTVWESEEWMHVLEDIAKFFKAIVGKNLPDEEIFQQLNQLNSLHQETIMKCVKSRKDEIKQALSREIVAISSAQLQDFDWQVKLALSSDKIAALRMPLLSLHLDVKENGEVKPYSIEMSREELQNLIQSLEAANKVVLQLK

SEQ ID NO: 52862 - protein, 86 aa, Homo sapiens
IPTKEELIANKPEFDHLAEYLGANSVVYLSVEGLVSSVQEGIKFKKQKEKKHDIMIQENGNGLECFEKSGHCTACLTGKYPVELEW

SEQ ID NO: 52863 - protein, 1048 aa, Homo sapiens
KRDFLSMKQSPALAPEERCRRAGSPKPVLRADDNNMGNGCSQKLATANLLRFLLLVLIPCICALVLLLVILLSYVGTLQKVYFKSNGSEPLVTDGEIQGSDVILTNTIYNQSTVVSTAHPDQHVPAWTTDASLPGDQSHRNTSACMNITHSQCQMLPYHATLTPLLSVVRNMEMEKFLKFFTYLHRLSCYQHIMLFGCTLAFPECIIDGDDSHGLLPCRSFCEAAKEGCESVLGMVNYSWPDFLRCSQFRNQTESSNVSRICFSPQQENGKQLLCGRGENFLCASGICIPGKLQCNGYNDCDDWSDEAHCNCSENLFHCHTGKCLNYSLVCDGYDDCGDLSDEQNCDCNPTTEHRCGDGRCIAMEWVCDGDHDCVDKSDEVNCSCHSQGLVECRNGQCIPSTFQCDGDEDCKDGSDEENCSVIQTSCQEGDQRCLYNPCLDSCGGSSLCDPNNSLNNCSQCEPITLELCMNLPYNSTSYPNYFGHRTQKEASISWESSLFPALVQTNCYKYLMFFSCTILVPKCDVNTGEHIPPCRALCEHSKERCESVLGIVGLQWPEDTDCSQFPEENSDNQTCLMPDEYVEECSPSHFKCRSGQCVLASRRCDGQADCDDDSDEENCGCKERDLWECPSNKQCLKHTVICDGFPDCPDYMDEKNCSFCQDDELECANHACVSRDLWCDGEADCSDSSDEWDCVTLSINVNSSSFLMVHRAATEHHVCADGWQEILSQLACKQMGLGEPSVTKLIQEQEKEPRWLTLHSNWESLNGTTLHELLVNGQSCESRSKISLLCTKQDCGRRPAARMNKRILGGRTSRPGRWPWQCSLQSEPSGHICGCVLIAKKWVLTVAHCFEGRENAAVWKVVLGINNLDHPSVFMQTRFVKTIILHPRYSRAVVDYDISIVELSEDISETGYVRPVCLPNPEQWLEPDTYCYITGWGHMGNKMPFKLQEGEVRIISLEHCQSYFDMKTITTRMICAGYESGTVDSCMGDSGGPLVCEKPGGRWTLFGLTSWGSVCFSKVLGPGVYSNVSYFVEWIKRQIYIQTFLLN

SEQ ID NO: 52864 - protein, 8 aa, Homo sapiens
KLSALSKS

SEQ ID NO: 52865 - protein, 159 aa, Homo sapiens
ITHCLRDFSNTETLCSEQKYYCETCCSKQEAQKRMRVKKLPMILALHLKRFKYMEQLHRYTKLSYRVVFPLELRLFNTSSDAVNLDRMYDLVAVVVHCGSGPNRGHYITIVKSHGFWLLFDDDIVEKIDAQAIEEFYGLTSDISKNSESGYILFYQSRE

SEQ ID NO: 52866 - protein, 295 aa, Homo sapiens
IQLFKNNLKALMNHCGLLQLGLATAQTLKHPQTAKWDNFLAFERLLLQSIGESAMSVVLNQLLPMIKPVTQRTNEDYSPEELLILLIYIYSVTGELTVDKDLCEAEEKVKKALAQVFCEESGLSPLLQKITDWDSSINLTFHKSKIAVDELFTSLRDIAGARSLLKQFKSVYVPGNHTHQASYKPLLKQVVEEIFHPERPDSVDIEHMSSGLTDLLKTGFSMFMKVSRPHPSDYPLLILFVVGGVTVSEVKMVKDLVASLKPGTQVIVLSTRLLKPLNIPELLFATDRLHPDLGF

SEQ ID NO: 52867 - protein, 123 aa, Homo sapiens
LSNKFESEFPSSLTGKVAPEEFKASINRVNSCLKKNLPVNVRWLLCGCLCCCCTLGCSMWPVICLSKRTRRSIEKLLEWENNRLYHKLCLHWRLSKRKCETNNMMEYVILIEFLPKTPIFRPD

SEQ ID NO: 52868 - protein, 61 aa, Homo sapiens [sequence omitted]

SEQ ID NO: 52869 - protein, 155 aa, Homo sapiens
LLFWGVLAVFIKAVHVKAQEDERIVLVDNKCKCARITSRIIRSSEDPNEDIVERNIRIIVPLNNRENISDPTSPLRTRFVYHLSDLCKKCDPTEVELDNQIVTATQSNICDEDSATETCYTYDRNKCYTAVVPLVYGGETKMVETALTPDACYPD

SEQ ID NO: 52870 - protein, 367 aa, Homo sapiens
TRSYSQESKTTYLEDLPPPPEYELAPSKLEEEVDDVFLIRAQGLPWSCTMEDVLNFFSDCRIRNGENGIHFLLNRDGKRRGDALIEMESEQDVQKALEKHRMYMGQRYVEVYEINNEDVDALMKSLQVKSSPVVNDGVVRLRGLPYSCNEKDIVDFFAGLNIVDITFVMDYRGRRKTGEAYVQFEEPEMANQALLKHREEIGNRYIEIFPSRRNEVRTHVGSYKGKKIASFPTAKYITEPEMVFEEHEVNEDIQPMTAFESEKEIELPKEVPEKLPEAADFGTTSSLHFVHMRGLPFQANAQDIINFFAPLKPVRITMEYSSSGKATGEADVHFETHEDAVAAMLKDRSHVHHRYIELFLNSCPKGK

SEQ ID NO: 52871 - protein, 100 aa, Homo sapiens
IMAEGGFDPCECVCSHEHAMRRLINLLRQSQSYCTDTECLQELPGPSGDNGISVTMILVAWMVIALILFLLRPPNLRGSSLPGKPTSPHNGQDPPAPPVD

SEQ ID NO: 52872 - protein, 715 aa, Homo sapiens
IDSEAISALVKLMNKSIEGTADDEEEGVSPDTAIRSGLELLKVLSFTHPTSFHSAETYESLLQCLRMEDDKVAEAAIQIFRNTGHKIETDLPQIRSTLIPILHQKAKRGTPHQAKQAVHCIHAIFTNKEVQLAQIFEPLSRSLNADVPEQLITPLVSLGHISMLAPDQFASPMKSVVANFIVKDLLMNDRSTGEKNGKLWSPDEEVSPEVLAKVQAIKLLVRWLLGMKNNQSKSANSTLRLLSAMLVSEGDLTEQKRISKSDMSRLRLAAGSAIMKLAQEPCYHEIITPEQFQLCALVINDECYQVRQIFAQKLHKALVKLLLPLEYMAIFALCAKDPVKERRAHARQCLLKNISIRREYIKQNPMATEKLLSLLPEYVVPYMIHLLAHDPDFTRSQDVDQLRDIKECLWFMLEVLMTKNENNSHAFMKKMAENIKLTRDAQSPDESKTNEKLYTVCDVALCVINSKSALCNADSPKDPVLPMKFFTQPEKDFCNDKSYISEETRVLLLTGKPKPAGVLGAVNKPLSATGRKPYVRSTGTETGSNINVNSELNPSTGNRSREQSSEAAETGVSENEENPVRIISVTPVKNIDPVKNKEINSDQATQGNISSDRGKKRTVTAAGAENIQQKTDEKVDESGPPAPSKPRRGRRPKSESQGNATKNDDLNKPINKGRKRAAVGQESPGGLEAGNAKAPKLQDLAKKAAPAERQIDLQR

SEQ ID NO: 52873 - protein, 100 aa, Homo sapiens
INLLIVEICALQKIGMSRFQTYITYFVRAMSVLMIPIAATVPSSIVLYWLCSSFVGLSQNLLLRSPGFRQLCRIPSTKSDSETPYKDIFAAFNTKFISRK

SEQ ID NO: 52874 - protein, 347 aa, Homo sapiens
LFENSPTSAHAFWGGSVVSSQSTPESMLSGKSSYLPNSDPLHQSDTSKAPGFRPPLQRPAPSPSGIVNMDSPYGSVTPSSTHLGNFASNISGGQMYGPGAPLGGAPAAANFNRQHFSPLSLLTPCSSASNDSSAQSVSSGVRAPSPAPSSVPLGSEKPSNVSQDRKVPVPIGTERSARIRQTGTSAPSVIGSNLSTSVGHSGIWSFEGIGGNQDKVDWCNPGMGNPMIHRPMSDPGVFSQHQAMERDSTGIVTPSGTFHQHVPAGYMDFPKVGGMPFSVYGNAMIPPVAPIPDGAGGPIFNGPHAADPSWNSLIKMVSSSTENNGPQTVWTGPWAPHMNSVHMNQLG

SEQ ID NO: 52875 - protein, 90 aa, Homo sapiens
MLKEGLGASEAVADIKFSSAGWVSVTPNFKDRLHLRGYTPEGTVLTVRPPLLPYIVNIKGQRIKKSVAYKTKKPPSLMYNVRKKKGKINV

SEQ ID NO: 52876 - protein, 266 aa, Homo sapiens
LLLLLPLSSSSSSDTCGPCEPASCPPLPPLGCLLGETRDACGCCPMCARGEGEPCGGGGAGRGYCAPGMECVKSRKRRKGKAGAAAGGPGVSGVCVCKSRYPVCGSDGTTYPSGCQLRAASQRAESRGEKAITQVSKGTCEQGPSIVTPPKDIWNVTGAQVYLSCEVIGIPTPVLIWNKVKRGHYGVQRTELLPGDRDNLAIQTRGGPEKHEVTGWVLVSPLSKEDAGEYECHASNSQGQASASAKITVVDALHEIPVKKGEGAEL

SEQ ID NO: 52877 - protein, 24 aa, Homo sapiens
REPPPNPGSSGGGLRPGVIMELIR

SEQ ID NO: 52878 - protein, 63 aa, Homo sapiens
KPANDITSQLEINFGDLGRPGRGGRGGQGGHGRGGRPNRGSRTDKSSTSAPDVDDPEAFPVLA

SEQ ID NO: 52879 - protein, 28 aa, Homo sapiens
MLYWWHQSTVYVMQYRHSKPCPDYVSHL

SEQ ID NO: 52880 - protein, 474 aa, Homo sapiens
LFPGLWLLVLSGPGGLLRAQEQPSCRRAFDLYFVLDKSGSVANNWIEIYNFVQQLAERFVSPEMRLSFIVFSSQATIILPLTGDRGKISKGLEDLKRVSPVGETYIHEGLKLANEQIQKAGGLKTSSIIIALTDGKLDGLVPSYAEKEAKISRSLGASVYCVGVLDFEQAQLERIADSKEQVFPVKGGFQALKGIINSILAQSCTEILELQPSSVCVGEEFQIVLSGRGFMLGSRNGSVLCTYTVNETYTTSVKPVSVQLNSMLCPAPILNKAGETLDVSVSFNGGKSVISGSLIVTATECSNGIAAIIVILVLLLLLGIGLMWWFWPLCCKVVIKDPPPPPAPAPKEEEEEPLPTKKWPTVDASYYGGRGVGGIKRMEVRWGDKGSTEEGARLEKAKNAVVKIPEETEEPIRPRPPRPKPTHQPPQTKWYTPIKGRLDALWALLRRQYDRVSLMRPQEGDEGRCINFSRVPSQ

SEQ ID NO: 52881 - protein, 12 aa, Homo sapiens
LAIALGFYRFWK

SEQ ID NO: 52882 - protein, 181 aa, Homo sapiens
LFGEYYCDICHLFDKDKKQYHCENCGICRIGPKEDFFHCLKCNLCLAMNLQGRHKCIENVSRQNCPICLEDIHTSRVVAHVLPCGHLLHRTCYEEMLKEGYRCPLCMHSALDMTRYWRQLDDEVAQTPMPSEYQNMTVDILCNDCNGRSTVQFHILGMKCKICESYNTAQAGGRRISLDQQ

SEQ ID NO: 52883 - protein, 100 aa, Homo sapiens
MRYEPANSHFFKTEIQYEKLADAVRFLGCFSDLRKISAMNVFPSNTQPFQRLLEEDVISIESVSPTLRHCSKLFIYLYKVATDSFDRYGSALSSELKGVY

SEQ ID NO: 52884 - protein, 16 aa, Homo sapiens
TLENLIPGACLSELLL

SEQ ID NO: 52885 - protein, 31 aa, Homo sapiens
VEIFKLQPNKPSKELAELVMFMAQNILNVCI

SEQ ID NO: 52886 - protein, 218 aa, Homo sapiens
MNLSLADCLLVNLAYESSVFCTSIVAQDSRGHIYHGRNLDYPFGNVLRKLTVDVQFLKNGQIAFTGTTFIGYVGLWTGQSPHKFTVSGDERDKGWWWENAIAALFRRHIPVSWLIRATLSESENFEAAVGKLAKTPLIADVYYIVGGTSPREGVVITRNRDGPADIWPLDPLNGAWFRVETNYDHWKPAPKEDDRRTSAIKALNATGQANLSLEALFQ

SEQ ID NO: 52887 - protein, 136 aa, Homo sapiens
LSESENFEAAVGKLAKTPLIADVYYIVGGTSPREGVVITRNRDGPADIWPLDPLNGAWFRVETNYDHWKPAPKEDDRRTSAIKALNATGQANLSLEALFQILSVVPVYNNFTIYTTVMSAGSPDKYMTRIRNPSRK

SEQ ID NO: 52888 - protein, 437 aa, Homo sapiens
TGTSTGLGTGLGTGLGFGGFNTQQQQQTTLGGLFSQPTQAPTQSNQLINTASALSAPTLLGDERDAILAKWNQLQAFWGTGKGYFNNNIPPVEFTQENPFCRFKAVGYSCMPSNKDEDGLVVLVFNKKETEIRSQQQQLVESLHKVLGGNQTLTVNVEGTKTLPDDQTEVVIYVVERSPNGTSRRVPATTLYAHFEQANIKTQLQQLGVTLSMTRTELSPAQIKQLLQNPPAGVDPIIWEQAKVDNPDSEKLIPVPMVGFKELLRRLKVQDQMTKQHQTRLDIISEDISELQKNQTTSVAKIAQYKRKLMDLSHRTLQVLIKQEIQRKSGYAIQADEEQLRVQLDTIQGELNAPTQFKGRLNELMSQIRMQNHFGAVRSEERYYIDADLLREIKQHLKQQQEGLSHLISIIKDDLEDIKLVEHGLNETIHIRGGVFS

SEQ ID NO: 52889 - protein, 468 aa, Homo sapiens
TLSLLLLVTSVTLLVARVFQKAVDQSIEKKIVLRNGTEAFDSWEKPPLPVYTQFYFFNVTNPEEILRGETPRVEEVGPYTYRELRNKANIQFGDNGTTISAVSNKAYVFERDQSVGDPKIDLIRTLNIPVLTVIEWSQVHFLREIIEAMLKAYQQKLFVTHTVDELLWGYKDEILSLIHVFRPDISPYFGLFYEKNGTNDGDYVFLTGEDSYLNFTKIVEWNGKTSLDWWITDKCNMINGTDGDSFHPLITKDEVLYVFPSDFCRSVYITFSDYESVQGLPAFRYKVPAEILANTSDNAGFCIPEGNCLGSGVLNVSICKNGAPIIMSFPHFYQADERFVSAIEGMHPNQEDHETFVDINPLTGIILKAAKRFQINIYVKKLDDFVETGDIRTMVFPVMYLNESVHIDKETASRLKSMINTTLIITNIPYIIMALGVFFGLVFTWLACKGQGSMDEGTADERAPLIRT

SEQ ID NO: 52890 - protein, 231 aa, Homo sapiens
LWAWNEKGVLSNISSITDLGGFDPVWLFLVVGGVMFILGFAGCIGALRENTFLLKFFSVFLGIIFFLELTAGVLAFVFKDWIKDQLYFFINNNIRAYRDDIDLQNLIDFTQEYWQCCGAFGADDWNLNIYFNCTDSNASRERCGVPFSCCTKDPAEDVINTQCGYDARQKPEVDQQIVIYTKGCVPQFEKWLQDNLTIVAGIFIGIALLQIFGICLAQNLVSDIEAVRASW

SEQ ID NO: 52891 - protein, 20 aa, Homo sapiens
KNSEINFSFSRSFASSGRWA

SEQ ID NO: 52892 - protein, 76 aa, Homo sapiens
IPELLEHLQEMREEKKRIRKKLRDFEDNFFRQNGRNVQKEDRTPMAEEYSEYKHIKAKLRLLEVLISKRDTDSKSM

SEQ ID NO: 52893 - protein, 26 aa, Homo sapiens
KKTETQEKNPLPSKETIEQEKQAGES

SEQ ID NO: 52894 - protein, 4 aa, Homo sapiens
TMTV

SEQ ID NO: 52895 - protein, 667 aa, Homo sapiens
LESMKTGLFFLCLLGTAAAIPTNARLLSDHSKPTAETVAPDNTAIPSLRAEAEENEKETAVSTEDDSHHKAEKSSVLKSKEESHEQSAEQGKSSSQELGLKDQEDSDGHLSVNLEYAPTEGTLDIKEDMSEPQEKKLSENTDFLAPGVSSFTDSNQQESITKREENQEQPRNYSHHQLNRSSKHSQGLRDQGNQEQDPNISNGEEEEEKEPGEVGTHNDNQERKTELPREHANSKQEEDNTQSDDILEESDQPTQVSKMQEDEFDQGNQEQEDNSNAEMEEENASNVNKHIQETEWQSQEGKTGLEAISNHKETEEKTVSEALLMEPTDDGNTTPRNHGVDDDGDDDGDDGGTDGPRHSASDDYFIPSQAFLEAERAQSIAYHLKIEEQREKVHENENIGTTEPGEHQEAKKAENSSNEEETSSEGNMRVHAVDSCMSFQCKRGHICKADQQGKPHCVCQDPVTCPPTKPLDQVCGTDNQTYASSCHLFATKCRLEGTKKGHQLQLDYFGACKSIPTCTDFEVIQFPLRMRDWLKNILMQLYEANSEHAGYLNEKQRNKVKKIYLDEKRLLAGDHPIDLLLRDFKKNYHMYVYPVHWQFSELDQHPMDRVLTHSELAPLRASLVPMEHCITRFFEECDPNKDKHITLKEWGHCFGIKEEDIDENLLF

SEQ ID NO: 52896 - protein, 26 aa, Homo sapiens
KHEDWAFFPMSLGNCSCNPDKCKIII

SEQ ID NO: 52897 - protein, 11 aa, Homo sapiens
IISTKVKRGKP

SEQ ID NO: 52898 - protein, 344 aa, Homo sapiens
KLYPLPSARALLEIIMKNGSTAGNSPHCRKPSGSGDQSKPNCTKDSTSGSGEGGKGYTKDQVDGVLSINKCKNYYEVLGVTKDAGDEDLKKAYRKLALKFHPDKNHAPGATDAFKKIGNAYAVLSNPEKRKQYDLTGNEEQACNHQNNGRFNFHRGCEADITPEDLFNIFFGGGFPSGSVHSFSNGRAGYSQQHQHRHSGHEREEERGDGGFSVFIQLMPIIVLILVSLLSQLMVSNPPYSLYPRSGTGQTIKMQTENLGVVYYVNKDFKNEYKGMLLQKVEKSVEEDYVTNIRNNCWKERQQKTDMQYAAKVYRDDRLRRKADALSMDNCKELERLTSLYKGG

SEQ ID NO: 52899 - protein, 117 aa, Homo sapiens
KAKTKAVSRSQRAGLQFPVGRIHRHLKSRTTSHGRVGATAAVYSAAILEYLTAEVLELAGNASKDLKVKRITPRHLQLAIRGDEELDSLIKATIAGGGVIPHIHKSLIGKKGQQKTV

SEQ ID NO: 52900 - protein, 222 aa, Homo sapiens
ITTPNTESLQKNVVTPTTGTTPKGTITNELLKMSLMSTATFLTSKDEGLKATTTDVRKNDSIISNVTVTSVTLPNAVSTLQSSKPKTETQSSIKTTEIPGSVLQPDASPSKTGTLTSIPVTIPENTSQSQVIGTEGGKNASTSATSRSYSSIILPVVIALIVITLSVFVLVGLYRMCWKADPGTPENGNDQPQSDKESVKLLTVKTISHESGEHSAQGKTKN

SEQ ID NO: 52901 - protein, 124 aa, Homo sapiens
VPVIPLDVVDNQTEKLDTNITEVDAASVYTLPAGADFLMCYSVAEGYYSHRETVNGSWYIQDLCEMLGKYGSSLEFTELLTLVNRKVSQRRVDFCKDPSAIGKKQVPCFASMLTKKLHFFPKSN

SEQ ID NO: 52902 - protein, 118 aa, Homo sapiens
KPFPRYGYKPSPPNGCGSPLFGVHLNIGIPSLTKCCNQHDRCYETCGKSKNDCDEEFQYCLSKICRDVQKTLGLTQHVQACETTVELLFDSVIHLGCKPYLDSQRAACRCHYEEKTDL

SEQ ID NO: 52903 - protein, 90 aa, Homo sapiens
IPSLTKCCNQHDRCYETCGKSKNDCDEEFQYCLSKICRDVQKTLGLTQHVQACETTVELLFDSVIHLGCKPYLDSQRAACRCHYEEKTDL

SEQ ID NO: 52904 - protein, 201 aa, Homo sapiens
VKHAPYISIAGDDPPASCVFSQVMNMAAFLALVVAVLRFIQLKPKVLNPWLNISGLVALCLASFGMTLLGNFQLTNDEEIHNVGTSLTFGFGTLTCWIQAALTLKVNIKNEGRRVGIPRVILSASITLCVVLYFILMAQSIHMYAARVQWGLVMCFLSYFGTFAVEFRHYRYEIVCSEYQENFLSFSESLSEASEYQTDQV

SEQ ID NO: 52905 - protein, 59 aa, Homo sapiens
LGTVLQLKQPLNITCINAAEIESRVRELSKLAETTDKVKQGFWKEFETLQQQECKLLYS

SEQ ID NO: 52906 - protein, 13 aa, Homo sapiens
TPATDAGRQDLHP

SEQ ID NO: 52907 - protein, 320 aa, Homo sapiens
IPFCDAKEEIRAGLESSEGGGGPERPGARGQRQNIVWRNVVLMSLLHLGAVYSLVLIPKAKPLTLLWAYFCFLLAALGVTAGAHRLWSHRSYRAKLPLRIFLAVANSMAFQNDIFEWSRDHRAHHKYSETDADPHNARRGFFFSHIGWLFVRKHRDVIEKGRKLDVTDLLADPVVRIQRKYYKISVVLMCFVVPTLVPWYIWGESLWNSYFLASILRYTISLNISWLVNSAAHMYGNRPYDKHISPRQNPLVALGAIGEGFHNYHHTFPFDYSASEFGLNFNPTTWFIDFMCWLGLATDRKRATKPMIEARKARTGDSSA

SEQ ID NO: 52908 - protein, 21 aa, Homo sapiens
LGESDERCTNAGSGCRRSSPG

SEQ ID NO: 52909 - protein, 1219 aa, Homo sapiens
KLKEVDRTAMQAWSPAQNHPIYLATGTSAQQLDATFSTNASLEIFELDLSDPSLDMKSCATFSSSHRYHKLIWGPYKMDSKGDVSGVLIAGGENGNIILYDPSKIIAGDKEVVIAQNDKHTGPVRALDVNIFQTNLVASGANESEIYIWDLNNFATPMTPGAKTQPPEDISCIAWNRQVQHILASASPSGRATVWDLRKNEPIIKVSDHSNRMHCSGLAWHPDVATQMVLASEDDRLPVIQMWDLRFASSPLRVLENHARGILAIAWSMADPELLLSCGKDAKILCSNPNTGEVLYELPTNTQWCFDIQWCPRNPAVLSAASFDGRISVYSIMGGSTDGLRQKQVDKLSSSFGNLDPFGTGQPLPPLQIPQQTAQHSIVLPLKKPPKWIRRPVGASFSFGGKLVTFENVRMPSHQGAEQQQQQHHVFISQVVTEKEFLSRSDQLQQAVQSQGFINYCQKKIDASQTEFEKNVWSFLKVNFEDDSRGKYLELLGYRKEDLGKKIALALNKVDGANVALKDSDQVAQSDGEESPAAEEQLLGEHIKEEKEESEFLPSSGGTFNISVSGDIDGLITQALLTGNFESAVDLCLHDNRMADAIILAIAGGQELLARTQKKYFAKSQSKITRLITAVVMKNWKEIVESCDLKNWREALAAVLTYAKPDEFSALCDLLGTRLENEGDSLLQTQACLCYICAGNVEKLVACWTKAQDGSHPLSLQDLIEKVVILRKAVQLTQAMDTSTVGVLLAAKMSQYANLLAAQGSIAAALAFLPDNTNQPNIMQLRDRLCRAQGEPVAGHESPKIPYEKQQLPKGRPGPVAGHHQMPRVQTQQYYPHGENPPPPGFIMHGNVNPNAAGQLPTSPGHMHTQVPPYPQPQPYQPAQPYPFGTGGSAMYRPQQPVAPPTSNAYPNTPYISSASSYTGQSQLYAAQHQASSPTSSPATSFPPPPSSGASFQHGGPGAPPSSSAYALPPGTTGTLPAASELPASQRTGPQNGWNDPPALNRVPKKKKMPENFMPPVPITSPIMNPLGDPQSQMLQQQPSAPVPLSSQSSFPQPHLPGGQPFHGVQQPLGQTGMPPSFSKPNIEGAPGAPIGNTFQHVQSLPTKKITKKPIPDEHLILKTTFEDLIQRCLSSATDPQTKRKLDDASKRLEFLYDKLREQTLSPTITSGLHNIARSIETRNYSEGLTMHTHIVSTSNFSETSAFMPVLKVVLTQANKLGV

SEQ ID NO: 52910 - protein, 303 aa, Homo sapiens [sequence omitted]

SEQ ID NO: 52911 - protein, 70 aa, Homo sapiens
ILYKRLKVPPAINQFTQALDRQTATQLLKLAHKYRPETKQEKKAVGPGREESCWQRGRPHQETTCPLSRS

SEQ ID NO: 52912 - protein, 52 aa, Homo sapiens
LAKLVEAIRTNYNDRYDEICRHWGGNILGPKSVARIAKLEKAKAKELATKLG

SEQ ID NO: 52913 - protein, 897 aa, Homo sapiens
RTPKMFPLKDAEMGAFTFFASALPHDVCGSNGLPLTPNSIKILGRFQILKTITHPRLCQYVDISRGKHERLVVVAEHCERSLEDLLRERKPVSCSTVLCIAFEVLQGLQYMNKHGIVHRALSPHNILLDRKGHIKLAKFGLYHMTAHGDDVDFPIGYPSYLAPEVIAQGIFKTTDHMPSKKPLPSGPKSDVWSLGIILFELCVGRKLFQSLDISERLKFLLTLDCVDDTLIVLAEEHGCLDIIKELPETVIDLLNKCLTFHPSKRPTPDQLMKDKVFSEVSPLYTPFTKPASLFSSSLRCADLTLPEDISQLCKDINNDYLAERSIEEVYYLWCLAGGDLEKELVNKEIIRSKPPICTLPNFLFEDGESFGQGRDRSSLLDDTTVTLSLCQLRNRLKDVGGEAFYPLLEDDQSNLPHSNSNNELSAAATLPLIIREKDTEYQLNRIILFDRLLKAYPYKKNQIWKEARVDIPPLMRGLTWAALLGVEGAIHAKYDAIDKDTPIPTDRQIEVDIPRCHQYDELLSSPEGHAKFRRVLKAWVVSHPDLVYWQGLDSLCAPFLYLNFNNEALAYACMSAFIPKYLYNFFLKDNSHVIQEYLTVFSQMIAFHDPELSNHLNEIGFIPDLYAIPWFLTMFTHVFPLHKIFHLWDTLLLGNSSFPFCIGVAILQQLRDRLLANGFNECILLFSDLPEIDIERCVRESINLFCWTPKSATYRQHAQPPKPSSDSSGGRSSAPYFSAECPDPPKTDLSRESIPLNDLKSEVSPRISAEDLIDLCELTVTGHFKTPSKKTKSSKPKLLVVDIRNSEDFIRGHISGSINIPFSAAFTAEGELTQGPYTAMLQNFKGKVIVIVGHVAKHTAEFAAHLVKMKYPRICILDGGINKIKPTGLLTIPSPQI

SEQ ID NO: 52914 - protein, 246 aa, Homo sapiens
IMGRLDGKVIILTAAAQGIGQAAALAFAREGAKVIATDINESKLQELEKYPGIQTRVLDVTKKKQIDQFANEVERLDVLFNVAGFVHHGTVLDCEEKDWDFSMNLNVRSMYLMIKAFLPKMLAQKSGNIINMSSVASSVKGVVNRCVYSTTKAAVIGLTKSVAADFIQQGIRCNCVCPGTVDTPSLQERIQARGNPEEARNDFLKRQKTGRFATAEEIAMLCVYLASDESAYVTGNPVIIDGGWSL

SEQ ID NO: 52915 - protein, 33 aa, Homo sapiens
TRCRALRPFICSQRSLPAQPGKMRESGTPERGG

SEQ ID NO: 52916 - protein, 21 aa, Homo sapiens
KCTDLLKKHQGTPVSHTVFLF

SEQ ID NO: 52917 - protein, 19 aa, Homo sapiens
ISYDCSNYMGPQTPNLMYV

SEQ ID NO: 52918 - protein, 1041 aa, Homo sapiens
IILWNDIFIMSQQGYVATPPYSQPQPGIGLSPPHYGHYGDPSHTASPTGMMKPAGPLGATATRGMLPPGPPPPGPHQFGQNGAHATGHPPQRFPGPPPVNNVASSHAPYQPSAQSSYPGPISTSSVTQLGSQLSAMQINSYGSGMAPPSQGPPGPLSATSLQTPPRPPQPSILQPGSQVLPPPPTTLNGPGASPLPLPMYRPDGLSGPPPPNAQYQPPPLPGQTLGAGYPPQQANSGPQMAGAQLSYPGGFPGGPAQMAGPPQPQKKLDPDSIPSPIQVIENDRASRGGQVYATNTRGQIPPLVTTDCMIQDQGNASPRFIRCTTYCFPCTSDMAKQAQIPLAAVIKPFATIPSNESPLYLVNHGESGPVRCNRCKAYMCPFMQFIEGGRRYQCGFCNCVNDVPPFYFQHLDHIGRRLDHYEKPELSLGSYEYVATLDYCRKSKPPNPPAFIFMIDVSYSNIKNGLVKLICEELKTMLEKIPKEEQEETSAIRVGFITYNKVLHFFNVKSNLAQPQMMVVTDVGEVFVPLLDGFLVNYQESQSVIHNLLDQIPDMFADSNENETVFAPVIQAGMEALKAADCPGKLFIFHSSLPTAEAPGKLKNRDDKKLVNTDKEKILFQPQTNVYDSLAKDCVAHGCSVTLFLFPSQYVDVASLGLVPQLTGGTLYKYNNFQMHLDRQQFLNDLRNDIEKKIGFDAIMRVRTSTGFRATDFFGGILMNNTTDVEMAAIDCDKAVTVEFKHDDKLSEDSGALIQCAVLYTTISGQRRLRIHNLGLNCSSQLADLYKSCETDALINFFAKSAFKAVLHQPLKVIREILVNQTAHMLACYRKNCASPSAASQLILPDSMKVLPVYMNCLLKNCVLLSRPEISTDERAYQRQLVMTMGVADSQLFFYPQLLPIHTLDVKSTMLPAAVRCSESRLSEEGIFLLANGLHMFLWLGVSSPPELIQGIFNVPSFAHINTDMTLLPEVGNPYSQQLRMIMGIIQQKRPYSMKLTIVKQREQPEMVFRQFLVEDKGLYGGSSYVDFLCCVHKEICQLLN

SEQ ID NO: 52919 - protein, 64 aa, Homo sapiens
LPLLEVSCSFDLLIYTDKDLVVPEKWEESGPQFITNSEEVRLRSFTTTIHKVNSMVAYKIPVND

SEQ ID NO: 52920 - protein, 37 aa, Homo sapiens
IKGLQPGKSYLLDVYVIGHGGHSVKYQSKVVKTRKFC

SEQ ID NO: 52921 - protein, 146 aa, Homo sapiens
ISTISILKDVLSKEATKRKINLNISYEINEVSVKHTLKLIHPKLEYQLLLAKKVQLIDALKELQIHEGNTNFLIPEYHCILEEADHLQEEYKKQPAHLERLYGMITDLFIDKFKFKGTNVKTKVPLLLEILDSYDQNALISFFDAA

SEQ ID NO: 52922 - skipped

SEQ ID NO: 52923 - protein, 144 aa, Homo sapiens
VDQLRDDNLETYWQSDGSQPHLVNIQFRRKTTVKTLCIYADYKSDESYTPSKISVRVGNNFHNLQEIRQLELVEPSGWIHVPLTDNHKKPTRTFMIQIAVLANHQNGRDTHMRQIKIYTPVEESSIGKFPRCTTIDFMMYRSIR

SEQ ID NO: 52924 - protein, 14 aa, Homo sapiens
RRSGMGDGHRGQHT

SEQ ID NO: 52925 - protein, 11 aa, Homo sapiens
IMQTYNTGNHQ

SEQ ID NO: 52926 - protein, 589 aa, Homo sapiens
VVDSGGTILELSSNGVENQEESEKVSEYPAVIVEPVPSARLEQGYAAQVLVYDDETYMMQDVAEEQEVETENVETVEASVHSSNAHCTDKTIEAAEALLHMESPTCLRDSRSPVEVFVPPCVSTPEFIHAAMRPDVITETVVEVSTEESEPMDTSPIPTSPDSHEPMKKKKVGRKPKTQQSPISNGSPELGIKKKPREGKGNTTYLWEFLLDLLQDKNTCPRYIKWTQREKGIFKLVDSKAVSKLWGKHKNKPDMNYETMGRALRYYYQRGILAKVEGQRLVYQFKDMPKNIVVIDDDKSETCNEDLAGTTDEKSLERVSLSAESLLKAASSVRSGKNSSPINCSRAEKGVARVVNITSPGHDASSRSPTTTASVSATAAPRTVRVAMQVPVVMTSLGQKISTVAVQSVNAGAPLITSTSPTTATSPKVVIQTIPTVMPASTENGDKITMQPAKIITIPATQLAQCQLQTKSNLTGSGSINIVGTPLAVRALTPVSIAHGTPVMRLSMPTQQASGQTPPRVISAVIKGPEVKSEAVAKKQEHDVKTLQLVEEKPADGNKTVTHVVVVSAPSAIALPVTMKTEGLVTCEK

SEQ ID NO: 52927 - protein, 4 aa, Homo sapiens
VETC

SEQ ID NO: 52928 - protein, 70 aa, Homo sapiens
LRPLSRLLAPARLPSGPSVRSKFYVREPPNAKPDWLKVGFTLGTTVFLWIYLIKQHNEDILEYKRRNGLE

SEQ ID NO: 52929 - protein, 24 aa, Homo sapiens
MASGSIVLFYNDFNRWHHEYQTRY

SEQ ID NO: 52930 - protein, 27 aa, Homo sapiens
ILQIIIMLLLLQGTLLLLQLRLTFQKK

SEQ ID NO: 52931 - protein, 47 aa, Homo sapiens
KGPQPTPQFQFCRASPWWTSISSALMMMFCPPHRGTWLKNLLVQRWF

SEQ ID NO: 52932 - protein, 313 aa, Homo sapiens
LPWLLWLLCRGGGDADSRAPFTPTWPRSREREAAAFRESLNRHRYLNSLFPSENSTAFYGINQFSYLFPEEFKAIYLRSKPSKFPRYSAEVHMSIPNVSLPLRFDWRDKQVVTQVRNQQMCGGCWAFSVVGAVESAYAIKGKPLEDLSVQQVIDCSYNNYGCNGGSTLNALNWLNKMQVKLVKDSEYPFKAQNGLCHYFSGSHSGFSIKGYSAYDFSDQEDEMAKALLTFGPLVVIVDAVSWQDYLGGIIQHHCSSGEANHAVLITGFDKTGSTPYWIVRNSWGSSWGVDGYAHVKMGSNVCGIADSVSSIFV

SEQ ID NO: 52933 - protein, 77 aa, Homo sapiens
IFWPGCLLVKRCGGNCACCLHNCNECQCVPSKVTKKYHEVLQLRPKTGVRGLHKSLTDVALEHHEECDCVCRGSTGG

SEQ ID NO: 52934 - protein, 294 aa, Homo sapiens
LQGPGSLLLLFLASHCCLGSARGLFLFGQPDFSYKRSNCKPIPANLQLCHGIEYQNMRLPNLLGHETMKEVLEQAGAWIPLVMKQCHPDTKKFLCSLFAPVCLDDLDETIQPCHSLCVQVKDRCAPVMSAFGFPWPDMLECDRFPQDNDLCIPLASSDHLLPATEEAPKVCEACKNKNDDDNDIMETLCKNDFALKIKVKEITYINRDTKIILETKSKTIYKLNGVSERDLKKSVLWLKDSLQCTCEEMNDINAPYLVMGQKQGGELVITSVKRWQKGQREFKRISRSIRKLQC

SEQ ID NO: 52935 - protein, 64 aa, Homo sapiens
LARCCCSSSPRTAAWARRAGSSSLASPTSPTSAAIASPSLPTCSCATASNTRTCGCPTCWATRP

SEQ ID NO: 52936 - protein, 18 aa, Homo sapiens
LPPPPSSGDSNSHFGPYY

SEQ ID NO: 52937 - protein, 17 aa, Homo sapiens
MGPAVNKPHFSLGRLII

SEQ ID NO: 52938 - protein, 54 aa, Homo sapiens
IAAATPPSHPSLRYPWMVPWPLQSPRAMGPLCSPMWCTLPYAPSAASRPISVAP

SEQ ID NO: 52939 - protein, 335 aa, Homo sapiens
LFADIVPKTAENFRALCTGEKGIGHTTGKPLHFKGCPFHRIIKKFMIQGGDFSNQNGTGGESIYGEKFEDENFHYKHDREGLLSMANAGRNTNGSQFFITTVPTPHLDGKHVVFGQVIKGIGVARILENVEVKGEKPAKLCVIAECGELKEGDDGGIFPKDGSGDSHPDFPEDADIDLKDVDKILLITEDLKNIGNTFFKSQNWEMAIKKYAEVLRYVDSSKAVIETADRAKLQPIALSCVLNIGACKLKMSNWQGAIDSCLEALELDPSNTKALYRRAQGWQGLKEYDQALADLKKAQGIAPEDKAIQAELLKVKQKIKAQKDKEKAVYAKMFA

SEQ ID NO: 52940 - protein, 57 aa, Homo sapiens
LCYSLILLSIDLTSPHVKNKMSKREFIRNTRRAAQNISEDFVGHLYDNIYLIGHVAA

SEQ ID NO: 52941 - protein, 72 aa, Homo sapiens [sequence omitted]

SEQ ID NO: 52942 - protein, 29 aa, Homo sapiens
ITHVLPFEKINEGFDLLHSGKSIRTILMF

SEQ ID NO: 52943 - protein, 7 aa, Homo sapiens
VWKMQSL

SEQ ID NO: 52944 - protein, 16 aa, Homo sapiens
RTSSPRPMGSRRPQRC

SEQ ID NO: 52945 - protein, 107 aa, Homo sapiens
RTQSINSAFAELRECIPNVPADTKLSKIKTLRLATSYIAYLMDLLAKDDQNGEAEAFKAEIKKTDVKEEKRKKELNEILKSTVSSNDKKTKGRTGWPQHVWALELKQ

SEQ ID NO: 52946 - protein, 42 aa, Homo sapiens
KSLALLLNYLHDFLKYLAKNSATLFSASDYEVALPEYHRKAV

SEQ ID NO: 52947 - protein, 11 aa, Homo sapiens
MPSTQKIKESA

SEQ ID NO: 52948 - protein, 89 aa, Homo sapiens
LFEYAKDNKEQFMENHNPINSATSISNIISIETPNTAPSSKKKDKKEQLSKAQKRKLADKTDHKGELPRGWNWVDVVKHLSKTGSKDDE

SEQ ID NO: 52949 - protein, 345 aa, Homo sapiens
RMRMRPWLEEQINSNTIPGLKWLNKEKKIFQIPWMHAARHGWDVEKDAPLFRNWAIHTGKHQPGVDKPDPKTWKANFRCAMNSLPDIEEVKDKSIKKGNNAFRVYRMLPLSERPSKKGKKPKTEKEDKVKHIKQEPVESSLGLSNGVSDLSPEYAVLTSTIKNEVDSTVNIIVVGQSHLDSNIENQEIVTNPPDICQVVEVTTESDEQPVSMSELYPLQISPVSSYAESETTDSVPSDEESAEGRPHWRKRNIEGKQYLSNMGTRGSYLLPGMASFVTSNKPDLQVTIKEESNPVPYNSSWPPFQDLPLSSSMTPASSSSRPDRETRASVIKKTSDITQARVKSC

SEQ ID NO: 52950 - protein, 280 aa, Homo sapiens
KVSMENTENSVDSKSIKNLEPKIIHGSESMDSGISLDNSYKMDYPEMGLCIIINNKNFHKSTGMTSRSGTDVDAANLRETFRNLKYEVRNKNDLTREEIVELMRDVSKEDHSKRSSFVCVLLSHGEEGIIFGTNGPVDLKKITNFFRGDRCRSLTGKPKLFIIQACRGTELDCGIETDSGVDDDMACHKIPVEADFLYAYSTAPGYYSWRNSKDGSWFIQSLCAMLKQYADKLEFMHILTRVNRKVATEFESFSFDATFHAKKQIPCIVSMLTKELYFYH

SEQ ID NO: 52951 - protein, 4 aa, Homo sapiens
MNSA

SEQ ID NO: 52952 - protein, 62 aa, Homo sapiens
ILGVAWNEITGQIKFLILDPHYTGAEDLQVILEKGWCGWKGPDFWNKDAYYNLCLPQRPNMI

SEQ ID NO: 52953 - protein, 52 aa, Homo sapiens
LYNYTPRNEDELELRESDVIDVMEKCDDGWFVGTSRRTKFFGTFPGNYVKRL

SEQ ID NO: 52954 - protein, 99 aa, Homo sapiens
RCFGVRVSPTGEKVTHTGQVYDDKDYRRIRFVGRQKEVNENFAIDLIAEQPVSEVETRVIACDGGGGALGHPKVYINLDKETKTGTCGYCGLQFRQHHH

SEQ ID NO: 52955 - protein, 37 aa, Homo sapiens
LAPPVQWALQVQGNQLQTAVLCLRMAPPEPAGSRQRI

SEQ ID NO: 52956 - protein, 46 aa, Homo sapiens
TLPERDLVPRPDSPAQQLKSPFQPVRDNSLAPQEGTPRILAALPSA

SEQ ID NO: 52957 - protein, 158 aa, Homo sapiens
RVDKDRSGVISDTELQQALSNGTWTPFNPVTVRSIISMFDRENKAGVNFSEFTGVWKYITDWQNVFRTYDRDNSGMIDKNELKQALSGFGYRLSDQFHDILIRKFDRQGRGQIAFDDFIQGCIVLQRLTDIFRRYDTDQDGWIQVSYEQYLSMVFSIV

SEQ ID NO: 52958 - protein, 42 aa, Homo sapiens
LHPPGHVPRPLRASVLNLPISDARRKAYATVGVYNGDYVLYL

SEQ ID NO: 52959 - protein, 41 aa, Homo sapiens
KDVHDALVQIISKEVGVEKLEAMKTLATLKEEKRYLQDIWS

SEQ ID NO: 52960 - protein, 504 aa, Homo sapiens
IMAAKAVANTMRTSLGPNGLDKMMVDKDGDVTVTNDGATILSMMDVDHQIAKLMVELSKSQDDEIGDGTTGVVVLAGALLEEAEQLLDRGIHPIRIADGYEQAARVAIEHLDKISDSVLVDIKDTEPLIQTAKTTLGSKVVNSCHRQMAEIAVNAVLTVADMERRDVDFELIKVEGKVGGRLEDTKLIKGVIVDKDFSHPQMPKKVEDAKIAILTCPFEPPKPKTKHKLDVTSVEDYKALQKYEKEKFEEMIQQIKETGANLAICQWGFDDEANHLLLQNNLPAVRWVGGPEIELIAIATGGRIVPRFSELTAEKLGFAGLVQEISFGTTKDKMLVIEQCKNSRAVTIFIRGGNKMIIEEAKRSLHDALCVIRNLIRDNRVVYGGGAAEISCALAVSQEADKCPTLEQYAMRAFADALEVIPMALSENSGMNPIQTMTEVRARQVKEMNPALGIDCLHKGTNDMKQQHVIETLIGKKQQISLATQMVRMILKIDDIRKPGESEE

SEQ ID NO: 52961 - protein, 143 aa, Homo sapiens
VTVAKSIDLKDKYKNIGAKLVQDVANNTNEESGDGTTTATVLAGSIAKEGFQKISKGANPVEIRRGVMLAVDAVIAELKKQSKPVTTPEEIAQVAMISANGDKEIGNIISDAMKKVGRKGVITVKDGKTLNDELEIIEGMKFD

SEQ ID NO: 52962 - protein, 8 aa, Homo sapiens
LFSSDLGT

SEQ ID NO: 52963 - protein, 133 aa, Homo sapiens
IPKNALPITKPTSPAPAAQSTNGTHASYGPFYLEYSLLAEFTLVVKQKLPGVYVQPSYRSALMWFGVIFIQHGLYQDGVFKFTVYIPDNYPDGDCPRLVFDIPVFHPLVDPTSGELDVKRAFAKWRRNHNHIW

SEQ ID NO: 52964 - protein, 78 aa, Homo sapiens
VAEPAENEQDEQDENGAEASADLRADAMAKDRSEEECTTEAEKNERVQKHLKALTSELASARDESKKTANDMIHAENM

SEQ ID NO: 52965 - protein, 67 aa, Homo sapiens
IECLIQSVHYLLKNLPNPTLVTIARSSLDDYCPSDQVDTIQEKVLNMLRALYGNLDLQVYAAESPPS

SEQ ID NO: 52966 - protein, 347 aa, Homo sapiens
TEDDGIYTCIAVNDMGSASSSASLRVLGPGMDGIMVTWKDNFDSFYSEVAELGRGRFSVVKKCDQKGTKRAVATKFVNKKLMKRDQVTHELGILQSLQHPLLVGLLDTFETPTSYILVLEMADQGRLLDCVVRWGSLTEGKIRAHLGEVLEAVRYLHNCRIAHLDLKPENILVDESLAKPTIKLADFGDAVQLNTTYYIHQLLGNPEFAAPEIILGNPVSLTSDTWSVGVLTYVLLSGVSPFLDDSVEETCLNICRLDFSFPDDYFKGVSQKAKEFVCFLLQEDPAKRPSAALALQEQWLQAGNGRSTGVLDTSRLTSFIERRKHQNDVRPIRSIKNFLQSRLLPRV

SEQ ID NO: 52967 - protein, 55 aa, Homo sapiens
VRHTIQVYRLSKYNTEEFITVYPTDPPKDWPVVTLIAEDDRHYNIPVRVCEETSL

SEQ ID NO: 52968 - protein, 237 aa, Homo sapiens
LHRHPEPNSKMGGKLSKKKKGYNVNDEKAKEKDKKAEGAATEEEGTPKESEPQAAAEPAEAKEGKEKPDQDAEGKAEEKEGEKDAAAAKEEAPKAEPEKTEGAAEAKAEPPKAPEQEQAAPGPAAGGEAPKAAEAAAAPAESAAPAAGEEPSKEEGEPKKTEAPAAPAAQETKSDGAPASDSKPGSSEAAPSSKETPAATEAPSSTPKAQGPAASAEEPKPVEAPAANSDQTVTVKE

SEQ ID NO: 52969 - protein, 39 aa, Homo sapiens
KAGQCVEPNCRSKRMLAIKRCKHFELGGDRKRKGQVIQF

SEQ ID NO: 52970 - protein, 17 aa, Homo sapiens
IYKYIYMYITDAQVYTR

SEQ ID NO: 52971 - protein, 45 aa, Homo sapiens
KEALPHLQINCSHFTTIARPTIGNKKNQEIWGIKCRLTLQKPSCL

SEQ ID NO: 52972 - protein, 92 aa, Homo sapiens
MVIVLTSVGLPTDDITLIIAVDWFLDRLRTTTNVLGDSLGAGIVEHLSRHELKNRDVEMGNSVIEENEMKKPYQLIAQDNETEKPIDSETKM

SEQ ID NO: 52973 - protein, 719 aa, Homo sapiens
KASSPSGKMGGEEKPIGAGEEKQKEGGKKKNKEGSGDGGRAELNPWPEYIYTRLEMYNILKAEHDSILAEKAEKDSKPIKVTLPDGKQVDAESWKTTPYQIACGISQGLADNTVIAKVNNVVWDLDRPLEEDCTLELLKFEDEEAQAVYWHSSAHIMGEAMERVYGGCLCYGPPIENGFYYDMYLEEGGVSSNDFSSLEALCKKIIKEKQAFERLEVKKETLLAMFKYNKFKCRILNEKVNTPTTTVYRCGPLIDLCRGPHVRHTGKIKALKIHKNSSTYWEGKADMETLQRIYGISFPDPKMLKEWEKFQEEAKNRDHRKIGRDQELYFFHELSPGSCFFLPKGAYIYNALIEFIRSEYRKRGFQEVVTPNIFNSRLWMTSGHWQHYSENMFSFEVEKELFALKPMNCPGHCLMFDHRPRSWRELPLRLADFGVLHRNELSGALTGLTRVRRFQQDDAHIFCAMEQIEDEIKGCLDFLRTVYSVFGFSFKLNLSTRPEKFLGDIEVWDQAEKQLENSLNEFGEKWELNSGDGAFYGPKIDIQIKDAIGRYHQCATIQLDFQLPIRFNLTYVSHDGDDKKRPVIVHRAILGSVERMIAILTENYGGKWPFWLSPRQVMVVPVGPTCDEYAQKVRQQFHDAKFMADIDLDPGCTLNKKIRNAQLAQYNFILVVGEKEKISGTVNIRTRDNKVHGERTISETIERLQQLKEFRSKQAEEEF

SEQ ID NO: 52974 - protein, 10 aa, Homo sapiens
RLFGFSTYGI

SEQ ID NO: 52975 - protein, 979 aa, Homo sapiens
KSLKAKFRKSDTNEWNKNDDRLLQAVENGDAEKVASLLGKKGASATKHDSEGKTAFHLAAAKGHVECLRVMITHGVDVTAQDTTGHSALHLAAKNSHHECIRKLLQSKCPAESVDSSGKTALHYAAAQGCLQAVQILCEHKSPINLKDLDGNIPLLLAVQNGHSEICHFLLDHGADVNSRNKSGRTALMLACEIGSSNAVEALIKKGADLNLVDSLGYNALHYSKLSENAGIQSLLLSKISQDADLKTPTKPKQHDQVSKISSERSGTPKKRKAPPPPISPTQLSDVSSPRSITSTPLSGKESVFFAEPPFKAEISSIRENKDRLSDSTTGADSLLDISSEADQQDLLSLLQAKVASLTLHNKELQDKLQAKSPKEAEADLSFDSYHSTQTDLGPSLGKPGETSPPDSKSSPSVLIHSLGKSTTDNDVRIQQLQEILQDLQKRLESSEAERKQLQVELQSRRAELVCLNNTEISENSSDLSQKLKETQSKYEEAMKEVLSVQKQMKLGLVSPESMDNYSHFHELRVTEEEINVLKQDLQNALEESERNKEKVRELEEKLVEREKGTVIKPPVEEYEEMKSSYCSVIENMNKEKAFLFEKYQEAQEEIMKLKDTLKSQMTQEASDEAEDMKEAMNRMIDELNKQVSELSQLYKEAQAELEDYRKRKSLEDVTAEYIHKAEHEKLMQLTNVSRAKAEDALSEMKSQYSKVLNELTQLKQLVDAQKENSVSITEHLQVITTLRTAAKEMEEKISNLKEHLASKEVEVAKLEKQLLEEKAAMTDAMVPRSSYEKLQSSLESEVSVLASKLKESVKEKEKVHSEVVQIRSEVSQVKREKENIQTLLKSKEQEVNELLQKFQQAQEELAEMKRYAESSSKLEEDKDKKINEMSKEVTKLKEALNSLSQLSYSTSSSKRQSQQLEALQQQVKQLQNQLAECKKQHQEVISVYRMHLLYAVQGQMDEDVQKVLKQILTMCKNQSQKK

SEQ ID NO: 52976 - protein, 336 aa, Homo sapiens
KPKRNEIDAEPPAKRHATAEEVEEEERDRIPGPVCKGKWKNKERILIFSSRGINFRTRHLMQDLRMLMPHSKADTKMDRKDKLFVINEVCEMKNCNKCIYFEAKKKQDLYMWLSNSPHGPSAKFLVQNIHTLAELKMTGNCLKGSRPLLSFDPAFDELPHYALLKELLIQIFSTPRYHPKSQPFVDHVFTFTILDNRIWFRNFQIIEEDAALVEIGPRFVLNLIKIFQGSFGGPTLYENPHYQSPNMHRRVIRSITAAKYREKQQVKDVQKLRKKEPKTLLPHDPTADVFVTPAEEKPIEIQWVKPEPKVDLKARKKRIYKRQRKMKQRMDSGKTK

SEQ ID NO: 52977 - protein, 158 aa, Homo sapiens
MEDAPKQKLSKKQKKKKQKPAQNYDDNFNVNGPGEGVKVDPEDTNLNQDSAKELEDSPQENVSVTEIIKPCDDPKSEAKSVPKPKGKKTKDMKKPVRVPAEPQTMSVLISCTTCHSEFPSRNKLFDHLKATGHARAPSSSSLNSATSSQSKKEKRKNR

SEQ ID NO: 52978 - protein, 831 aa, Homo sapiens
IGEFQSFSSASSPVNCQWDFYAPWSECNGCTKTQTRRRSVAVYGQYGGQPCVGNAFETQSCEPTRGCPTEEGCGERFRCFSGQCISKSLVCNGDSDCDEDSADEDRCEDSERRPSCDIDKPPPNIELTGNGYNELTGQFRNRVINTKSFGGQCRKVFSGDGKDFYRLSGNVLSYTFQVKINNDFNYEFYNSTWSYVKHTSTEHTSSSRKRSFFRSSSSSSRSYTSHTNEIHKGKSYQLLVVENTVEVAQFINNNPEFLQLAEPFWKELSHLPSLYDYSAYRRLIDQYGTHYLQSGSLGGEYRVLFYVDSEKLKQNDFNSVEEKKCKSSGWHFVVKFSSHGCKELENALKAASGTQNNVLRGEPFIRGGGAGFISGLSYLELDNPAGNKRRYSAWAESVTNLPQVIKQKLTPLYELVKEVPCASVKKLYLKWALEEYLDEFDPCHCRPCQNGGLATVEGTHCLCHCKPYTFGAACEQGVLVGNQAGGVDGGWSCWSSWSPCVQGKKTRSRECNNPPPSGGGRSCVGETTESTQCEDEELEHLRLLEPHCFPLSLVPTEFCPSPPALKDGFVQDEGTMFPVGKNVVYTCNEGYSLIGNPVARCGEDLRWLVGEMHCQKIACVLPVLMDGIQSHPQKPFYTVGEKVTVSCSGGMSLEGPSAFLCGSSLKWSPEMKNARCVQKENPLTQAVPKCQRWEKLQNSRCVCKMPYECGPSLDVCAQDERSKRILPLTVCKMHVLHCQGRNYTLTGRDSCTLPASAEKACGACPLWGKCDAESSKCVCREASECEEEGFSICVEVNGKEQTMSECEAGALRCRGQSISVTSIRPCAAETQ

SEQ ID NO: 52979 - protein, 65 aa, Homo sapiens
KNIALDKTDDSNPREAILRHAKAAEDSPYWVSPAYSKTQPKTMFAQVESDDEEAKNEPEWKKRKI

SEQ ID NO: 52980 - protein, 10 aa, Homo sapiens
RLASSDLQPE

SEQ ID NO: 52981 - protein, 6 aa, Homo sapiens
MTTQIS

SEQ ID NO: 52982 - protein, 1088 aa, Homo sapiens
INMANLLKTVVTGCSCPLLSNLGSCKGLRVKKDFLRTFYTHQELWCKAPVKPGIPYKQLTVGVPKEIFQNEKRVALSPAGVQNLVKQGFNVVVESGAGEASKFSDDHYRVAGAQIQGAKEVLASDLVVKVRAPMVNPTLGVHEADLLKTSGTLISFIYPAQNPELLNKLSQRKTTVLAMDQVPRVTIAQGYDALSSMANIAGYKAVVLAANHFGRFFTGQITAAGKVPPAKILIVGGGVAGLASAGAAKSMGAIVRGFDTRAAALEQFKSLGAEPLEVDLKESGEGQGGYAKEMSKEFIEAEMKLFAQQCKEVDILISTALIPGKKAPVLFNKEMIESMKEGSVVVDLAAEAGGNFETTKPGELYIHKGITHIGYTDLPSRMATQASTLYSNNITKLLKAISPDKDNFYFDVKDDFDFGTMGHVIRGTVVMKDGKVIFPAPTPKNIPQGAPVKQKTVAELEAEKAATITPFRKTMSTASAYTAGLTGILGLGIAAPNLAFSQMVTTFGLAGIVGYHTVWGVTPALHSPLMSVTNAISGLTAVGGLALMGGHLYPSTTSQGLAALAAFISSVNIAGGFLVTQRMLDMFKRPTDPPEYNYLYLLPAGTFVGGYLAALYSGYNIEQIMYLGSGLCCVGALAGLSTQGTARLGNALGMIGVAGGLAATLGVLKPGPELLAQMSGAMALGGTIGLTIAKRIQISDLPQLVAAFHSLVGLAAVLTCIAEYIIEYPHFATDAAANLTKIVAYLGTYIGGVTFSGSLIAYGKLQGLLKSAPLLLPGRHLLNAGLLAASVGGIIPFMVDPSFTTGITCLGSVSALSAVMGVTLTAAIGGADMPVVITVLNSYSGWALCAEGFLLNNNLLTIVGALIGSSGAILSYIMCVAMNRSLANVILGGYGTTSTAGGKPMEISGTHTEINLDNAIDMIREANSIIITPGYGLCAAKAQYPIADLVKMLTEQGKKVRFGIHPVAGRMPGQLNVLLAEAGVPYDIVLEMDEINHDFPDTDLVLVIGANDTVNSAAQEDPNSIIAGMPVLEVWKSKQVIVMKRSLGVGYAAVDNPIFYKPNTAMLLGDAKKTCDALQAKVRESYQK

SEQ ID NO: 52983 - protein, 22 aa, Homo sapiens
LPVRFQRPRARRGGRCGNPSGM

SEQ ID NO: 52984 - protein, 223 aa, Homo sapiens
VEVNIPRKRKGNCSQHDRALERFYEQVVQAIQRHIHFDVVKCILVASPGFVREQFCDYLFQQAVKTDNKLLLENRSKFLQVHASSGHKYSLKEALCDPTVASRLSDTKAAGEVKALDDFYKMLQHEPDRAFYGLKQVEKANEAMAIDTLLISDELFRHQDVATRSRYVRLVDSVKENAGTVRIFSSLHVSGEQLSQLTGVAAILRFPVPELSDQEGDSSSEED

SEQ ID NO: 52985 - protein, 1147 aa, Homo sapiens
VKNSMTFSGPVEDMFGYTVQQYENEEGKWVLIGSPLVGQPKNRTGDVYKCPVGRGESLPCVKLDLPVNTSIPNVTEVKENMTFGSTLVTNPNGGFLACGPLYAYRCGHLHYTTGICSDVSPTFQVVNSIAPVQECSTQLDIVIVLDGSNSIYPWDSVTAFLNDLLERMDIGPKQTQVGIVQYGENVTHEFNLNKYSSTEEVLVAAKKIVQRGGRQTMTALGIDTARKEAFTEARGARRGVKKVMVIVTDGESHDNHRLKKVIQDCEDENIQRFSIAILGSYNRGNLSTEKFVEEIKSIASEPTEKHFFNVSDELALVTIVKTLGERIFALEATADQSAASFEMEMSQTGFSAHYSQDWVMLGAVGAYDWNGTVVMQKASQIIIPRNTTFNVESTKKNEPLASYLGYTVNSATASSGDVLYIAGQPRYNHTGQVIIYRMEDGNIKILQTLSGEQIGSYFGSILTTTDIDKDSNTDILLVGAPMYMGTEKEEQGKVYVYALNQTRFEYQMSLEPIKQTCCSSRQHNSCTTENKNEPCGARFGTAIAAVKDLNLDGFNDIVIGAPLEDDHGGAVYIYHGSGKTIRKEYAQRIPSGGDGKTLKFFGQSIHGEMDLNGDGLTDVTIGGLGGAALFWSRDVAVVKVTMNFEPNKVNIQKKNCHMEGKETVCINATVCFDVKLKSKEDTIYEADLQYRVTLDSLRQISRSFFSGTQERKVQRNITVRKSECTKHSFYMLDKHDFQDSVRITLDFNLTDPENGPVLDDSLPNSVHEYIPFAKDCGNKEKCISDLSLHVATTEKDLLIVRSQNDKFNVSLTVKNTKDSAYNTRTIVHYSPNLVFSGIEAIQKDSCESNHNITCKVGYPFLRRGEMVTFKILFQFNTSYLMENVTIYLSATSDSEEPPETLSDNVVNISIPVKYEVGLQFYSSASEYHISIAANETVPEVINSTEDIGNEINIFYLIRKSGSFPMPELKLSISFPNMTSNGYPVLYPTGLSSSENANCRPHIFEDPFSINSGKKMTTSTDHLKRGTILDCNTCKFATITCNLTSSDISQVNVSLILWKPTFIKSYFSSLNLTIRGELRSENASLVLSSSNQKRELAIQISKDGLPGRVPLWVILLSAFAGLLLLMLLILALWKIGFFKRPLKKKMEK

SEQ ID NO: 52986 - protein, 27 aa, Homo sapiens
KLGFFKRKYEKMTKNPDEIDETTELSS

SEQ ID NO: 52987 - protein, 15 aa, Homo sapiens
ISQKKLKKQKLMARE

SEQ ID NO: 52988 - protein, 340 aa, Homo sapiens
RHQPGGLCLLLLLLCQFMEDRSAQAGNCWLRQAKNGRCQVLYKTELSKEECCSTGRLSTSWTEEDVNDNTLFKWMIFNGGAPNCIPCKETCENVDCGPGKKCRMNKKNKPRCVCAPDCSNITWKGPVCGLDGKTYRNECALLKARCKEQPELEVQYQGRCKKTCRDVFCPGSSTCVVDQTNNAYCVTCNRICPEPASSEQYLCGNDGVTYSSACHLRKATCLLGRSIGLAYEGKCIKAKSCEDIQCTGGKKCLWDFKVGRGRCSLCDELCPDSKSDEPVCASDNATYASECAMKEAACSSGVLLEVKHSGSCNSISEDTEEEEEDEDQDYSFPISSILEW

SEQ ID NO: 52989 - protein, 168 aa, Homo sapiens
VVLRQTLWRRRAVAVAALSVSRVPTRSLRTSTWRLAQDQTQDTQLITVDEKLDITTLTGVPEEHIKTRKVRIFVPARNNMQSGVNNTKKWKMEFDTRERWENPLMGWASTADPLSNMVLTFSTKEDAVSFAEKNGWSYDIEERKVPKPKSKSYGANFSWNKRTRVSTK

SEQ ID NO: 52990 - protein, 36 aa, Homo sapiens
MNVQGDYQSIDATGFININSLRLKEYHRLQSKVTAK

SEQ ID NO: 52991 - protein, 428 aa, Homo sapiens
TRSDLSLGSRGGSVPPQHHPSGPKSSATVSRNLNRFSTFVKSGGEAFVLGEASGFVKDGDKLCVVLGPYGPEWQENPYPFQCTIDDPTKQTKFKGMKSYISYKLVPTHTQVPVHRRYKHFDWLYARLAEKFPVISVPHLPEKQATGRFEEDFISKRRKGLIWWMNHMASHPVLAQCDVFQHFLTCPSSTDEKAWKQGKRKAEKDEMVGANFFLTLSTPPAAALDLQEVESKIDGFKCFTKKMDDSALQLNHTANEFARKQVTGFKKEYQKVGQSFRGLSQAFELDQQAFSVGLNQAIAFTGDAYDAIGELFAEQPRQDLDPVMDLLALYQGHLANFPDIIHVQKGALTKVKESRRHVEEGKMEVQKADGIQDRCNTISFATLAEIHHFHQIRVRDFKSQMQHFLQQQIIFFQKVTQKLEEALHKYDSV

SEQ ID NO: 52992 - protein, 5 aa, Homo sapiens
MLSCY

SEQ ID NO: 52993 - protein, 172 aa, Homo sapiens
VDGMGWSQDLFRALWRSLSREVKEHVGTDQFGNKYYYIPQYKNWRGQTIREKRIVEAANKKEVDYEAGDIPTEWEAWIRRTRKTPPTMEEILKNEKHREEIKIKSQDFYEKEKLLSKETSEELLPPPVQTQIKGHASAPYFGKEEPSVAPSSTGKTFQPGSWMPRDGKSHNQ

SEQ ID NO: 52994 - protein, 84 aa, Homo sapiens
LNQFKSKLTQAIAETPENDIPETEVEDDEGWMSHVLQFEDKSRKVKDASMQDSDTFEIYDPRNPVNKRRREESKKLMREKKERR

SEQ ID NO: 52995 - protein, 4 aa, Homo sapiens
ITVK

SEQ ID NO: 52996 - protein, 172 aa, Homo sapiens [sequence omitted]

SEQ ID NO: 52997 - protein, 634 aa, Homo sapiens
VYDAVGMLGIEEVTYENCLQALADVEVKYIVERTMLDFPQHVSSDKEVRAASTEADKRLSRFDIEMSMRGDIFERIVHLQETCDLGKIKPEARRYLEKSIKMGKRNGLHLPEQVQNEIKSMKKRMSELCIDFNKNLNEDDTFLVFSKAELGALPDDFIDSLEKTDDDKYKITLKYPHYFPVMKKCCIPETRRRMEMAFNTRCKEENTIILQQLLPLRTKVAKLLGYSTHADFVLEMNTAKSTSRVTAFLDDLSQKLKPLGEAEREFILNLKKKECKDRGFEYDGKINAWDLYYYMTQTEELKYSIDQEFLKEYFPIEVVTEGLLNTYQELLGLSFEQMTDAHVWNKSVTLYTVKDKATGEVLGQFYLDLYPREGKYNHAACFGLQPGCLLPDGSRMMAVAALVVNFSQPVAGRPSLLRHDEVRTYFHEFGHVMHQICAQTDFARFSGTNVETDFVEVPSQMLENWVWDVDSLRRLSKHYKDGSPIADDLLEKLVASRLVNTGLLTLRQIVLSKVDQSLHTNTSLDAASEYAKYCSEILGVAATPGTNMPATFGHLAGGYDGQYYGYLWSEVFSMDMFYSCFKKEGIMNPEVGMKYRNLILKPGGSLDGMDMLHNFLKREPNQKAFLMSRGLHAP

SEQ ID NO: 52998 - protein, 71 aa, Homo sapiens [sequence omitted]

SEQ ID NO: 52999 - protein, 33 aa, Homo sapiens
LAYGSITPISAFVFVVFFSVFFPSFYEDFCCWI

SEQ ID NO: 53000 - protein, 14 aa, Homo sapiens
LRVTPFILKKLDSI

SEQ ID NO: 53001 - protein, 33 aa, Homo sapiens; identical to SEQ ID NO: 52999

SEQ ID NO: 53002 - protein, 14 aa, Homo sapiens
LRVTPFILKKLDSI

SEQ ID NO: 53003 - protein, 477 aa, Homo sapiens
IDNLIDPGSPFLELSQFAGYQLYDNEEVPGGGIITGIGRVSGVECMIIANDATVKGGAYYPVTVKKQLRAQEIAMQNRLPCIYLVDSGGAYLPRQADVFPDRDHFGRTFYNQAIMSSKNIAQIAVVMGSCTAGGAYVPAMADENIIVRKQGTIFLAGPPLVKAATGEEVSAEDLGGADLHCRKSGVSDHWALDDHHALHLTRKVVRNLNYQKKLDVTIEPSEEPLFPADELYGIVGANLKRSFDVREVIARIVDGSRFTEFKAFYGDTLVTGFARIFGYPVGIVGNNGVLFSESAKKGTHFVQLCCQRNIPLLFLQNITGFMVGREYEAEGIAKDGAKMVAAVACAQVPKITLIIGGSYGAGNYGMCGRAYSPRFLYIWPNARISVMGGEQAANVLATITKDQRAREGKQFSSADEAALKEPIIKKFEEEGNPYYSSARVWDDGIIDPADTRLVLGLSFSAALNAPIEKTDFGIFRM

SEQ ID NO: 53004 - protein, 10 aa, Homo sapiens
MESFSLGIKS

SEQ ID NO: 53005 - protein, 733 aa, Homo sapiens
LLHGSRFANMSAEGYQYRALYDYKKEREEDIDLHLGDILTVNKGSLVALGFSDGQEARPEEIGWLNGYNETTGERGDFPGTYVEYIGRKKISPPTPKPRPPRPLPVAPGSSKTEADVEQQALTLPDLAEQFAPPDIAPPLLIKLVEAIEKKGLECSTLYRTQSSSNLAELRQLLDCDTPSVDLEMIDVHVLADAFKRYLLDLPNPVIPAAVYSEMISLAPEVQSSEEYIQLLKKLIRSPSIPHQYWLTLQYLLKHFFKLSQTSSKNLLNARVLSEIFSPMLFRFSAASSDNTENLIKVIEILISTEWNERQPAPALPPKPPKPTTVANNGMNNNMSLQDAEWYWGDISREEVNEKLRDTADGTFLVRDASTKMHGDYTLTLRKGGNNKLIKIFHRDGKYGFSDPLTFSSVVELINHYRNESLAQYNPKLDVKLLYPVSKYQQDQVVKEDNIEAVGKKLHEYNTQFQEKSREYDRLYEEYTRTSQEIQMKRTAIEAFNETIKIFEEQCQTQERYSKEYIEKFKREGNEKEIQRIMHNYDKLKSRISEIIDSRRRLEEDLKKQAAEYREIDKRMNSIKPDLIQLRKTRDQYLMWLTQKGVRQKKLNEWLGNENTEDQYSLVEDDEDLPHHDEKTWNVGSSNRNKAENLLRGKRDGTFLVRESSKQGCYACSVVVDGEVKHCVINKTATGYGFAEPYNLYSSLKELVLHYQHTSLVQHNDSLNVTLAYPVYAQQRR

SEQ ID NO: 53006 - protein, 399 aa, Homo sapiens
KRGQKGTLIGYSPEGTPLYNFMGDAFQHSSQSIPRFIKESLKQILEESDSRQIFYFLCLNLLFTFVELFYGVLTNSLGLISDGFHMLFDCSALVMGLFAALMSRWKATRIFSYGYGRIEILSGFINGLFLIVIAFFVFMESVARLIDPPELDTHMLTPVSVGGLIVNLIGICAFSHAHSHAHGASQGSCHSSDHSHSHHMHGHSDHGHGHSHGSAGGGMNANMRGVFLHVLADTLGSIGVIVSTVLIEQFGWFIADPLCSLFIAILIFLSVVPLIKDACQVLLLRLPPEYEKELHIALEKIQKIEGLISYRDPHFWRHSASIVAGTIHIQVTSDVLEQRIVQQVTGILKDAGVNNLTIQVEKEAYFQHMSGLSTGFHDVLAMTKQMESMKYCKDGTYIM

SEQ ID NO: 53007 - protein, 65 aa, Homo sapiens
LSYTEESLLPVMQHLAKNVVMVNQGLTKHMTVKNKYATSKHAKISTLPQLNSALVQDLAKAVAKV

SEQ ID NO: 53008 - protein, 151 aa, Homo sapiens [sequence omitted]

SEQ ID NO: 53009 - protein, 534 aa, Homo sapiens
LAAMLALLTQVALVVQVAEAARAPSVSAKPGPALWPLPLLVKMTPNLLHLAPENFYISHSPNSTAGPSCTLLEEAFRRYHGYIFGFYKWHHEPAEFQAKTQVQQLLVSITLQSECDAFPNISSDESYTLLVKEPVAVLKANRVWGALRGLETFSQLVYQDSYGTFTINESTIIDSPRFSHRGILIDTSRHYLPVKIILKTLDAMAFNKFNVLHWHIVDDQSFPYQSITFPELSNKGSYSLSHVYTPNDVRMVIEYARLRGIRVLPEFDTPGHTLSWGKGQKDLLTPCYSRQNKLDSFGPINPTLNTTYSFLTTFFKEISEVFPDQFIHLGGDEVEFKCWESNPKIQDFMRQKGFGTDFKKLESFYIQKVLDIIATINKGSIVWQEVFDDKAKLAPGTIVEVWKDSAYPEELSRVTASGFPVILSAPWYLDLISYGQDWRKYYKVEPLDFGGTQKQKQLFIGGEACLWGEYVDATNLTPRLWPRASAVGERLWSSKDVRDMDDAYDRLTRHRCRMVERGIAAQPLYAGYCNHENM

SEQ ID NO: 53010 - protein, 876 aa, Homo sapiens
VASHPWEVIVGTVTLTICMMSMNMFTGNNKICGWNYECPKFEEDVLSSDIIILTITRCIAILYIYFQFQNLRQLGSKYILGIAGLFTIFSSFVFSTVVIHFLDKELTGLNEALPFFLLLIDLSRASTLAKFALSSNSQDEVRENIARGMAILGPTFTLDALVECLVIGVGTMSGVRQLEIMCCFGCMSVLANYFVFMTFFPACVSLVLELSRESREGRPIWQLSHFARVLEEEENKPNPVTQRVKMIMSLGLVLVHAHSRWIADPSPQNSTADTSKVSLGLDENVSKRIEPSVSLWQFYLSKMISMDIEQVITLSLALLLAVKYIFFEQTETESTLSLKNPITSPVVTQKKVPDNCCRREPMLVRNNQKCDSVEEETGINRERKVEVIKPLVAETDTPNRATFVVGNSSLLDTSSVLVTQEPEIELPREPRPNEECLQILGNAEKGAKFLSDAEIIQLVNAKHIPAYKLETLMETHERGVSIRRQLLSKKLSEPSSLQYLPYRDYNYSLVMGACCENVIGYMPIPVGVAGPLCLDEKEFQVPMATTEGCLVASTNRGCRAIGLGGGASSRVLADGMTRGPVVRLPRACDSAEVKAWLETSEGFAVIKEAFDSTSRFARLQKLHTSIAGRNLYIRFQSRSGDAMGMNMISKGTEKALSKLHEYFPEMQILAVSGNYCTDKKPAAINWIEGRGKSVVCEAVIPAKVVREVLKTTTEAMIEVNINKNLVGSAMAGSIGGYNAHAANIVTAIYIACGQDAAQNVGSSNCITLMEASGPTNEDLYISCTMPSIEIGTVGGGTNLLPQQACLQMLGVQGACKDNPGENARQLARIVCGTVMAGELSLMAALAAGHLVKSHMIHNRSKINLQDLQGACTKKTA

SEQ ID NO: 53011 - protein, 22 aa, Homo sapiens
IKEASPESEDEEEALPCTDWEN

SEQ ID NO: 53012 - protein, 63 aa, Homo sapiens
IGLRVSIDTDMVEFQAGSEGQLLPQHYLNDLDSALIPVIHGGTSNSSLPLEIELVFFIIEHLF

SEQ ID NO: 53013 - protein, 53 aa, Homo sapiens
RYSLTIWTGKNDNYSVEDLLYIRDHFDKKQVFYDILEPQNHEFKQAIGIKVNL

SEQ ID NO: 53014 - protein, 75 aa, Homo sapiens
ILCAFRRASSSGMLGQSIRRFTTSVVRRSHYEEGPGKNLPFSVENKWSLLAKMCLYFGSAFATPFLVVRHQLLKT

SEQ ID NO: 53015 - protein, 37 aa, Homo sapiens
TLSNERGAQQHVLKKLLAITELLQQKQNQYTKTNDVR

SEQ ID NO: 53016 - protein, 39 aa, Homo sapiens
IEQLFFVRLVGKTPIETLIRDMLLSGSSFNWPYMSIQCS

SEQ ID NO: 53017 - protein, 14 aa, Homo sapiens
ITLEMMCRSVMEFS

SEQ ID NO: 53018 - protein, 4 aa, Homo sapiens
MKGF

SEQ ID NO: 53019 - protein, 699 aa, Homo sapiens
KSSSMNPTETKAIPVSQQMEGPHLPNKKKHKKQAVKTEPEKKSQSTKLSVVHEKKSQEGKPKEHTEPKSLPKQASDTGSNDAHNKKAVSRSAEQQPSEKSTEPKTKPQDMISAGGESVAGITAISGKPGDKKKEKKSLTPAVPVESKPDKPSGKSGMDAALDDLIDTLGGPEETEEENTTYTGPEVSDPMSSTYIEELGKREVTIPPKYRELLAKPIGPDDAIDALSSDFTCGSPTAAGKKTEKEESTEVLKAQSAGTVRSAAPPQEKKRKVEKDTMSDQALEALSASLGTRQAEPELDLRSIKEVDEAKAKEEKLEKCGEDDETIPSEYRLKPATDKDGKPLLPEPEEKPKPRSESELIDELSEDFDRSECKEKPSKPTEKTEESKAAAPAPVSEAVCRTSMCSIQSAPPEPATLKGTVPDDAVEALADSLGKKEADPEDGKPVMDKVKEKAKEEDREKLGEKEETIPPDYRLEEVKDKDGKPLLPKESKEQLPPMSEDFLLDALSEDFSGPQNASSLKFEDAKLAAAISEVVSQTPASTTQAGAPPRDTSQSDKDLDDALDKLSDSLGQRQPDPDENKPMEDKVKEKAKAEHRDKLGERDDTIPPEYRHLLDDNGQDKPVKPPTKKSEDSKKPADDQDPIDALSGDLDSCPSTTETSQNTAKDKCKKAASSSKAPKNGGKAKDSAKTTEETSKPKDD

SEQ ID NO: 53020 - protein, 1010 aa, Homo sapiens
IENSMFEEEPDVVDLAKEPCLHPLEPDEVEYEPRGSRLLVRGLGEHEMEEDEEDYESSAKLLGMSFMNRSSGLRNSATGYRQSPDGACSVPSARTMVVCAFVIVVAVSVIMVIYLLPRCTFTKEGCHKKNQSIGLIQPFATNGKLFPWAQIRLPTAVVPLRYELSLHPNLTSMTFRGSVTISVQALQVTWNIILHSTGHNISRVTFMSAVSSQEKQAEILEYAYHGQIAIVAPEALLAGHNYTLKIEYSANISSSYYGFYGFSYTDESNEKKYFAATQFEPLAARSAFPCFDEPAFKATFIIKIIRDEQYTALSNMPKKSSVVLDDGLVQDEFSESVKMSTYLVAFIVGEMKNLSQDVNGTLVSIYAVPEKIGQVHYALETTVKLLEFFQNYFEIQYPLKKLDLVAIPDFEAGAMENWGLLTFREETLLYDSNTSSMADRKLVTKIIAHELAHQWFGNLVTMKWWNDLWLNEGFATFMEYFSLEKIFKELSSYEDFLDARFKTMKKDSLNSSHPISSSVQSSEQIEEMFDSLSYFKGSSLLLMLKTYLSEDVFQHAVVLYLHNHSYASIQSDDLWDSFNEVTNQTLDVKRMMKTWTLQKGFPLVTVQKKGKELFIQQERFFLNMKPEIQPSDTSYLWHIPLSYVTEGRNYSKYQSVSLLDKKSGVINLTEEVLWVKVNINMNGYYIVHYADDDWEALIHQLKINPYVLSDKDRANLINNIFELAGLGKVPLKRAFDLINYLGNENHTAPITEALFQTDLIYNLLEKLGYMDLASRLVTRVFKLLQNQIQQQTWTDEGTPSMRELRSALLEFACTHNLGNCSTTAMKLFDDWMASNGTQSLPTDVMTTVFKVGAKTDKGWSFLLGKYISIGSEAEKNKILEALASSEDVRKLYWLMKSSLNGDNFRTQKLSFIIRTVGRHFPGHLLAWDFVKENWNKLVQKFPLGSYTIQNIVAGSTYLFSTKTHLSEVQAFFENQSEATFRLRCVQEALEVIQLNIQWMEKNLKSLTWWL

SEQ ID NO: 53021 - protein, 14 aa, Homo sapiens
MVCGRRRTPAVPGP

SEQ ID NO: 53022 - protein, 978 aa, Homo sapiens
IGVDMAGRVPSLLVLLVFPSSCLAFRSPLSVFKRFKETTRPFSNECLGTTRPVVPIDSSDFALDIRMPGVTPKQSDTYFCMSMRIPVDEEAFVIDFKPRASMDTVHHMLLFGCNMPSSTGSYWFCDEGTCTDKANILYAWARNAPPTRLPKGVGFRVGGETGSKYFVLQVHYGDISAFRDNNKDCSGVSLHLTRLPQPLIAGMYLMMSVDTVIPAGEKVVNSDISCHYKNYPMHVFAYRVHTHHLGKVVSGYRVRNGQWTLIGRQSPQLPQAFYPVGHPVDVSFGDLLAARCVFTGEGRTEATHIGGTSSDEMCNLYIMYYMEAKHAVSFMTCTQNVAPDMFRTIPPEANIPIPVKSDMVMMHEHHKETEYKDKIPLLQQPKREEEEVLDQGDFYSLLSKLLGEREDVVHVHKYNPTEKAESESDLVAEIANVVQKKDLGRSDAREGAEHERGNAILVRDRIHKFHRLVSTLRPPESRVFSLQQPPPGEGTWEPEHTGDFHMEEALDWPGVYLLPGQVSGVALDPKNNLVIFHRGDHVWDGNSFDSKFVYQQIGLGPIEEDTILVIDPNNAAVLQSSGKNLFYLPHGLSIDKDGNYWVTDVALHQVFKLDPNNKEGPVLILGRSMQPGSDQNHFCQPTDVAVDPGTGAIYVSDGYCNSRIVQFSPSGKFITQWGEESSGSSPLPGQFTVPHSLALVPLLGQLCVADRENGRIQCFKTDTKEFVREIKHSSFGRNVFAISYIPGLLFAVNGKPHFGDQEPVQGFVMNFSNGEIIDIFKPVRKHFDMPHDIVASEDGTVYIGDAHTNTVWKFTLTEKLEHRSVKKAGIEVQEIKEAEAVVETKMENKPTSSELQKMQEKQKLIKEPGSGVPVVLITTLLVIPVVVLLAIAIFIRWKKSRAFGADSEHKLETSSGRVLGRFRGKGSGGLNLGNFFASRKGYSRKGFDRLSTEGSDQEKEDDGSESEEEYSAPLPALAPSSS

SEQ ID NO: 53023 - protein, 70 aa, Homo sapiens
VKGRVRMPTKTLRITTKKTPCGEGSKTWDRFQMRIHKRLIDLHSPSEIVKQITSISIEPGVEVEVTIADA

SEQ ID NO: 53024 - protein, 35 aa, Homo sapiens
LARPMTIFARLHCTFSQVSSLSLMCDTSSWTRYFS

SEQ ID NO: 53025 - protein, 191 aa, Homo sapiens
KAILIFNNHGKPRLSKFYQPYSEDTQQQIIRETFHLVSKRDENVCNFLEGGLLIGGSDNKLIYRHYATLYFVFCVDSSESELGILDLIQVFVETLDKCFENVCELDLIFHVDKVHNILAEMVMGGMVLETNMNEIVTQIDAQNKLEKSEAGLAGAPARAVSAVKNMNLPEIPRNINIGDISIKVPNLPSFK

SEQ ID NO: 53026 - protein, 375 aa, Homo sapiens
TTPPDIPGSRNLHWGEKSPPYGVPTTSTPYEGPTEEPFSSGGGGSVQGQSSEQLNRFAGFGIGLASLFTENVLAHPCIVLRRQCQVNYHAQHYHLTPFTVINIMYSFNKTQGPRALWKGMGSTFIVQGVTLGAEGIISEFTPLPREVLHKWSPKQIGEHLLLKSLTYVVAMPFYSASLIETVQSEIIRDNTGILECVKEGIGRVIGMGVPHSKRLLPLLSLIFPTVLHGVLHYIISSVIQKFVLLILKRKTYNSHLAESTSPVQSMLDAYFPELIANFAASLCSDVILYPLETVLHRLHIQGTRTIIDNTDLGYEVLPINTQYEGMRDCINTIRQEEGVFGFYKGFGAVIIQYTLHAAVLQITKIIYSTLLQNNI

SEQ ID NO: 53027 - protein, 182 aa, Homo sapiens
LINAIDTGRFPRLLTRILQKLHLKAESSFSEEEEEKLQAAFSLEKQDLHLVLETISFILEQAVYHNVKPAALQQQLENIHLRQDKAEAFVNTWSSMGQETVEKFRQRILAPCKLETVGWQLNLQMAHSAQAKLKSPQAVLQLGVNNEDSKSLEKVLVEFSHKELFDFYNKLETIQAQLDSLT

SEQ ID NO: 53028 - protein, 40 aa, Homo sapiens
IEVDPDTKEMLKLLDFGSLSNPQVTQPTVGMNYKMPRGPV

SEQ ID NO: 53029 - protein, 2464 aa, Homo sapiens
VVEATEPEPSGSIANPAASTSPSLSHRFLDSKFYLLVVVGEIVTEEHLRRAIGNIELGIRSWDTNLIECNLDQELKLFVSRHSARFSPEVPGQKILHHRSDVLETVVLINPSDEAVSTEVRLMITDAARHKLLVLTGQCFENTGELILQSGSFSFQNFIEIFTDQEIGELLSTTHPANKASLTLFCPEEGDWKNSNLDRHNLQDFINIKLNSASILPEMEGLSEFTEYLSESVEVPSPFDILEPPTSGGFLKLSKPCCYIFPGGRGDSALFAVNGFNMLINGGSERKSCFWKLIRHLDRVDSILLTHIGDDNLPGINSMLQRKIAELEEEQSQGSTTNSDWMKNLISPDLGVVFLNVPENLKNPEPNIKMKRSIEEACFTLQYLNKLSMKPEPLFRSVGNTIDPVILFQKMGVGKLEMYVLNPVKSSKEMQYFMQQWTGTNKDKAEFILPNGQEVDLPISYLTSVSSLIVWHPANPAEKIIRVLFPGNSTQYNILEGLEKLKHLDFLKQPLATQKDLTGQVPTPVVKQTKLKQRADSRESLKPAAKPLPSKSVRKESKEETPEVTKVNHVEKPPKVESKEKVMVKKDKPIKTETKPSVTEKEVPSKEEPSPVKAEVAEKQATDVKPKAAKEKTVKKETKVKPEDKKEEKEKPKKEVAKKEDKTPIKKEEKPKKEEVKKEVKKEIKKEEKKEPKKEVKKETPPKEVKKEVKKEEKKEVKKEEKEPKKEIKKLPKDAKKSSTPLSEAKKPAALKPKVPKKEESVKKDSVAAGKPKEKGKIKVIKKEGKAAEAVAAAVGTGATTAAVMAAAGIAAIGPAKELEAERSLMSSPEDLTKDFEELKAEEVDVTKDIKPQLELIEDEEKLKETEPVEAYVIQKEREVTKGPAESPDEGITTTEGEGECEQTPEELEPVEKQGVDDIEKFEDEGAGFEESSETGDYEEKAETEEAEEPEEDGEEHVCVSASKHSPTEDEESAKAEADAYIREKRESVASGDDRAEEDMDEAIEKGEAEQSEEEADEEDKAEDAREEEYEPEKMEAEDYVMAVVDKAAEAGGAEEQYGFLTTPTKQLGAQSPGREPASSIHDETLPGGSESEATASDEENREDQPEEFTATSGYTQSTIEISSEPTPMDEMSTPRDVMSDETNNEETESPSQEFVNITKYESSLYSQEYSKPADVTPLNGFSEGSKTDATDGKDYNASASTISPPSSMEEDKFSRSALRDAYCSEVKASTTLDIKDSISAVSSEKVSPSKSPSLSPSPPSPLEKTPLGERSVNFSLTPNEIKVSAEAEVAPVSPEVTQEVVEEHCASPEDKTLEVVSPSQSVTGSAGHTPYYQSPTDEKSSHLPTEVIEKPPAVPVSFEFSDAKDENERASVSPMDEPVPDSESPIEKVLSPLRSPPLIGSESAYESFLSADDKASGRGAESPFEEKSGKQGSPDQVSPVSEMTSTSLYQDKQEGKSTDFAPIKEDFGQEKKTDDVEAMSSQPALALDERKLGDVSPTQIDVSQFGSFKEDTKMSISEGTVSDKSATPVDEGVAEDTYSHMEGVASVSTASVATSSFPEPTTDDVSPSLHAEVGSPHSTEVDDSLSVSVVQTPTTFQETEMSPSKEECPRPMSISPPDFSPKTAKSRTPVQDHRSEQSSMSIEFGQESPEQSLAMDFSRQSPDHPTVGAGVLHITENGPTEVDYSPSDMQDSSLSHKIPPMEEPSYTQDNDLSELISVSQVEASPSTSSAHTPSQIASPLQEDTLSDVAPPRDMSLYASLTSEKVQSLEGEKLSPKSDISPLTPRESSPLYSPTFSDSTSAVKEKTATCHSSSSPPIDAASAEPYGFRASVLFDTMQHHLALNRDLSTPGLEKDSGGKTPGDFSYAYQKPEETTRSPDEEDYDYESYEKTTRTSDVGGYYYEKIERTTKSPSDSGYSYETIGKTTKTPEDGDYSYEIIEKTTRTPEEGGYSYDISEKTTSPPEVSGYSYEKTERSRRLLDDISNGYDDSEDGGHTLGDPSYSYETTEKITSFPESEGYSYETSTKTTRTPDTSTYCYETAEKITRTPQASTYSYETSDLCYTAEKKSPSEARQDVDLCLVSSCEYKHPKTELSPSFINPNPLEWFASEEPTEESEKPLTQSGGAPPPPGGKQQGRQCDETPPTSVSESAPSQTDSDVPPETEECPSITADANIDSEDESETIPTDKTVTYKHMDPPPAPVQDRSPSPRHPDVSMVDPEALAIEQNLGKALKKDLKEKTKTKKPGTKTKSSSPVKKSDGKSKPLAASPKPAGLKESSDKVSRVASPKKKESVEKAAKPTTTPEVKAARGEEKDKETKNAANASASKSAKTATAGPGTTKTTKSSAVPPGLPVYLDLCYIPNHSNSKNVDVEFFKRVRSSYYVVSGNDPAAEEPSRAVLDALLEGKAQWGSNMQVTLIPTHDSEVMREWYQETHEKQQDLNIMVLASSSTVVMQDESFPACKIEL

SEQ ID NO: 53030 - protein, 7 aa, Homo sapiens
IMGHKPD

SEQ ID NO: 53031 - protein, 36 aa, Homo sapiens
KDFKTVIIKYLESLVQTQQQLIKYWEAFLPEAKAIA

SEQ ID NO: 53032 - protein, 39 aa, Homo sapiens
ITAPTEVEVMDETNCQKVLNMWCCCFFKRRKRKTIQRHK

SEQ ID NO: 53033 - protein, 34 aa, Homo sapiens
LAKKEQKKGKGLRFKRLESFLHDSWRQKRDVSED

SEQ ID NO: 53034 - protein, 87 aa, Homo sapiens
VFFHSLSGSKSSRRNFKEQAPKTRSLDFPQNEPQIKNQFNKKLSGRLENTKQQLQLPLHPSWEASRRRKEQQSNIAVFQGKKITFDD

SEQ ID NO: 53035 - protein, 65 aa, Homo sapiens
LRKCSGRGRANLAQPTQRLRMVWRRKRKPAGRQQPNPLPHLWRRTPQTRRKSLAYGQNPVLMVPL

SEQ ID NO: 53036 - protein, 379 aa, Homo sapiens
VEADSPDQKKIISLWSKSSFDGASLASDKNDCKTESKNDPKTERKKSSSSSQYKANMHFHKLFLSVPTEEPLKQSFTCALQKEILYQGKLFVSENWICFHSKVFGKDTKISIPAFSVTLIKKTKTALLVPNALIIATVTDRYIFVSLLSRDSTYKLLKSVCGHLENTSVGNSPNPSSAENSFRADRPSSLPLDFNDEFSDLDGVVQQRRQDMEGYSSSGSQTPESENSRDFHATESQTVLNVSKGEAKPTRADAHVNRVPEGKAKSLPVQGLSETVGILHKVKSQKCPMLHHILIFYAIVVCALIISTFYMRYRINTLEEQLGLLTSIVDTHNTEQAAPSGLRSQVQFNVEVLCQELTANIVKLEKIQNNLQKLLENGD

SEQ ID NO: 53037 - protein, 395 aa, Homo sapiens
KMALEVGDMEDGQLSDSDSDMTVAPSDRPLQLPKVLGGDSAMRAFQNTATACAPVSHYRAVESVDSSEESFSDSDDDSCLWKRKRQKCFNPPPKPEPFQFGQSSQKPPVAGGKKINNIWGAVLQEQNQDAVATELGILGMEGTIDRSRQSETYNYLLAKKLRKESQEHTKDLDKELDEYMHGGKKMGSKEEENGQGHLKRKRPVKDRLGNRPEMNYKGRYEITAEDSQEKVADEISFRLQEPKKDLIARVVRIIGNKKAIELLMETAEVEQNGGLFIMNGSRRRTPGGVFLNLLKNTPSISEEQIKDIFYIENQKEYENKKAARKRRTQVLGKKMKQAIKSLNFQEDDDTSRETFASDTNEALASLDESQEGHAEAKLEAEEAIEVDHSHDLDIF

SEQ ID NO: 53038 - protein, 995 aa, Homo sapiens [sequence omitted]

SEQ ID NO: 53039 - protein, 34 aa, Homo sapiens
IFSCGADGTMKMRILPDQFSPLNEVLKNDVKFML

SEQ ID NO: 53040 - protein, 69 aa, Homo sapiens
VISYSLSPFEQRAYPHVFTKGIPNVLRRIRESFFRVVPQFVVFYLIYTWGTEEFERSKRKNPAAYENDK

SEQ ID NO: 53041 - protein, 41 aa, Homo sapiens
KENSRPDSSLPETSKKEHISAENMSLETLRNSSPEDLFDEI

SEQ ID NO: 53042 - protein, 17 aa, Homo sapiens
TSPSNYPVLRKWKMGYT

SEQ ID NO: 53043 - protein, 99 aa, Homo sapiens
KVLQLFKTLHRTRQQVFKNDARALEAARIKINEEFKNNKSETSSKKIEELMKIGSDVELLLRTSVIQGIHTDHNTLKLVPRKDLLVENVPYCDAPTQKQ

SEQ ID NO: 53044 - protein, 9 aa, Homo sapiens
ICMHNMECS

SEQ ID NO: 53045 - protein, 183 aa, Homo sapiens
LDSFIKPPECSSDVNLELRQRNRGDLTADSVQRGSRHGLEQYLSRFEEAMKLRKQLISEKPSQEDGNTTEEFDSFRIFRLVGCALLALGVRAFVCKYLSIFAPFLTLQLAYMGLYKYFPKSEKKIKTTVLTAALLLSGIPAEVINRSMDTYSKMGEVFTDLCVYFFTFIFCHELLDYWGSEVP

SEQ ID NO: 53046 - protein, 152 aa, Homo sapiens
ILRGGTILAPTVSAKTIAEQLAEKINAKLNYVPLEKQEEERQDGGQNESFKRYEEELEINDFPQTARWKVTSKEALQRISEYSEAAITIRGTYFPPGKEPKEGERKIYLAIESANELAVQKAKAEITRLIKEELIRLQNSYQPTNKGRYKVL

SEQ ID NO: 53047 - protein, 815 aa, Homo sapiens
IANEYSDRCTPACISFGPKNRSIGAAAKSQVISNAKNTVQGFKRFHGRAFSDPFVEAEKSNLAYDIVQLPTGLTGIKVTYMEEERNFTTEQVTAMLLSKLKETAESVLKKPVVDCVVSVPCFYTDAERRSVMDATQIAGLNCLRLMNETTAVALAYGIYKQDLPALEEKPRNVVFVDMGHSAYQVSVCAFNRGKLKVLATAFDTTLGGRKFDEVLVNHFCEEFGKKYKLDIKSKIRALLRLSQECEKLKKLMSANASDLPLSIECFMNDVDVSGTMNRGKFLEMCNDLLARVEPPLRSVLEQTKLKKEDIYAVEIVGGATRIPAVKEKISKFFGKELSTTLNADEAVTRGCALQCAILSPAFKVREFSITDVVPYPISLRWNSPAEEGSSDCEVFSKNHAAPFSKVLTFYRKEPFTLEAYYSSPQDLPYPDPAIAQFSVQKVTPQSDGSSSKVKVKVRVNVHGIFSVSSASLVEVHKSEENEEPMETDQNAKEEEKMQVDQEEPHVEEQQQQTPAENKAESEEMETSQAGSKDKKMDQPPQAKKAKVKTSTVDLPIENQLLWQIDREMLNLYIENEGKMIMQDKLEKERNDAKNAVEEYVYEMRDKLSGEYEKFVSEDDRNSFTLKLEDTENWLYEDGEDQPKQVYVDKLAELKNLGQPIKIRFQESEERPKLFEELGKQIQQYMKIISSFKNKEDQYDHLDAADMTKVEKSTNEAMEWMNNKLNLQNKQSLTMDPVVKSKEIEAKIKELTSTCSPIISKPKPKVEPPKEEQKNAEQNGPVDGQGDNPGPQAAEQGTDTAVPSDSDKKLPEMDID

SEQ ID NO: 53048 - protein, 10 aa, Homo sapiens
RKTESSGHCI

SEQ ID NO: 53049 - protein, 146 aa, Homo sapiens
RRLMRDFKRLQEDPPVGVSGAPSENNIMQWNAVIFGPEGTPFEDGTFKLVIEFSEEYPNKPPTVRFLSKMFHPNVYADGSICLDILQNRWSPTYDVSSILTSIQSLLDEPNPNSPANSQAAQLYQENKREYEKRVSAIVEQSWNDS

SEQ ID NO: 53050 - protein, 328 aa, Homo sapiens
LGLGPTMSSLGGGSQDAGGSSSSSTNGSGGSGSSGPKAGAADKSAVVAAAAPASVADDTPPPERRNKSGIISEPLNKSLRRSRPLSHYSSFGSSGGSGGGSMMGGESADKATAAAAAASLLANGHDLAAAMAVDKSNPTSKHKSGAVASLLSKAERATELAAEGQLTLQQFAQSTEMLKRVVQEHLPLMSEAGAGLPDMEAVAGAEALNGQSDFPYLGAFPINPGLFIMTPAGVFLAESALHMAGLAEYPMQGELASAISSGKKKRKRCGMCAPCRRRINCEQCSSCRNRKTGHQICKFRKCEELKKKPSAALEKVMLPTGAAFRWFQ

SEQ ID NO: 53051 - protein, 166 aa, Homo sapiens
MDLKENQRGRFLRIRQTVNRGPGLGSTQGQTIALPAQGLIEFRDALAKLIDDYGVEEEPAELPEGTSLTVDNKRFFFDVGSNKYGVFMRVSEVKPTYRNSITVPYKVWAKFGHTFCKYSEEMKKIQEKQREKRAACEQLHQQQQQQQEETAAATLLLQGEEEGEED

SEQ ID NO: 53052 - protein, 64 aa, Homo sapiens
VPYKVWAKFGHTFCKYSEEMKKIQEKQREKRAACEQLHQQQQQQQEETAAATLLLQGEEEGEED

SEQ ID NO: 53053 - protein, 106 aa, Homo sapiens
RRGALYRSPMNQENPPPYPGPGPTAPYPPYPPQPMGPGPMGGPYPPPQGYPYQGYPQYGWQGGPQEPPKTTVYVVEDQRRDELGPSTCLTACWTALCCCCLWDMLT

SEQ ID NO: 53054 - protein, 93 aa, Homo sapiens [sequence omitted]

SEQ ID NO: 53055 - protein, 68 aa, Homo sapiens
VGQDGSLLSSPFLKGFLAGYVVAKLRASAVLGFAVGTCTGIYAAQAYAVPNVEKTLRDYLQLLRKGPD

SEQ ID NO: 53056 - protein, 179 aa, Homo sapiens
KRHSYFEKPKVDDEPMDVDKGPGSTKELIKSINEKFAGSAGWEGTESLKKPEDKKQLGDFFGMSNSYAECYPATMDDMAVDSDEEVDYSKMDQGNKKGPLGRWDFDTQEEYSEYMNNKEALPKAAFQYGIKMSEGRKTRRFKETNDKAELDRQWKKISAIIEKRKKMEADGVEVKRPKY

SEQ ID NO: 53057 - protein, 93 aa, Homo sapiens
VATPQKNFLQERLKLIAELWDSGIKAEMLYKNNPKLLTQLHYCESTGIPLVVIIGEQELKEGVIKIRSVASREEVAIKRENFVAEIQKRLSES

SEQ ID NO: 53058 - protein, 26 aa, Homo sapiens
VKPEQLPVYTAPPLQSKYVEEQPGHL

SEQ ID NO: 53059 - protein, 43 aa, Homo sapiens
KNPPRDFLPKMGVITVSGLVGLVSARKGFKFKKITYPLGLATL

SEQ ID NO: 53060 - protein, 77 aa, Homo sapiens
IEEEKEDLLQHFSTANQGPKFKDRRLQISWHKPKVPSISTETEEEEVKEEETETSDLFLPDDDDEDEDEYESRSWRR

SEQ ID NO: 53061 - protein, 83 aa, Homo sapiens
IEALTKKKREHFRQLLDETSAITLTSTWKEVKKIIKEDPRCIKFSSSDRKKQREFEEYIRDKYITAKADFRTLLKETKFITYS

SEQ ID NO: 53062 - protein, 58 aa, Homo sapiens
VHSGFPSPSVATTYSSVPPAFPAQVSSFPSSAVTNSFSASTGLSDMTATFSPRTIEIC

SEQ ID NO: 53063 - protein, 5 aa, Homo sapiens
IRRMN

SEQ ID NO: 53064 - protein, 191 aa, Homo sapiens
ISQTSKYSPIYSPDPYYASESEYWTYHGSPKVPRARRFSSGGEEDDFDRSMHKLQSGIGRLILKEEMKARSSSYADPWTPPRSSTSSREALHTAGYEMSLNGSPRSHYLADSDPLISKSASLPAYRRNGLHRTPSADLFHYDSMNAVNWGMREYKIYPYELLLVTTRGRNRLPKDVDRTRLEGNFWKSGCL

SEQ ID NO: 53065 - protein, 61 aa, Homo sapiens
IYDGDEFRKAESVQGGETRIYLDLPQNFKIFVSAICSMQALRQPMGRTPWQRGPVCLDAIS

SEQ ID NO: 53066 - protein, 81 aa, Homo sapiens
KEWLEKNSKSCPCCGTPIEKLDGCNKMTCTGCMQYFCWICMGSLSRANPYKHFNDPGSPCFNRLFYAVDVDDDIWEDEVED

SEQ ID NO: 53067 - protein, 200 aa, Homo sapiens
LQNEEESGEPEQAAGDAPPPYSSISAESAAYFDYKDESGFPKPPSYNVATTLPSYDEAERTKAEATIPLVPGRDEDFVGRDDFDDADQLRIGNDGIFMLTFFMAFLFNWIGFFLSFCLTTSAAGRYGAISGFGLSLIKWILIVRFSTYFPGYFDGQYWLWWVFLVLGFLLFLRGFINYAKVRKMPETFSNLPRTRVLFIY

SEQ ID NO: 53068 - protein, 241 aa, Homo sapiens
RDLPKMWSISRMDTVIWFVTMLSSALLSTEIGLLVGVCFSIFCVILRTQKPKSSLLGLVEESEVFESVSAYKNLQIKPGIKIFRFVAPLYYINKECFKSALYKQTVNPILIKVAWKKAAKRKIKEKVVTLGGIQDEMSVQLSHDPLELHTIVIDCSAIQFLDTAGIHTLKEVRRDYEAIGIQVLLAQCNPTVRDSLTNGEYCKKEEENLLFYSVYEAMAFAEVSKNQKGVCVPNGLSLSSD

SEQ ID NO: 53069 - protein, 367 aa, Homo sapiens
LSHFPMKLHCCLFTLVASIIVPAAFVLEDVDFDQMVSLEANRSSYNASFPSSFELSASSHSDDDVIIAKEGTSVSIECLLTASHYEDVHWHNSKGQQLDGRSRGGKWLVSDNFLNITNVAFDDRGLYTCFVTSPIRASYSVTLRVIFTSGDMSVYYMIVCLIAFTITLILNVTRLCMMSSHLRKTEKAINEFFRTEGAEKLQKAFEIAKRIPIITSAKTLELAKVTQFKTMEFARYIEELARSVPLPPLILNCRAFVEEMFEAVRVDDPDDLGERIKERPALNAQGGIYVINPEMGRSNSPGGDSDDGSLNEQGQEIAVQVSVHLQSETKSIDTESQGSSHFSPPDDIGSAESNCNYKDGAYENCQL

SEQ ID NO: 53070 - protein, 58 aa, Homo sapiens
LWKYRKDKTLYHPVSGSCMDCSESDHRIFMNTCNPSSLTQQWLFEHTNSTVLEKFNRN

SEQ ID NO: 53071 - protein, 289 aa, Homo sapiens
KSENCGVPEDLLNGLKVTDTQEAECAGPPVPDPKNQHSQSKLLRDDEAHLQEDQGEEECFHDCSASFEEEPGADKVENKSNEDVNSSELDEEYLIELEKNMSDEEKQKRREESTRLKEEGNEQFKKGDYIEAESSYSRALEMCPSCFQKERSILFSNRAAARMKQDKKEMAINDCSKAIQLNPSYIRAILRRAELYEKTDKLDEALEDYKSILEKDPSIHQAREACMRLPKQIEERNERLKEEMLGKLKDLGNLVLRPFGLSTENFQIKQDSSTGSYSINFVQNPNNNR

SEQ ID NO: 53072 - protein, 942 aa, Homo sapiens
RAAVPKQRKGSKVGDFGDAINWPTPGEIAHKSVQPQSHKPQPTRKLPPKKDMKEQEKGEGSDSKESPKTKSDESGEEKNGDEDCQRGGQKKKGNKHKWVPLQIDMKPEVPREKLASRPTRPPEPRHIPANRGEIKGSESATYVPVAPPTPAWQPEIKPEPAWHDQDETSSVKSDGAGGARASFRGRGRGRGRGRGRGRGGTRTHFDYQFGYRKFDGVEGPRTPKYMNNITYYFDNVSSTELYSVDQELLKDYIKRQIEYYFSVDNLERDFFLRRKMDADGFLPITLIASFHRVQALTTDISLIFAALKDSKVVEIVDEKVRRREEPEKWPLPPIVDYSQTDFSQLLNCPEFVPRQHYQKETESAPGSPRAVTPVPTKTEEVSNLKTLPKGLSASLPDLDSENWIEVKKRPRPSPARPKKSEESRFSHLTSLPQQLPSQQLMSKDQDEQEELDFLFDEEMEQMDGRKNTFTAWSDEESDYEIDDRDVNKILIVTQTPHYMRRHPGGDRTGNHTSRAKMSAELAKVINDGLFYYEQDLWAEKFEPEYSQIKQEVENFKKVNMISREQFDTLTPEPPVDPNQEVPPGPPRFQQVPTDALANKLFGAPEPSTIARSLPTTVPESPNYRNTRTPRTPRTPQLKDSSQTSRFYPVVKEGRTLDAKMPRKRKTRHSSNPPLESHVGWVMDSREHRPRTASISSSPSEGTPTVGSYGCTPQSLPKFQHPSHELLKENGFTQHVYHKYRRRCLNERKRLGIGQSQEMNTLFRFWSFFLRDHFNKKMYEEFKQLALEDAKEGYRYGLECLFRYYSYGLEKKFRLDIFKDFQEETVKDYEAGQLYGLEKFWAFLKYSKAKNLDIDPKLQEYLGKFRRLEDFRVDPPMGEEGNHKRHSVVAGGGGGEGRKRCPSQSSSRPAAMISQPPTPPTGQPVREDAKWTSQHSNTQTLGK

SEQ ID NO: 53073 - protein, 185 aa, Homo sapiens
KLALGVLPQSYIHTSASLDISRKWEKKNKIVYPPQLPGEPRRPAEIYHCRRQIKYSKDKMWYLAKLIRGMSIDQALAQLEFNDKKGAKIIKEVLLEAQDMAVRDHNVEFRSNLYIAESTSGRGQCLKRIRYHGRGRFGIMEKVYCHYFVKLVEGPPPPPEPPKTAVAHAKEYIQQLRSRTIVHTL

SEQ ID NO: 53074 - protein, 90 aa, Homo sapiens
IQEQESSGEEDSDLSPEEREKKRQFEMRRKLHYNEGLNIKLARQLISKDLHDDDEDEEMLETADGESMNTEESNQGSTPSDQQQNKLRSS

SEQ ID NO: 53075 - protein, 34 aa, Homo sapiens
MPSPPWESNLLQSPSSILSTLDVELPPVCCDIDI

SEQ ID NO: 53076 - protein, 283 aa, Homo sapiens
TCDRFPKLLIIGPQKTGTTALYLFLGMHPDLSSNYPSSETFEEIQFFNGHNYHKGIDWYMEFFPIPSNTTSDFYFEKSANYFDSEVAPRRAAALLPKAKVLTILINPADRAYSWYQHQRAHDDPVALKYTFHEVITAGSDASSKLRALQNRCLVPGWYATHIERWLSAYHANQILVLDGKLLRTEPAKVMDMVQKFLGVTNTIDYHKTLAFDPKKGFWCQLLEGGKTKCLGKSKGRKYPEMDLDSRAFLKDYYRDHNIELSKLLYKMGQTLPTWLREDLQNTR

SEQ ID NO: 53077 - protein, 15 aa, Homo sapiens
LDQDPMHRLHWQLYL

SEQ ID NO: 53078 - protein, 58 aa, Homo sapiens
LEVTTFYSEGMSPLTIFKDALISILGFVGFVVGTYEALYELIQPSNAPIFINSTCAFI

SEQ ID NO: 53079 - protein, 470 aa, Homo sapiens
LTKAMVMEKPSPLLVGREFVRQYYTLLNQAPDMLHRFYGKNSSYVHGGLDSNGKPADAVYGQKEIHRKVMSQNFTNCHTKIRHVDAHATLNDGVVVQVMGLLSNNNQALRRFMQTFVLAPEGSVANKFYVHNDIFRYQDEVFGGFVTEPQEESEEEVEEPEERQQTPEVVPDDSGTFYDQAVVSNDMEEHLEEPVAEPEPDPEPEPEQEPVSEIQEEKPEPVLEETAPEDAQKSSSPAPADIAQTVQEDLRTFSWASVTSKNLPPSGAVPVTGIPPHVVKVPASQPRPESKPESQIPPQRPQRDQRVREQRINIPPQRGPRPIREAGEQGDIEPRRMVRHPDSHQLFIGNLPHEVDKSELKDFFQSYGNVVELRINSGGKLPNFGFVVFDDSEPVQKVLSNRPIMFRGEVRLNVEEKKTRAAREGDRRDNRLRGPGGPRGGLGGGMRGPPRGGMVQKPGFGVGRGLAPRQ

SEQ ID NO: 53080 - protein, 31 aa, Homo sapiens
ISDSTTKTSAGSKSARTTNKYSSPKGTQTNP

SEQ ID NO: 53081 - protein, 296 aa, Homo sapiens
KMIEVLTTTDSQKLLHQLNALLEQESRCQPKVCGLRLIESAHDNGLRMTARLRDFEVKDLLSLTQFFGFDTETFSLAVNLLDRFLSKMKVQPKHLGCVGLSCFYLAVKSIEEERNVPLATDLIRISQYRFTVSDLMRMEKIVLEKVCWKVKATTAFQFLQLYYSLLQENLPLERRNSINFERLEAQLKACHCRIIFSKAKPSVLALSIIALEIQAQKCVELTEGIECLQKHSKINGRDLTFWQELVSKCLTEYSSNKCSKPNVQKLKWIVSGRTARQLKHSYYRITHLPTIPEMVP

SEQ ID NO: 53082 - protein, 78 aa, Homo sapiens
LFPGAVGWWRRKLTSLIGGFWLLVPLGFLAELYTKNFSRIIGMQLAVVSEEQDQNLNRLICWILMQFITSFMIFSPML

SEQ ID NO: 53083 - protein, 7 aa, Homo sapiens
RTLDSMT

SEQ ID NO: 53084 - protein, 75 aa, Homo sapiens
LPYSYNLCVAHTGKTEFNFLKCSEQLSSGQDILCGDSSGALFPLCNSSESTSHPELVSFIYVYSFSLPTQFSVFT

SEQ ID NO: 53085 - protein, 13 aa, Homo sapiens
MSDSAPSAQALTR

SEQ ID NO: 53086 - protein, 68 aa, Homo sapiens
LKSFSSPSLCSLNTLLAGTSRLPHASSTGNLGLLCRSGHLGASLEASSRAIPPHPYPLERSVVRLGFG

SEQ ID NO: 53087 - protein, 16 aa, Homo sapiens
IKRHTPLSKLMKAYCE

SEQ ID NO: 53088 - protein, 119 aa, Homo sapiens
RKIMSSPLSKELRQKYNVRSMPIRKDDEVQVVRGHYKGQQIGKVVQVYRKKYVIYIERVQREKANGTTVHVGIHPSKVVITRLKLDKDRKKILERKAKSRQVGKEKGKYKEELIEKMQE

SEQ ID NO: 53089 - protein, 74 aa, Homo sapiens
VPLIVMSVFWGFVGFLVPWFIPKGPNRGVIITMLVTCSVCCYLFWLIAILAQLNPLFGPQLKNETIWYLKYHWP

SEQ ID NO: 53090 - protein, 40 aa, Homo sapiens
KLITKYNRRELTDKLLIFLALALFLATVLYIVKKRLFPFL

SEQ ID NO: 53091 - protein, 99 aa, Homo sapiens
LECLPPEPSPDDPESVKIIFKLPNDSRVERRFHFSQSLTVIHDFLFSLKESPEKFQIEANFPRRVLPCIPSEEWPNPPTLQEAGLSHTEVLFVQDLTDE

SEQ ID NO: 53092 - protein, 210 aa, Homo sapiens
VLRSSWDQVFAAFWQRYPNPYSKHVLTEDIVHREVTPDQKLLSRRLLTKTNRMPRWAERLFPANVAHSVYVLEDSIVDPQNQTMTTFTWNINHARLMVVEERCVYCVNSDNSGWTEIRREAWVSSSLFGVSRAVQEFGLARFKSNVTKTMKGFEYILAKLQGEAPSKTLVETAKEAKEKAKETALAATEKAKDLASKAATKKQQQQQQFV

SEQ ID NO: 53093 - protein, 16 aa, Homo sapiens
ISIEPGVEVEVTIADI

SEQ ID NO: 53094 - protein, 25 aa, Homo sapiens
INGGKLKCPYCPMEQNPADGKRIIF

SEQ ID NO: 53095 - protein, 203 aa, Homo sapiens
TRGSALYFHIGETEKKCFIEEIPDETMVIGNYRTQLYDKQREEYQPATPGLGMFVEVKDPEDKVILARQYGSEGRFTFTSHTPGEHQICLHSNSTKFSLFAGGMLRVHLDIQVGEHANDYAEIAAKDKLSELQLRVRQLVEQVEQIQKEQNYQRWREERFRQTSESTNQRVLWWSILQTLILVAIGVWQMRHLKSFFEAKKLV

SEQ ID NO: 53096 - protein, 24 aa, Homo sapiens
MRRFLSRKKIRHHIYVLNQVDHFR

SEQ ID NO: 53097 - protein, 93 aa, Homo sapiens
IKGAGLQLFRPSGITTGYKTFRHLHDPAWRKRDQKRIAAQKQEQFKVDREGGLNTVKYHVASRTALSVGGAPCTVLNIMLDCDKTATPWCTFS

SEQ ID NO: 53098 - protein, 62 aa, Homo sapiens
KRILMEHIHKLKADKARKKLLADQAEARRSKTKEAGKCPEERLQAKKEEFIKTLSKEEETKK

SEQ ID NO: 53099 - protein, 649 aa, Homo sapiens
LLQQEEEIKSLTAEIDRLKNCGCLGASPNLEQLQEENLKLKYRLNILRKSLQAERNKPTKNMINIISRLQEVFGHAIKAAYPDLENPPLLVTPSQQAKFGDYQCNSAMGISQMLKTKEQKVNPREIAENITKHLPDNECIEKVEIAGPGFINVHLRKDFVSEQLTSLLVNGVQLPALGENKKVIVDFSSPNIAKEMHVGHLRSTIIGESISRLFEFAGYDVLRLNHVGDWGTQFGMLIAHLQDKFPDYLTVSPPIGDLQVFYKESKKRFDTEEEFKKRAYQCVVLLQGKNPDITKAWKLICDVSRQELNKIYDALDVSLIERGESFYQDRMNDIVKEFEDRGFVQVDDGRKIVFVPGCSIPLTIVKSDGGYTYDTSDLAAIKQRLFEEKADMIIYVVDNGQSVHFQTIFAAAQMIGWYDPKVTRVFHAGFGVVLGEDKKKFKTRSGETVRLMDLLGEGLKRSMDKLKEKERDKVLTAEELNAAQTSVAYGCIKYADLSHNRLNDYIFSFDKMLDDRGNTAAYLLYAFTRIRSIARLANIDEEMLQKAARETKILLDHEKEWKLGRCILRFPEILQKILDDLFLHTLCDYIYELATAFTEFYDSCYCVEKDRQTGKILKVNMWRMLLCEAVAAVMAKGFDILGIKPVQRM

SEQ ID NO: 53100 - protein, 5 aa, Homo sapiens
IETKI

SEQ ID NO: 53101 - protein, 73 aa, Homo sapiens
VKLIGVPADAEALSERSGNTPNSPRLAAESKLQTEVKEGKETSSKLEKETCKKLHPILYVSSKSTPETQCPQQ

SEQ ID NO: 53102 - protein, 4 aa, Homo sapiens
KLCP

SEQ ID NO: 53103 - protein, 96 aa, Homo sapiens
MGLHLSQSKLKMEDIKEVNQALKGHAWLKDDEATHCRQCEKEFSISRRKHHCRNCGHIFCNTCSSNELALPSYPKPVRVCDSCHTLLLQRCSSTAS

SEQ ID NO: 53104 - protein, 24 aa, Homo sapiens
IDSLLKNRTSEEWMSDLDDLLGSQ

SEQ ID NO: 53105 - protein, 148 aa, Homo sapiens
LVEEKKLLEQERAQVMQEKRQVQPLRSAYLSCLQREENWQRRARLLLKEFEAVLTERQNIYCSLFLPRSKRLEIEKSLLVRASVDPVAADLEMAAGLTDIFQHDTYCGDVWNTNKRQNGRLMWLYLKYWELVVELKKFKRVEEAILEK

SEQ ID NO: 53106 - protein, 43 aa, Homo sapiens
RSGVISDTELQQALSNGTWTPFNPVTVRSIIYYTEGWLRSYVQ

SEQ ID NO: 53107 - protein, 528 aa, Homo sapiens
LVVGVFVVYVVHTCWVMYGIVYTRPCSGDANCIQPYLARRPKLQLSVYTTTRSHLGAENNIDLVLNVEDFDVESKFERTVNVSVPKKTRNNGTLYAYIFLHHAGVLPWHDGKQVHLVSPLTTYMVPKPEEINLLTGESDTQQIEAEKKPTSALDEPVSHWRPRLALNVMADNFVFDGSSLPADVHRYMKMIQLGKTVHYLPILFIDQLSNRVKDLMVINRSTTELPLTVSYDKVSLGRLRFWIHMQDAVYSLQQFGFSEKDADEVKGIFVDTNLYFLALTFFVAAFHLLFDFLAFKNDISFWKKKKSMIGMSTKAVLWRCFSTVVIFLFLLDEQTSLLVLVPAGVGAAIELWKVKKALKMTIFWRGLMPEFQFGTYSESERKTEEYDTQAMKYLSYLLYPLCVGGAVYSLLNIKYKSWYSWLINSFVNGVYAFGFLFMLPQLFVNYKLKSVAHLPWKAFTYKAFNTFIDDVFAFIITMPTSHRLACFRDDVVFLVYLYQRWLYPVDKRRVNEFGESYEEKATRAPHTD

SEQ ID NO: 53108 - protein, 84 aa, Homo sapiens
VAELTVTDLFRAIDQEEKGKITFADFHRFAEMYPAFAEEYLYPDQTHFESCAETSPAPIPNGFCADFSPENSDAGRKPVRKKLD

SEQ ID NO: 53109 - protein, 117 aa, Homo sapiens
VFRVGSVLQEGCGKISKLYGDLKHLKTFDRGMVWNTDLVETLELQNLMLCALQTIYGAEARKESRGTHAREGYKVQIDEYDYSKPIQGQQKKPFEEHWRKHTLSYVDVGTGKVSVDP

SEQ ID NO: 53110 - protein, 132 aa, Homo sapiens
KFDHLEEHLEKFVENIRQLGIIVSDFQPSSQAGLNQKLNFIVTGLQDIDKCRQQLHDITVPLEVFEYIDQGRNPQLYTKECLERALAKNEQVKGKIDTMKKFKSLLIQELSKVFPEDMAKYRSIRGEDHPPS

SEQ ID NO: 53111 - protein, 82 aa, Homo sapiens
IRTFVPKNERLHYLRMMGLEVLGEKKKEGVILTNESAASTGQPDNDVTEGQRAGEPNSPDAEEANSPDVTAGCDPAGVHPPR

SEQ ID NO: 53112 - protein, 40 aa, Homo sapiens
KAFNKNNLILEERNKYFNPHLTGKTYSNAYFTDLNNYDEY

SEQ ID NO: 53113 - protein, 32 aa, Homo sapiens
VDVAKLMKAYISMIVKKRYSTTRSASSQGSSR

SEQ ID NO: 53114 - protein, 163 aa, Homo sapiens
INRQINLELYASCVYLSMSYYFDRDDVALKNFAKYFLHQSHEEREHAEKLMKLQNQGGGRIFLQDIKKPDCDDWESGLNAMECALHLEKNVNQSLLELHKLATDKNDPHLCDFIETHYLNEQVKAIKELGDHMTNLCKMGAPESSLAEYLFDQHTLGDSDNES

SEQ ID NO: 53115 - protein, 130 aa, Homo sapiens
INKIILQSEGLREAFSELDMTSEVLQITMSPDKPYFRLSTFGNAGSSHLDYPKDSDLMEAFHCNQTQVNRYKISLLKPSTKALVLSCKVSIRTDNRGFLSLQYMIRNEDGQICFVEYYCCPDEEVPESES

SEQ ID NO: 53116 - protein, 50 aa, Homo sapiens
RDRIELLQDAEPLDFNAETFTDDPLESESGRYQPGGRYLSMSRSDIFNDV

SEQ ID NO: 53117 - protein, 99 aa, Homo sapiens
LSLPLNRELVEKVTNEYNESLLYSPEEPKILFSIREPIANRVFSSSRQRCFSSKVCVRSRCWDACMVVDGGTSFEFNDGAIASMMINKEDELRTVLLEQ

SEQ ID NO: 53118 - protein, 40 aa, Homo sapiens
KTVSANKTMVIVSASGAIETVTEKEDGATPPDGSVFIKAR

SEQ ID NO: 53119 - protein, 174 aa, Homo sapiens
LRLRGHQKEGYGLSWNLNLSGHLLSASDDHTICLWDISAVPKEGKVVDAKTIFTGHTAIVEDVSWHLLCESLFGSVADDQKLMIWDTRSNNTSKPSHSVDTHTAEVNCLSFSPYSEFILATGSADKTVALWDLRNLKLKLHSFESHKDEIFQVQWSPHNETILASSGTDHRPNV

SEQ ID NO: 53120 - protein, 471 aa, Homo sapiens
ITCRVAFRDADMQRAHYKTDWHRYNLRRKVASMAPVTAEGFQERVRAQRAVAEEESKGSATYCTVCSKKFASFNAYENHLKSRRHVELEKKAVQAVNRKVEMMNEKNLEKGLGVDSVDKDAMNAAIQQAIKAQPSMSPKKAPPAPAKEARNVVAVGTGGRGTHDRDPSEKPPRLQWFEQQAKKLAKQQEEDSEEEEEDLDGDDWEDIDSDEELECEDTEAMDDVVEQDAEEEEAEEGPPLGAIPITDCLFCSHHSSSLMKNVAHMTKDHSFFIPDIEYLSDIKGLIKYLGEKVGVGKICLWCNEKGKSFYSTEAVQAHMNDKSHCKLFTDGDAALEFADFYDFRSSYPDHKEGEDPNKAEELPSEKNLEYDDETMELILPSGARVGHRSLMRYYKQRFGLSRAVAVAKNRKAVGRVLQQYRALGWTGSTGAALMRERDMQYVQRMKSKWMLKTGMKNNATKQMHFRVQVRF

SEQ ID NO: 53121 - protein, 9 aa, Homo sapiens
MSQLGCCEA

SEQ ID NO: 53122 - protein, 79 aa, Homo sapiens
LYFAKSAEITGVRSETISVPQEIKALQLWKEIETRHPGLADVRNQIIFAVRQEYVELGDQLLVLQPGDEIAVIPPISGG

SEQ ID NO: 53123 - protein, 165 aa, Homo sapiens [sequence omitted]

SEQ ID NO: 53124 - protein, 65 aa, Homo sapiens
VVVTTPAMWRSLGLALALCLLPSGGTESQDQSSLCKQPPAWSIRDQDPMLNSNGSVTVVALLQAS

SEQ ID NO: 53125 - protein, 99 aa, Homo sapiens [sequence omitted]

SEQ ID NO: 53126 - protein, 83 aa, Homo sapiens
MNMCSEESERPAKRLKMGIAVPESFMNEVSVNNLGVDFENHTHHITSAKMAVSVADFGSLSANETNGFISAHALHQHAALHSE

SEQ ID NO: 53127 - protein, 778 aa, Homo sapiens
RFAACLLAMSNEVETSATNGQPDQQAAPKAPSKKEKKKGPEKTDEYLLARFKGDGVKYKAKLIGIDDVPDARGDKMSQDSMMKLKGMAAAGRSQGQHKQRIWVNISLSGIKIIDEKTGVIEHEHPVNKISFIARDVTDNRAFGYVCGGEGQHQFFAIKTGQQAEPLVVDLKDLFQVIYNVKKKEEEKKKIEEASKAVENGSEALMILDDQTNKLKSGVDQMDLFGDMSTPPDLNSPTESKDILLVDLNSEIDTNQNSLRENPFLTNGITSCSLPRPTPQASFLPENAFSANLNFFPTPNPDPFRDDPFTQPDQSTPSSFDSLKSPDQKKENSSSSSTPLSNGPLNGDVDYFGQQFDQISNRTGKQEAQAGPWPFSSSQTQPAVRTQNGVSEREQNGFSVKSSPNPFVGSPPKGLSIQNGVKQDLESSVQSSPHDSIAIIPPPQSTKPGRGRRTAKSSANDLLASDIFAPPVSEPSGQASPTGQPTALQPNPLDLFKTSAPAPVGPLVGLGGVTVTLPQAGPWNTASLVFNQSPSMAPGAMMGGQPSGFSQPVIFGTSPAVSGWNQPSPFAASTPPPVPVVWGPSASVAPNAWSTTSPLGNPFQSNIFPAPAVSTQPPSMHSSLLVTPPQPPPRAGPPKDISSDAFTALDPLGDKEIKDVKEMFKDFQLRQPPAVPARKGEQTSSGTLSAFASYFNSKVGIPQENADHDDFDANQLLNKINEPPKPAPRQVSLPVTKSTDNAFENPFFKDSFGSSQASVASSQPVSSEMYRDPFGNPFA

SEQ ID NO: 53128 - protein, 10 aa, Homo sapiens
IKAFWISALA

SEQ ID NO: 53129 - protein, 596 aa, Homo sapiens
KGGFAKCYEMTDLTNNKVYAAKIIPHSRVAKPHQREKIDKEIELHRILHHKHVVQFYHYFEDKENIYILLEYCSRRSMAHILKARKVLTEPEVRYYLRQIVSGLKYLHEQEILHRDLKLGNFFINEAMELKVGDFGLAARLEPLEHRRRTICGTPNYLSPEVLNKQGHGCESDIWALGCVMYTMLLGRPPFETTNLKETYRCIREARYTMPSSLLAPAKHLIASMLSKNPEDRPSLDDIIRHDFFLQGFTPDRLSSSCCHTVPDFHLSSPAKNFFKKAAAALFGGKKDKARYIDTHNRVSKEDEDIYKLRHDLKKTSITQQPSKHRTDEELQPPTTTVARSGTPAVENKQQIGDAIRMIVRGTLGSCSSSSECLEDSTMGSVADTVARVLRGCLENMPEADCIPKEQLSTSFQWVTKWVDYSNKYGFGYQLSDHTVGVLFNNGAHMSLLPDKKTVHYYAELGQCSVFPATDAPEQFISQVTVLKYFSHYMEENLMDGGDLPSVTDIRRPRLYLLQWLKSDKALMMLFNDGTFQVNFYHDHTKIIICSQNEEYLLTYINEDRISTTFRLTTLLMSGCSSELKNRMEYALNMLLQRCN

SEQ ID NO: 53130 - protein, 26 aa, Homo sapiens
RKRQHEEPESFFTWFTDHSDAGADEL

SEQ ID NO: 53131 - protein, 41 aa, Homo sapiens
IDLKFIDTTSKFGHGCFQTMEEKTAFMAPLKKDRIAKEEGA

SEQ ID NO: 53132 - protein, 282 aa, Homo sapiens
TGIGQHILKNPLIINSIIDKAALRPTDVVLEVGPGTGNMTVKLLEKAKKVVACELDPRLVAELHKRVQGTPVASKLQVLVGDVLKTDLPFFDTCVANLPYQISSPFVFKLLLHRPFFRCAILMFQREFALRLVAKPGDKLYCRLSINTQLLARVDHLMKVGKNNFRPPPKVESSVVRIEPKNPPPPINFQEWDGLVRITFVRKNKTLSAAFKSSAVQQLLEKNYRIHCSVHNIIIPEDFSIADKIQQILTSTGFSDKRARSMDIDDFIRLLHGFNAEGIHFS

SEQ ID NO: 53133 - protein, 38 aa, Homo sapiens
LAKLEECVRSIQADGLVWGSSKLVPVGYRIKKPNTVCS

SEQ ID NO: 53134 - protein, 40 aa, Homo sapiens
LLPNILLTGTPGVGKTTLGKELASKSGLKYINVGDLAREV

SEQ ID NO: 53135 - protein, 37 aa, Homo sapiens
KMDDNLRQSPQLPPRKLPTLKLTPAEEENNSFQRLSP

SEQ ID NO: 53136 - protein, 83 aa, Homo sapiens
IYDEKKGTVYIYSYFHFVFFLASLYVMMTVTNWFNYESANIESFFSGSWSIFWVKMASCWICVLLYLCTLVAPLCCPTREFSV

SEQ ID NO: 53137 - protein, 31 aa, Homo sapiens
ILASLSTFQQMWISKQEYSESSPSIVHRKCF

SEQ ID NO: 53138 - protein, 78 aa, Homo sapiens
IAHFQDNLHSVNRDLNELERLSNLVGKPSENHPLHNSGLLSLDPVQDKTPLYSQLLQAYKWSNKLQYHAGLASGLLNQ

SEQ ID NO: 53139 - protein, 572 aa, Homo sapiens
INIYLFHKSSYADSVLTHLNLLRQQRLFTDVLLHAGNRTFPCHRAVLAACSRYFEAMFSGGLKESQDSEVNFDNSIHPEVLELLLDYAYSSRVIINEENAESLLEAGDMLEFQDIRDACAEFLEKNLHPTNCLGMLLLSDAHQCTKLYELSWRMCLSNFQTIRKNEDFLQLPQDMVVQLLSSEELETEDERLVYESAINWISYDLKKRYCYLPELLQTVRLALLPAIYLMENVAMEELITKQRKSKEIVEEAIRCKLKILQNDGVVTSLCARPRKTGHALFLLGGQTFMCDKLYLVDQKAKEIIPKADIPSPRKEFSACAIGCKVYITGGRGSENGVSKDVWVYDTLHEEWSKAAPMLVARFGHGSAELKHCLYVVGGHTAATGCLPASPSVSLKQVEHYDPTINKWTMVAPLREGVSNAAVVSAKLKLFAFGGTSVSHDKLPKVQCYDQCENRWTVPATCPQPWRYTAAAVLGNQIFIMGGDTEFSACSAYKFNSETYQWTKVGDVTAKRMSCHAVASGNKLYVVGGYFGIQRCKTLDCYDPTLDVWNSITTVPYSLIPTAFVSTWKHLPS

SEQ ID NO: 53140 - protein, 573 aa, Homo sapiens
LLGCRASMSDNQSWNSSGSEEDPETESGPPVERCGVLSKWTNYIHGWQDRWVVLKNNALSYYKSEDETEYGCRGSICLSKAVITPHDFDECRFDISVNDSVWYLRAQDPDHRQQWIDAIEQHKTESGYGSESSLRRHGSMVSLVSGASGYSATSTSSFKKGHSLREKLAEMETFRDILCRQVDTLQKYFDACADAVSKDELQRDKVVEDDEDDFPTTRSDGDFLHSTNGNKEKLFPHVTPKGINGIDFKGEAITFKATTAGILATLSHCIELMVKREDSWQKRLDKETEKKRRTEEAYKNAMTELKKKSHFGGPDYEEGPNSLINEEEFFDAVEAALDRQDKIEEQSQSEKVRLHWPTSLPSGDAFSSVGTHRFVQKVYRREVEENGIVLDPLKATHAVKGVTGHEVCNYFWNVDVRNDWETTIENFHVVETLADNAIIIYQTHKRVWPASQRDVLYLSVIRKIPALTENDPETWIVCNFSVDHDSAPLNNRCVRAKINVAMICQTLVSPPEGNQEISRDNILCKITYVANVNPGGWAPASVLRAVAKREYPKFLKRFTSYVQEKTAGKPILF

SEQ ID NO: 53141 - protein, 607 aa, Homo sapiens
TESGPPVERCGVLSKWTNYIHGWQDRWVVLKNNALSYYKSEDETEYGCRGSICLSKAVITPHDFDECRFDISVNDSVWYLRAQDPDHRQQWIDAIEQHKTESGYGSESSLRRHGSMVSLVSGASGYSATSTSSFKKGHSLREKLAEMETFRDILCRQVDTLQKYFDACADAVSKDELQRDKVVEDDEDDFPTTRSDGDFLHSTNGNKEKLFPHVTPKGINGIDFKGEAITFKATTAGILATLSHCIELMVKREDSWQKRLDKETEKKRRTEEAYKNAMTELKKKSHFGGPDYEEGPNSLINEEEFFDAVEAALDRQDKIEEQSQSEKVRLHWPTSLPSGDAFSSVGTHRFVQKPYSRSSSMSSIDLVSASDDVHRFSSQVEEMVQNHMTYSLQDVGGDANWQLVVEEGEMKVYRREVEENGIVLDPLKATHAVKGVTGHEVCNYFWNVDVRNDWETTIENFHVVETLADNAIIIYQTHKRVWPASQRDVLYLSVIRKIPALTENDPETWIVCNFSVDHDSAPLNNRCVRAKINVAMICQTLVSPPEGNQEISRDNILCKITYVANVNPGGWAPASVLRAVAKREYPKFLKRFTSYVQEKTAGKPILF

SEQ ID NO: 53142 - protein, 302 aa, Homo sapiens
LRADANRKFRCKAVANGKVLPNDPVFLEPHEEMTLCKYYEKRLLEFCSVFKPAMPRSVVGTACMYFKRFYLNNSVMEYHPRIIMLTCAFLACKVDEFNVSSPQFVGNLRESPLGQEKALEQILEYELLLIQQLNFHLIVHNPYRPFEGFLIDLKTRYPILENPEILRKTADDFLNRIALTDAYLLYTPSQIALTAILSSASRAGITMESYLSESLMLKENRTCLSQLLDIMKSMRNLVKKYEPPRSEEVAVLKQKLERCHSAELALNVITKKRKGYEDDDYVSKKSKHEEEEWTDDDLVESL

SEQ ID NO: 53143 - protein, 100 aa, Homo sapiens
KKVVDPFSKKDWYDVKAPAMFNIRNIGKMLITRTQGTKIASDGLKGRVFEVSLADLQNDEVALRKFKLITEDVQGKNCLTSMAWILPVTKCVPWSKNGRQ

SEQ ID NO: 53144 - protein, 101 aa, Homo sapiens
MVKKWQTMIEAHVDVRTIDGYLLRLFCVGFTKKRNNQIQKTSYAQHQRVRQIRKKMMEIMTREVQTNALKEVVNKLIPDSIGKDIEKACQSILSMMSSLEK

SEQ ID NO: 53145 - protein, 61 aa, Homo sapiens
IYPLHDVFVRKVKMLKKPKFELGKLMELHGEGSSSGKATGDERGAKVERADGFEPPVQESV

SEQ ID NO: 53146 - protein, 530 aa, Homo sapiens
LPLGHACSFTMPGSLPLNAEACWPKDVGIVALEIYFPSQYVDQAELEKYDGVDAGKYTIGLGQAKMGFCTDREDINSLCMTVVQNLMERNNLSYDCIGRLEVGTETIIDKSKSVKTNLMQLFEESGNTDIEGIDTTNACYGGTAAVFNAVNWIESSSWDGRYALVVAGDIAVYATGNARPTGGVGAVALLIGPNAPLIFERGLRGTHMQHAYDFYKPDMLSEYPIVDGKLSIQCYLSALDRCYSVYCKKIHAQWQKEGNDKDFTLNDFGFMIFHSPYCKLVQKSLARMLLNDFLNDQNRDKNSIYSGLEAFGDVKLEDTYFDRDVEKAFMKASSELFSQKTKASLLVSNQNGNMYTSSVYGSLASVLAQYSPQQLAGKRIGVFSYGSGLAATLYSLKVTQDATPGSALDKITASLCDLKSRLDSRTGVAPDVFAENMKLREDTHHLVNYIPQGSIDSLFEGTWYLVRVDEKHRRTYARRPTPNDDTLDEGVGLVHSNIATEHIPSPAKKVPRLPATAAEPEAAVISNGEH

SEQ ID NO: 53147 - protein, 109 aa, Homo sapiens
LTLPRRPFLHCSTVIPVVVLTLKFTMHLFKLKDSWCFLPWMLFISWTSHHIRDGIRHGLWICPFGKTSPLPFWLYVIITSSLPHICSFVMYLTGTRQMMSSKHGVRIDV

SEQ ID NO: 53148 - protein, 50 aa, Homo sapiens
LKAERERGITIDISLWKFETSKYYVTIIDAPGLRDFIKNMITGTSQAVLS

SEQ ID NO: 53149 - protein, 92 aa, Homo sapiens
LPSTQSLNIKSEPVSPPRDRTTTPSRYPQHTRHEAGRSPVDSLSSCSSSYDGSDREDHRNEFHSPIGLTRPSPDERESPSVKRMRLSEGWAT

SEQ ID NO: 53150 - protein, 50 aa, Homo sapiens
LSSCSSSYDGSDREDHRNEFHSPIGLTRPSPDERESPSVKRMRLSEGWAT

SEQ ID NO: 53151 - protein, 27 aa, Homo sapiens
IGLTRPSPDERESPSVKRMRLSEGWAT

SEQ ID NO: 53152 - protein, 75 aa, Homo sapiens
ISDYVGTCERLIELVDRGLVEKVLPGHFNTFGAERLFRLASNYISKAGICHKVSTFAMRSLASLALRVTNSRTSP

SEQ ID NO: 53153 - protein, 310 aa, Homo sapiens
IHSGRHEYAFSFELPQTPLATSFEGRHGSVRYWVKAELHRPWLLPVKLKKEFTVFEHIDINTPSLLSPQAGTKEKTLCCWFCTSGPISLSAKIERKGYTPGESIQIFAEIENCSSRMVVPKAAIYQTQAFYAKGKMKEVKQLVANLRGESLSSGKTETWNGKLLKIPPVSPSILDCSIIRVEYSLMVYVDIPGAMDLFLNLPLVIGTIPLHPFGSRTSSVSSQCSMNMNWLSLSLPERPEAPPSYAEVVTEEQRRNNLAPVSACDDFERALQGPLFAYIQEFRFLPPPLYSEIDPNPDQSADDRPSCPSR

SEQ ID NO: 53154 - protein, 22 aa, Homo sapiens
MADRGRPRTAGTGREISFTDNR

SEQ ID NO: 53155 - protein, 52 aa, Homo sapiens
VEMFLYFEDHGLVTCSADHLIILWKNGERESGLRSLRLFQKLEENGDLYLAV

SEQ ID NO: 53156 - protein, 90 aa, Homo sapiens
LVKEKVMYEKEAKQQEEKIEKMRAEDGENYDIKKQAEILQESRMMIPDCQRRLEAAYLDLQRILENEKDLEEAEEYKEARLVLDSVKLEA

SEQ ID NO: 53157 - protein, 137 aa, Homo sapiens
IASGFWQATAIFLAVGIFILCMVALVSVFTMCVQSIMKKSIFNVCGLLQGIAGLFLILGLILYPAGWGCQKAIDYCGHYASAYKPGDCSLGWAFYTAIGGTVLTFICAVFSAQAEIATSSDKVQEEIEEGKNLICLL

SEQ ID NO: 53158 - protein, 69 aa, Homo sapiens
IFNFQSLLTVILLLICTCAYIRSLAPSLLDRNKTGLLGIFWKCARIGERKSPYVAVCCIVMAFSILFIQ

SEQ ID NO: 53159 - protein, 307 aa, Homo sapiens
KVFSHRGGNVTLPCKFYRDPTAFGSGIHKIRIKWTKLTSDYLKEVDVFVSMGYHKKTYGGYQGRVFLKGGSDSDASLVITDLTLEDYGRYKCEVIEGLEDDTVVVALDLQGVVFPYFPRLGRYNLNFHEAQQACLDQDAVIASFDQLYDAWRGGLDWCNAGWLSDGSVQYPITKPREPCGGQNTVPGVRNYGFWDKDKSRYDVFCFTSNFNGRFYYLIHPTKLTYDEAVQACLNDGAQIAKVGQIFAAWKILGYDRCDAGWLADGSVRYPISRPRRRCSPTEAAVRFVGFPDKKHKLYGVYCFRAYN

SEQ ID NO: 53160 - protein, 507 aa, Homo sapiens
LPCAATSATLPSATTPDQPGSRPGDGIMKRSVAVWLLVGLSLGVPQFGKGDICDPNPCENGGICLPGLADGSFSCECPDGFTDPNCSSVVEVASDEEEPTSAGPCTPNPCHNGGTCEISEAYRGDTFIGYVCKCPRGFNGIHCQHNINECEVEPCKNGGICTDLVANYSCECPGEFMGRNCQYKCSGPLGIEGGIISNQQITASSTHRALFGLQKWYPYYARLNKKGLINAWTAAENDRWPWIQINLQRKMRVTGVITQGAKRIGSPEYIKSYKIAYSNDGKTWAMYKVKGTNEDMVFRGNIDNNTPYANSFTPPIKAQYVRLYPQVCRRHCTLRMELLGCELSGCSEPLGMKSGHIQDYQITASSIFRTLNMDMFTWEPRKARLDKQGKVNAWTSGHNDQSQWLQVDLLVPTKVTGIITQGAKDFGHVQFVGSYKLAYSNDGEHWTVYQDEKQRKDKVFQGNFDNDTHRKNVIDPPIYARHIRILPWSWYGRITLRSELLGCTEEE

SEQ ID NO: 53161 - protein, 141 aa, Homo sapiens
KCRGLRTARKLRSHRRDQKWHDKQYKKAHLGTALKANPFGGASHAKGIVLEKVGVEAKQPNSAIRKCVRVQLIKNGKKITAFVPNDGCLNFIEENDEVLVAGFGRKGHAVGDIPGVRFKVVKVANVSLLALYKGKKERPRS

SEQ ID NO: 53162 - protein, 1314 aa, Homo sapiens
REPRVKQGPKIYSFNSTNDSSGPANLDKSILKVVINNKLEQRIIGVINEHKKQNNDKGMISGRLTAKKLQDLYMALQAFSFKTKDIEDAMTNTLLYGGDLHSALDWLCLNLSDDALPEGFSQEFEEQQPKSRPKFQSPQIQATISPPLQPKTKTYEEDPKSKPKKEEKNMEVNMKEWILRYAEQQNEEEKNENSKSLEEEEKFDPNERYLHLAAKLLDAKEQAATFKLEKNKQGQKEAQEKIRKFQREMETLEDHPVFNPAMKISHQQNERKKPPVATEGESALNFNLFEKSAAATEEEKDKKKEPHDVRNFDYTARSWTGKSPKQFLIDWVRKNLPKSPNPSFEKVPVGRYWKCRVRVIKSEDDVLVVCPTILTEDGMQAQHLGATLALYRLVKGQSVHQLLPPTYRDVWLEWSDAEKKREELNKMETNKPRDLFIAKLLNKLKQQQQQQQQHSENKRENSEDPEESWENLVSDEDFSALSLESANVEDLEPVRNLFRKLQSTPKYQKLLKERQQLPVFKHRDSIVETLKRHRVVVVAGETGSGKSTQVPHFLLEDLLLNEWEASKCNIVCTQPRRISAVSLANRVCDELGCENGPGGRNSLCGYQIRMESRACESTRLLYCTTGVLLRKLQEDGLLSNVSHVIVDEVHERSVQSDFLLIILKEILQKRSDLHLILMSATVDSEKFSTYFTHCPILRISGRSYPVEVFHLEDIIEETGFVLEKDSEYCQKFLEEEEEVTINVTSKAGGIKKYQEYIPVQTGAHADLNPFYQKYSSRTQHAILYMNPHKINLDLILELLAYLDKSPQFRNIEGAVLIFLPGLAHIQQLYDLLSNDRRFYSERYKVIALHSILSTQDQAAAFTLPPPGVRKIVLATNIAETGITIPDVVFVIDTGRTKENKYHESSQMSSLVETFVSKASALQRQGRAGRVRDGFCFRMYTRERFEGFMDYSVPEILRVPLEELCLHIMKCNLGSPEDFLSKALDPPQLQVISNAMNLLRKIGACELNEPKLTPLGQHLAALPVNVKIGKMLIFGAIFGCLDPVATLAAVMTEKSPFTTPIGRKDEADLAKSALAMADSDHLTIYNAYLGWKKARQEGGYRSEITYCRRNFLNRTSLLTLEDVKQELIKLVKAAGFSSSTTSTSWEGNRASQTLSFQEIALLKAVLVAGLYDNVGKIIYTKSVDVTEKLACIVETAQGKAQVHPSSVNRDLQTHGWLLYQEKIRYARVYLRETTLITPFPVLLFGGDIEVQHRERLLSIDGWIYFQAPVKIAVIFKQLRVLIDSVLRKKLENPKMSLENDKILQIITELIKTENN

SEQ ID NO: 53163 - protein, 76 aa, Homo sapiens
KLKVFVRPTNSCMKTIGVHDRVFDVNDKVENSLEPADDTVHESAEPSRGENAAQTPRIPSRLLAILLFLLAMLLTL

SEQ ID NO: 53164 - protein, 100 aa, Homo sapiens
IALSSLNREFRPFRDEENVGAMNQYRTRTLSITSSGSAVSCSTIPPELVKQKVKRQLTKQQKSAVRRRLQKGEANIFTKQRRENMQNIKSSLEAASFWGE

SEQ ID NO: 53165 - protein, 22 aa, Homo sapiens
VPPSRAIAHQLIKHWIRINPNL

SEQ ID NO: 53166 - protein, 11 aa, Homo sapiens
MGRSGSSRLLQ

SEQ ID NO: 53167 - protein, 52 aa, Homo sapiens
RPSTTKDKHKEEDKNSERIIVKKETQSPEQVKSEKLKDLFDYNPPLHKNLDA

SEQ ID NO: 53168 - protein, 16 aa, Homo sapiens
IKEGGVQLLLTRVDIP

SEQ ID NO: 53169 - protein, 609 aa, Homo sapiens
VKLTETAIRALETYQSHKNLIPFRPSIQFQGLHGLVKIPKNDPLNEVHNFNFYLSNVGKDNPQGSFDCIQQTFSSSGASQLNCLGFIQDKITVCATNDSYQMTRERMTQAEEESRNRSTKVIKPGGPYVGKRVQIRKAPQAVSDTVPERKRSTPMNPANTIRKTHSSSTISQRPYRDRVIHLLALKAYKKPELLARLQKDGVNQKDKNSLGAILQQVANLNSKDLSYTLKDYVFKELQRDWPGYSEIDRRSLESVLSRKLNPSQNAAGTSRSESPVCSSRDAVSSPQKRLLDSEFIDPLMNKKARISHLTNRVPPTLNGHLNPTSEKSAAGLPLPPAAAAIPTPPPLPSTYLPISHPPQIVNSNSNSPSTPEGRGTQDLPVDSFSQNDSIYEDQQDKYTSRTSLETLPPGSVLLKCPKPMEENHSMSHKKSKKKSKKHKEKDQIKKHDIETIEEKEEDLKREEEIAKLNNSSPNSSGGVKEDCTASMEPSAIELPDYLIKYIAIVSYEQRQNYKDDFNAEYDEYRALHARMETVARRFIKLDAQRKRLSPGSKEYQNVHEEVLQEYQKIKQSSPNYHEEKYRCEYLHNKLAHIKRLIGEFDQQQAESWS

SEQ ID NO: 53170 - protein, 890 aa, Homo sapiens
IRLPEYVIPVHYDLLIHANLTTLTFWGTTKVEITASQPTSTIILHSHHLQISRATLRKGAGERLSEEPLQVLEHPRQEQIALLAPEPLLVGLPYTVVIHYAGNLSETFHGFYKSTYRTKEGELRILASTQFEPTAARMAFPCFDEPAFKASFSIKIRREPRHLAISNMPLVKSVTVAEGLIEDHFDVTVKMSTYLVAFIISDFESVSKITKSGVKVSVYAVPDKINQADYALDAAVTLLEFYEDYFSIPYPLPKQDLAAIPDFQSGAMENWGLTTYRESALLFDAEKSSASSKLGITMTVAHELAHQWFGNLVTMEWWNDLWLNEGFAKFMEFVSVSVTHPELKVGDYFFGKCFDAMEVDALNSSHPVSTPVENPAQIREMFDDVSYDKGACILNMLREYLSADAFKSGIVQYLQKHSYKNTKNEDLWDSMASICPTDGVKGMDGFCSRSQHSSSSSHWHQEGVDVKTMMNTWTLQKGFPLITITVRGRNVHMKQEHYMKGSDGAPDTGYLWHVPLTFITSKSDMVHRFLLKTKTDVLILPEEVEWIKFNVGMNGYYIVHYEDDGWDSLTGLLKGTHTAVSSNDRASLINNAFQLVSIGKLSIEKALDLSLYLKHETEIMPVFQGLNELIPMYKLMEKRDMNEVETQFKAFLIRLLRDLIDKQTWTDEGSVSERMLRSQLLLLACVHNYQPCVQRAEGYFRKWKESNGNLSLPVDVTLAVFAVGAQSTEGWDFLYSKYQFSLSSTEKSQIEFALCRTQNKEKLQWLLDESFKGDKIKTQEFPQILTLIGRNPVGYPLAWQFLRKNWNKLVQKFELGSSSIAHMVMGTTNQFSTRTRLEEVKGFFSSLKENGSQLRCVQQTIETIEENIGWMDKNFDKIRVWLQSEKLERM

SEQ ID NO: 53171 - protein, 205 aa, Homo sapiens [sequence omitted]

SEQ ID NO: 53172 - protein, 4 aa, Homo sapiens
LFSP

SEQ ID NO: 53173 - protein, 78 aa, Homo sapiens
MRENCCNWVSSSEPLDTSVESMLPDCPRVSAGTDRHELTSWKSFPSIFKFFTEASEAKTSSLKPAVTRRSHRIKHEEL

SEQ ID NO: 53174 - protein, 53 aa, Homo sapiens
VKFIKETYLDTVTEEMAKFLENFCELQFRENAVRVVKTSKSSSKHRGAVHALG

SEQ ID NO: 53175 - protein, 16 aa, Homo sapiens
LLEEENSRPHTNETSL

SEQ ID NO: 53176 - protein, 38 aa, Homo sapiens
IDKMTKKTRDLRRQLHKAVMDHVSDSFLETNVPLLVLT

SEQ ID NO: 53177 - protein, 614 aa, Homo sapiens
KTAVFNAARDGKLRLLTKLLASKSKEEVSSLISEKTNGATPLLMAARYGHLDMVEFLLEQCSASIEVGGSVNFDGETIEGAPPLWAASAAGHLKVVQSLLNHGASVNNTTLTNSTPLRAACFDGHLEIVKYLVEHKADLEVSNRHGHTCLMISCYKGHKEIAQYLLEKGADVNRKSVKGNTALHDCAESGSLDIMKMLLMYCAKMEKDGYGMTPLLSASVTGHTNIVDFLTHHAQTSKTERINALELLGATFVDKKRDLLGALKYWKKAMNMRYSDRTNIISKPVPQTLIMAYDYAKEVNSAEELEGLIADPDEMRMQALLIRERILGPSHPDTSYYIRYRGAVYADSGNFKRCINLWKYALDMQQSNLDPLSPMTASSLLSFAELFSFMLQDRAKGLLGTTVTFDDLMGILCKSVLEIERAIKQTQCPADPLQLNKALSIILHLICLLEKVPCTLEQDHFKKQTIYRFLKLHPRGKNNFSPLHLAVDKNTTCVGRYPVCKFPSLQVTAILIECGADVNVRDSDDNSPLHIAALNNHPDIMNLLIKSGAHFDATNLHKQTASDLLDEKEIAKNLIQPINHTTLQCLAARVIVNHRIYYKGHIPEKLETFVSLHR

SEQ ID NO: 53178 - protein, 205 aa, Homo sapiens
RLLALLLLVPGPGGASEITFELPDNAKQCFYEDIAQGTKCTLEFQVITGGHYDVDCRLEDPDGKVLYKEMKKQYDSFTFTASKNGTYKFCFSNEFSTFTHKTVYFDFQVGEDPPLFPSENRVSALTQMESACVSIHEALKSVIDYQTHFRLREAQGRSRAEDLNTRVAYWSVGEALILLVVSIGQVFLLKSFFSDKRTTTTRVGS

SEQ ID NO: 53179 - protein, 132 aa, Homo sapiens
LQLPTSIAAGGEGLTDVSPETTTPEPPSSAAVSPGTEEPAGDTKKKIDILLKAVGDTPIMKTKKWAVERTRTIQGLIDFIKKFLKLVASEQLFIYVNQSFAPSPDQEVGTLYECFGSDGKLVLHYCKSQAWG

SEQ ID NO: 53180 - protein, 1143 aa, Homo sapiens
IQQGEDAFPPSSPLFAEPYKVTSKEDKLSSRIQSMLGNYDEMKDFIGDRSIPKLVAIPKPTVPPSADEKSNPNFFEQRHGGSHQSSKWTPVGPAPSTSQSQKRSSGLQSGHSSQRTSAGSSSGTNSSGQRHDRESYNNSGSSSRKKGQHGSEHSKSRSSSPGKPQAVSSLNSSHSRSHGNDHHSKEHQRSKSPRDPDANWDSPSRVPFSSGQHSTQSFPPSLMSKSNSMLQKPTAYVRPMDGQESMEPKLSSEHYSSQSHGNSMTELKPSSKAHLTKLKIPSQPLDASASGDVSCVDEILKEMTHSWPPPLTAIHTPCKTEPSKFPFPTKESQQSNFGTGEQKRYNPSKTSNGHQSKSMLKDDLKLSSSEDSDGEQDCDKTMPRSTPGSNSEPSHHNSEGADNSRDDSSSHSGSESSSGSDSESESSSSDSEANEPSQSASPEPEPPPTNKWQLDNWLNKVNPHKVSPASSVDSNIPSSQGYKKEGREQGTGNSYTDTSGPKETSSATPGRDSKTIQKGSESGRGRQKSPAQSDSTTQRRTVGKKQPKKAEKAAAEEPRGGLKIESETPVDLASSMPSSRHKAATKGSRKPNIKKESKSSPRPTAEKKKYKSTSKSSQKSREIIETDTSSSDSDESESLPPSSQTPKYPESNRTPVKPSSVEEEDSFFRQRMFSPMEEKELLSPLSEPDDRYPLIVKIDLNLLTRIPGKPYKETEPPKGEKKNVPEKHTREAQKQASEKVSNKGKRKHKNEDDNRASESKKPKTEDKNSAGHKPSSNRESSKQSAAKEKDLLPSPAGPVPSKDPKTEHGSRKRTISQSSSLKSSSNSNKETSGSSKNSSSTSKQKKTEGKTSSSSKEVKEKAPSSSSNCPPSAPTLDSSKPRRTKLVFDDRNYSADHYLQEAKKLKHNADALSDRFEKAVYYLDAVVSFIECGNALEKNAQESKSPFPMYSETVDLIKYTMKLKNYLAPDATAADKRLTVLCLRCESLLYLRLFKLKKENALKYSKTLTEHLKNSYNNSQAPSPGLGSKAVGMPSPVSPKLSPGNSGNYSSGASSASASGSSVTIPQKIHQMAASYVQVTSNFLYATEIWDQAEQLSKEQKEFFAELDKVMGPLIFNASIMTDLVRYTRQGLHWLRQDAKLIS

SEQ ID NO: 53181 - protein, 211 aa, Homo sapiens
LRSLQSQTLSDLDMSFIFDWIYSGFSSVLQFLGLYKKTGKLVFLGLDNAGKTTLLHMLKDDRLGQHVPTLHPTSEELTIAGMTFTTFDLGGHVQARRVWKNYLPAINGIVFLVDCADHERLLESKEELDSLMTDETIANVPILILGNKIDRPEAISEERLREMFGLYGQTTGKGSISLKELNARPLEVFMCSVLKRQGYGEGFRWMAQYID

SEQ ID NO: 53182 - protein, 256 aa, Homo sapiens
RGPAQAKLLPGSAIQALVGLARPLVLALLLVSAALSSVVSRTDSPSPTVLNSHISTPNVNALTHENQTKPSISQISTTLPPTTSTKKSGGASVVPHPSPTPLSQEEADNNEDPSIEEEDLLMLNSSPSTAKDTLDNGDYGEPDYDWTTGPRDDDESDDTLEENRGYMEIEQSVKSFKMPSSNIEEEDSHFFFHLIIFAFCIAVVYITYHNKRKIFLLVQSRKWRDGLCSKTVEYHRLDQNVNEAMPSLKITNDYIF

SEQ ID NO: 53183 - protein, 13 aa, Homo sapiens
RCSPRSWTSGSSS

SEQ ID NO: 53184 - protein, 302 aa, Homo sapiens
KELDQWIEQLNECKQLSESQVKSLCEKAKEILTKESNVQEVRCPVTVCGDVHGQFHDLMELFRIGGKSPDTNYLFMGDYVDRGYYSVETVTLLVALKVRYRERITILRGNHESRQITQVYGFYDECLRKYGNANVWKYFTDLFDYLPLTALVDGQIFCLHGGLSPSIDTLDHIRALDRLQEVPHEGPMCDLLWSDPDDRGGWGISPRGAGYTFGQDISETFNHANGLTLVSRAHQLVMEGYNWCHDRNVVTIFSAPNYCYRCGNQAAIMELDDTLKYSFLQFDPAPRRGEPHVTRRTPDYFL

SEQ ID NO: 53185 - protein, 211 aa, Homo sapiens
IHSRYRGSYWRTVRACLGCPLRRGALLLLSIYFYYSLPNAVGPPFTWMLALLGLSQALNILLGLKGLAPAEISAVCEKGNFNVAHGLAWSYYIGYLRLILPELQARIRTYNQHYNNLLRGAVSQRLYILLPLDCGVPDNLSMADPNIRFLDKLPQQTGDHAGIKDRVYSNSIYELLENGQRNLQMTAASRCPRRFSGTCGRRKRKRLLWAA

SEQ ID NO: 53186 - protein, 115 aa, Homo sapiens
LQTLFAMSQYSQAGFSREDRLEQAKLFCRTLEDILADAPESQNNCRLIAYQEPADDSSFSLSQEVLRHLRQEEKEEVTVGSLKTSAVPSTSTMSQEPELLISGMEKPLPLRTDFS

SEQ ID NO: 53187 - protein, 114 aa, Homo sapiens
LKKAFTELQAKVIDTQQKVKLADIQIEQLNRTKKHAHLTDTEIMTLVDETNMYEGVGRMFILQSKEAIHSQLLEKQKIAEEKIKELEQKKSYLERSVKEAEDNIREMLMARRAQ

SEQ ID NO: 53188 - protein, 218 aa, Homo sapiens
KPGNKERGWNDPPQFSYGLQTQAGGPRRSLLTKRVAAPQDGSPRVPASETSPGPPPMGPPPPSSKAPRSPPVGSGPASGVEPTSFPVESEAVMEDVLRPLEQALEDCRGHTRKQVCDDISRRLALLQEQWAGGKLSIPVKKRMALLVQELSSHRWDAADDIHRSLMVDHVTEVSQWMVGVKRLIAEKRSLFSEEAANEEKSAATAEKNHTIPGFQQAS

SEQ ID NO: 53189 - protein, 53 aa, Homo sapiens
LLSLSMVWANHLFLGCSYNKDLLDKVMEMADGIEVEDLPQFTTRSELMKKHQS

SEQ ID NO: 53190 - protein, 31 aa, Homo sapiens
VPAPFFLPASLSANNTPTRRVSPLNLSSVTP

SEQ ID NO: 53191 - protein, 393 aa, Homo sapiens
VFHPTHEWQALQPGQAVPAGSHVRLNLQTGEREAKLQYEDKFRNNLKGKRLDINTNTYTSQDLKSALAKFKEGAEMESSKEDKARQAEVKRLFRPIEELKKDFDELNVVIETDMQIMVRLINKFNSSSSSLEEKIAALFDLEYYVHQMDNAQDLLSFGGLQVVINGLNSTEPLVKEYAAFVLGAAFSSNPKVQVEAIEGGALQKLLVILATEQPLTAKKKVLFALCSLLRHFPYAQRQFLKLGGLQVLRTLVQEKGTEVLAVRVVTLLYDLVTEKMFAEEEAELTQEMSPEKLQQYRQVHLLPGLWEQGWCEITAHLLALPEHDAREKVLQTLGVLLTTCRDRYRQDPQLGRTLASLQAEYQVLASLELQDGEDEGYFQELLGSVNSLLKELR

SEQ ID NO: 53192 - protein, 107 aa, Homo sapiens
LATSILTRMAAAAASRGVGAKLGLREIRIHLCQRSPGSQGVRDFIEKRYVELKKANPDLPILIRECSDVQPKLWARYAFGQETNVPLNNFSADQVTRALENVLSGKA

SEQ ID NO: 53193 - protein, 408 aa, Homo sapiens
KAQLGPDESKQKFVLKTPKETLMGKYGEDSKLIYDLKDQGGELLSLRYDLTVPFARYLAMNKLTNIKRYHIAKDFDIAGNFDPMIPDAECLKIMCEILSSLQIGDFLVKVNDRRILDGMFAICGVSDSKFRTICSSVDKLDKVSWEEVKNEMVGEKGLAPEVADRIGDYVQQHGGVSLVEQLLQDPKLSQNKQALEGLGDLKLLFEYLTLFGIDDKISFDLSLARGLDYYTGVIYEAVLLQTPAQAGEEPLGVGSVAAGGRYDGLVGMFDPKGRKVPCVGLSIGVERIFSIVEQRLEALEEKIRTTETQVLVASAQKKLLEERLKLVSELWDAGIKAELLYKKNPKLLNQLQYCEEAGIPLVAIIGEQELKDGVIKLRSVTSREEVDVRREDLVEEIKRRTGQPLCIC

SEQ ID NO: 53194 - protein, 230 aa, Homo sapiens
VEQLLQDPKLSQNKQALEGLGDLKLLFEYLTLFGIDDKISFDLSLARGLDYYTGVIYEAVLLQTPAQAGEEPLGVGSVAAGGRYDGLVGMFDPKGRKVPCVGLSIGVERIFSIVEQRLEALEEKIRTTETQVLVASAQKKLLEERLKLVSELWDAGIKAELLYKKNPKLLNQLQYCEEAGIPLVAIIGEQELKDGVIKLRSVTSREEVDVRREDLVEEIKRRTGQPLCIC

SEQ ID NO: 53195 - protein, 356 aa, Homo sapiens
VNHKEIKMSKSKDDAPHELESQFILRLPPEYASTVRRAVQSGHVNLKDRLTIELHPDGRHGIVRVDRVPLASKLVDLPCVMESLKTIDKKTFYKTADICQMLVSTVDGDLYPPVEEPVASTDPKASKKKDKDKEKKFIWNHGITLPLKNVRKRRFRKTAKKKYIESPDVEKEVKRLLSTDAEAVSTRWEIIAEDETKEAENQGLDISSPGMSGHRQGHDSLEHDELREIFNDLSSSSEDEDETQHQDEEDINIIDTEEDLERQLQDKLNESDEQHQENEGTNQLVMGIQKQIDNMKGKLQETQDRAKRQEDLIMKVENLALKNRFQAVLDELKQKEDREKEQLSSLQEELESLLEK

SEQ ID NO: 53196 - protein, 9 aa, Homo sapiens
LVMSTSRTD

SEQ ID NO: 53197 - protein, 91 aa, Homo sapiens
KREQLIDMNAEGDETGVMDSLLEALQSGAAFRRKRGPRQANRKAGCAVTSLLASELTKDDAMAAVPAKVSKNSETFPTILEEAKELVGRAS

SEQ ID NO: 53198 - protein, 87 aa, Homo sapiens
LPEVGTKLNKQDEFGALESVKAASELCSPLSGEVTEINEALAENPGLVNKSCYEDGWQIKMTLSNPSELDELMSEEAYEKYIKSIEE

SEQ ID NO: 53199 - protein, 440 aa, Homo sapiens
KMPAIAVLAAAAAAWCFLQVESRHLDALAGGAGPNHGNFLDNDQWLSTVSQYDRDKYWNRFRDDDYFRNWNPNKPFDQALDPSKDPCLKVKCSPHKVCVTQDYQTALCVSRKHLLPRQKKGNVAQKHWVGPSNLVKCKPCPVAQSAMVCGSDGHSYTSKCKLEFHACSTGKSLATLCDGPCPCLPEPEPPKHKAERSACTDKELRNLASRLKDWFGALHEDANRVIKPTSSNTAQGRFDTSILPICKDSLGWMFNKLDMNYDLLLDPSEINAIYLDKYEPCIKPLFNSCDSFKDGKLSNNEWCYCFQKPGGLPCQNEMNRIQKLSKGKSLLGAFIPRCNEEGYYKATQCHGSTGQCWCVDKYGNELAGSRKQGAVSCEEEQETSGDFGSGGSVVLLDDLEYERELGPKDKEGKLRVHTRAVTEDDEDEDDDKEDEVGYIW

SEQ ID NO: 53200 - protein, 75 aa, Homo sapiens
ISPPSFTPDTARSPGLPRRSPLPSRTEKGEREGCHVRAAALTGEGSESHPWHCLVETEIPVLRSPPWLKISPSLT

SEQ ID NO: 53201 - protein, 1164 aa, Homo sapiens
LKKIEKEIQQKWDTERVFEVNASNLEKQTSKGKYFVTFPYPYMNGRLHLGHTFSLSKCEFAVGYQRLKGKCCLFPFGLHCTGMPIKACADKLKREIELYGCPPDFPDEEEEEEETSVKTEDIIIKDKAKGKKSKAAAKAGSSKYQWGIMKSLGLSDEEIVKFSEAEHWLDYFPPLAIQDLKRMGLKVDWRRSFITTDVNPYYDSFVRWQFLTLRERNKIKFGKRYTIYSPKDGQPCMDHDRQTGEGVGPQEYTLLKLKVLEPYPSKLSGLKGKNIFLVAATLRPETMFGQTNCWVRPDMKYIGFETVNGDIFICTQKAARNMSYQGFTKDNGVVPVVKELMGEEILGASLSAPLTSYKVIYVLPMLTIKEDKGTGVVTSVPSDSPDDIAALRDLKKKQALRAKYGIRDDMVLPFEPVPVIEIPGFGNLSAVTICDELKIQSQNDREKLAEAKEKIYLKGFYEGIMLVDGFKGQKVQDVKKTIQKKMIDAGDALIYMEPEKQVMSRSSDECVVALCDQWYLDYGEENWKKQTSQCLKNLETFCEETRRNFEATLGWLQEHACSRTYGLGTHLPWDEQWLIESLSDSTIYMAFYTVAHLLQGGNLHGQAESPLGIRPQQMTKEVWDYVFFKEAPFPKTQIAKEKLDQLKQEFEFWYPVDLRVSGKDLVPNHLSYYLYNHVAMWPEQSDKWPTAVRANGHLLLNSEKMSKSTGNFLTLTQAIDKFSADGMRLALADAGDTVEDANFVEAMADAGILRLYTWVEWVKEMVANWDSLRSGPASTFNDRVFASELNAGIIKTDQNYEKMMFKEALKTGFFEFQAAKDKYRELAVEGMHRELVFRFIEVQTLLLAPFCPHLCEHIWTLLGKPDSIMNASWPVAGPVNEVLIHSSQYLMEVTHDLRLRLKNYMMPAKGKKTDKQPLQKPSHCTIYVAKNYPPWQHTTLSVLRKHFEANNGKLPDNKVIASELGSMPELKKYMKKVMPFVAMIKENLEKMGPRILDLQLEFDEKAVLMENIVYLTNSLELEHIEVKFASEAEDKIREDCCPGKPLNVFRIEPGVSVSLVNPQPSNGHFSTKIEIRQGDNCDSIIRRLMKMNRGIKDLSKVKLMRFDDPLLGPRRVPVLGKEYTEKTPISEHAVFNVDLMSKKIHLTENGIRVDIGDTIIYLVH

SEQ ID NO: 53202 - protein, 51 aa, Homo sapiens
RGRKRRKNRSSASDLRWLKERMYLVSAISLHPSMTLLSMSLIFLARKPSAV

SEQ ID NO: 53203 - protein, 38 aa, Homo sapiens
MFHPMGPPPPFMRAPGPIHYPSQDPQRMGAHAGKHSSP

SEQ ID NO: 53204 - protein, 284 aa, Homo sapiens
LEHYSQASEWAAKYIRNRIIQFNPGPEKYFTLGLPTGSTPLGCYKKLIEYYKNGDLSFKYVKTFNMDEYVGLPRDHPESYHSFMWNNFFKHIDIHPENTHILDGNAVDLQAECDAFEEKIKAAGGIELFVGGIGPDGHIAFNEPGSSLVSRTRVKTLAMDTILANARFFDGELTKVPTMALTVGVGTVMDAREVMILITGAHKAFALYKAIEEGVNHMWTVSAFQQHPRTVFVCDEDATLELKVKTVKYFKGLMLVHNKLVDPLYSIKEKETEKSQSSKKPYSD

SEQ ID NO: 53205 - protein, 273 aa, Homo sapiens
KKTHYGLLFDEFQGLSHLEALEMLSQESEIKVKSILNSLSGEELETLKVELEQLKETFSLAEFCEEEEEEKKGDEDFTKDITELFSQLHVSSKPEKLARARNTAHEWIRKSLTKPLAENEEGEKQSEAENTEQVNKNSIEDIHAFAIRSLAELTACSIELFHKTAALVLHGRKQEVTAIERSQTLSQMTIVLCKELSSLSKEFTTCLTTAGVKEMADVLNPLITAVFLEASNSASYIQDAFQLLLPVLEISLIENKIESHRHELQGQKPLLEH

SEQ ID NO: 53206 - protein, 212 aa, Homo sapiens
TDENIQEGLAPKPPPPIKDSYMMFGNQFQCDDLIIRPLESQGIERLHPMQFDHKKELRKLNMSILINFLDLLDILIRSPGSIKREEKLEDLKLLFVHVHHLINEYRPHQARETLRVMMEVQKRQRLETAERFQKHLERVIEMIQNCLASLPDDLPHSEAGMRVKTEPMDADDSNNCTGQNEHQRENSGHRRDQIIEKDAALCVLIDEMNERP

SEQ ID NO: 53207 - protein, 595 aa, Homo sapiens
KVVFMFGIQESIQRSGSSMKEEPLGSGMNAVRTWMQGAGVLDANTAAQSGVGLARAHFEKQPPSNLRKSNFFHFVLALYDRQGQPVEIERTAFVGFVEKEKEANSEKTNNGIHYRLQLLYSNGIRTEQDFYVRLIDSMTKQAIVYEGQDKNPEMCRVLLTHEIMCSRCCDKKSCGNRNETPSDPVIIDRFFLKFFLKCNQNCLKNAGNPRDMRRFQVVVSTTVNVDGHVLAVSDNMFVHNNSKHGRRARRLDPSEGTPSYLEHATPCIKAISPSEGWTTGGATVIIIGDNFFDGLQVIFGTMLVWSELITPHAIRVQTPPRHIPGVVEVTLSYKSKQFCKGTPGRFIYTALNEPTIDYGFQRLQKVIPRHPGDPERLPKEVILKRAADLVEALYGMPHNNQEIILKRAADIAEALYSVPRNHNQLPALANTSVHAGMMGVNSFSGQLAVNVSEASQATNQGFTRNSSSVSPHGYVPSTTPQQTNYNSVTTSMNGYGSAAMSNLGGSPTFLNGSAANSPYAIVPSSPTMASSTSLPSNCSSSSGIFSFSPANMVSAVKQKSAFAPVVRPQTSPPPTCTSTNGNSLQAISGMIVPPM

SEQ ID NO: 53208 - protein, 264 aa, Homo sapiens
ICQFFHMDFWLLIIISSSILTSLQVLGTLFIYVLFMVEEFRKEPVENMDDVIYYVNGTYRLLEFLVALCVVAYGVSETIFGEWTVMGSMIIFIHSYYNVWLRAQLGWKSFLLRRDAVNKIKSLPIATKEQLEKHNDICAICYQDMKSAVITPCSHFFHAGCLKKWLYVQETCPLCHCHLKNSSQLPGLGTEPVLQPHAGAEQNVMFQEGTEPPGQEHTPGTRIQEGSRDNNEYIARRPDNQEGAFDPKEYPHSAKDEAHPVESA

SEQ ID NO: 53209 - protein, 115 aa, Homo sapiens
IQCGLQSRHVALSVGGREILKGKLFDSTIADEGTWTLEDRKMVRIVLTKTKRDAANCWTSLLESEYAADPWVQDQMQRKLTLERFQKENPGFDFSGAEISGNYTKGGPDFSNLEK

SEQ ID NO: 53210 - protein, 7 aa, Homo sapiens
LDFSTRI

SEQ ID NO: 53211 - protein, 313 aa, Homo sapiens
RSPDGRLIPRTMCAERLGQFMTLALVLATFDPARGTDATNPPEGPQDRSSQQKGRLSLQNTAEIQHCLVNAGDVGCGVFECFENNSCEIRGLHGICMTFLHNAGKFDAQGKSFIKDALKCKAHALRHRFGCISRKCPAIREMVSQLQRECYLKHDLCAAAQENTRVIVEMIHFKDLLLHEPYVDLVNLLLTCGEEVKEAITHSVQVQCEQNWGSLCSILSFCTSAIQKPPTAPPERQPQVDRTKLSRAHHGEAGHHLPEPSSRETGRGAKGERGSKSHPNAHARGRVGGLGAQGPSGSSEWEDEQSEYSDIRR

SEQ ID NO: 53212 - protein, 147 aa, Homo sapiens
INPASLPPGDPQLIALIVEQLKSRGLFDSFRRDCLADVDTKPAYQNLRQKVDNFVSTHLDKQEWNPTMNKNQLRNGLRQSVVQSGMLEAGVDRIISQVVDPKLNHIFRPQIERAIHEFLAAQKKAAVPAPPPEPEGQDPPAPSQDTS

SEQ ID NO: 53213 - protein, 266 aa, Homo sapiens
KDRLVKENNYRGHGDSVDQLCWHPSNPDLFVTASGDKTIRIWDVRTTKCIATVNTKGENINICWSPDGQTIAVGNKDDVVTFIDAKTHRSKAEEQFKFEVNEISWNNDNNMFFLTNGNGCINILSYPELKPVQSINAHPSNCICIKFDPMGKYFATGSADALVSLWDVDELVCVRCFSRLDWPVRTLSFSHDGKMLASASEDHFIDIAEVETGDKLWEVQCESPTFTVAWHPKRPLLAFACDDKDGKYDSSREAGTVKLFGLPNDS

SEQ ID NO: 53214 - protein, 4 aa, Homo sapiens
MLGE

SEQ ID NO: 53215 - protein, 1118 aa, Homo sapiens
VPTPEAISSKDTMRLPGAMPALALKGELLLLSLLLLLEPQISQGLVVTPPGPELVLNVSSTFVLTCSGSAPVVWERMSQEPPQEMAKAQDGTFSSVLTLTNLTGLDTGEYFCTHNDSRGLETDERKRLYIFVPDPTVGFLPNDAEELFIFLTEITEITIPCRVTDPQLVVTLHEKKGDVALPVPYDHQRGFSGIFEDRSYICKTTIGDREVDSDAYYVYRLQVSSINVSVNAVQTVVRQGENITLMCIVIGNEVVNFEWTYPRKESGRLVEPVTDFLLDMPYHIRSILHIPSAELEDSGTYTCNVTESVNDHQDEKAINITVVESGYVRLLGEVGTLQFAELHRSRTLQVVFEAYPPPTVLWFKDNRTLGDSSAGEIALSTRNVSETRYVSELTLVRVKVAEAGHYTMRAFHEDAEVQLSFQLQINVPVRVLELSESHPDSGEQTVRCRGRGMPQPNIIWSACRDLKRCPRELPPTLLGNSSEEESQLETNVTYWEEEQEFEVVSTLRLQHVDRPLSVRCTLRNAVGQDTQEVIVVPHSLPFKVVVISAILALVVLTIISLIILIMLWQKKPRYEIRWKVIESVSSDGHEYIYVDPMQLPYDSTWELPRDQLVLGRTLGSGAFGQVVEATAHGLSHSQATMKVAVKMLKSTARSSEKQALMSELKIMSHLGPHLNVVNLLGACTKGGPIYIITEYCRYGDLVDYLHRNKHTFLQHHSDKRRPPSAELYSNALPVGLPLPSHVSLTGESDGGYMDMSKDESVDYVPMLDMKGDVKYADIESSNYMAPYDNYVPSAPERTCRATLINESPVLSYMDLVGFSYQVANGMEFLASKNCVHRDLAARNVLICEGKLVKICDFGLARDIMRDSNYISKGSTFLPLKWMAPESIFNSLYTTLSDVWSFGILLWEIFTLGGTPYPELPMNEQFYNAIKRGYRMAQPAHASDEIYEIMQKCWEEKFEIRPPFSQLVLLLERLLGEGYKKKYQQVDEEFLRSDHPAILRSQARLPGFHGLRSPLDTSSVLYTAVQPNEGDNDYIIPLPDPKPEVADEGPLEGSPSLASSTLNEVNTSSTISCDSPLEPQDEPEPEPQLELQVEPEPELEQLPDSGCPAPRAEAEDSFL

SEQ ID NO: 53216 - protein, 174 aa, Homo sapiens
KGKTRRQKFGYSVNRKRLNRNARRKAAPRIECSHIRHAWDHAKSVRQNLAEMGLAVDPNRAVPLRKRKVKAMEVDIEERPKELVRKPYVLNDLEAEASLPEKKGNTLSRDLIDYVRYMVENHGEDYKAMARDEKNYYQDTPKQIRSKINVYKRFYPAEWQDFLDSLQKRKMEVE

SEQ ID NO: 53217 - protein, 23 aa, Homo sapiens
IICDRLQKEAIRRKLSKRKRLVY

SEQ ID NO: 53218 - protein, 481 aa, Homo sapiens
KRPSEGNYQKEKDLCIKYFDQWSESDQVEFVEHLISRMCHYQHGHINSYLKPMLQRDFITALPEQGLDHIAENILSYLDARSLCAAELVCKEWQRVISEGMLWKKLIERMVRTDPLWKGLSERRGWDQYLFKNRPTDGPPNSFYRSLYPKIIQDIETIESNWRCGRHNLQRIQCRSENSKGVYCLQYDDEKIISGLRDNSIKIWDKTSLECLKVLTGHTGSVLCLQYDERVIVTGSSDSTVRVWDVNTGEVLNTLIHHNEAVLHLRFSNGLMVTCSKDRSIAVWDMASATDITLRRVLVGHRAAVNVVDFDDKYIVSASGDRTIKVWSTSTCEFVRTLNGHKRGIACLQYRDRLVVSGSSDNTIRLWDIECGACLRVLEGHEELVRCIRFDNKRIVSGAYDGKIKVWDLQAALDPRAPASTLCLRTLVEHSGRVFRLQFDEFQIISSSHDDTILIWDFLNVPPSAQNETRSPSRTYTYISR

SEQ ID NO: 53219 - protein, 45 aa, Homo sapiens
LEEDLNQKKREQEMFFKLSEEAECPNPSTPSKAAKFFPYSSADAS

SEQ ID NO: 53220 - protein, 942 aa, Homo sapiens
RFPARGGAPPALPAPRATRTRARPAAGGGAAMPPRRSIVEVKVLDVQKRRVPNKHYVYIIRVTWSSGSTEAIYRRYSKFFDLQMQMLDKFPMEGGQKDPKQRIIPFLPGKILFRRSHIRDVAVKRLIPIDEYCKALIQLPPYISQCDEVLQFFETRPEDLNPPKEEHIGKKKSGGDQTSVDPMVLEQYVVVANYQKQESSEISLSVGQVVDIIEKNESGWWFVSTAEEQGWVPATCLEGQDGVQDEFSLQPEEEEKYTVIYPYTARDQDEMNLERGAVVEVIQKNLEGWWKIRYQGKEGWAPASYLKKNSGEPLPPKPGPGSPSHPGALDLDGVSRQQNAVGREKELLSSQRDGRFEGRPVPDGDAKQRSPKMRQRPPPRRDMTIPRGLNLPKPPIPPQVEEEYYTIAEFQTTIPDGISFQAGLKVEVIEKNLSGWWYIQIEDKEGWAPATFIDKYKKTSNASRPNFLAPLPHEVTQLRLGEAAALENNTGSEATGPSRPLPDAPHGVMDSGLPWSKDWKGSKDVLRKASSDMSASAGYEEISDPDMEEKPSLPPRKESIIKSEGELLERERERQRTEQLRGPTPKPPGVILPMMPAKHIPPARDSRRPEPKPDKSRLFQLKNDMGLECGHKVLAKEVKKPNLRPISKSKTDLPEEKPDATPQNPFLKSRPQVRPKPAPSPKTEPPQGEDQVDICNLRSKLRPAKSQDKSLLDGEGPQAVGGQDVAFSRSFLPGEGPGRAQDRTGKQDGLSPKEISCRAPPRPAKTTDPVSKSVPVPLQEAPQQRPVVPPRRPPPPKKTSSSSRPLPEVRGPQCEGHESRAAPTPGRALLVPPKAKPFLSNSLGGQDDTRGKGSLGPWGTGKIGENREKAAAASVPNADGLKDSLYVAVADFEGDKDTSSFQEGTVFEVREKNSSGWWFCQVLSGAPSWEGWIPSNYLRKKP

SEQ ID NO: 53221 - protein, 16 aa, Homo sapiens
RSSLTNHYKIHIEEDP

SEQ ID NO: 53222 - protein, 43 aa, Homo sapiens
VDELFQKVAEDYVSVAAFQVMTEDKGVDLGQKPNPYFYSCCHH

SEQ ID NO: 53223 - protein, 659 aa, Homo sapiens
LSVRPGPARSMAGVSFSGHRLELLAAYEEVIREESAADWALYTYEDGSDDLKLAASGEGGLQELSGHFENQKVMYGFCSVKDSQAALPKYVLINWVGEDVPDARKCACASHVAKVAEFFQGVDVIVNASSVEDIDAGAIGQRLSNGLARLSSPVLHRLRLREDENAEPVGTTYQKTDAAVEMKRINREQFWEQAKKEEELRKEEERKKALDERLRFEQERMEQERQEQEERERRYREREQQIEEHRRKQQTLEAEEAKRRLKEQSIFGDHRDEEEETHMKKSESEVEEAAAIIAQRPDNPREFFKQQERVASASAGSCDVPSPFNHRPGSHLDSHRRMAPTPIPTRSPSDSSTASTPVAEQIERALDEVTSSQPPPLPPPPPPAQETQEPSPILDSEETRAAAPQAWAGPMEEPPQAQAPPRGPGSPAEDLMFMESAEQAVLAAPVEPATADATEIHDAADTIETDTATADTTVANNVPPAATSLIDLWPGNGEGASTLQGEPRAPTPPSGTEVTLAEVPLLDEVAPEPLLPAGEGCATLLNFDELPEPPATFCDPEEVEGESLAAPQTPTLPSALEELEQEQEPEPHLLTNGETTQKEGTQASEGYFSQSQEEEFAQSEELCAKAPPPVFYNKPPEIDITCWDADPVPEEEEGFEGGD

SEQ ID NO: 53224 - protein, 478 aa, Homo sapiens
TRLPGARRRAAPWPGQAGAGIMDSFKVVLEGPAPWGFRLQGGKDFNVPLSISRLTPGGKAAQAGVAVGDWVLSIDGENAGSLTHIEAQNKIRACGERLSLGLSRAQPVQSKPQKASAPAADPPRYTFAPSVSLNKTARPFGAPPPADSAPQQNGQPLRPLVPDASKQRLMENTEDWRPRPGTGQSRSFRILAHLTGTEFMQDPDEEHLKKSSQVPRTEAPAPASSTPQEPWPGPTAPSPTSRPPWAVDPAFAERYAPDKTSTVLTRHSQPATPTPLQSRTSIVQAAAGGVPGGGSNNGKTPVCHQCHKVIRGRYLVALGHAYHPEEFVCSQCGKVLEEGGFFEEKGAIFCPPCYDVRYAPSCAKCKKKITGEIMHALKMTWHVHCFTCAACKTPIRNRAFYMEEGVPYCERDYEKMFGTKCHGCDFKIDAGDRFLEALGFSWHDTCFVCAICQINLEGKTFYSKKDRPLCKSHAFSHV

SEQ ID NO: 53225 - protein, 53 aa, Homo sapiens
ISFEQILASILTESVLVNFFEKRVDIGLKIKDQKKVERQFSTASDHEQPGVSG

SEQ ID NO: 53226 - protein, 384 aa, Homo sapiens
TALINVTVQEPGRGAPLTFRIDRGRYGLDSPKAEVRGQVLAPLPLHGVADHLGCDPQTRFFVPPNIKQWIALLQRGNCTFKEKISRAAFHNAVAVVIYNNKSKEEPVTMTHPGTGDIIAVMITELRGKDILSYLEKNISVQMTIAVGTRMPPKNFSRGSLVFVSISFIVLMIISSAWLIFYFIQKIRYTNARDRNQRRLGDAAKKAISKLTTRTVKKGDKETDPDFDHCAVCIESYKQNDVVRILPCKHVFHKSCVDPWLSEHCTCPMCKLNILKALGIVPNLPCTDNVAFDMERLTRTQAVNRRSALGDLAGDNSLGLEPLRTSGISPLPQDGELTPRTGEINIAVTKEWFIIASFGLLSALTLCYMIIRATASLNANEVEWF

SEQ ID NO: 53227 - protein, 5 aa, Homo sapiens
IRRMN

SEQ ID NO: 53228 - protein, 99 aa, Homo sapiens
RPFFLLRFTFFEILRQGFCNFLPRPLTVLESLGALGRLCNVYRSGLPAAPPPRLAAHCARPGAPRLASRAVRGPALCRGLQLEQGARARGSPRSRRRAY

SEQ ID NO: 53229 - protein, 6 aa, Homo sapiens
LWTTCL

SEQ ID NO: 53230 - protein, 19 aa, Homo sapiens
LLSALLSMTFPLKHQHIFW

SEQ ID NO: 53231 - protein, 212 aa, Homo sapiens
LENGVFPRWSIEESFNLSDESCGPNPGIVRKKKIAIGVIFSLSKDEDENNKFNEFFFSHFPLFESHMNKLKSAIEQAMKMSRRSADASQRSLAYNRIVDALNEFRTTICNLYTMPRIGEPVWLTMMSGTPEKNHLCYRFMKEFTFLMENASKNQFLPALITAVLTNHLAWVPTVMPNGQPPIKIFLEKHSSQSVDMLAKTHPYNPLWAQLGM

SEQ ID NO: 53232 - protein, 167 aa, Homo sapiens
LLGGYCSSYVPDFVLQGIGSDERFRQCLMSDLSHAVQHPVLDEPIAEAVCIIADMDKWTVQVASSQRRVTDNKLGKEVLVSSLVSNLLHSTLQLYKHNLSPNFCVMHLEDRLQELYFKSKMLSEYLRGQMRVHVKELGVVLGIESSDLPLLAAVASTHSPYVAQILL

SEQ ID NO: 53233 - protein, 30 aa, Homo sapiens
VGFRAEKWEHCGAAASRTWALNIPGECSRE

SEQ ID NO: 53234 - protein, 25 aa, Homo sapiens
KFGARTSGGPGAWLPPNPIVQRRHP

SEQ ID NO: 53235 - protein, 376 aa, Homo sapiens
ITLGALRPAMVMEVGTLDAGGLRALLGERAAQCLLLDCRSFFAFNAGHIAGSVNVRFSTIVRRRAKGAMGLEHIVPNAELRGRLLAGAYHAVVLLDERSAALDGAKRDGTLALAAGALCREARAAQVFFLKGGYEAFSASCPELCSKQSTPMGLSLPLSTSVPDSAESGCSSCSTPLYDQGGPVEILPFLYLGSAYHASRKDMLDALGITALINVSANCPNHFEGHYQYKSIPVEDNHKADISSWFNEAIDFIDSIKNAGGRVFVHCQAGISRSATICLAYLMRTNRVKLDEAFEFVKQRRSIISPNFSFMGQLLQFESQVLAPHCSAEAGSPAMAVLDRGTSTTTVFNFPVSIPVHSTNSALSYLQSPITTSPSC

SEQ ID NO: 53236 - protein, 74 aa, Homo sapiens
ITNNIGSVARMCAVNEKINRVVFVGNFLRVNTLSMKLLAYALDYWSKGQLKALFLEHEGYFGAVGALLGLPNFS

SEQ ID NO: 53237 - protein, 61 aa, Homo sapiens
TPHCARPRSPTRPAGQRGQGALRTWALPAMRSGAAPAPPMELLLLPPPPPGAPRSARAPCA

SEQ ID NO: 53238 - protein, 1201 aa, Homo sapiens
LLCPALLLLLLLLPPPLLPPPPPPANARLAAAADPPGGPLGHGAERILAVPVRTDAQGRLVSHVVSAATSRAGVRARRAAPVRTPSFPGGNEEEPGSHLFYNVTVFGRDLHLRLRPNARLVAPGATMEWQGEKGTTRVEPLLGSCLYVGDVAGLAEASSVALSNCDGLAGLIRMEEEEFFIEPLEKGLAAQEAEQGRVHVVYRRPPTSPPLGGPQALDTGASLDSLDSLSRALGVLEEHANSSRRRARRHAADDDYNIEVLLGVDDSVVQFHGKEHVQKYLLTLMNIVNEIYHDESLGAHINVVLVRIILLSYGKSMSLIEIGNPSQSLENVCRWAYLQQKPDTGHDEYHDHAIFLTRQDFGPSGMQGYAPVTGMCHPVRSCTLNHEDGFSSAFVVAHETGHVLGMEHDGQGNRCGDEVRLGSIMAPLVQAAFHRFHWSRCSQQELSRYLHSYDCLLDDPFAHDWPALPQLPGLHYSMNEQCRFDFGLGYMMCTAFRTFDPCKQLWCSHPDNPYFCKTKKGPPLDGTMCAPGKHCFKGHCIWLTPDILKRDGSWGAWSPFGSCSRTCGTGVKFRTRQCDNPHPANGGRTCSGLAYDFQLCSRQDCPDSLADFREEQCRQWDLYFEHGDAQHHWLPHEHRDAKERCHLYCESRETGEVVSMKRMVHDGTRCSYKDAFSLCVRGDCRKVGCDGVIGSSKQEDKCGVCGGDNSHCKVVKGTFTRSPKKHGYIKMFEIPAGARHLLIQEVDATSHHLAVKNLETGKFILNEENDVDASSKTFIAMGVEWEYRDEDGRETLQTMGPLHGTITVLVIPVGDTRVSLTYKYMIHEDSLNVDDNNVLEEDSVVYEWALKKWSPCSKPCGGGSQFTKYGCRRRLDHKMVHRGFCAALSKPKAIRRACNPQECSQPVWVTGEWEPCSQTCGRTGMQVRSVRCIQPLHDNTTRSVHAKHCNDARPESRRACSRELCPGRWRAGPWSQCSVTCGNGTQERPVLCRTADDSFGICQEERPETARTCRLGPCPRNISDPSKKSYVVQWLSRPDPDSPIRKISSKGHCQGDKSIFCRMEVLSRYCSIPGYNKLCCKSCNLYNNLTNVEGRIEPPPGKHNDIDVFMPTLPVPTVAMEVRPSPSTPLEVPLNASSTNATEDHPETNAVDEPYKIHGLEDEVQPPNLIPRRPSPYEKTRNQRIQELIDEMRKKEMLGKF

SEQ ID NO: 53239 - protein, 59 aa, Homo sapiens
LAVTSSTMSRSLAETCTCGCGPTPASWRPGPLWSGRARRAPPAWSPCSGAVSTSETWPA

SEQ ID NO: 53240 - protein, 23 aa, Homo sapiens
VLVSLSHPVPSSSLQRHTLSPPP

SEQ ID NO: 53241 - protein, 58 aa, Homo sapiens
MEHPPPLPNSRLFHLPEYTWRLPCGGVRNPNQSSQVMDPPTARPTEPESPKNDREGPQ

SEQ ID NO: 53242 - protein, 222 aa, Homo sapiens
VCELDENNTPMCVCQDPTSCPAPIGEFEKVCSNDNKTFDSSCHFFATKCTLEGTKKGHKLHLDYIGPCKYIPPCLDSELTEFPLRMRDWLKNVLVTLYERDEDNNLLTEKQKLRVKKIHENEKRLEAGDHPVELLARDFEKNYNMYIFPVHWQFGQLDQHPIDGYLSHTELAPLRAPLIPMEHCTTRFFETCDLDNDKYIALDEWAGCFGIKQKDIDKDLVI

SEQ ID NO: 53243 - protein, 224 aa, Homo sapiens
IVYAHQEPKSFNGSLKNVAVDELSRQGCTVTVSDLYAMNLEPRATDKDITGTLSNPEVFNYGVETHEAYKQRSLASDITDEQKKVREADLVIFQFPLYWFSVPAILKGWMDRVLCQGFAFDIPGFYDSGLLQGKLALLSVTTGGTAEMYTKTGVNGDSRYFLWPLQHGTLHFCGFKVLAPQISFAPEIASEEERKGMVAAWSQRLQTIWKEEPIPCTAHWHFGQ

SEQ ID NO: 53244 - protein, 618 aa, Homo sapiens
IEHNEALLEEAKMMNRLRHSRVVKLLGVIIEEGKYSLVMEYMEKGNLMHVLKAEMSTPLSVKGRIILEIIEGMCYLHGKGVIHKDLKPENILVDNDFHIKIADLGLASFKMWSKLNNEEHNELREVDGTAKKNGGTLYYMAPEHLNDVNAKPTEKSDVYSFAVVLWAIFANKEPYENAICEQQLIMCIKSGNRPDVDDITEYCPREIISLMKLCWEANPEARPTFPGIEEKFRPFYLSQLEESVEEDVKSLKKEYSNENAVVKRMQSLQLDCVAVPSSRSNSATEQPGSLHSSQGLGMGPVEESWFAPSLEHPQEENEPSLQSKLQDEANYHLYGSRMDRQTKQQPRQNVAYNREEERRRRVSHDPFAQQRPYENFQNTEGKGTAYSSAASHGNAVHQPSGLTSQPQVLYQNNGLYSSHGFGTRPLDPGTAGPRVWYRPIPSHMPSLHNIPVPETNYLGNTPTMPFSSLPPTDESIKYTIYNSTGIQIGAYNYMEIGGTSSSLLDSTNTNFKEEPAAKYQAIFDNTTSLTDKHLDPIRENLGKHWKNCARKLGFTQSQIDEIDHDYERDGLKEKVYQMLQKWVMREGIKGATVGKLAQALHQCSRIDLLSSLIYVSQN

SEQ ID NO: 53245 - protein, 37 aa, Homo sapiens
IHKHVKGSRLHLMPEGKHNLHLRFADEFNKLAEDFLQ

SEQ ID NO: 53246 - protein, 840 aa, Homo sapiens
KGKLELVDNKITTKKRSKSRSKERTRHRSDKKKSKGGIEIVKEKTTRSKSKERKKSKSPSKRSKSQDQARKSKSPTLRRRSQEKIGKARSPTDDKVKIEDKSKSKDRKKSPIINESRSRDRGKKSRSPVDLRGKSKDRRSRSKERKSKRSETDKEKKPIKSPSKDASSGKENRSPSRRPGRSPKRRSLSPKPRDKSRRSRSPLLNDRRSKQSKSPSRTLSPGRRAKSRSLERKRREPERRRLSSPRTRPRDDILSRRERSKDASPINRWSPTRRRSRSPIRRRSRSPLRRSRSPRRRSRSPRRRDRGRRSRSRLRRRSRSRGGRRRRSRSKVKEDKFKGSLSEGMKVEQESSSDDNLEDFDVEEEDEEALIEQRRIQRQAIVQKYKYLAEDSNMSVPSEPSSPQSSTRTRSPSPDDILERVAADVKEYERENVDTFEASVKAKHNLMTVEQNNGSSQKKLLAPDMFTESDDMFAAYFDSARLRAAGIGKDFKENPNLRDNWTDAEGYYRVNIGEVLDKRYNVYGYTGQGVFSNVVRARDNARANQEVAVKIIRNNELMQKTGLKELEFLKKLNDADPDDKFHCLRLFRHFYHKQHLCLVFEPLSMNLREVLKKYGKDVGLHIKAVRSYSQQLFLALKLLKRCNILHADIKPDNILVNESKTILKLCDFGSASHVADNDITPYLVSRFYRAPEIIIGKSYDYGIDMWSVGCTLYELYTGKILFPGKTNNHMLKLAMDLKGKMPNKMIRKGVFKDQHFDQNLNFMYIEVDKVTEREKVTVMSTINPTKDLLADLIGCQRLPEDQRKKVHQLKDLLDQILMLDPAKRISINQALQHAFIQEKI

SEQ ID NO: 53247 - protein, 37 aa, Homo sapiens
LMALRERRMKATNEDFKKSKENVLYKKQEGTPEGLSL

SEQ ID NO: 53248 - protein, 97 aa, Homo sapiens [sequence omitted]

SEQ ID NO: 53249 - protein, 12 aa, Homo sapiens
IAFAITAIKGVG

SEQ ID NO: 53250 - protein, 101 aa, Homo sapiens
KVKFQPLSKYPAVINDISFWLPSENYAENDFYDLVRTIGGDLVEKVDLIDKFVHPKTHKTSHCYRITYRHMERTLSQREVRHIHQALQEAAVQLLGVEGRF

SEQ ID NO: 53251 - protein, 112 aa, Homo sapiens
KPLFPLVPLHWFGFGYTALVVSGGIVGYVKTGSVPSLAAGLLFGSLAGLGAYQLYQDPRNVWGFLAATSVTFVGVMGMRSYYYGKFMPVGLIAGASLLMAAKVGVRMLMTSD

SEQ ID NO: 53252 - skipped

SEQ ID NO: 53253 - protein, 16 aa, Homo sapiens
LAAPGILKFWAFLRRL

SEQ ID NO: 53254 - protein, 51 aa, Homo sapiens
INSTFCPCGHTVCCESCAAQLQSCPVCRSRVEHVQHVYLPTHTSLLNLTVI

SEQ ID NO: 53255 - protein, 38 aa, Homo sapiens
MNILIPQDGDYREFPIPEQFKTAWDGSKLITEPAEIMA

SEQ ID NO: 53256 - protein, 54 aa, Homo sapiens
LSSGSHTSAASQCDSASSRMVLPMPRLHQDCALRMSVGLALLGLLFAFFVKVYN

SEQ ID NO: 53257 - protein, 181 aa, Homo sapiens
KRVYLFGGLGTSSSPVGGVGAGADPSDPLGLYEEEGAGCSPDAPSLSGRSSAASSPAAGRSPADHRGYASLRAASPAPSSAPSHASSSASSHSSSSSSSGSSSSDDEFEDDLLDLNPSSNFESMSLGSFSSSSALDRDLDFNFEPGSGSHFEFPDYCTPEVSEMISGDWLESSISNLVFTY

SEQ ID NO: 53258 - protein, 46 aa, Homo sapiens
LESSLEEDHRIFWLITGIMFMGSGLIWRRLLSFLGRQLEAPLPPMV

SEQ ID NO: 53259 - protein, 141 aa, Homo sapiens
TMTSMTQSLREVIKAMTKARNFERVLGKITLVSAAPGKVICEMKVEEEHTNAIGTLHGGLTATLVDNISTMALLCTERGAPGVSVDMNITYMSPAKLGEDIVITAHVLKQGKTLAFTSVDLTNKATGKLIAQGRHTKHLGN

SEQ ID NO: 53260 - protein, 210 aa, Homo sapiens
IMNPSMKQKQEEIKENIKNSSVPRRTLKMIQPSASGSLVGRENELSAGLSKRKHRNDHLTSTTSSPGVIVPESSENKNLGGVTQESFDLMIKENPSSQYWKEVAEKRRKALYEALKENEKLHKEIEQKDNEIARLKKENKELAEVAEHVQYMAELIERLNGEPLDNFESLDNQEFDSEEETVEDSLVEDSEIGTCAEGTVSSSTDAKPCI

SEQ ID NO: 53261 - protein, 8 aa, Homo sapiens
IADCGQLE

SEQ ID NO: 53262 - protein, 60 aa, Homo sapiens
LIPPNMPCTRTGKNNVLIVCVPNPPIDEKNATMPVTMLIRVKTSEDADELHKILLEKKDA

SEQ ID NO: 53263 - protein, 347 aa, Homo sapiens
LEPPRELRKRGEAASGSGAELQEQAGCEAPEAAAPRERPARLSAREYSRQVHEWLWQSYCGYLTWHSGLAAFPAYCSPQPSPQSFPSGGAAVPQAAAPPPPQLGYYNPFYFLSPGAAGPDPRTAAGISTPAPVAGLGPRAPHVQASVRATPVTRVGSAAPSRSPSETGRQAGREYVIPSLAHRFMAEMVDFFILFFIKATIVLSIMHLSGIKDISKFAMHYIIEEIDEDTSMEDLQKMMVVALIYRLLVCFYEIICIWGAGGATPGKFLLGLRVVTCDTSVLIAPSRVLVIPSSNVSITTSTIRALIKNFSIASFFPAFITLLFFQHNRTAYDIVAGTIVVKRNGVR

SEQ ID NO: 53264 - protein, 68 aa, Homo sapiens
IGSSECSDTDSEEQGDHARPKKHTTDPDIDKKERKKMVKEAQREKRKNKIPKHVKKRKEKTAKTKKGK

SEQ ID NO: 53265 - protein, 2184 aa, Homo sapiens
VQPELKYGDGIQLTRSRELDECFAQANDQMEILDSLIREMRQMGQPCDAYQKRLLQLQEQMRALYKAISVPRVRRASSKGGGGYTCQSGSGWDEFTKHVTSECLGWMRQQRAEMDMVAWGVDLASVEQHINSHRGIHNSIGDYRWQLDKIKADLREKSAIYQLEEEYENLLKASFERMDHLRQLQNIIQATSREIMWINDCEEEELLYDWSDKNTNIAQKQEAFSIRMSQLEVKEKELNKLKQESDQLVLNQHPASDKIEAYMDTLQTQWSWILQITKCIDVHLKENAAYFQFFEEAQSTEAYLKGLQDSIRKKYPCDKNMPLQHLLEQIKELEKEREKILEYKRQVQNLVNKSKKIVQLKPRNPDYRSNKPIILRALCDYKQDQKIVHKGDECILKDNNERSKWYVTGPGGVDMLVPSVGLIIPPPNPLAVDLSCKIEQYYEAILALWNQLYINMKSLVSWHYCMIDIEKIRAMTIAKLKTMRQEDYMKTIADLELHYQEFIRNSQGSEMFGDDDKRKIQSQFTDAQKHYQTLVIQLPGYPQHQTVTTTEITHHGTCQDVNHNKVIETNRENDKQETWMLMELQKIRRQIEHCEGRMTLKNLPLADQGSSHHITVKINELKSVQNDSQAIAEVLNQLKDMLANFRGSEKYCYLQNEVFGLFQKLENINGVTDGYLNSLCTVRALLQAILQTEDMLKVYEARLTEEETVCLDLDKVEAYRCGLKKIKNDLNLKKSLLATMKTELQKAQQIHSQTSQQYPLYDLDLGKFGEKVTQLTDRWQRIDKQIDFRLWDLEKQIKQLRNYRDNYQAFCKWLYDAKRRQDSLESMKFGDSNTVMRFLNEQKNLHSEISGKRDKSEEVQKIAELCANSIKDYELQLASYTSGLETLLNIPIKRTMIQSPSGVILQEAADVHARYIELLTRSGDYYRFLSEMLKSLEDLKLKNTKIEVLEEELRLARDANSENCNKNKFLDQNLQKYQAECSQFKAKLASLEELKRQAELDGKSAKQNLDKCYGQIKELNEKITRLTYEIEDEKRRRKSVEDRFDQQKNDYDQLQKARQCEKENLGWQKLESEKAIKEKEYEIERLRVLLQEEGTRKREYENELAKASNRIQESKNQCTQVVQERESLLVKIKVLEQDKARLQRLEDELNRAKSTLEAETRVKQRLECEKQQIQNDLNQWKTQYSRKEEAIRKIESEREKSEREKNSLRSEIERLQAEIKRIEERCRRKLEDSTRETQSQLETERSRYQREIDKLRQRPYGSHRETQTECEWTVDTSKLVFDGLRKKVTAMQLYECQLIDKTTLDKLLKGKKSVEEVASEIQPFLRGAGSIAGASASPKEKYSLVEAKRKKLISPESTVMLLEAQAATGGIIDPHRNEKLTVDSAIARDLIDFDDRQQIYAAEKAITGFDDPFSGKTVSVSEAIKKNLIDRETGMRLLEAQIASGGVVDPVNSVFLPKDVALARGLIDRDLYRSLNDPRDSQKNFVDPVTKKKVSYVQLKERCRIEPHTGLLLLSVQKRSMSFQGIRQPVTVTELVDSGILRPSTVNELESGQISYDEVGERIKDFLQGSSCIAGIYNETTKQKLGIYEAMKIGLVRPGTALELLEAQAATGFIVDPVSNLRLPVEEAYKRGLVGIEFKEKLLSAERAVTGYNDPETGNIISLFQAMNKELIEKGHGIRLLEAQIATGGIIDPKESHRLPVDIAYKRGYFNEELSEILSDPSDDTKGFFDPNTEENLTYLQLKERCIKDEETGLCLLPLKEKKKQVQTSQKNTLRKRRVVIVDPETNKEMSVQEAYKKGLIDYETFKELCEQECEWEEITITGSDGSTRVVLVDRKTGSQYDIQDAIDKGLVDRKFFDQYRSGSLSLTQFADMISLKNGVGTSSSMGSGVSDDVFSSSRHESVSKISTISSVRNLTIRSSSFSDTLEESSPIAAIFDTENLEKISITEGIERGIVDSITGQRLLEAQACTGGIIHPTTGQKLSLQDAVSQGVIDQDMATRLKPAQKAFIGFEGVKGKKKMSAAEAVKEKWLPYEAGQRFLEFQYLTGGLVDPEVHGRISTEEAIRKGFIDGRAAQRLQDTSSYAKILTCPKTKLKISYKDAINRSMVEDITGLRLLEAASVSSKGLPSPYNMSSAPGSRSGSRSGSRSGSRSGSRSGSRRGSFDATGNSSYSYSYSFSSSSIGH

SEQ ID NO: 53266 - protein, 1192 aa, Homo sapiens
LRNEHFQKAIEDKSRSLNESKIEIERLQSLTENLTKEHLMLEEELRNLRLEYDDLRRGRSEADSDKNATILELRSQLQISNNRTLELQGLINDLQRERENLRQEIEKFQKQALEASNRIQESKNQCTQVVQERESLLVKIKVLEQDKARLQRLEDELNRAKSTLEAETRVKQRLECEKQQIQNDLNQWKTQYSRKEEAIRKIESEREKSEREKNSLRSEIERLQAEIKRIEERCRRKLEDSTRETQSQLETERSRYQREIDKLRQRPYGSHRETQTECEWTVDTSKLVFDGLRKKVTAMQLYECQLIDKTTLDKLLKGKKSVEEVASEIQPFLRGAGSIAGASASPKEKYSLVEAKRKKLISPESTVMLLEAQAATGGIIDPHRNEKLTVDSAIARDLIDFDDRQQIYAAEKAITGFDDPFSGKTVSVSEAIKKNLIDRETGMRLLEAQIASGGVVDPVNSVFLPKDVALARGLIDRDLYRSLNDPRDSQKNFVDPVTKKKVSYVQLKERCRIEPHTGLLLLSVQKRSMSFQGIRQPVTVTELVDSGILRPSTVNELESGQISYDEVGERIKDFLQGSSCIAGIYNETTKQKLGIYEAMKIGLVRPGTALELLEAQAATGFIVDPVSNLRLPVEEAYKRGLVGIEFKEKLLSAERAVTGYNDPETGNIISLFQAMNKELIEKGHGIRLLEAQIATGGIIDPKESHRLPVDIAYKRGYFNEELSEILSDPSDDTKGFFDPNTEENLTYLQLKERCIKDEETGLCLLPLKEKKKQVQTSQKNTLRKRRVVIVDPETNKEMSVQEAYKKGLIDYETFKELCEQECEWEEITITGSDGSTRVVLVDRKTGSQYDIQDAIDKGLVDRKFFDQYRSGSLSLTQFADMISLKNGVGTSSSMGSGVSDDVFSSSRHESVSKISTISSVRNLTIRSSSFSDTLEESSPIAAIFDTENLEKISITEGIERGIVDSITGQRLLEAQACTGGIIHPTTGQKLSLQDAVSQGVIDQDMATRLKPAQKAFIGFEGVKGKKKMSAAEAVKEKWLPYEAGQRFLEFQYLTGGLVDPEVHGRISTEEAIRKGFIDGRAAQRLQDTSSYAKILTCPKTKLKISYKDAINRSMVEDITGLRLLEAASVSSKGLPSPYNMSSAPGSRSGSRSGSRSGSRSGSRSGSRRGSFDATGNSSYSYSYSFSSSSIGH

SEQ ID NO: 53267 - protein, 62 aa, Homo sapiens
IAQDFKTDLRFQSSAVMALQEACEAYLVGLFEDTNLCAIHAKRVTIMPKDIQLARRIRGERA

SEQ ID NO: 53268 - protein, 74 aa, Homo sapiens
ITKPAIRRLARRGGVKRISGLIYEETRGVLKVFLENVIRDAVTYTEHAKRKTVTAMDVVYALKRQGRTLYGFGG

SEQ ID NO: 53269 - protein, 127 aa, Homo sapiens
TMPEPTKSAPAPKKGSKKAVTKAQKKDGKKRKRSRKESYSVYVYKVLKQVHPDTGISSKAMGIMNSFVNDIFERIAGEASRLAHYNKRSTITSREIQTAVRLLLPGELAKHAVSEGTKAVTKYTSSK

SEQ ID NO: 53270 - protein, 4 aa, Homo sapiens
MENY

SEQ ID NO: 53271 - protein, 9 aa, Homo sapiens
MEKNILTCC

SEQ ID NO: 53272 - protein, 27 aa, Homo sapiens
TCAKRGRTSSKRETSRRIAMEKNILTC

SEQ ID NO: 53273 - protein, 87 aa, Homo sapiens
VYVYKVLKQVHPDTGISSKAMGIMNSFVNDIFERIAGEASRLAHYNKRSTITSREIQTAVRLLLPGELAKHAVSEGTKAVTKYTSSK

SEQ ID NO: 53274 - protein, 56 aa, Homo sapiens
RAWRAREGGLGTQAGSAASSGHGAARSGSRVTTLSPLGETYLVLTTTDKGLNGPGR

SEQ ID NO: 53275 - protein, 85 aa, Homo sapiens
IRRYQKSTELLIRKLPFQRLVREIAQDFKTDLRFQSSAVMALQEACEAYLVGLFEDTNLCAIHAKRVTIMPKDIQLARRIRGERA

SEQ ID NO: 53276 - protein, 103 aa, Homo sapiens
VGRVHRLLRKGNYAERVGAGAPVYLAAVLEYLTAEILELAGNAARDNKKTRIIPRHLQLAIRNDEELNKLLGKVTIAQGGVLPNIQAVLLPKKTESHHKAKGK

SEQ ID NO: 53277 - protein, 44 aa, Homo sapiens
KVFLENVIRDAVTYTEHAKRKTVTAMDVVYALKRQGRTLYGFGG

SEQ ID NO: 53278 - protein, 35 aa, Homo sapiens
VGLFEDTNLCAIHAKRVTIMPKDIQLARRIRGERA

SEQ ID NO: 53279 - protein, 61 aa, Homo sapiens
MSYKCNECERSFTQNTGLIEHQKIHTGEKPYQCNACGKGFTRISYLVQHQRSHVGKNILSQ

SEQ ID NO: 53280 - protein, 108 aa, Homo sapiens
INKAQKKDGKKRKRSRKESYSVYVYKVLKQVHPDTGISSKAMGIMNSFVNDIFERIAGEASRLAHYNKRSTITSREIQTAVRLLLPGELAKHAVSEGTKAVTKYTSSK

SEQ ID NO: 53281 - protein, 94 aa, Homo sapiens
KGNYAERVGAGAPVYLAAVLEYLTAEILELAGNAARDNKKTRIIPRHLQLAIRNDEELNKLLGKVTIAQGGVLPNIQAVLLPKKTESHHKAKGK

SEQ ID NO: 53282 - protein, 106 aa, Homo sapiens
KAQKKDGKKRKRSRKESYSIYVYKVLKQVHPDTGISSKAMGIMNSFVNDIFERIAGEASRLAHYNKRSTITSREIQTAVRLLLPGELAKHAVSEGTKAVTKYTSSK

SEQ ID NO: 53283 - protein, 82 aa, Homo sapiens
RAFSQKSGLIEHQRIHTGERPYKCKECGKAFNGNTGLIQHLRIHTGEKPYQCNECGKAFIQRSSLIRHQRIHSGEKSESISV

SEQ ID NO: 53284 - protein, 98 aa, Homo sapiens
MYGCDVGPDGRFLRGYEQHAYDGKDYIALNEDLRSWTAADMAAQITKRKWEAARRAEQLRAYLEGEFVEWLRRYLENGKETLQRADPPQDTYDPPPHL

SEQ ID NO: 53285 - protein, 153 aa, Homo sapiens
KTHMTHHPISDHEATLRCWALGFYPAEITLTWQRDGEDQTQDTELVETRPAGDGTFQKWAAVVVPSGEEQRYTCHVQHEGLPEPLTLRWEPSSQPNVPIVGIVAGLVLLVAVVTGAVVAAVMWRKKSSDRKGGSYSQAASSNSAQGSDVSLTA

SEQ ID NO: 53286 - protein, 92 aa, Homo sapiens
TVTCIRCGFNINVRDFEGKVVKTSVVFHQLGTAMPMSVEEGPECQGPVVDRRCPRCGHEGMAYHTRQMRSADEGQTVFYTCTNCKFQEKEDS

SEQ ID NO: 53287 - protein, 49 aa, Homo sapiens
LATTLNPIPLLLDLSDRKREGCLIPLPPLLPVLSLSHGRGRGWAERDRH

SEQ ID NO: 53288 - protein, 87 aa, Homo sapiens
KVEWTSDTVDNEHMGRRSSKCCCIYEKPRAFGESSTESDEEEEEGCGHTHCVRGHRKGRRRATLGPTPTTPPQPPDPSQPPPGPMQH

SEQ ID NO: 53289 - protein, 21 aa, Homo sapiens
VFDVTSRVTYKNVPNWHRDLV

SEQ ID NO: 53290 - protein, 9 aa, Homo sapiens
IESYLQECA

SEQ ID NO: 53291 - protein, 69 aa, Homo sapiens
RGSFHKEQRNPRRLKSWSLIKNTCPPKDDPQVMEDKSDRPVCRHFAKKGHCRYEDLCAFYHPGVNGPPL

SEQ ID NO: 53292 - protein, 180 aa, Homo sapiens
TLLLLLTGKLTPTHGEMRKNHRLKIGFFNQQYAEQLRMEETPTEYLQRGFNLPYQDARKCLGRFGLESHAHTIQICKLSGGQKARVVFAELACREPDVLILDEPTNNLDIESIDALGEAINEYKGAVIVVSHDARLITETNCQLWVVEEQSVSQIDGDFEDYKREVLEALGEVMVSRPRE

SEQ ID NO: 53293 - protein, 87 aa, Homo sapiens
LGGFVHYGEVTNDFVMLKGCVVGTKKWVLTLRKTLLVQTKQRALEKIDLKFIDTHSKFGHGRFQTMEEKKAFMGPLKKDRIAKEEGA

SEQ ID NO: 53294 - protein, 79 aa, Homo sapiens
IKGGSFRLLQEGQALEYVCPSGFYPYPVQTRTCRSTGSWSTLKTQDQKTVRKAECRGLRAMSVGSGLRQKQGRRQQGQD

SEQ ID NO: 53295 - protein, 90 aa, Homo sapiens
VVTPRFLCTGGVSPYADPNTCRGDSGGPLIVHKRSRFIQVGVISWGVVDVCKNQKRQKQVPAHARDFHINLFQVLPWLKEKLQDEDLGFL

SEQ ID NO: 53296 - protein, 6 aa, Homo sapiens
IEPWLS

SEQ ID NO: 53297 - protein, 170 aa, Homo sapiens
VFDKLSPLHERIYCALSGSAADAQAVADMAAYQLELHGIELEEPPLVLAAANVVRNISYKYREDLSAHLMVAGWDQREGGQVYGTLGGMLTRQPFAIGGSGSTFIYGYVDAAYKPGMSPEECRRFTTDAIALAMSRDGSSGGVIYLVTITAAGVDHRVILGNELPKFYDE

SEQ ID NO: 53298 - protein, 18 aa, Homo sapiens
RYFSHVPRRSEPESQGFE

SEQ ID NO: 53299 - protein, 58 aa, Homo sapiens
LSSNLGGPGSSRTPPTGRSFSGLNSRLKATPSTYSGVFRTQRVDLYQQVKEKPLWPQL

SEQ ID NO: 53300 - protein, 614 aa, Homo sapiens
IIANDQGNRTTPSYVAFTDTERLIGDAAKNQVALNPQNTVFDAKRLIGRKFGDPVVQSDMKHWPFQVINDGDKPKVQVSYKGETKAFYPEEISSMVLTKMKEIAEAYLGYPVTNAVITVPAYFNDSQRQATKDAGVIAGLNVLRIINEPTAAAIAYGLDRTGKGERNVLIFDLGGGTFDVSILTIDDGIFEVKATAGDTHLGGEDFDNRLVNHFVEEFKRKHKKDISQNKRAVRRLRTACERAKRTLSSSTQASLEIDSLFEGIDFYTSITRARFEELCSDLFRSTLEPVEKALRDAKLDKAQIHDLVLVGGSTRIPKVQKLLQDFFNGRDLNKSINPDEAVAYGAAVQAAILMGDKSENVQDLLLLDVAPLSLGLETAGGVMTALIKRNSTIPTKQTQIFTTYSDNQPGVLIQVYEGERAMTKDNNLLGRFELSGIPPAPRGVPQIEVTFDIDANGILNVTATDKSTGKANKITITNDKGRLSKEEIERMVQEAEKYKAEDEVQRERVSAKNALESYAFNMKSAVEDEGLKGKISEADKKKVLDKCQEVISWLDANTLAEKDEFEHKRKELEQVCNPIISGLYQGAGGPGPGGFGAQGPKGGSGSGPTIEEVD

SEQ ID NO: 53301 - protein, 667 aa, Homo sapiens
LSSCRGSRPPFPAPSLRAEPTEQGTGMAKAAAIGIDLGTTYSCVGVFQHGKVEIIANDQGNRTTPSYVAFTDTERLIGDAAKNQVALNPQNTVFDAKRLIGRKFGDPVVQSDMKHWPFQVINDGDKPKVQVSYKGETKAFYPEEISSMVLTKMKEIAEAYLGYPVTNAVITVPAYFNDSQRQATKDAGVIAGLNVLRIINEPTAAAIAYGLDRTGKGERNVLIFDLGGGTFDVSILTIDDGIFEVKATAGDTHLGGEDFDNRLVNHFVEEFKRKHKKDISQNKRAVRRLRTACERAKRTLSSSTQASLEIDSLFEGIDFYTSITRARFEELCSDLFRSTLEPVEKALRDAKLDKAQIHDLVLVGGSTRIPKVQKLLQDFFNGRDLNKSINPDEAVAYGAAVQAAILMGDKSENVQDLLLLDVAPLSLGLETAGGVMTALIKRNSTIPTKQTQIFTTYSDNQPGVLIQVYEGERAMTKDNNLLGRFELSGIPPAPRGVPQIEVTFDIDANGILNVTATDKSTGKANKITITNDKGRLSKEEIERMVQEAEKYKAEDEVQRERVSAKNALESYAFNMKSAVEDEGLKGKISEADKKKVLDKCQEVISWLDANTLAEKDEFEHKRKELEQVCNPIISGLYQGAGGPGPGGFGAQGPKGGSGSGPTIEEVD

SEQ ID NO: 53302 - protein, 7 aa, Homo sapiens
VLSLSKE

SEQ ID NO: 53303 - protein, 25 aa, Homo sapiens
INKKGNFNYIEFTCILKHGAKDKDD

SEQ ID NO: 53304 - protein, 53 aa, Homo sapiens
KLKHHLTEHMKTHAGALHACPHCGRRFRVHACFLRHRDLCKGQGWATAHWTYK

SEQ ID NO: 53305 - protein, 21 aa, Homo sapiens
IRLEMAFVPAYDWSQRAVQTP

SEQ ID NO: 53306 - protein, 155 aa, Homo sapiens
KRQLSLDINKLPGEKLGRVVHIIQAREPSLRDSNPEEIEIDFETLKPSTLRELERYVLSCLRKKPRKPYTIKKPVGKTKEELALEKKRELEKRLQDVSGQLNSTKKPPKKANEKTESSSAQQVAVSRLSASSSSSDSSSSSSSSSSSDTSDSDSG

SEQ ID NO: 53307 - protein, 470 aa, Homo sapiens
VMARGLGAPHWVAVGLLTWATLGLLVAGLGGHDDLHDDLQEDFHGHSHRHSHEDFHHGHSHAHGHGHTHESIWHGHTHDHDHGHSHEDLHHGHSHGYSHESLYHRGHGHDHEHSHGGYGESGAPGIKQDLDAVTLWAYALGATVLISAAPFFVLFLIPVESNSPRHRSLLQILLSFASGGLLGDAFLHLIPHALEPHSHHTLEQPGHGHSHSGQGPILSVGLWVLSGIVAFLVVEKFVRHVKGGHGHSHGHGHAHSHTRGSHGHGRQERSTKEKQSSEEEEKETRGVQKRRGGSTVPKDGPVRPQNAEEEKRGLDLRVSGYLNLAADLAHNFTDGLAIGASFRGGRGLGILTTMTVLLHEVPHEVGDFAILVQSGCSKKQAMRLQLLTAVGALAGTACALLTEGGAVGSEIAGGAGPGWVLPFTAGGFIYVATVSVLPELLREASPLQSLLEVLGLLGGVIMMVLIAHLE

SEQ ID NO: 53308 - protein, 132 aa, Homo sapiens
KGEYCQTRYVKTTGNATVDHLSKYLALRIALERRQQQEAGEPGGPGGGASDTGGPDGCGGEGGGAGGGDGPEEPALPSLEGVSEKQYTIYIAPGGGAFTTLNGSLTLELVNEKFWKVSRPLELCYAPTKDPK

SEQ ID NO: 53309 - protein, 43 aa, Homo sapiens
LALRPSDRPTFEEIQNHPWMQDVLLPQETAEIHLHSLSPGPSK

SEQ ID NO: 53310 - protein, 118 aa, Homo sapiens
KNKELEQTKEEKEKMQAQKEEVLSHMNDVLENELQCIICSEYFIEAVTLNCAHSFCSYCINEWMKRKIECPICRKDIKSKTYSLVLDNCINKMVNNLSSEVKERRIVLIRERKAKRLF

SEQ ID NO: 53311 - protein, 340 aa, Homo sapiens
MIRSNESHCSLQIKALAKIHAFVQDTTLSEPRQAEIRKECLRLWGIPDQARVAPSSSDPKSKFFELIQGTEIDIFSYKPTLLTSKTLEKIRPVFDYRCMVSGSEQKFLIGLGKSQIYTWDGRQSDRWIKLDLKTELPRDTLLSVEIVHELKGEGKAQRKISAIHILDVLVLNGTDVREQHFNQRIQLAEKFVKAVSKPSRPDMNPIRVKEVYRLEEMEKIFVRLEMKIIKGSSGTPKLSYTGRDDRHFVPMGLYIVRTVNEPWTMGFSKSFKKKFFYNKKTKDSTFDLPADSIAPFHICYYGRLFWEWGDGIRVHDSQKPQDQDKLSKEDVLSFIQMHRA

SEQ ID NO: 53312 - protein, 42 aa, Homo sapiens
VSALRSGEVFDKDLCKLKRSRKRSGSQALEVTRERAINRLNY

SEQ ID NO: 53313 - protein, 44 aa, Homo sapiens
VLGLYEYDDLKQKKKMAMSVKLYGTGDQEAWQKGVLFASGQNLA

SEQ ID NO: 53314 - protein, 140 aa, Homo sapiens
VDSEQLSRDCDALMAGCIQEARERWNFDFVTETPLEGDFAWERVRGLGLPKLYLPTGPRRGRDELGGGRRPGTSPALLQGTAEEDHVDLSLSCTLVPRSGEQAEGSPGGPGDSQGRKRRQTSMTDFYHSKRRLIFSKRKP

SEQ ID NO: 53315 - protein, 351 aa, Homo sapiens
ILEDMDLAANEISIYDKLSETVDLVRQTGHQCGMSEKAIEKFIRQLLEKNEPQRPPPQYPLLIVVYKVLATLGLILLTAYFVIQPFSPLAPEPVLSGAHTWRSLIHHIRLMSLPIAKKYMSENKGVPLHGGDEDRPFPDFDPWWTNDCEQNESEPIPANCTGCAQKHLKVMLLEDAPRKFERLHPLVIKTGKPLLEEEIQHFLCQYPEATEGFSEGFFAKWWRCFPERWFPFPYPWRRPLNRSQMLRELFPVFTHLPFPKDASLNKCSFLHPEPVVGSKMHKMPDLFIIGSGEAMLQLIPPFQCRRHCQSVAMPIEPGDIGYVDTTHWKVYVIARGVQPLVICDGTAFSEL

SEQ ID NO: 53316 - protein, 12 aa, Homo sapiens
MEETSEQITNVT

SEQ ID NO: 53317 - protein, 466 aa, Homo sapiens
LATMHGSCSFLMLLLPLLLLLVATTGPVGALTDEEKRLMVELHNLYRAQVSPTASDMLHMRWDEELAAFAKAYARQCVWGHNKERGRRGENLFAITDEGMDVPLAMEEWHHEREHYNLSAATCSPGQMCGHYTQVVWAKTERIGCGSHFCEKLQGVEETNIELLVCNYEPPGNVKGKRPYQEGTPCSQCPSGYHCKNSLCEPIGSPEDAQDLPYLVTEAPSFRATEASDSRKMGTPSSLATGIPAFLVTEVSGSLATKALPAVETQAPTSLATKDPPSMATEAPPCVTTEVPSILAAHSLPSLDEEPVTFPKSTHVPIPKSADKVTDKTKVPSRSPENSLDPKMSLTGARELLPHAQEEAEAEAELPPSSEVLASVFPAQDKPGELQATLDHTGHTSSKSLPNFPNTSATANATGGRALALQSSLPGAEGPDKPSVVSGLNSGPGHVWGPLLGLLLLPPLVLAGIF

SEQ ID NO: 53318 - protein, 1009 aa, Homo sapiens
LAARPAPAAGPPVAPAMGSGRVPGLCLLVLLVHARAAQYSKAAQDVDECVEGTDNCHIDAICQNTPRSYKCICKSGYTGDGKHCKDVDECEREDNAGCVHDCVNIPGNYRCTCYDGFHLAHDGHNCLDVDECAEGNGGCQQSCVNMMGSYECHCREGFFLSDNQHTCIQRPEEGMNCMNKNHGCAHICRETPKGGIACECRPGFELTKNQRDCKLTCNYGNGGCQHTCDDTEQGPRCGCHIKFVLHTDGKTCIETCAVNNGGCDSKCHDAATGVHCTCPVGFMLQPDRKTCKDIDECRLNNGGCDHICRNTVGSFECSCKKGYKLLINERNCQDIDECSFDRTCDHICVNTPGSFQCLCHRGYLLYGITHCGDVDECSINRGGCRFGCINTPGSYQCTCPAGQGRLHWNGKDCTEPLKCQGSPGASKAMLSCNRSGKKDTCALTCPSRARFLPESENGFTVSCGTPSPRAAPARAGHNGNSTNSNHCHEAAVLSIKQRASFKIKDAKCRLHLRNKGKTEEAGRITGPGGAPCSECQVTFIHLKCDSSRKGKGRRARTPPGKEVTRLTLELEAEVRAEETTASCGLPCLRQRMERRLKGSLKMLRKSINQDRFLLRLAGLDYELAHKPGLVAGERAEPMESCRPGQHRAGTKCVSCPQGTYYHGQTEQCVPCPAGTFQEREGQLSCDLCPGSDAHGPLGATNVTTCAGQCPPGQHSVDGFKPCQPCPRGTYQPEAGRTLCFPCGGGLTTKHEGAISFQDCDTKVQCSPGHYYNTSIHRCIRCAMGSYQPDFRQNFCSRCPGNTSTDFDGSTSVAQCKNRQCGGELGEFTGYIESPNYPGNYPAGVECIWNINPPPKRKILIVVPEIFLPSEDECGDVLVMRKNSSPSSITTYETCQTYERPIAFTARSRKLWINFKTSEANSARGFQIPYVTYDEDYEQLVEDIVRDGRLYASENHQEILKDKKLIKAFFEVLAHPQNYFKYTEKHKEMLPKSFIKLLRSKVSSFLRPYK

SEQ ID NO: 53319 - protein, 5 aa, Homo sapiens
MPSWL

SEQ ID NO: 53320 - protein, 24 aa, Homo sapiens
INVATAAMQQGAVTLETTVSESGC

SEQ ID NO: 53321 - protein, 15 aa, Homo sapiens
MHVRGARASSVVRSA

SEQ ID NO: 53322 - protein, 63 aa, Homo sapiens
LTEMLQSYISEIGRSAKSYCEHTARTQPTLSDIVVTLVEMGFNVDTLPAYAKRSQRMVITARK

SEQ ID NO: 53323 - protein, 238 aa, Homo sapiens
IPLVPENLLKKRKAYQALKATQAKQALLAKKEQKKGKGLRFKRLESFLHDSWRQKRDKVRLRRLEVKPHALELPDKHSLAFVVRIERIDGVSLLVQRTIARLRLKKIFSGVFVKVTPQNLKMLRIVEPYVTWGFPNLKSVRELILKRGQAKVKNKTIPLTDNTVIEEHLGKFGVICLEDLIHEIAFPGKHFQEISWFLCPFHLSVARHATKNRVGFLKEMGTPGYRGERINQLIRQLN

SEQ ID NO: 53324 - protein, 531 aa, Homo sapiens
IKYSGGPQIVKKERRQSSSRFNLSKNRELQKLPALKDSPTQEREELFIQKLRQCCVLFDFVSDPLSDLKFKEVKRAGLNEMVEYITHSRDVVTEAIYPEAVTMFSVNLFRTLPPSSNPTGAEFDPEEDEPTLEAAWPHLQLVYEFFLRFLESPDFQPNIAKKYIDQKFVLALLDLFDSEDPRERDFLKTILHRIYGKFLGLRAYIRRQINHIFYRFIYETEHHNGIAELLEILGSIINGFALPLKEEHKMFLIRVLLPLHKVKSLSVYHPQLAYCVVQFLEKESSLTEPVIVGLLKFWPKTHSPKEVMFLNELEEILDVIEPSEFSKVMEPLFRQLAKCVSSPHFQVAERALYYWNNEYIMSLISDNAARVLPIMFPALYRNSKSHWNKTIHGLIYNALKLFMEMNQKLFDDCTQQYKAEKQKGRFRMKEREEMWQKIEELARLNPQYPMFRAPPPLPPVYSMETETPTAEDIQLLKRTVETEAVQMLKDIKKEKVLLRRKSELPQDVYTIKALEAHKRAEEFLTASQEAL

SEQ ID NO: 53325 - protein, 113 aa, Homo sapiens
KFNPVSFTWKKIEPKGKGPCPRRRQCCCIVGDKIVLFGGTSPSPEEGLGDEFDLIDHSDLHILDFSPSLKTLCKLAVIQYNLDQSCLPHDIRWELNAMTTNSNISRPIVSSHG

SEQ ID NO: 53326 - protein, 40 aa, Homo sapiens
LALAEKFKELKRSKKLENFLSRKRRRNAGKDRRHLPLSKE

SEQ ID NO: 53327 - protein, 157 aa, Homo sapiens
IRPVHDDILIAQLRPGQEIDLLMHCVKGIGKDHAKFSPVATASYRLLPDITLLEPVEGEAAEELSRCFSPGVIEVQEVQGKKVARVANPRLDTFSREIFRNEKLKKVVRLARVRDHYIFSVESTGVLPPDVLVSEAIKVLMGKCRRFLDELDAVQMD

SEQ ID NO: 53328 - protein, 67 aa, Homo sapiens
MPEHMDYHFALELQKSFLQPHSSNPQVVSAVSHQGKRNPKSPLACTNKRPRPEGMQTLESFFKPLTH

SEQ ID NO: 53329 - protein, 194 aa, Homo sapiens [sequence omitted]

SEQ ID NO: 53330 - protein, 39 aa, Homo sapiens
LFVQDPQTCKCSCKNTDSRCKARQLELNERTCRCDKPRR

SEQ ID NO: 53331 - protein, 49 aa, Homo sapiens
ILLFFLTTPAIIITTMDKFNVTKPVEYLNVRPHAPVTFHAGSQHTDTRP

SEQ ID NO: 53332 - protein, 104 aa, Homo sapiens
IATLPMDLIGFGYAALVTFGSIFGYKRRGGVPSLIAGLFVGCLAGYGAYRVSNDKRDVKVSLFTAFFLATIMGVRFKRSKKIMPAGLVAGLSLMMILRLVLLLL

SEQ ID NO: 53333 - protein, 24 aa, Homo sapiens
KMAAVRRARSYCRCLVRFSDRELC

SEQ ID NO: 53334 - protein, 52 aa, Homo sapiens
RFNKLIWIHHSCHITYKSTGETAVSAFEIDKMYTPLFFARVRSYTAFSERPL

SEQ ID NO: 53335 - protein, 1086 aa, Homo sapiens
LRARRAPSAPFPEPAAMGAARGSPARPRRLPLLSVLLLPLLGGTQTAIVFIKQPSSQDALQGRRALLRCEVEAPGPVHVYWLLDGAPVQDTERRFAQGSSLSFAAVDRLQDSGTFQCVARDDVTGEEARSANASFNIKWIEAGPVVLKHPASEAEIQPQTQVTLRCHIDGHPRPTYQWFRDGTPLSDGQSNHTVSSKERNLTLRPAGPEHSGLYSCCAHSAFGQACSSQNFTLSIADESFARVVLAPQDVVVARYEEAMFHCQFSAQPPPSLQWLFEDETPITNRSRPPHLRRATVFANGSLLLTQVRPRNAGIYRCIGQGQRGPPIILEATLHLAEIEDMPLFEPRVFTAGSEERVTCLPPKGLPEPSVWWEHAGVRLPTHGRVYQKGHELVLANIAESDAGVYTCHAANLAGQRRQDVNITVATVPSWLKKPQDSQLEEGKPGYLDCLTQATPKPTVVWYRNQMLISEDSRFEVFKNGTLRINSVEVYDGTWYRCMSSTPAGSIEAQARVQVLEKLKFTPPPQPQQCMEFDKEATVPCSATGREKPTIKWERADGSSLPEWVTDNAGTLHFARVTRDDAGNYTCIASNGPQGQIRAHVQLTVAVFITFKVEPERTTVYQGHTALLQCEAQGDPKPLIQWKGKDRILDPTKLGPRMHIFQNGSLVIHDVAPEDSGRYTCIAGNSCNIKHTEAPLYVVDKPVPEESEGPGSPPPYKMIQTIGLSVGAAVAYIIAVLGLMFYCKKRCKAKRLQKQPEGEEPEMECLNGGPLQNGQPSAEIQEEVALTSLGSGPAATNKRHSTSDKMHFPRSSLQPITTLGKSEFGEVFLAKAQGLEEGVAETLVLVKSLQSKDEQQQLDFRRELEMFGKLNHANVVRLLGLCREAEPHYMVLEYVDLGDLKQFLRISKSKDEKLKSQPLSTKQKVALCTQVALGMEHLSNNRFVHKDLAARNCLVSAQRQVKVSALGLSKDVYNSEYYHFRQAWVPLRWMSPEAILEGDFSTKSDVWAFGVLMWEVFTHGEMPHGGQADDEVLADLQAGKARLPQPEGCPSKLYRLMQRCWALSPKDRPSFSEIASALGDSTVDSKP

SEQ ID NO: 53336 - protein, 78 aa, Homo sapiens
LNAFSQAPSTMQVSHSQVQEPGGVPQVFLTASSGTVQIPVSAVQLHQMAVIGQQAGSSSNLTELQVVNLDTAHSTKSE

SEQ ID NO: 53337 - protein, 98 aa, Homo sapiens
IYKAKKIVSTIAINSAEAERGFNLMNIICTRVRNSLTIDHVSDLMTINLLGKELADWDATPFVKSWSNCNHRLATDTRVRQKSTKVFHENQLAIWNLK

SEQ ID NO: 53338 - protein, 77 aa, Homo sapiens
LELENQFKKTQRPAHILNPHHLEGDMMCALLNSISDTTKECDSDDNMGAKNTSIGEEFISTEDVELEEAIRRSLEEM

SEQ ID NO: 53339 - protein, 12 aa, Homo sapiens
MEGLEDYFSEDS

SEQ ID NO: 53340 - protein, 22 aa, Homo sapiens
LRDDDKNNDGYIDYAEFAKSLQ

SEQ ID NO: 53341 - protein, 43 aa, Homo sapiens
IRPQSSMSKHIPQFCGVLGHTFMEFLKGSGDYCQAQHDLYADK

SEQ ID NO: 53342 - protein, 157 aa, Homo sapiens
MRFLITHNPTNATLNKFIEELKKYGVTTIVRVCEATYDTTLVEKEGIHVLDWPFDDGAPPSNQIVDDWLSLVKIKFREEPGCCIAVHCVAGLGRAPVLVALALIEGGMKYEDAVQFIRQKRRGAFNSKQLLYLEKYRPKMRLRFKDSNGHRNNCCIQ

SEQ ID NO: 53343 - protein, 5 aa, Homo sapiens
LYKSK

SEQ ID NO: 53344 - protein, 420 aa, Homo sapiens
IGVFICIRCAGIHRNLGVHISRVKSVNLDQWTAEQIQCMQDMGNTKARLLYEANLPENFRRPQTDQAVEFFIRDKYEKKKYYDKNAIAITNISSSDAPLQPLVSSPSLQAAVDKNKLEKEKEKKKEEKKREKEPEKPAKPLTAEKLQKKDQQLEPKKSTSPKKAAEPTVDLLGLDGPAVAPVTNGNTTVPPLNDDLDIFGPMISNPLPATVMPPAQGTPSAPAAATLSTVTSGDLDLFTEQTTKSEEVAKKQLSKDSILSLYGTGTIQQQSTPGVFMGPTNIPFTSQAPAAFQGFPSMGVPVPAAPGLIGNVMGQSPSMMVGMPMPNGFMGNAQTGVMPLPQNVVGPQGGMVGQMGAPQSKFGLPQAQQPQWSLSQMNQQMAGMSISSATPTAGFGQPSSTTAGWSGSSSGQTLSTQLWK

SEQ ID NO: 53345 - protein, 77 aa, Homo sapiens
IKPRRYLTVVFEHDAWFIFFMAAFAFSNGYLASLCMCFGPKKVKPAEAETAGAIMAFFLCLGLALGAVFSFLFRAIV

SEQ ID NO: 53346 - protein, 736 aa, Homo sapiens
LLTITYNPFLFKMPEEVHHGEEEVETFAFQAEIAQLMSLIINTFYSNKEIFLRELISNASDALDKIRYESLTDPSKLDSGKELKIDIIPNPQERTLTLVDTGIGMTKADLINNLGTIAKSGTKAFMEALQAGADISMIGQFGVGFYSAYLVAEKVVVITKHNDDEQYAWESSAGGSFTVRADHGEPIGRGTKVILHLKEDQTEYLEERRVKEVVKKHSQFIGYPITLYLEKEREKEISDDEAEEEKGEKEEEDKDDEEKPKIEDVGSDEEDDSGKDKKKKTKKIKEKYIDQEELNKTKPIWTRNPDDITQEEYGEFYKSLTNDWEDHLAVKHFSVEGQLEFRALLFIPRRAPFDLFENKKKKNNIKLYVRRVFIMDSCDELIPEYLNFIRGVVDSEDLPLNISREMLQQSKILKVIRKNIVKKCLELFSELAEDKENYKKFYEAFSKNLKLGIHEDSTNRRRLSELLRYHTSQSGDEMTSLSEYVSRMKETQKSIYYITGESKEQVANSAFVERVRKRGFEVVYMTEPIDEYCVQQLKEFDGKSLVSVTKEGLELPEDEEEKKKMEESKAKFENLCKLMKEILDKKVEKVTISNRLVSSPCCIVTSTYGWTANMERIMKAQALRDNSTMGYMMAKKHLEINPDHPIVETLRQKAEADKNDKAVKDLVVLLFETALLSSGFSLEDPQTHSNRIYRMIKLGLGIDEDEVAAEEPNAAVPDEIPPLEGDEDASRMEEVD

SEQ ID NO: 53347 - protein, 228 aa, Homo sapiens
IKKEMITMLHYDLLHHPYEPSGNKKGKTVGFGTNNSEHITYLEHNPYEKFSKEELKKAQDVLVQEMEVVKQGMSHGELSSEAYNQVWEECYSQVLYLPGQSRYTRANLASKKDRIESLEKRLEINRGHMTTEAKRAAKMEKKMKILLGGYQSRAMGLMKQLNDLWDQIEQAHLELRTFEELKKHEDSAIPRRLECLKEDVQRQQEREKELQHRYADLLLEKETLKSKF

SEQ ID NO: 53348 - protein, 78 aa, Homo sapiens
LQYVESFFENPILSFELPMNLANWFPPPRMRTKREEIRNIILKLQEDQSKEKRKHKDTYSTEAPLGEGTEQYVNSISD

SEQ ID NO: 53349 - protein, 34 aa, Homo sapiens
IWERCGGIQYLQNAIESRQARPTYATAMLQSLLK

SEQ ID NO: 53350 - protein, 240 aa, Homo sapiens
IFPAFDQIVNEAAKYRYRSGDLFNCGSLTIRSPWGCVGHGALYHSQSPEAFFAHCPGIKVVIPRSPFQAKGLLLSCIEDKNPCIFFEPKILYRAAAEEVPIEPYNIPLSQAEVIQEGSDVTLVAWGTQVHVIREVASMAKEKLGVSCEVIDLRTIIPWDVDTICKSVIKTGRLLISHEAPLTGGFASEISSTVQEECFLNLEAPISRVCGYDTPFPHIFEPFYIPDKWKCYDALRKMINY

SEQ ID NO: 53351 - protein, 403 aa, Homo sapiens
LARLALVLLGWVSSSSPTSSASSFSSSAPFLASAVSAQPPLPDQCPALCECSEAARTVKCVNRNLTEVPTDLPAYVRNLFLTGNQLAVLPAGAFARRPPLAELAALNLSGSRLDEVRAGAFEHLPSLRQLDLSHNPLADLSPFAFSGSNASVSAPSPLVELILNHIVPPEDERQNRSFEGMVVAALLAGRALQGLRRLELASNHFLYLPRDVLAQLPSLRHLDLSNNSLVSLTYVSFRNLTHLESLHLEDNALKVLHNGTLAELQGLPHIRVFLDNNPWVCDCHMADMVTWLKETEVVQGKDRLTCAYPEKMRNRVLLELNSADLDCDPILPPSLQTSYVFLGIVLALIGAIFLLVLYLNRKGIKKWMHNIRDACRDHMEGYHYRYEINADPRLTNLSSNSDV

SEQ ID NO: 53352 - protein, 30 aa, Homo sapiens
LKKLEVHSNDPDMSVMKDISIGKATGRGQY

SEQ ID NO: 53353 - protein, 325 aa, Homo sapiens
KLYCLAVMTLMAAVYTIALRYTRTSDKELYFSTTAVCITEVIKLLLSVGILAKETGSLGRFKASLRENVLGSPKELLKLSVPSLVYAVQNNMAFLALSNLDAAVYQVTYQLKIPCTALCTVLMLNRTLSKLQWVSVFMLCAGVTLVQWKPAQATKVVVEQNPLLGFGAIAIAVLCSGFAGVYFEKVLKSSDTSLWVRNIQMYLSGIIVTLAGVYLSDGAEIKEKGFFYGYTYYVWFVIFLASVGGLYTSVVVKYTDNIMKGFSAAAAIVLSTIASVMLFGLQITLTFALGTLLVCVSIYLYGLPRQDTTSIQQGETASKERVIGV

SEQ ID NO: 53354 - protein, 63 aa, Homo sapiens
KTHYSMDSLSSWYMTVTQKTDPKMLSKKRTTSSQWQSPPVVVILKDMESFATKVLQDFIIISR

SEQ ID NO: 53355 - protein, 101 aa, Homo sapiens
KNEALKSEEGCIPNIAPDICIAYKLHLECSRLINLVDWSEAFATVVTAAEKMDANSATSEEMNEIIHARFIRAVSELELLGFIKPTKQKTDHVARLTWGGC

SEQ ID NO: 53356 - protein, 69 aa, Homo sapiens
INLVDWSEAFATVVTAAEKMDANSATSEEMNEIIHARFIRAVSELELLGFIKPTKQKTDHVARLTWGGC

SEQ ID NO: 53357 - protein, 42 aa, Homo sapiens
MRSLISSSVQMIIDEDPSLVPEAIQGGTFGFNSSANVPTEEF

SEQ ID NO: 53358 - protein, 8 aa, Homo sapiens
LKKDPPRP

SEQ ID NO: 53359 - protein, 249 aa, Homo sapiens
LGAVLWPAAGAWELTILHTNDVHSRLEQTSEDSSKCVNASRCMGGVARLFTKVQQIRRAEPNVLLLDAGDQYQGTIWFTVYKGAEVAHFMNALRYDAMALGNHEFDNGVEGLIEPLLKEAKFPILSANIKAKGPLASQISGLYLPYKVLPVGDEVVGIVGYTSKETPFLSNPGTNLVFEDEITALQPEVDKLKTLNVNKIIALGHSGFEMDKLIAQKVRGVDVVVGGHSNTFLYTGNCFKRIAWARMSR

SEQ ID NO: 53360 - protein, 555 aa, Homo sapiens
LWPAAGAWELTILHTNDVHSRLEQTSEDSSKCVNASRCMGGVARLFTKVQQIRRAEPNVLLLDAGDQYQGTIWFTVYKGAEVAHFMNALRYDAMALGNHEFDNGVEGLIEPLLKEAKFPILSANIKAKGPLASQISGLYLPYKVLPVGDEVVGIVGYTSKETPFLSNPGTNLVFEDEITALQPEVDKLKTLNVNKIIALGHSGFEMDKLIAQKVRGVDVVVGGHSNTFLYTGNPPSKEVPAGKYPFIVTSDDGRKVPVVQAYAFGKYLGYLKIEFDERGNVISSHGNPILLNSSIPEDPSIKADINKWRIKLDNYSTQELGKTIVYLDGSSQSCRFRECNMGNLICDAMINNNLRHTDEMFWNHVSMCILNGGGIRSPIDERNNGTITWENLAAVLPFGGTFDLVQLKGSTLKKAFEHSVHRYGQSTGEFLQVGGIHVVYDLSRKPGDRVVKLDVLCTKCRVPSYDPLKMDEVYKVILPNFLANGGDGFQMIKDELLRHDSGDQDINVVSTYISKMKVIYPAVEGRIKFSTGSHCHGSFSLIFLSLWAVIFVLYQ

SEQ ID NO: 53361 - protein, 150 aa, Homo sapiens
RKEVLKSKMGKSEKIALPHGQLVHGIHLYEQPKINRQKSKYNLPLTKITSAKRNENNFWQDSVSSDRIQKQEKKPFKNTENIKNSHLKKSAFLTEVSQKENYAGAKFSDPPSPSVLPKPPSHWMGSTVENSNQNRELMAVHLKTLLKVQT

SEQ ID NO: 53362 - protein, 4 aa, Homo sapiens
RAPG

SEQ ID NO: 53363 - protein, 15 aa, Homo sapiens
RSEAPNWATQDSGFY

SEQ ID NO: 53364 - protein, 741 aa, Homo sapiens
KEYITPAQISKEMRDELHVRGGRVNIVDLQQVINVDLIHIENRIGDIIKSEKHVQLVLGQLIDENYLDRLAEEVNDKLQESGQVTISELCKTYDLPGNFLTQALTQRLGRIISGHIDLDNRGVIFTEAFVARHKARIRGLFSAITRPTAVNSLISKYGFQEQLLYSVLEELVNSGRLRGTVVGGRQDKAVFVPDIYSRTQSTWVDSFFRQNGYLEFDALSRLGIPDAVSYIKKRYKTTQLLFLKAACVGQGLVDQVEASVEEAISSGTWVDIAPLLPTSLSVEDAAILLQQVMRAFSKQASTVVFSDTVVVSEKFINDCTELFRELMHQKAEKEMKNNPVHLITEEDLKQISTLESVSTSKKDKKDERRRKATEGSGSMRGGGGGNAREYKIKKVKKKGRKDDDSDDESQSSHTGKKKPEISFMFQDEIEDFLRKHIQDAPEEFISELAEYLIKPLNKTYLEVVRSVFMSSTTSASGTGRKRTIKDLQEEVSNLYNNIRLFEKGMKFFADDTQAALTKHLLKSVCTDITNLIFNFLASDLMMAVDDPAAITSEIRKKILSKLSEETKVALTKLHNSLNEKSIEDFISCLDSAAEACDIMVKRGDKKRERQILFQHRQALAEQLKVTEDPALILHLTSVLLFQFSTHSMLHAPGRCVPQIIAFLNSKIPEDQHALLVKYQGLVVKQLVSQSKKTGQGDYPLNNELDKEQEDVASTTRKELQELSSSIKDLVLKSRKSSVTEE

SEQ ID NO: 53365 - protein, 7 aa, Homo sapiens
LYGTYEF

SEQ ID NO: 53366 - protein, 67 aa, Homo sapiens
IRKVVEVFKPGKFVTTLFVNQSSKCRTVLASPQKIEGFKRLDCQSAMFNDYNFVFTSFAKKQQQQQS

SEQ ID NO: 53367 - protein, 100 aa, Homo sapiens
KEGEENIGGVEWLQIKDNDFSYRPNMICNFLHENEDEEVVASAPDKSLELEEEEIQMNDSSNLSCEQEKPMHLEIEDSGPLIDIPSETEGSVFMETQMLP

SEQ ID NO: 53368 - protein, 303 aa, Homo sapiens
LDRVVKPKTKRAKRFLEKREPKLNENIKNAMLIKGGNANATVTKVLKDVYALKKPYGVLYKKKNITRPFEDQTSLEFFSKKSDCSLFMFGSHNKKRPNNLVIGRMYDYHVLDMIELGIENFVSLKDIKNSKCPEGTKPMLIFAGDDFDVTEDYRRLKSLLIDFFRGPTVSNIRLAGLEYVLHFTALNGKIYFRSYKLLLKKSGCRTPRIELEEMGPSLDLVLRRTHLASDDLYKLSMKMPKALKPKKKKNISHDTFGTTYGRIHMQKQDLSKLQTRKMKGLKKRPAERITEDHEKKSKRIKKN

SEQ ID NO: 53369 - protein, 47 aa, Homo sapiens
IPGVTPAAIINLLRFVKTTQRRQSAMNESSKTDQYLCDADRLQEREL

SEQ ID NO: 53370 - protein, 1382 aa, Homo sapiens
KTASNLTVSVLEAEGVFEKGSFKTLTLPSLPLNSADEIYELRVTGRTQDEILFSNSTRLSFETKRISVFIQTDKALYKPKQEVKFRIVTLFSDFKPYKTSLNILIKDPKSNLIQQWLSQQSDLGVISKTFQLSSHPILGDWSIQVQVNDQTYYQSFQVSEYVLPKFEVTLQTPLYCSMNSKHLNGTITAKYTYGKPVKGDVTLTFLPLSFWGKKKNITKTFKINGSANFSFNDEEMKNVMDSSNGLSEYLDLSSPGPVEILTTVTESVTGISRNVSTNVFFKQHDYIIEFFDYTTVLKPSLNFTATVKVTRADGNQLTLEERRNNVVITVTQRNYTEYWSGSNSGNQKMEAVQKINYTVPQSGTFKIEFPILEDSSELQLKAYFLGSKSSMAVHSLFKSPSKTYIQLKTRDENIKVGSPFELVVSGNKRLKELSYMVVSRGQLVAVGKQNSTMFSLTPENSWTPKACVIVYYIEDDGEIISDVLKIPVQLVFKNKIKLYWSKVKAEPSEKVSLRISVTQPDSIVGIVAVDKSVNLMNASNDITMENVVHELELYNTGYYLGMFMNSFAVFQECGLWVLTDANLTKDYIDGVYDNAEYAERFMEENEGHIVDIHDFSLGSSPHVRKHFPETWIWLDTNMGYRIYQEFEVTVPDSITSWVATGFVISEDLGLGLTTTPVELQAFQPFFIFLNLPYSVIRGEEFALEITIFNYLKDATEVKVIIEKSDKFDILMTSNEINATGHQQTLLVPSEDGATVLFPIRPTHLGEIPITVTALSPTASDAVTQMILVKAEGIEKSYSQSILLDLTDNRLQSTLKTLSFSFPPNTVTGSERVQITAIGDVLGPSINGLASLIRMPYGCGEQNMINFAPNIYILDYLTKKKQLTDNLKEKALSFMRQGYQRELLYQREDGSFSAFGNYDPSGSTWLSAFVLRCFLEADPYIDIDQNVLHRTYTWLKGHQKSNGEFWDPGRVIHSELQGGNKSPVTLTAYIVTSLLGYRKYQPNIDVQESIHFLESEFSRGISDNYTLALITYALSSVGSPKAKEALNMLTWRAEQEGGMQFWVSSESKLSDSWQPRSLDIEVAAYALLSHFLQFQTSEGIPIMRWLSRQRNSLGGFASTQDTTVALKALSEFAALMNTERTNIQVTVTGPSSPSPVKFLIDTHNRLLLQTAELAVVQPTAVNISANGFGFAICQLNVVYNVKASGSSRRRRSIQNQEAFDLDVAVKENKDDLNHVDLNVCTSFSGPGRSGMALMEVNLLSGFMVPSEAISLSETVKKVEYDHGKLNLYLDSVNETQFCVNIPAVRNFKVSNTQDASVSIVDYYEPRRQAVRSYNSEVKLSSCDLCSDVQGCRPCEDGASGSHHHSSVIFIFCFKLLYFMELWL

SEQ ID NO: 53371 - protein, 466 aa, Homo sapiens
KYVIMAKFRRRTCIILALFILFIFSLMMGLKMLRPNTATFGAPFGLDLLPELHQRTIHLGKNFDFQKSDRINSETNTKNLKSVEITMKPSKASELNLDELPPLNNYLHVFYYSWYGNPQFDGKYIHWNHPVLEHWDPRIAKNYPQGRHNPPDDIGSSFYPELGSYSSRDPSVIETHMRQMRSASIGVLALSWYPPDVNDENGEPTDNLVPTILDKAHKYNLKVTFHIEPYSNRDDQNMYKNVKYIIDKYGNHPAFYRYKTKTGNALPMFYVYDSYITKPEKWANLLTTSGSRSIRNSPYDGLFIALLVEEKHKYDILQSGFDGIYTYFATNGFTYGSSHQNWASLKLFCDKYNLIFIPSVGPGYIDTSIRPWNTQNTRNRINGKYYEIGLSAALQTRPSLISITSFNEWHEGTQIEKAVPKRTSNTVYLDYRPHKPGLYLELTRKWSEKYSKERATYALDRQLPVS

SEQ ID NO: 53372 - protein, 158 aa, Homo sapiens
KYMMLGKQTPSGTTCHCIVDSCGSRMRELARALGGSSTLMGGRAEKPPGGGLSPWTIATSIPRAVAAQPRRRQPCRQPPNQLTTVPPSSPSGLAAPRHAAVMSWMRGRTSVHAPILTPAQSVAACRPSWQAQSWMKSRTMMRLSRPCSTAAQPACHLQ

SEQ ID NO: 53373 - protein, 209 aa, Homo sapiens
ITVTSEAGENDETVQTTLKFTYSEKYPDEAPLYEIFSQENLEDNDVSDILKLLALQAEENLGMVMIFTLVTAVQEKLNEIVDQIKTRREEEKKQKEKEAEEAEKQLFHGTPVTIENFLNWKAKFDAELLEIKKKRMKEEEQAGKNKLSGKQLFETDHNLDTSDIQFLEDAGNNVEVDESLFQEMDDLELEDDEDDPDYNPADPESDSAD

SEQ ID NO: 53374 - protein, 103 aa, Homo sapiens
LSPEDGKADIVRAAQDFCQLVAQKQKRPTDLDVDTLASLLSSNGCPDPDLVLKFGPVDSTLGFLPWHIRLTEIVSLPSHLNISYEDFFSALRQYAACEQRLGK

SEQ ID NO: 53375 - protein, 157 aa, Homo sapiens
MAKSKNHTTHNQSRKWHRNGIKKPRSQRYESLKGVDPKFLRNMRFAKKHNKKGLKKMQANNAKAMSARAEAIKALVKPKEVKPKIPKGVSCKLDRHAYVAHPKLGKRALARIAKGLRLCRPKAKAKAKDQTKAQAAAPASVPAQAPKGTQAPTKASE

SEQ ID NO: 53376 - protein, 32 aa, Homo sapiens
KKNKHKRKKVKLAVLKYYKVDENGKISCLRRE

SEQ ID NO: 53377 - protein, 348 aa, Homo sapiens
LFPLLDLLSFFVEEASMGAQFSKTAAKGEAAAERPGEAAVASSPSKANGQENGHVKVNGDASPAAAESGAKEELQANGSAPAADKEEPAAAGSGAASPSAAEKGEPAAAAAPEAGASPVEKEAPAEGEAAEPGSPTAAEGEAASAASSTSSPKAEDGATPSPSNETPKKKKKRFSFKKSFKLSGFSFKKNKKEAGEGGEAEAPAAEGGKDEAAGGAAAAAAEAGAASGEQAAAPGEEAAAGEEGAAGGDPQEAKPQEAAVAPEKPPASDETKAAEEPSKVEEKKAEEAGASAAACEAPSAAGPGAPPEQEAAPAEEPAAAAASSACAAPSQEAQPECSPEAPPAEAAE

SEQ ID NO: 53378 - protein, 180 aa, Homo sapiens
LPSLDKPGWYSQGNAVHLYELLKKMTGKPEPKVVYFGDSMHSDIFPARHYSNWETVLILEELRGDEGTRSQRPEESEPLEKKGKYEGPKAKPLNTSSKKWGSFFIDSVLGLENTEDSLVYTWSCKRISTYSTIAIPSIEAIAELPLDYKFTRFSSSNSKTAGYYPNPPLVLSSDETLISK

SEQ ID NO: 53379 - protein, 21 aa, Homo sapiens
LGADLSKMVWLPWRFGDLMPR

SEQ ID NO: 53380 - protein, 965 aa, Homo sapiens
IWRSDATMRTHTRGAPSVFFIYLLCFVSAYITDENPEVMIPFTNANYDSHPMLYFSRAEVAELQLRAASSHEHIAARLTEAVHTMLSSPLEYLPPWDPKDYSARWNEIFGNNLGALAMFCVLYPENIEARDMAKDYMERMAAQPSWLVKDAPWDEVPLAHSLVGFATAYDFLYNYLSKTQQEKFLEVIANASGYMYETSYRRGWGFQYLHNHQPTNCMALLTGSLVLMNQGYLQEAYLWTKQVLTIMEKSLVLLREVTDGSLYEGVAYGSYTTRSLFQYMFLVQRHFNINHFGHPWLKQHFAFMYRTILPGFQRTVAIADSNYNWFYGPESQLVFLDKFVMRNGSGNWLADQIRRNRVVEGPGTPSKGQRWCTLHTEFLWYDGSLKSVPPPDFGTPTLHYFEDWGVVTYGSALPAEINRSFLSFKSGKLGGRAIYDIVHRNKYKDWIKGWRNFNAGHEHPDQNSFTFAPNGVPFITEALYGPKYTFFNNVLMFSPAVSKSCFSPWVGQVTEDCSSKWSKYKHDLAASCQGRVVAAEEKNGVVFIRGEGVGAYNPQLNLKNVQRNLILLHPQLLLLVDQIHLGEESPLETAASFFHNVDVPFEETVVDGVHGAFIRQRDGLYKMYWMDDTGYSEKATFASVTYPRGYPYNGTNYVNVTMHLRSPITRAAYLFIGPSIDVQSFTVHGDSQQLDVFIATSKHAYATYLWTGEATGQSAFAQVIADRHKILFDRNSAIKSSIVPEVKDYAAIVEQNLQHFKPVFQLLEKQILSRVRNTASFRKTAERLLRFSDKRQTEEAIDRIFAISQQQQQQSKSKKNRRAGKRYKFVDAVPDIFAQIEVNEKKIRQKAQILAQKELPIDEDEEMKDLLDFADVTYEKHKNGGLIKGRFGQARMVTTTHSRAPSLSASYTRLFLILNIAIFFVMLAMQLTYFQRAQSLHGQRCLYAVLLIDSCILLWLYSSCSQSQC

SEQ ID NO: 53381 - protein, 159 aa, Homo sapiens
LLDYLDSIDCSLEDFQAMLSGRQFSIDPDLLVDSENKGLETTKNNVVQPVSEEGRKSKSKPDKQLIQYTAFPLLAFLDGNPASSVEQASTTASSEVLSSVDKPIEVDELLDSSLDPEPTQSKLVRLEPLTEAEASEATLFYLCELAPAPLDSDMPLLDS

SEQ ID NO: 53382 - protein, 117 aa, Homo sapiens
KNNVVQPVSEEGRKSKSKPDKQLIQYTAFPLLAFLDGNPASSVEQASTTASSEVLSSVDKPIEVDELLDSSLDPEPTQSKLVRLEPLTEAEASEATLFYLCELAPAPLDSDMPLLDS

SEQ ID NO: 53383 - protein, 98 aa, Homo sapiens
LPLRWEQQSKLLPTVAGIPASKVSKWSTDEVSEFIQSLPGCEEHGKVFKDEQIDGEAFLLMTQTDIVKIMSIKLGPALKIFNSILMFKAAEKNSHNEL

SEQ ID NO: 53384 - protein, 211 aa, Homo sapiens
VSSSISAFTLPVIKLNNCVIDEPSIDNITEDADNLKSRSRNLSMDSLVVPLPNTSESFQPVSTVLPRNNSIGESLSSQYKSSMALGPGAGQLLSPGAARRQFGSNTSLHLLSSHSKSLDLDRGPSTLTVQAEQRKHPSWPRLDRNNSKGYMKLENKEDPMDRLLVPQVAIKKDFTNKEKLLMISRSHNNLSFEHDEFLSNNLKRGTSETRF

SEQ ID NO: 53385 - protein, 273 aa, Homo sapiens
KHETLPYGRPRVLQKENTICLLSQHQFMSGYSQDILMPLWTSYTVDRNDSFSTEDFSNCLYQDFRIPLSPVHKCSFYKNNTKVSYGFLSPPQLNKNSSGIYSEALLTTNIVPMYQSFQVIWRYFHDTLLRKYAEERNGVNVVSGPVFDFDYDGRCDSLENLRQKRRVIRNQEILIPTHFFIVLTSCKDTSQTPLHCENLDTLAFILPHRTDNSESCVHGKHDSSWVEELLMLHRARITDVEHITGLSFYQQRKEPVSDILKLKTHLPTFSQED

SEQ ID NO: 53386 - protein, 34 aa, Homo sapiens
LALGAIAVVIGLFVFPIYCLCKKQRKRSRTGMHW

SEQ ID NO: 53387 - protein, 152 aa, Homo sapiens
LARRLPARVQGYPWRLAYSTLEHGTSLKTLYRKSASLDSPVLLVIKDMDNQIFGAYATHPFKFSDHYYGTGETFLYTFSPHFKVFKWSGENSYFINGDISSLELGGGGGRFGLWLDADLYHGRSNSCSTFNNDILSKKEDFIVQDLEVWAFD

SEQ ID NO: 53388 - protein, 52 aa, Homo sapiens
MGFHMPPFCSISHLHLHVLAPVDQLGFLSKLVYRVNSYWFITADHLIEKLRT

SEQ ID NO: 53389 - protein, 41 aa, Homo sapiens
MTTFTWNINHARLMVVEERCVYCVNSDKWLDRNPPGSLSLL

SEQ ID NO: 53390 - protein, 116 aa, Homo sapiens
ISRPLKVLLTVVIVFIVTQLPYNIVKFCRAIDIIYSLITSCNMSKRMDIAIQVTESIALFHSCLNPILYVFMGASFKNYVMKVAKKYGSWRRQRQSVEEFPFDSEGPTEPTSTFSI

SEQ ID NO: 53391 - protein, 55 aa, Homo sapiens
KVDDNKKLGEWVGLCKIDREGKPRKVVGCSCVVVKDYGKESQAKDVIEEYFKCKK

SEQ ID NO: 53392 - protein, 86 aa, Homo sapiens
KVVNVLAVCNMPFEIRLPEFTKNNRPHASYEPELHPAVCYRIKSLRATLQIFSTGSITVTGPNVKAVATAVEQIYPFVFESRKEIL

SEQ ID NO: 53393 - protein, 224 aa, Homo sapiens
LSYCSILCNYKAIEMPSHQTYGGSWKFLTFIDLVIQAVFFGICVLTDLSSLLTRGSGNQEQERQLKKLISLRDWMLAVLAFPVGVFVVAVFWIIYAYDREMIYPKLLDNFIPGWLNHGMHTTVLPFILIEMRTSHHQYPSRSSGLTAICTFSVGYILWVCWVHHVTGMWVYPFLEHIGPGARIIFFGSTTILMNFLYLLGEVLNNYIWDTQKSMEEEKEKPKLE

SEQ ID NO: 53394 - protein, 25 aa, Homo sapiens
LEFTSSGSANTETTKVTGSLETKYR

SEQ ID NO: 53395 - protein, 6 aa, Homo sapiens
RTKGAA

SEQ ID NO: 53396 - protein, 5 aa, Homo sapiens
RFHRP

SEQ ID NO: 53397 - protein, 419 aa, Homo sapiens
KYGVFFDDDYDYLQHLKEPSGPSELIPSSTFSAHNRREEKEETLVIPSTGIKLPSSVFASEFEEDVGLLNKAAPVSGPRLDFDPDIVAALDDDFDFDDPDNLLEDDFILQANKATGEEEGMDIQKSENEDDSEWEDVDDEKGDSNDDYDSAGLLSDEDCMSVPGKTHRAIADHLFWSEETKSRFTEYSMTSSVMRRNEQLTLHDERFEKFYEQYDDDEIGALDNAELEGSIQVDSNRLQEVLNDYYKEKAENCVKLNTLEPLEDQDLPMNELDESEEEEMITVVLEEAKEKWDCESICSTYSNLYNHPQLIKYQPKPKQIRISSKTGIPLNVLPKKGLTAKQTERIQMINGSDLPKVSTQPRSKNESKEDKRARKQAIKEERKERRVEKKANKLAFKLEKRRQEKELLNLKKNVEGLKL

SEQ ID NO: 53398 - protein, 21 aa, Homo sapiens
LNHRRKLKALERGLGKVFGLS

SEQ ID NO: 53399 - protein, 81 aa, Homo sapiens
LEQPESDSRINGVSPWASPQHSALSYSLDPDASGPQFHQAAGEDLLAPPHDTSTDLTEVMEQIHSTFPSCCPNVPSRPQAM

SEQ ID NO: 53400 - protein, 45 aa, Homo sapiens
ITNRERHPGSFDVFHMKDANGHSFATQLSNIFVIGKGNKPWISLP

SEQ ID NO: 53401 - protein, 222 aa, Homo sapiens
LLGQPSSGAAAEPLEEDEEGDDEFDDEAPEELTFASAQAEAREEERRVRETVRRDKTLLKEKRKRREELFIEQKKRKLLPDTILEKLTTASQTNIKKSPGKVKEVNLQKKNEDCEKGNDSKKVKVQKVQSVSQNKSYLAVRLKDQDLRDSRQQAAQAFIHNSLYGPGTNRTTVNKFLSLANKRLPVKRAAVQFLNNAWGIQKKQNAKRFKRRWMVRKMKTKK

SEQ ID NO: 53402 - protein, 36 aa, Homo sapiens
KLICKRKMKTVKKEMTPRKLKYKKYSLSARIKATWP

SEQ ID NO: 53403 - protein, 196 aa, Homo sapiens
VIGELGVGKTSIIKRYVHQLFSQHYRATIGVDFALKVLNWDSRTLVRLQLWDIAGQERFGNMTRVYYKEAVGAFVVFDISRSSTFEAVLKWKSDLDSKVHLPNGSPIPAVLLANKCDQNKDSSQSPSQVDQFCKEHGFAGWFETSAKDNINIEEAARFLVEKILVNHQSFPNEENDVDKIKLDQETLRAENKSQCC

SEQ ID NO: 53404 - protein, 814 aa, Homo sapiens
TTRSGEPFIILSGGLSYDTVGRRPCLTVMHGKSTAVLEMDYSIVDFLTLCETPYPNDFQEPYAVVVLLEKDLVLIDLAQNGYPIFENPYPLSIHESPVTCCEYFADCPVDLIPALYSVGARQKRQGYSKKEWPINGGNWGLGAQSYPEIIITGHADGSVKFWDASAITLQVLYKLKTSKVFEKSRNKDDRPNTDIVDEDPYAIQIISWCPESRMLCIAGVSAHVIIYRFSKQEVITEVIPMLEVRLLYEINDVETPEGEQPPPLPTPVGGSNPQPIPPQSHPSTSSSSSDGLRDNVPCLKVKNSPLKQSPGYQTELVIQLVWVGGEPPQQITSLAVNSSYGLVVFGNCNGIAMVDYLQKAVLLNLGTIELYGSNDPYRREPRSPRKSRQPSGAGLCDISEGTVVPEDRCKSPTSAKMSRKLSLPTDLKPDLDVKDNSFSRSRSSSVTSIDKESREAISALHFCETFTRKTDSSPSPCLWVGTTLGTVLVIALNLPPGGEQRLLQPVIVSPSGTILRLKGAILRMAFLDTTGCLIPPAYEPWREHNVPEEKDEKEKLKKRRPVSVSPSSSQEISENQYAVICSEKQAKVISLPTQNCAYKQNITETSFVLRGDIVALSNSICLACFCANGHIMTFSLPSLRPLLDVYYLPLTNMRIARTFCFTNNGQALYLVSPTEIQRLTYSQETCENLQEMLGELFTPVETPEAPNRGFFKGLFGGGAQSLDREELFGESSSGKASRSLAQHIPGPGGIEGVKGAASGVVGELARARLALDERGQKLGDLEERTAAMLSSAESFSKHAHEIMLKYKDKKWYQF

SEQ ID NO: 53405 - protein, 398 aa, Homo sapiens
MSRKLSLPTDLKPDLDVKDNSFSRSRSSSVTSIDKESREAISALHFCETFTRKTDSSPSPCLWVGTTLGTVLVIALNLPPGGEQRLLQPVIVSPSGTILRLKGAILRMAFLDTTGCLIPPAYEPWREHNVPEEKDEKEKLKKRRPVSVSPSSSQEISENQYAVICSEKQAKVISLPTQNCAYKQNITETSFVLRGDIVALSNSICLACFCANGHIMTFSLPSLRPLLDVYYLPLTNMRIARTFCFTNNGQALYLVSPTEIQRLTYSQETCENLQEMLGELFTPVETPEAPNRGFFKGLFGGGAQSLDREELFGESSSGKASRSLAQHIPGPGGIEGVKGAASGVVGELARARLALDERGQKLGDLEERTAAMLSSAESFSKHAHEIMLKYKDKKWYQF

SEQ ID NO: 53406 - protein, 17 aa, Homo sapiens
MDLILRLAFFIKMEKDL

SEQ ID NO: 53407 - protein, 456 aa, Homo sapiens
VFVVFFICFGLTIFVGIRGPKVIQTSAANFSLNNSKKLKPIQILSNPLSTYNQQLWLTCVVELDQSKETSIKTSFPMTVKVDGVAQDGTTMYIHNKVHNRTRTLTCAGKCAEIIVAHLGYLNYTQYTVIVGFEHLKLPIKGMNFTWKTYNPAFSRLEIWFRFFFVVLTFIVTCLFAHSLRKFSMRDWGIEQKWMSVLLPLLLLYNDPFFPLSFLVNSWLPGMLDDLFQSMFLCALLLFWLCVYHGIRVQGERKCLTFYLPKFFIVGLLWLASVTLGIWQTVNELHDPMYQYRVDTGNFQGMKVFFMVVAAVYILYLLFLIVRACSELRHMPYVDLRLKFLTALTFVVLVISIAILYLRFGAQVLQDNFVAELSTHYQNSAEFLSFYGLLNFYLYTLAFVYSPSKNALYESQLKDNPAFSMLNDSDDDVIYGSDYEEMPLQNGQAIRAKYKEESDSD

SEQ ID NO: 53408 - protein, 44 aa, Homo sapiens
IPVQNDPELYEKLTSSNEINKEKSDTVADIESEPVVESTETEGT

SEQ ID NO: 53409 - protein, 1192 aa, Homo sapiens
LGNIDDLAQQYADYYNTCFSDVCERMEELRKRRVSQDLEVEKPDASPTSLQLRSQIEESLGFCSAVSTPEVERKNPLHKSNSEDSSVGKGDWKKKNKYFWQNFRKNQKGIMRQTSKGEDVGYVASEITMSDEERIQLMMMVKEKMITIEEALARLKEYEAQHRQSAALDPADWPDGSYPTFDGSSNCNSREQSDDETEESVKFKRLHKLVNSTRRVRKKLIRVEEMKKPSTEGGEEHVFENSPVLDERSALYSGVHKKPLFFDGSPEKPPEDDSDSLTTSPSSSSLDTWGAGRKLVKTFSKGESRGLIKPPKKMGTFFSYPEEEKAQKVSRSLTEGEMKKGLGSLSHGRTCSFGGFDLTNRSLHVGSNNSDPMGKEGDFVYKEVIKSPTASRISLGKKVKSVKETMRKRMSKKYSSSVSEQDSGLDGMPGSPPPSQPDPEHLDKPKLKAGGSVESLRSSLSGQSSMSGQTVSTTDSSTSNRESVKSEDGDDEEPPYRGPFCGRARVHTDFTPSPYDTDSLKLKKGDIIDIISKPPMGTWMGLLNNKVGTFKFIYVDVLSEDEEKPKRPTRRRRKGRPPQPKSVEDLLDRINLKEHMPTFLFNGYEDLDTFKLLEEEDLDELNIRDPEHRAVLLTAVELLQEYDSNSDQSGSQEKLLVDSQGLSGCSPRDSGCYESSENLENGKTRKASLLSAKSSTEPSLKSFSRNQLGNYPTLPLMKSGDALKQGQEEGRLGGGLAPDTSKSCDPPGVTGLNKNRRSLPVSICRSCETLEGPQTVDTWPRSHSLDDLQVEPGAEQDVPTEVTEPPPQIVPEVPQKTTASSTKAQPLEQDSAVDNALLLTQSKRFSEPQKLTTKKLEGSIAASGRGLSPPQCLPRNYDAQPPGAKHGLARTPLEGHRKGHEFEGTHHPLGTKEGVDAEQRMQPKIPSQPPPVPAKKSRERLANGLHPVPMGPSGALPSPDAPCLPVKRGSPASPTSPSDCPPALAPRPLSGQAPGSPPSTRPPPWLSELPENTSLQEHGVKLGPALTRKVSCARGVDLETLTENKLHAEGIDLTEEPYSDKHGRCGIPEALVQRYAEDLDQPERDVAANMDQIRVKQLRKQHRMAIPSGGLTEICRKPVSPGCISSVSDWLISIGLPMYAGTLSTAGFSTLSQVPSLSHTCLQEAGITEERHIRKLLSAARLFKLPPGPEAM

SEQ ID NO: 53410 - protein, 4 aa, Homo sapiens
KKVS

SEQ ID NO: 53411 - protein, 5 aa, Homo sapiens
RWPVQ

SEQ ID NO: 53412 - protein, 429 aa, Homo sapiens
LSHTSSQQPNQQGHQTSHVYMPISSPTTSQPPTIHSSGSSQSSAHSQYNIQNISTGPRKNQIEIKLEPPQRNNSSKLRSSGPRTSSTSSSVNSQTLNRNQPTVYIAASPPNTDELMSRSQPKVYISANAATGDEQVMRNQPTLFISTNSGASAASRNMSGQVSMGPAFIHHHPPKSRAIGNNSATSPRVVVTQPNTKYTFKITVSPNKPPAVSPGVVSPTFELTNLLNHPDHYVETENIQHLTDPTLAHVDRISETRKLSMGSDDAAYTQALLVHQKARMERLQRELEIQKKKLDKLKSEVNEMENNLTRRRLKRSNSISQIPSLEEMQQLRSCNRQLQIDIDCLTKEIDLFQARGPHFNPSAIHNFYDNIGFVGPVPPKPKDQRSIIKTPKTQDTEDDEGAQWNCTACTFLNHPALIRCEQCEMPRHF

SEQ ID NO: 53413 - protein, 317 aa, Homo sapiens
LLFVALPASGWLTTGAPEPPPLSGAPQDGIRINVTTLKDDGDISKQQVVLNITYESGQVYVNDLPVNSGVTRISCQTLIVKNENLENLEEKEYFGIVSVRILVHEWPMTSGSSLQLIVIQEEVVEIDGKQVQQKDVTEIDILVKNRGVLRHSNYTLPLEESMLYSISRDSDILFTLPNLSKKESVSSLQTTSQYLIRNVETTVDEDVLPGKLPETPLRAEPPSSYKVMCQWMEKFRKDLCRFWSNVFPVFFQFLNIMVVGITGAAVVITILKVFFPVSEYKGILQLDKVDVIPVTAINLYPDGPEKRAENLEDKTCI

SEQ ID NO: 53414 - protein, 254 aa, Homo sapiens
VVSLLGKLLGTVVALKVVLYLLRVCLAMAWKSGGASHSELIHNLRKNGIIKTDKVFEVMLATDRSHYAKCNPYMDSPQSIGFQATISAPHMHAYALELLFDQLHEGAKALDVGSGSGILTACFARMVGCTGKVIGIDHIKELVDDSVNNVRKDDPTLLSSGRVQLVVGDGRMGYAEEAPYDAIHVGAAAPVVPQALIDQLKPGGRLILPVGPAGGNQMLEQYDKLQDGSIKMKPLMGVIYVPLTDKEKQWSRWK

SEQ ID NO: 53415 - protein, 255 aa, Homo sapiens
VVSLLGKLLGTVVALKVVLYLLRVCLAMAWKSGGASHSELIHNLRKNGIIKTDKVFEVMLATDRSHYAKCNPYMDSPQSIGFQATISAPHMHAYALELLFDQLHEGAKALDVGSGSGILTACFARMVGCTGKVIGIDHIKELVDDSVNNVRKDDPTLLSSGRVQLVVGDGRMGYAEEAPYDAIHVGAAAPVVPQALIDQLKPGGRLILPVGPAGGNQMLEQYDKLQDGSIKMKPLMGVIYVPLTDKEKQWSRDEL

SEQ ID NO: 53416 - protein, 33 aa, Homo sapiens
LHEGRLLDISISAVLNSLVASVICDVLFQIGQL

SEQ ID NO: 53417 - protein, 10 aa, Homo sapiens
MTRVIVCFAA

SEQ ID NO: 53418 - protein, 592 aa, Homo sapiens
KARVMYDFAAEPGNNELTVNEGEIITITNPDVGGGWLEGRNIKGERGLVPTDYVEILPSDGKDQFSCGNSVADQAFLDSLSASTAQASSSAASNNHQVGSGNDPWSAWSASKSGNWESSEGWGAQPEGAGAQRNTNTPNNWDTAFGHPQAYQGPATGDDDDWDEDWDGPKSSSYFKDSESADAGGAQRGNSRASSSSMKIPLNKFPGFAKPGTEQYLLAKQLAKPKEKIPIIVGDYGPMWVYPTSTFDCVVADPRKGSKMYGLKSYIEYQLTPTNTNRSVNHRYKHFDWLYERLLVKFGSAIPIPSLPDKQVTGRFEEEFIKMRMERLQAWMTRMCRHPVISESEVFQQFLNFRDEKEWKTGKRKAERDELAGVMIFSTMEPEAPDLDLVEIEQKCEAVGKFTKAMDDGVKELLTVGQEHWKRCTGPLPKEYQKIGKALQSLATVFSSSGYQGETDLNDAITEAGKTYEEIASLVAEQPKKDLHFLMECNHEYKGFLGCFPDIIGTHKGAIEKVKESDKLVATSKITLQDKQNMVKRVSIMSYALQAEMNHFHSNRIYDYNSVIRLYLEQQVQFYETIAEKLRQALSRFPVM

SEQ ID NO: 53419 - protein, 33 aa, Homo sapiens
IDDINTSDKLDDLTQDLTVSQLSDVADYLEDVA

SEQ ID NO: 53420 - protein, 130 aa, Homo sapiens
TALIFSSGKMVCTGAKSEEQSRLAARKYARVVQKLGFPAKFLDFKIQNMVGSCDVKFPIRLEGLVLTHQQFSSYEPELFPGLIYRMIKPRIVLLIFVSGKVVLTGAKVRAEIYEAFENIYPILKGFRKTT

SEQ ID NO: 53421 - protein, 197 aa, Homo sapiens
IQNSKEVLSLLQEKNPAFKPVLAIIQAGDDNLMQEINQNLAEEAGLNITHICLPPDSSEAEIIDEILKINEDTRVHGLALQISENLFSNKVLNALKPEKDVDGVTDINLGKLVRGDAHECFVSPVAKAVIELLEKSGVNLDGKKILVVGAHGSLEAALQCLFQRKGSMTMSIQWKTRQLQSKTESRSVTRLECRRVI

SEQ ID NO: 53422 - protein, 60 aa, Homo sapiens
KFLVHNVKELEVLLMCNNRTCAEIAHNVSSKNRKAIVERAAQLAITVTNPSARLCSEENE

SEQ ID NO: 53423 - protein, 429 aa, Homo sapiens
VGSFAYLTIKDRIPQILTKVIDTLHRHKSEFFEKHGEEGVEAEKKAISLLSKLRNELQTDKPFIPLVEKFVDTDIWNQYLEYQQSLLNESDGKSRWFYSPWLLVECYMYRRIHEAIIQSPPIDYFDVFKESKEQNFYGSQESIIALCTHLQQLIRTIEDLDENQLKDEFFKLLQISLWGNKCDLSLSGGESSSQNTNVLNSLEDLKPFILLNDMEHLWSLLSNCKKTREKASATRVYIVLDNSGFELVTDLILADFLLSSELATEVHFYGKTIPWFVSDTTIHDFNWLIEQVKHSNHKWMSKCGADWEEYIKMGKWVYHNHIFWTLPHEYCAMPQVAPDLYAELQKAHLILFKGDLNYRKLTGDRKWEFSVPFHQALNGFHPAPLCTIRTLKAEIQVGLQPGQGEQLLASEPSWWTTGKYGIFQYDGPL

SEQ ID NO: 53424 - protein, 420 aa, Homo sapiens
RASSAASAYATGGAGAASAWRGFKMTNEEPLPKKVRLSETDFKVMARDELILRWKQYEAYVQALEGKYTDLNSNDVTGLRESEEKLKQQQQESARRENILVMRLATKEQEMQECTTQIQYLKQVQQPSVAQLRSTMVDPAINLFFLKMKGELEQTKDKLEQAQNELSAWKFTPDSQTGKKLMAKCRMLIQENQELGRQLSQGRIAQLEAELALQKKYSEELKSSQDELNDFIIQLDEEVEGMQSTILVLQQQLKETRQQLAQYQQQQSQASAPSTSRTTASEPVEQSEATSKDCSRLTNGPSNGSSSRQRTSGSGFHREGNTTEDDFPSSPGNGNKSSNSSEERTGRGGSGYVNQLSAGYESVDSPTGSENSLTHQSNDTDSSHDPQEEKAVSGKGNRTVGSRHVQNGLDSSVNVQGSVL

SEQ ID NO: 53425 - protein, 184 aa, Homo sapiens
IVSAMALRSRFWGLFSVCRNPGCRFAALSTSSEPAAKPEVDPVENEAVAPEFTNRNPRNLELLSVARKERGWRTVFPSREFWHRLRVIRTQHHVEALVEHQNGKVVVSASTREWAIKKHLYSTRNVVACESIGRVLAQRCLEAGINFMVYQPTPWEAASDSMKRLQSAMTEGGVVLREPQRIYE

SEQ ID NO: 53426 - protein, 2481 aa, Homo sapiens
LGPAPARRPQRSLLLLQLLLLVAAPGSTQAQAAPFPELCSYTWEAVDTKNNVLYKINICGSVDIVQCGPSSAVCMHDLKTRTYHSVGDSVLRSATRSLLEFNTTVSCDQQGTNHRVQSSIAFLCGKTLGTPEFVTATECVHYFEWRTTAACKKDIFKANKEVPCYVFDEELRKHDLNPLIKLSGAYLVDDSDPDTSLFINVCRDIDTLRDPGSQLRACPPGTAACLVRGHQAFDVGQPRDGLKLVRKDRLVLSYVREEAGKLDFCDGHSPAVTITFVCPSERREGTIPKLTAKSNCRYEIEWITEYACHRDYLESKTCSLSGEQQDVSIDLTPLAQSGGSSYISDGKEYLFYLNVCGETEIQFCNKKQAAVCQVKKSDTSQVKAAGRYHNQTLRYSDGDLTLIYFGGDECSSGFQRMSVINFECNKTAGNDGKGTPVFTGEVDCTYFFTWDTEYACVKEKEDLLCGATDGKKRYDLSALVRHAEPEQNWEAVDGSQTETEKKHFFINICHRVLQEGKARGCPEDAAVCAVDKNGSKNLGKFISSPMKEKGNIQLSYSDGDDCGHGKKIKTNITLVCKPGDLESAPVLRTSGEGGCFYEFEWHTAAACVLSKTEGENCTVFDSQAGFSFDLSPLTKKNGAYKVETKKYDFYINVCGPVSVSPCQPDSGACQVAKSDEKTWNLGLSNAKLSYYDGMIQLNYRGGTPYNNERHTPRATLITFLCDRDAGVGFPEYQEEDNSTYNFRWYTSYACPEEPLECVVTDPSTLEQYDLSSLAKSEGGLGGNWYAMDNSGEHVTWRKYYINVCRPLNPVPGCNRYASACQMKYEKDQGSFTEVVSISNLGMAKTGPVVEDSGSLLLEYVNGSACTTSDGRQTTYTTRIHLVCSRGRLNSHPIFSLNWECVVSFLWNTEAACPIQTTTDTDQACSIRDPNSGFVFNLNPLNSSQGYNVSGIGKIFMFNVCGTMPVCGTILGKPASGCEAETQTEELKNWKPARPVGIEKSLQLSTEGFITLTYKGPLSAKGTADAFIVRFVCNDDVYSGPLKFLHQDIDSGQGIRNTYFEFETALACVPSPVDCQVTDLAGNEYDLTGLSTVRKPWTAVDTSVDGRKRTFYLSVCNPLPYIPGCQGSAVGSCLVSEGNSWNLGVVQMSPQAAANGSLSIMYVNGDKCGNQRFSTRITFECAQISGSPAFQLQDGCEYVFIWRTVEACPVVRVEGDNCEVKDPRHGNLYDLKPLGLNDTIVSAGEYTYYFRVCGKLSSDVCPTSDKSKVVSSCQEKREPQGFHKVAGLLTQKLTYENGLLKMNFTGGDTCHKVYQRSTAIFFYCDRGTQRPVFLKETSDCSYLFEWRTQYACPPFDLTECSFKDGAGNSFDLSSLSRYSDNWEAITGTGDPEHYLINVCKSLAPQAGTEPCPPEAAACLLGGSKPVNLGRVRDGPQWRDGIIVLKYVDGDLCPDGIRKKSTTIRFTCSESQVNSRPMFISAVEDCEYTFAWPTATACPMKSNEHDDCQVTNPSTGHLFDLSSLSGRAGFTAAYSEKGLVYMSICGENENCPPGVGACFGQTRISVGKANKRLRYVDQVLQLVYKDGSPCPSKSGLSYKSVISFVCRPEARPTNRPMLISLDKQTCTLFFSWHTPLACEQATECSVRNGSSIVDLSPLIHRTGGYEAYDESEDDASDTNPDFYINICQPLNPMHGVPCPAGAAVCKVPIDGPPIDIGRVAGPPILNPIANEIYLNFESSTPCLADKHFNYTSLIAFHCKRGVSMGTPKLLRTSECDFVFEWETPVVCPDEVRMDGCTLTDEQLLYSFNLSSLSTSTFKVTRDSRTYSVGVCTFAVGPEQGGCKDGGVCLLSGTKGASFGRLQSMKLDYRHQDEAVVLSYVNGDRCPPETDDGVPCVFPFIFNGKSYEECIIESRAKLWCSTTADYDRDHEWGFCRHSNSYRTSSIIFKCDEDEDIGRPQVFSEVRGCDVTFEWKTKVVCPPKKLECKFVQKHKTYDLRLLSSLTGSWSLVHNGVSYYINLCQKIYKGPLGCSERASICRRTTTGDVQVLGLVHTQKLGVIGDKVVVTYSKGYPCGGNKTASSVIELTCTKTVGRPAFKRFDIDSCTYYFSWDSRAACAVKPQEVQMVNGTITNPINGKSFSLGDIYFKLFRASGDMRTNGDNYLYEIQLSSITSSRNPACSGANICQVKPNDQHFSRKVGTSDKTKYYLQDGDLDVVFASSSKCGKDKTKSVSSTIFFHCDPLVEDGIPEFSHETADCQYLFSWYTSAVCPLGVGFDSENPGDDGQMHKGLSERSQAVGAVLSLLLVALTCCLLALLLYKKERRETVISKLTTCCRRSSNVSYKYSKVNKEEETDENETEWLMEEIQLPPPRQGKEGQENGHITTKSVKALSSLHGDDQDSEDEVLTIPEVKVHSGRGAGAESSHPVRNAQSNALQEREDDRVGLVRGEKARKGKSSSAQQKTVSSTKLVSFHDDSDEDLLHI

SEQ ID NO: 53427 - protein, 97 aa, Homo sapiens
RGEGEEDHESPSSGRVPAPDTSIEETESDASSDSEDVSAVVAQHSLTQQRLLVSNANQTVPDRSDRSGTDRSVAGGGTVSVSVRSRRPDGQCTVTEV

SEQ ID NO: 53428 - protein, 3112 aa, Homo sapiens
LLLSGGLGGVQAQRPQQQRQSQAHQQRGLFPAVLNLASNALITTNATCGEKGPEMYCKLVEHVPGQPVRNPQCRICNQNSSNPNQRHPITNAIDGKNTWWQSPSIKNGIEYHYVTITLDLQQVFQIAYVIVKAANSPRPGNWILERSLDDVEYKPWQYHAVTDTECLTLYNIYPRTGPPSYAKDDEVICTSFYSKIHPLENGEIHISLINGRPSADDPSPELLEFTSARYIRLRFQRIRTLNADLMMFAHKDPREIDPIVTRRYYYSVKDISVGGMCICYGHARACPLDPATNKSRCECEHNTCGDSCDQCCPGFHQKPWRAGTFLTKTECEACNCHGKAEECYYDENVARRNLSLNIRGKYIGGGVCINCTQNTAGINCETCTDGFFRPKGVSPNYPRPCQPCHCDPIGSLNEVCVKDEKHARRGLAPGSCHCKTGFGGVSCDRCARGYTGYPDCKACNCSGLGSKNEDPCFGPCICKENVEGGDCSRCKSGFFNLQEDNWKGCDECFCSGVSNRCQSSYWTYGKIQDMSGWYLTDLPGRIRVAPQQDDLDSPQQISISNAEARQALPHSYYWSAPAPYLGNKLPAVGGQLTFTISYDLEEEEEDTERVLQLMIILEGNDLSISTAQDEVYLHPSEEHTNVLLLKEESFTIHGTHFPVRRKEFMTVLANLKRVLLQITYSFGMDAIFRLSSVNLESAVSYPTDGSIAAAVEVCQCPPGYTGSSCESCWPRHRRVNGTIFGGICEPCQCFGHAESCDDVTGECLNCKDHTGGPYCDKCLPGFYGEPTKGTSEDCQPCACPLNIPSNNFSPTCHLDRSLGLICDGCPVGYTGPRCERCAEGYFGQPSVPGGSCQPCQCNDNLDFSIPGSCDSLSGSCLICKPGTTGRYCELCADGYFGDAVDAKNCQPCRCNAGGSFSEVCHSQTGQCECRANVQGQRCDKCKAGTFGLQSARGCVPCNCNSFGSKSFDCEESGQCWCQPGVTGKKCDRCAHGYFNFQEGGCTACECSHLGNNCDPKTGRCICPPNTIGEKCSKCAPNTWGHSITTGCKACNCSTVGSLDFQCNVNTGQCNCHPKFSGAKCTECSRGHWNYPRCNLCDCFLPGTDATTCDSETKKCSCSDQTGQCTCKVNVEGIHCDRCRPGKFGLDAKNPLGCSSCYCFGTTTQCSEAKGLIRTWVTLKAEQTILPLVDEALQHTTTKGIVFQHPEIVAHMDLMREDLHLEPFYWKLPEQFEGKKLMAYGGKLKYAIYFEAREETGFSTYNPQVIIRGGTPTHARIIVRHMAAPLIGQLTRHEIEMTEKEWKYYGDDPRVHRTVTREDFLDILYDIHYILIKATYGNFMRQSRISEISMEVAEQGRGTTMTPPADLIEKCDCPLGYSGLSCEACLPGFYRLRSQPGGRTPGPTLGTCVPCQCNGHSSLCDPETSICQNCQHHTAGDFCERCALGYYGIVKGLPNDCQQCACPLISSSNNFSPSCVAEGLDDYRCTACPRGYEGQYCERCAPGYTGSPGNPGGSCQECECDPYGSLPVPCDPVTGFCTCRPGATGRKCDGCKHWHAREGWECVFCGDECTGLLLGDLARLEQMVMSINLTGPLPAPYKMLYGLENMTQELKHLLSPQRAPERLIQLAEGNLNTLVTEMNELLTRATKVTADGEQTGQDAERTNTRAKSLGEFIKELARDAEAVNEKAIKLNETLGTRDEAFERNLEGLQKEIDQMIKELRRKNLETQKEIAEDELVAAEALLKKVKKLFGESRGENEEMEKDLREKLADYKNKVDDAWDLLREATDKIREANRLFAVNQKNMTALEKKKEAVESGKRQIENTLKEGNDILDEANRLADEINSIIDYVEDIQTKLPPMSEELNDKIDDLSQEIKDRKLAEKVSQAESHAAQLNDSSAVLDGILDEAKNISFNATAAFKAYSNIKDYIDEAEKVAKEAKDLAHEATKLATGPRGLLKEDAKGCLQKSFRILNEAKKLANDVKENEDHLNGLKTRIENADARNGDLLRTLNDTLGKLSAIPNDTAAKLQAVKDKARQANDTAKDVLAQITELHQNLDGLKKNYNKLADSVAKTNAVVKDPSKNKIIADADATVKNLEQEADRLIDKLKPIKELEDNLKKNISEIKELINQARKQANSIKVSVSSGGDCIRTYKPEIKKGSYNNIVVNVKTAVADNLLFYLGSAKFIDFLAIEMRKGKVSFLWDVGSGVGRVEYPDLTIDDSYWYRIVASRTGRNGTISVRALDGPKASIVPSTHHSTSPPGYTILDVDANAMLFVGGLTGKLKKADAVRVITFTGCMGETYFDNKPIGLWNFREKEGDCKGCTVSPQVEDSEGTIQFDGEGYALVSRPIRWYPNISTVMFKFRTFSSSALLMYLATRDLRDFMSVELTDGHIKVSYDLGSGMASVVSNQNHNDGKWKSFTLSRIQKQANISIVDIDTNQEENIATSSSGNNFGLDLKADDKIYFGGLPTLRNLSMKARPEVNLKKYSGCLKDIEISRTPYNILSSPDYVGVTKGCSLENVYTVSFPKPGFVELSPVPIDVGTEINLSFSTKNESGIILLGSGGTPAPPRRKRRQTGQAYYAILLNRGRLEVHLSTGARTMRKIVIRPEPNLFHDGREHSVHVERTRGIFTVQVDENRRYMQNLTVEQPIEVKKLFVGGAPPEFQPSPLRNIPPFEGCIWNLVINSVPMDFARPVSFKNADIGRCAHQKLREDEDGAAPAEIVIQPEPVPTPAFPTPTPVLTHGPCAAESEPALLIGSKQFGLSRNSHIAIAFDDTKVKNRLTIELEVRTEAESGLLFYMARINHADFATVQLRNGLPYFSYDLGSGDTHTMIPTKINDGQWHKIKIMRSKQEGILYVDGASNRTISPKKADILDVVGMLYVGGLPINYTTRRIGPVTYSIDGCVRNLHMAEAPADLEQPTSSFHVGTCFANAQRGTYFDGTGFAKAVGGFKVGLDLLVEFEFRTTTTTGVLLGISSQKMDGMGIEMIDEKLMFHVDNGAGRFTAVYDAGVPGHLCDGQWHKVTANKIKHRIELTVDGNQVEAQSPNPASTSADTNDPVFVGGFPDDLKQFGLTTSIPFRGCIRSLKLTKGTGKPLEVNFAKALELRGVQPVSCPAN

SEQ ID NO: 53429 - protein, 23 aa, Homo sapiens
KFKSSMHLQLTCFQAASSTMMKT

SEQ ID NO: 53430 - protein, 59 aa, Homo sapiens
KLAPWVTLSVQGFADSPVSWEKNEHGFRKGGEHLYNFVIFNNQDYWLQMAVGANDHCPP

SEQ ID NO: 53431 - protein, 364 aa, Homo sapiens
IRLLKILCQDNPSHNVFCSPVSISSALAMVLLGAKGNTATQMAQALSLNTEEDIHRAFQSLLTEVNKAGTQYLLRTANRLFGEKTCQFLSTFKESCLQFYHAELKELSFIRAAEESRKHINTWVSKKTEGKIEELLPGSSIDAETRLVLVNAIYFKGKWNEPFDETYTREMPFKINQEEQRPVQMMYQEATFKLAHVGEVRAQLLELPYARKELSLLVLLPDDGVELSTVEKSLTFEKLTAWTKPDCMKSTEVEVLLPKFKLQEDYDMESVLRHLGIVDAFQQGKADLSAMSAERDLCLSKFVHKSFVEVNEEGTEAAAASSCFVVAECCMESGPRFCADHPFLFFIRHNRANSILFCGRFSSP

SEQ ID NO: 53432 - protein, 361 aa, Homo sapiens
LKTLGKDNSKNVFFSPMSMSCALAMVYMGAKGNTAAQMAQILSFNKSGGGGDIHQGFQSLLTEVNKTGTQYLLRMANRLFGEKSCDFLSSFRDSCQKFYQAEMEELDFISAVEKSRKHINTWVAEKTEGKIAELLSPGSVDPLTRLVLVNAVYFRGNWDEQFDKENTEERLFKVSKNEEKPVQMMFKQSTFKKTYIGEIFTQILVLPYVGKELNMIIMLPDETTDLRTVEKELTYEKFVEWTRLDMMDEEEVEVSLPRFKLEESYDMESVLRNLGMTDAFELGKADFSGMSQTDLSLSKVVHKSFVEVNEEGTEAAAATAAIMMMRCARFVPRFCADHPFLFFIQHSKTNGILFCGRFSSP

SEQ ID NO: 53433 - protein, 405 aa, Homo sapiens
RHNGMDLTQQAKDIQNITVQETNKNNSESIECSKITMDLKFNNSRKYISITVPSKTQTMSPHIKSVDDVVVLGMNLSKFNKLTQFFICVAGVFVFYLIYGYLQELIFSVEGFKSCGWYLTLVQFAFYSIFGLIELQLIQDKRRRIPGKTYMIIAFLTVGTMGLSNTSLGYLNYPTQVIFKCCKLIPVMLGGVFIQGKRYNVADVSAAICMSLGLIWFTLADSTTAPNFNLTGVVLISLALCADAVIGNVQEKAMKLHNASNSEMVLYSYSIGFVYILLGLTCTSGLGPAVTFCAKNPVRTYGYAFLFSLTGYFGISFVLALIKIFGALIAVTVTTGRKAMTIVLSFIFFAKPFTFQYVWSGLLVVLGIFLNVYSKNMDKIRLPSLYDLINKSVEARKSRTLAQTV

SEQ ID NO: 53434 - protein, 121 aa, Homo sapiens
IVPGNRVKLLIGPMQETASSHEQPASGLMQQTFGQQKLYQVPNPQAAPRDTIYQVPPSYQNQGIYQVPTGHGTQEQEVYQVPPSVQRSIGGTSGPHVGKKVFQRDGQVSYFLVRASKQTSL

SEQ ID NO: 53435 - protein, 368 aa, Homo sapiens
KGAVANAACLPELILHNKMKRELQRVEDSHQILSQTSHDLNECSWSLNILAINKPQNKCDDLDRFVMVAKTVPDDAKQLTTTINTNAEALFRPGPGSLHLKNGPESIMNSTEYPHGGSQGQLLHPGDHKAQAHNKALPPGLSKEQAPDCSSSDGSERSWMDDYDYVHLQGKEEFERQQKELLEKENIMKQNKMQLEHHQLSQFQLLEQEITKPVENDISKWKPSQSLPTTNSGVSAQDRQLLCFYYDQCETHFISLLNAIDALFSCVSSAQPPRIFVAHSKFVILSAHKLVFIGDTLTRQVTAQDIRNKVMNSSNQLCEQLKTIVMATKMAALHYPSTTALQEMVHQVTDLSRNAQLFKRSLLEMATF

SEQ ID NO: 53436 - protein, 180 aa, Homo sapiens [sequence omitted]

SEQ ID NO: 53437 - protein, 6 aa, Homo sapiens
IMKKIS

SEQ ID NO: 53438 - protein, 23 aa, Homo sapiens
ISYEAGILENPKNQVPPGLYTKT

SEQ ID NO: 53439 - protein, 29 aa, Homo sapiens
LGLKFAELVYTAFWHSPECEFVRHCIAKS

SEQ ID NO: 53440 - protein, 20 aa, Homo sapiens
VHHMSAYWSIVKESILKLQT

SEQ ID NO: 53441 - protein, 47 aa, Homo sapiens
KEYRQMYRTEIQMARMARKAGNFYVPAEPKLAFVIRIRGINGVSPKV

SEQ ID NO: 53442 - protein, 578 aa, Homo sapiens
KRLYPAVDEQETPLPRSWSPKDKFSYIGLSQNNLRVHYKGHGKTPKDAASVRATHPIPAACGIYYFEVKIVSKGRDGYMGIGLSAQGVNMNRLPGWDKHSYGYHGDDGHSFCSSGTGQPYGPTFTTGDVIGCCVNLINNTCFYTKNGHSLGIAFTDLPPNLYPTVGLQTPGEVVDANFGQHPFVFDIEDYMREWRTKIQAQIDRFPIGDREGEWQTMIQKMVSSYLVHHGYCATAEAFARSTDQTVLEELASIKNRQRIQKLVLAGRMGEAIETTQQLYPSLLERNPNLLFTLKVRQFIEMVNGTDSEVRCLGGRSPKSQDSYPVSPRPFSSPSMSPSHGMNIHNLASGKGSTAHFSGFESCSNGVISNKAHQSYCHSNKHQSSNLNVPELNSINMSRSQQVNNFTSNDVDMETDHYSNGVGETSSNGFLNGSSKHDHEMEDCDTEMEVDSSQLRRQLCGGSQAAIERMIHFGRELQAMSEQLRRDCGKNTANKKMLKDAFSLLAYSDPWNSPVGNQLDPIQREPVCSALNSAILETHNLPKQPPLALAMGQATQCLGLMARSGIGSCAFATVEDYLH

SEQ ID NO: 53443 - protein, 23 aa, Homo sapiens
IKYLAGSIFTCLTVALGFYRLWI

SEQ ID NO: 53444 - protein, 283 aa, Homo sapiens
RIHFFLSKKKTDELRNLHKLLYNRPGTVSSLKKNVGQFSGFPFEKGSVQYKKKEEMLKKFRNAMLKSICEVLDLERSGVNSELVKRILNFLMHPKPSGKPLPKSKKTCSKGSKKERNSSGMARKAKRTKCPEILSDESSSDEDEKKNKEESSDDEDKESEEEPPKKTAKREKPKQKATSKSKKSVKSANVKKADSSTTKKNQNSSKKESESEDSSDDEPLIKKLKKPPTDEELKETIKKLLASANLEEVTMKQICKKVYENYPTYDLTERKDFIKTTVKELIS

SEQ ID NO: 53445 - protein, 265 aa, Homo sapiens
IFGSSTSSSNPPVATFVFGQSSNPVSSSAFGNTAESSTSQSLLFSQDSKLATTSSTGTAVTPFVFGPGASSNNTTTSGFGFGATTTSSSAGSSFVFGTGPSAPSASPAFGANQTPTFGQSQGASQPNPPGFGSISSSTALFPTGSQPAPPTFGTVSSSSQPPVFGQQPSQSAFGSGTTPNSSSAFQFGSSTTNFNFTNNSPSGVFTFGANSSTPAASAQPSGSGGFPFNQSPAAFTVGSNGKNVFSSSGTSFSGRKIKTAVRRRK

SEQ ID NO: 53446 - protein, 6 aa, Homo sapiens
VRQRCL

SEQ ID NO: 53447 - protein, 113 aa, Homo sapiens
KAARKSAPATGGVKKPHRYRPGTVALREIRRYQKSTELLIRKLPFQRLVREIAQDFKTDLRFQSSAVMALQEACEAYLVGLFEDTNLCAIHAKRVTIMPKDIQLARRIRGERA

SEQ ID NO: 53448 - protein, 216 aa, Homo sapiens
ILNMSETAPAAPAAAPPAEKAPVKKKAAKKAGGTPRKASGPPVSELITKAVAASKERSGVSLAALKKALAAAGYDVEKNNSRIKLGLKSLVSKGTLVQTKGTGASGSFKLNKKAASGEAKPKVKKAGGTKPKKPVGAAKKPKKAAGGATPKKSAKKTPKKAKKPAAATVTKKVAKSPKKAKVAKPKKAAKSAAKAVKPKAAKPKVVKPKKAAPKKK

SEQ ID NO: 53449 - protein, 108 aa, Homo sapiens
VTKAQKKDGKKRKRSRKESYSVYVYKVLKQVHPDTGISSKAMGIMNSFVNDIFERIAGEASRLAHYNKRSTITSREIQTAVRLLLPGELAKHAVSEGTKAVTKYTSSK

SEQ ID NO: 53450 - protein, 130 aa, Homo sapiens
ILAVQIAYLVQAVRAAGKCDAVFKGFSDCLLKLGDSMANYPQGLDDKTNIKTVCTYWEDFHSCTVTALTDCQEGAKDMWDKLRKESKNLNIQGSLFELCGSGNGAAGSLLPAFPVLLVSLSAALATWLSF

SEQ ID NO: 53451 - protein, 296 aa, Homo sapiens
TETGHWTGSAMRLLPRLLLLLLLVFPATVLFRGGPRGLLAVAQDLTEDEETVEDSIIEDEDDEAEVEEDEPTDLVEDKEEEDVSGEPEASPSADTTILFVKGEDFPANNIVKFLVGFTNKGTEDFIVESLDASFRYPQDYQFYIQNFTALPLNTVVPPQRQATFEYSFIPAEPMGGRPFGLVINLNYKDLNGNVFQDAVFNQTVTVIEREDGLDGETIFMYMFLAGLGLLVIVGLHQLLESRKRKRPIQKVEMGTSSQNDVDMSWIPQETLNQINKASPRRLPRKRAQKRSVGSDE

SEQ ID NO: 53452 - protein, 114 aa, Homo sapiens
KGSKKAVTKAQKKDGKKRKRSRKESYSVYVYKVLKQVHPDTGISSKAMGIMNSFVNDIFERIAGEASRLAHYNKRSTITSREIQTAVRLLLPGELAKHAVSEGTKAVTKYTSAK

SEQ ID NO: 53453 - protein, 51 aa, Homo sapiens
IPQRGEKKEGFMLKKEKYKRVCAGLPLVVTVEAFTRLSIWHYYERSPDRRT

SEQ ID NO: 53454 - protein, 442 aa, Homo sapiens
IVHIQAGQCGNQIGAKFWEVISDEHGIDPTGSYHGDSDLQLERINVYYNEAAGNKYVPRAILVDLEPGTMDSVRSGPFGQIFRPDNFVFGQSGAGNNWAKGHYTEGAELVDSVLDVVRKESESCDCLQGFQLTHSLGGGTGSGMGTLLISKIREEYPDRIMNTFSVMPSPKVSDTVVEPYNATLSVHQLVENTDETYSIDNEALYDICFRTLKLTTPTYGDLNHLVSATMSGVTTCLRFPGQLNADLRKLAVNMVPFPRLHFFMPGFAPLTSRGSQQYRALTVPELTQQMFDSKNMMAACDPRHGRYLTVAAIFRGRMSMKEVDEQMLNVQNKNSSYFVEWIPNNVKTAVCDIPPRGLKMSATFIGNSTAIQELFKRISEQFTAMFRRKAFLHWYTGEGMDEMEFTEAESNMNDLVSEYQQYQDATADEQGEFEEEEGEDEA

SEQ ID NO: 53455 - protein, 441 aa, Homo sapiens
VHIQAGQCGNQIGAKFWEVISDEHGIDPTGSYHGDSDLQLERINVYYNEATGNKYVPRAILVDLEPGTMDSVRSGPFGQIFRPDNFVFGQSGAGNNWAKGHYTEGAELVDSVLDVVRKESESCDCLQGFQLTHSLGGGTGSGMGTLLISKIREEYPDRIMNTFSVMPSPKVSDTVVEPYNATLSVHQLVENTDETYCIDNEALYDICFRTLKLTTPTYGDLNHLVSATMSGVTTCLRFPGQLNADLRKLAVNMVPFPRLHFFMPGFAPLTSRGSQQYRALTVPELTQQMFDSKNMMAACDPRHGRYLTVAAIFRGRMSMKEVDEQMLNVQNKNSSYFVEWIPNNVKTAVCDIPPRGLKMSATFIGNSTAIQELFKRISEQFTAMFRRKAFLHWYTGEGMDEMEFTEAESNMNDLVSEYQQYQDATADEQGEFEEEEGEDEA

SEQ ID NO: 53456 - protein, 76 aa, Homo sapiens
VLEYLTAEILELAGNAARDNKKTRIIPRHLQLAIRNDEELNKLLGKVTIAQGGVLPNIQAVLLPKKTESHHKAKGK

SEQ ID NO: 53457 - protein, 211 aa, Homo sapiens
IPAPAEKTPVKKKAKKAGATAGKRKASGPPVSELITKAVAASKERSGVSLAALKKALAAAGYDVEKNNSRIKLGLKSLVSKGTLVQTKGTGASGSFKLNKKAASGEGKPKAKKAGAAKPRKPAGAAKKPKKVAGAATPKKSIKKTPKKVKKPATAAGTKKVAKSAKKVKTPQPKKAAKSPAKAKAPKPKAAKPKSGKPKVTKAKKAAPKKK

SEQ ID NO: 53458 - protein, 62 aa, Homo sapiens; identical to SEQ ID NO: 53267

SEQ ID NO: 53459 - protein, 165 aa, Homo sapiens
LEKSLGLSKGNKYSAQGERQIPVLQTNNGPSLTGLTTIAAHLVKQANKEYLLGSTAEEKAIVQQWLEYRVTQVDGHSSKNDIHTLLKDLNSYLEDKVYLTGYNFTLADILLYYGLHRFIVDLTVQEKEKYLNVSRWFCHIQHYPGIRQHLSSVVFIKNRLYTNSH

SEQ ID NO: 53460 - protein, 44 aa, Homo sapiens
VKKPHRYRPGTVALREIRRYQKSAELLIRKLPFQRLVREIAQDF

SEQ ID NO: 53461 - protein, 24 aa, Homo sapiens
IHAKRVTIMPKDIQLARRIRGERA

SEQ ID NO: 53462 - protein, 97 aa, Homo sapiens
LLRKGNYAERVGAGAPVYLAAVLEYLTAEILELAGNAARDNKKTRIIPRHLQLAIRNDEELNKLLGKVTIAQGGVLPNIQAVLLPKKTESHHKAKGK

SEQ ID NO: 53463 - protein, 61 aa, Homo sapiens
VSYKCNECERSFTRNRSLIEHQKIHTGEKPYQCDTCGKGFTRTSYLVQHQRSHVGKKTLSQ

SEQ ID NO: 53464 - protein, 11 aa, Homo sapiens
KKKFHKASQED

SEQ ID NO: 53465 - protein, 121 aa, Homo sapiens
KSAPAPKKGSKKAVTKAQKKDGKKRKRSRKESYSVYVYKVLKQVHPDTGISSKAMGIMNSFVNDIFERIASEASRLAHYNKRSTITSREIQTAVRLLLPGELAKHAVSEGTKAVTKYTSSK

SEQ ID NO: 53466 - protein, 52 aa, Homo sapiens
IIPRHLQLAIRNDEELNKLLGKVTIAQGGVLPNIQAVLLPKKTESHHKAKGK

SEQ ID NO: 53467 - protein, 180 aa, Homo sapiens
ITKAVAASKERNGLSLAALKKALAAGGYDVEKNNSRIKLGLKSLVSKGTLVQTKGTGASGSFKLNKKAASGEAKPKAKKAGAAKAKKPAGATPKKAKKAAGAKKAVKKTPKKAKKPAAAGVKKVAKSPKKAKAAAKPKKATKSPAKPKAVKPKAAKPKAAKPKAAKPKAAKAKKAAAKKK

SEQ ID NO: 53468 - protein, 5 aa, Homo sapiens
LSLML

SEQ ID NO: 53469 - protein, 20 aa, Homo sapiens
LEMEDEDTIDVFQQQTGGVY

SEQ ID NO: 53470 - protein, 70 aa, Homo sapiens
IWANTSPEAELFPALRPRRVGIALDYEGGTVTFTNAESQELIYTFTATFTRRLVPFLWLKWPGTRLLLRP

SEQ ID NO: 53471 - protein, 35 aa, Homo sapiens
MSNRPVCRHFMMKGNCRYENNCAFYHPGVNGPPLP

SEQ ID NO: 53472 - protein, 33 aa, Homo sapiens
LEVAPHYYKAKELEDPHAKKMPKKIGKTREELG

SEQ ID NO: 53473 - protein, 467 aa, Homo sapiens
RETRERRLGIGGAQELSLRPLEARDWRQSPGEVGDRSSRLSEAWKWRLSPGETPERSLRLAESREQSPRRKEVESRLSPGESAYQKLGLTEAHKWRPDSRESQEQSLVQLEATEWRLRSGEERQDYSEECGRKEEWPVPGVAPKETAELSETLTREAQGNSSAGVEAAEQRPVEDGERGMKPTEGWKWTLNSGKAREWTPRDIEAQTQKPEPPESAEKLLESPGVEAGEGEAEKEEAGAQGRPLRALQNCCSVPSPLPPEDAGTGGLRQQEEEAVELQPPPPAPLSPPPPAPTAPQPPGDPLMSRLFYGVKAGPGVGAPRRSGHTFTVNPRRSVPPATPATPTSPATVDAAVPGAGKKRYPTAEEILVLGGYLRLSRSCLAKGSPERHHKQLKISFSETALETTYQYPSESSVLEELGPEPEVPSAPNPPAAQPDDEEDEEELLLLQPELQGGLRTKALIVDESCRR

SEQ ID NO: 53474 - protein, 30 aa, Homo sapiens
RPAPWPPGVWPSACSRRPPAPCACSTSQSP

SEQ ID NO: 53475 - protein, 144 aa, Homo sapiens
INGAITQFSCNISHLSSLIAQLEEKQQQPTRELLQDIGDTLSRAERIRIPEPWITPPDLQEKIHIFAQKCLFLTESLKQFTEKMQSDMEKIQELREAQLYSVDVTLDPDTAYPSLILSDNLRQVRYSYLQQDLPDNPERSPSTT

SEQ ID NO: 53476 - protein, 74 aa, Homo sapiens
LDYDAGEVSFYNVTERCHTFTFSHATFCGPVRPYFSLSYSGGKSAAPLIICPMSGIDGFSGHVGNHGHSMETSP

SEQ ID NO: 53477 - protein, 5 aa, Homo sapiens
MPWHL

SEQ ID NO: 53478 - protein, 344 aa, Homo sapiens
LTETWAGSHSMRYFYTSVSRPGRGEPRFISVGYVDDTQFVRFDSDAASPREEPRAPWIEQEGPEYWDRNTQIYKAQAQTDRESLRNLRGYYNQSEAGSHTLQSMYGCDVGPDGRLLRGHDQYAYDGKDYIALNEDLRSWTAADTAAQITQRKWEAAREAEQRRAYLEGECVEWLRRYLENGKDKLERADPPKTHVTHHPISDHEATLRCWALGFYPAEITLTWQRDGEDQTQDTELVETRPAGDRTFQKWAAVVVPSGEEQRYTCHVQHEGLPKPLTLRWEPSSQSTVPIVGIVAGLAVLAVVVIGAVVAAVMCRRKSSGGKGGSYSQAACSDSAQGSDVSLTA

SEQ ID NO: 53479 - protein, 63 aa, Homo sapiens
LETYCKQKYPEQQGRFAKLLLRLPALRSIGLKCLEHLFFFKLIGDTPIDTFLMEMLEAPHQLA

SEQ ID NO: 53480 - protein, 226 aa, Homo sapiens
LLELPPEESLPLGPLLGDTAVIQGDTALITRPWSPARRPEVDGVRKALQDLGLRIVEIGDENATLDGTDVLFTGREFFVGLSKWTNHRGAEIVADTFRDFAVSTVPVSGPSHLRGLCGMGGPRTVVAGSSDAAQKAVRAMAVLTDHPYASLTLPDDAAADCLFLRPGLPGVPPFLLHRGGGDLPNSQEALQKLSDVTLVPVSCSELEKAGAGLSSLCLVLSTRPHS

SEQ ID NO: 53481 - protein, 92 aa, Homo sapiens
LKGKNVIHPFLSRSLPIVFDEFVDMDFGTGAVKITPAHDQNDYEVGQRHGLEAISIMDSRGALINVPPPFLVRLPEARVPGSGRWRDGWASP

SEQ ID NO: 53482 - protein, 18 aa, Homo sapiens
IPWTSSMESPCRASTTSC

SEQ ID NO: 53483 - protein, 356 aa, Homo sapiens [sequence omitted]

SEQ ID NO: 53484 - protein, 183 aa, Homo sapiens
METDGGGWLVFQRRMDGQTDFWRDWEDYAHGFGNISGEFWLGNEALHSLTQAGDYSMRVDLRAGDEAVFAQYDSFHVDSAAEYYRLHLEGYHGTAGDSMSYHSGSVFSARDRDPNSLLISCAVSYRGAWWYRNCHYANLNGLYGSTVDHQGVSWYHWKGFEFSVPFTEMKLRPRNFRSPAGGG

SEQ ID NO: 53485 - protein, 447 aa, Homo sapiens
KSLSLLLAVALGLATAVSAGPAVIECWFVEDASGKGLAKRPGALLLRQGPGEPPPRPDLDPELYLSVHDPAGALQAAFRRYPRGAPAPHCEMSRFVPLPASAKWASGLTPAQNCPRALDGAWLMVSISSPVLSLSSLLRPQPEPQQEPVLITMATVVLTVLTHTPAPRVRLGQDALLDLSFAYMPPTSEAASSLAPGPPPFGLEWRRQHLGKGHLLLAATPGLNGQMPAAQEGAVAFAAWDDDEPWGPWTGNGTFWLPTVQPFQEGTYLATIHLPYLQGQVTLELAVYKPPKVSLMPATLARAAPGEAPPELLCLVSHFYPSGGLEVEWELRGGPGGRSQKAEGQRWLSALRHHSDGSVSLSGHLQPPPVTTEQHGARYACRIHHPSLPASGRSAEVTLEVAGLSGPSLEDSVGLFLSAFLLLGLFKALGWAAVYLSTCKDSKKKAE

SEQ ID NO: 53486 - protein, 61 aa, Homo sapiens
MRAERAWPRDPVHCCCARDRGNRRPGRTSTLSSISVYTTPRAPSRLPSGGIPGAPPHHTAR

SEQ ID NO: 53487 - protein, 4 aa, Homo sapiens
RALP

SEQ ID NO: 53488 - protein, 14 aa, Homo sapiens
RNSEIPTTSSLRGI

SEQ ID NO: 53489 - protein, 41 aa, Homo sapiens
IPSPARLSQTPHSQPPRPGTCKTSVATQCDPEEIIVLSDSD

SEQ ID NO: 53490 - protein, 57 aa, Homo sapiens
IVNIARQMRHRSLARELSGTIKEIPGTAQSMGCNVDGHHPHDIIDDINSGAVECPAS

SEQ ID NO: 53491 - protein, 161 aa, Homo sapiens
LSFVWMPALLPVASRLLLLPRVLLTMASGSPPTQPSPASDSGSGYVPGSVSAAFVTCPNEKVAKEIARAVVEKRLAACVNLIPQITSIYEWKGKIEEDSEVLMMIKTQSSLVPALTDFVRSVHPYEVAEVIALPVEQGNFPYLQWVRQVTESVSDSITVLP

SEQ ID NO: 53492 - protein, 49 aa, Homo sapiens
LHHCIARWIAQRGGWVAALNLGNGPILNVLVVLGVVLLGQFVVRRFFKS

SEQ ID NO: 53493 - protein, 116 aa, Homo sapiens
KLCEEWPVDETKRGRDLGAYLRQRVAQAFREGENTQVAEPEACDQMYESLARLHSNYYKHKYPRPRDTSFSGLSLEEYKLILSTDTLEELKEIDKGMWKKLQEKFAPKGPEEDHKA

SEQ ID NO: 53494 - protein, 15 aa, Homo sapiens
VWRWTKPSSFSDSER

SEQ ID NO: 53495 - protein, 41 aa, Homo sapiens
VNPCCLGFIAFAYSVKSRDRKMVGDLTGAQAYASTAKCLNI

SEQ ID NO: 53496 - protein, 265 aa, Homo sapiens
LLGFQLNPAGCAFFLDMTNWNLQAAIGAYYDFESPNISVPSMSFVEDVTIGEGESIPPDTQFVKTWRIQNSGAEAWPPGVCLKYVGGDQFGHVNMVMVRSLEPQEIADVSVQMCSPSRAGMYQGQWRMCTATGLYYGDVIWVILSVEVGGLLGVTQQLSSFETEFNTQPHRKVEGNFNPFASPQKNRQSDENNLKDPGGSEFDSISKNTWAPAPDTWAPAPDQTEQDQNRLSQNSVNLSPSSHANNLSVVTYSKGLHGPYPFGQS

SEQ ID NO: 53497 - protein, 57 aa, Homo sapiens
LDEATSALDVQCEQALQDWNSRGDRTVLVIAHRLQTVQRAHQILVLQEGKLQKLAQL

SEQ ID NO: 53498 - protein, 326 aa, Homo sapiens
RMDGGSGGLGSGDNAPTTEALFVALGAGVTALSHPLLYVKLLIQVGHEPMPPTLGTNVLGRKVLYLPSFFTYAKYIVQVDGKIGLFRGLSPRLMSNALSTVTRGSMKKVFPPDEIEQVSNKDDMKTSLKKVVKETSYEMMMQCVSRMLAHPLHVISMRCMVQFVGREAKYSGVLSSIGKIFKEEGLLGFFVGLIPHLLGDVVFLWGCNLLAHFINAYLVDDSVSDTPGGLGNDQNPGSQFSQALAIRSYTKFVMGIAVSMLTYPFLLVGDLMAVNNCGLQAGLPPYSPVFKSWIHCWKYLSVQGQLFRGSSLLFRRVSSGSCFALE

SEQ ID NO: 53499 - protein, 126 aa, Homo sapiens
IDTKEKKEKKQKVDEDEIQKMQILVSSFSEEQLNRYEMYRRSAFPKAAIKRLIQSITGTSVSQNVVIAMSGISKVFVGEVVEEALDVCEKWGEMPPLQPKHMREAVRRLKSKGQIPNSKHKKIIFF

SEQ ID NO: 53500 - protein, 683 aa, Homo sapiens
LLSPEDWGLQNSTLYSGLDEVAEEQTQLFRCPEQDVPFDGSSLDVGMDVSPSEPPWELLPIFPDLQVKSEPSSPCSSSSLSSESSRLSTEPSSEALGVGEVLHVKTESLAPPLCLLGDDPTSSFETVQINVIPTSDDSSDVQTKIEPVSPCSSVNSEASLLSADSSSQAFIGEEVLEVKTESLSPSGCLLWDVPAPSLGAVQISMGPSLDGSSGKALPTRKPPLQPKPVVLTTVPMPSRAVPPSTTVLLQSLVQPPPVSPVVLIQGAIRVQPEGPAPSLPRPERKSIVPAPMPGNSCPPEVDAKLLKRQQRMIKNRESACQSRRKKKEYLQGLEARLQAVLADNQQLRRENAALRRRLEALLAENSELKLGSGNRKVVCIMVFLLFIAFNFGPVSISEPPSAPISPRMNKGEPQPRRHLLGFSEQEPVQGVEPLQGSSQGPKEPQPSPTDQPSFSNLTAFPGGAKELLLRDLDQLFLSSDCRHFNRTESLRLADELSGWVQRHQRGRRKIPQRAQERQKSQPRKKSPPVKAVPIQPPGPPERDSVGQLQLYRHPDRSQPAFLDAIDRREDTFYVVSFRRDHLLLPAISHNKTSRPKMSLVMPAMAPNETLSGRGAPGDYEEMMQIECEVMDTRVIHIKTSTVPPSLRKQPSPTPGNATGGPLPVSAASQAHQASHQPLYLNHP

SEQ ID NO: 53501 - protein, 203 aa, Homo sapiens
RTSTIFLNGNRERPLNVFCDMETDGGGWLVFQRRMDGQTDFWRDWEDYAHGFGNISGEFWLGNEALHSLTQAGDYSMRVDLRAGDEAVFAQYDSFHVDSAAEYYRLHLEGYHGTAGDSMSYHSGSVFSARDRDPNSLLISCAVSYRGAWWYRNCHYANLNGLYGSTVDHQGVSWYHWKGFEFSVPFTEMKLRPRNFRSPAGGG

SEQ ID NO: 53502 - protein, 4 aa, Homo sapiens
IGRG

SEQ ID NO: 53503 - protein, 192 aa, Homo sapiens
VCRRLWQGLGNFSVNTSKGNTAKNGGLLLSTNMKWVQFSNLHVDVPKDLTKPVVTISDEPDILYKRLSVLVKGHDKAVLDSYEYFAVLAAKELGISIKVHEPPRKIERFTLLQSVHIYKKHRVQYEMRTLYRCLELEHLTGSTADVYLEYIQRNLPEGVAMEVTKTQLEQLPEHIKEPIWETLSEEKEESKS

SEQ ID NO: 53504 - protein, 173 aa, Homo sapiens
TDEAALSCCSDADPSTKDFLLQQTMLRVKDPKKSLDFYTRVLGMTLIQKCDFPIMKFSLYFLAYEDKNDIPKEKDEKIAWALSRKATLELTHNWGTEDDETQSYHNGNSDPRGFGHIGIAVPDVYSACKRFEELGVKFVKKPDDGKMKGLAFIQDPDGYWIEILNPNKMATLM

SEQ ID NO: 53505 - protein, 216 aa, Homo sapiens
LQPKKRFAFKTRGKDAASSTKVDAAPGIPPAVESIQDSPLPKKAEGDLGPSWVCGFSNLESQVLEKRASELHQRDVLLTELSNCTVRLYGNPNTLRLTKAHSCKLLCGPVSTSVFLEDCSDCVLAVACQQLRIHSTKDTRIFLQVTSRAIVEDCSGIQFAPYTWSYPEIDKDFESSGLDRSKNNWNDVDDFNWLARDMASPNWSILPEEERNIQWD

SEQ ID NO: 53506 - protein, 22 aa, Homo sapiens
KTSPKPKIIQTRRPGLPPSVSN

SEQ ID NO: 53507 - protein, 157 aa, Homo sapiens
IFPNQTEELGHQGPSEGTGDWSSEEPEEEQEETGSGPAGYSYQPLNQDPEQEEVELAPVGDGDVVADIQDRIQALGLHLPDPPLESEDEDEEGATALNNHSSIPMDPEHVELVKRTMAGVSLPAPGVPAWAREISDAQWEDVVQKALQARQASPAWK

SEQ ID NO: 53508 - protein, 79 aa, Homo sapiens
MMAGIDDCYTSAQGCTATLGNFAKATFDAISKTYSYLTPDLWKETVFTKSPYQEFTDHLVKTHTRVSVQQTQAPAVATT

SEQ ID NO: 53509 - protein, 61 aa, Homo sapiens
KRRKDQFKRLIAGCIGKPLGEQFRKEVHIKNLPSLFKKTKPMLETEVLDNDGGGLATIFEP

SEQ ID NO: 53510 - protein, 144 aa, Homo sapiens
ITATPKESPNPPNPSGQCPICRWNLKHKYNYDDVLLLSQFIRPHGGMLPRKITGLCQEEHRKIEECVKMAHRAGLLPNHRPRLPEGVVPKSKPQLNRYLTRWAPGSVKPIYKKGPRWNRVRMPVGSPLLRDNVCYSRTPWKLYH

SEQ ID NO: 53511 - protein, 69 aa, Homo sapiens
MCEYMINFIHKLKHLPEKYMMNSVLENFTILQVVTSRDSQETLLVIAFVFEVSTSEHGAQHHVYKLVKD

SEQ ID NO: 53512 - protein, 433 aa, Homo sapiens
ITSKKDRGVLKIVKRVGNGEETPMIGDKVYVHYKGKLSNGKKFDSSHDRNEPFVFSLGKGQVIKAWDIGVATMKKGEICHLLCKPEYAYGSAGSLPKIPSNATLFFEIELLDFKGEDLFEDGGIIRRTKRKGEGYSNPNEGATVEIHLEGRCGGRMFDCRDVAFTVGEGEDHDIPIGIDKALEKMQREEQCILYLGPRYGFGEAGKPKFGIEPNAELIYEVTLKSFEKAKESWEMDTKEKLEQAAIVKEKGTVYFKGGKYMQAVIQYGKIVSWLEMEYGLSEKESKASESFLLAAFLNLAMCYLKLREYTKAVECCDKALGLDSANEKGLYRRGEAQLLMNEFESAKGDFEKVLEVNPQNKAARLQISMCQKKAKEHNERDRRIYANMFKKFAEQDAKEEANKAMGKKTSEGVTNEKGTDSQAMEEEKPEGHV

SEQ ID NO: 53513 - protein, 161 aa, Homo sapiens
IADLGNACWVHKHFTEDIQTRQYRSLEVLIGSGYNTPADIWSTACMAFELATGDYLFEPHSGEEYTRDEDHIALIIELLGKVPRKLIVAGKYSKEFFTKKGDLKHITKLKPWGLFEVLVEKYEWSQEEAAGFTDFLLPMLELIPEKRATAAECLRHPWLNS

SEQ ID NO: 53514 - protein, 64 aa, Homo sapiens
LEKNVNQSLLELHKLATDKNDPHLCDFIETHYLNEQVKAIKELGERDQLAQDGSTRIWLGRISL

SEQ ID NO: 53515 - protein, 106 aa, Homo sapiens
ILNSNDVTGLRESEEKLKQQQQESARRENILVMRLATKEQEMQECTTQIQYLKQVQQPSVAQLRSTMVDPAINLFFLKMKGELEQTKDKLEQAQNELSAWKFTPDR

SEQ ID NO: 53516 - protein, 7 aa, Homo sapiens
RFSNGTF

SEQ ID NO: 53517 - protein, 98 aa, Homo sapiens
VYAHFPINVVIQENGSLVEIRNFLGKKYIRRVWMRAGVVCSVSQAQKDELILEGNDIELVSNSAALIQQATTVKKKDIREFLDGIYVSEKGTGQQADE

SEQ ID NO: 53518 - protein, 8 aa, Homo sapiens
LFSSDLGT

SEQ ID NO: 53519 - protein, 84 aa, Homo sapiens
VVGVAASGEEIATRPFQLVTGRTWKGTAFGGWKSVESVPKLVSEYMSKKIKVDEFVTHNLSFGEINKAFQLMHSGKSIRTVVKI

SEQ ID NO: 53520 - protein, 328 aa, Homo sapiens
LVQRVAKLRDEIMALRNECSSVYSKGRILTTEQTKLMISGITQSLNSGFAQTLHPSLTSGLTQSLTPSLTSSSMTSGLSSGMTSRLTPSVTPAYTPGFPSGLVPNFSSGVEPNSLQTLKLMQIRKPLLKSSLLDQNLTEEEINMKFVQDLLNWVDEMQVQLDRTEWGSDLPSVESHLENHKNVHRAIEEFESSLKEAKISEIQMTAPLKLTYAEKLHRLESQYAKLLNTSRNQERHLDTLHNFVSRATNELIWLNEKEEEEVAYDWSERNTNIARKKDYHAELMRELDQKEENIKSVQEIAEQLLLENHPARLTIEVKLESVMVLVEY

SEQ ID NO: 53521 - protein, 212 aa, Homo sapiens
IQRYCKGIFTKDYKKTIGVDFLERQIQVNDEDVRLMLWDTAGQEEFDAITKAYYRGAQACVLVFSTTDRESFEAVSSWREKVVAEVGDIPTVLVQNKIDLLDDSCIKNEEAEALAKRLKLRFYRTSVKEDLNVNEVFKYLAEKYLQKLKQQIAEDPELTHSSSNKIGVFNTSGGSHSGQNSGTLNGGDVINLRPNKQRTKKNRNPFSSCSIP

SEQ ID NO: 53522 - protein, 87 aa, Homo sapiens
VTIGHTALSLYTDCPFPKWMHWALIAYAISFIFLFLNFYIRTYKEPKKPKAGKTAMNGISANGVSKSEKQLMIENGKKQKNGKAKGD

SEQ ID NO: 53523 - protein, 34 aa, Homo sapiens
RVIISAPSADPPMFTMGVNHEKYDNSLKIISNAT

SEQ ID NO: 53524 - protein, 11 aa, Homo sapiens
VDLMAHMASKE

SEQ ID NO: 53525 - protein, 449 aa, Homo sapiens
VALGGHYMAEGEGYFAMSEDELACSPYIPLGGDFGGGDFGGGDFGGGDFGGGGSFGGHCLDYCESPTAHCNVLNWEQVQRLDGILSETIPIHGRGNFPTLELQPSLIVKVVRRRLAEKRIGVRDVRLNGSAASHVLHQDSGLGYKDLDLIFCADLRGEGEFQTVKDVVLDCLLDFLPEGVNKEKITPLTLKEAYVQKMVKVCNDSDRWSLISLSNNSGKNVELKFVDSLRRQFEFSVDSFQIKLDSLLLFYECSENPMTETFHPTIIGESVYGDFQEAFDHLCNKIIATRNPEEIRGGGLLKYCNLLVRGFRPASDEIKTLQRYMCSRFFIDFSDIGEQQRKLESYLQNHFVGLEDRKYEYLMTLHGVVNESTVCLMGHERRQTLNLITMLAIRVLADQNVIPNVANVTCYYQPAPYVADANFSNYYIAQVQPVFTCQQQTYSTWLPCN

SEQ ID NO: 53526 - protein, 24 aa, Homo sapiens
LPSLRMSPFVALCGPCGIHRRSFI

SEQ ID NO: 53527 - protein, 4 aa, Homo sapiens
KHGC

SEQ ID NO: 53528 - protein, 545 aa, Homo sapiens
LAFTLEERQQLNIHGLLPPSFNSQEIQVLRVVKNFEHLNSDFDRYLLLMDLQDRNEKLFYRVLTSDIEKFMPIVYTPTVGLACQQYSLVFRKPRGLFITIHDRGHIASVLNAWPEDVIKAIVVTDGERILGLGDLGCNGMGIPVGKLALYTACGGMNPQECLPVILDVGTENEELLKDPLYIGLRQRRVRGSEYDDFLDEFMEAVSSKYGMNCLIQFEDFANVNAFRLLNKYRNQYCTFNDDIQGTASVAVAGLLAALRITKNKLSDQTILFQGAGEAALGIAHLIVMALEKEGLPKEKAIKKIWLVDSKGLIVKGRASLTQEKEKFAHEHEEMKNLEAIVQEIKPTALIGVAAIGGAFSEQILKDMAAFNERPIIFALSNPTSKAECSAEQCYKITKGRAIFASGSPFDPVTLPNGQTLYPGQGNNSYVFPGVALGVVACGLRQITDNIFLTTAEVIAQQVSDKHLEEGRLYPPLNTIRDVSLKIAEKIVKDAYQEKTATVYPEPQNKEAFVRSQMYSTDYDQILPDCYSWPEEVQKIQTKVDQ

SEQ ID NO: 53529 - protein, 458 aa, Homo sapiens
KRFHEIGTEMIITKAGRRMFPAMRVKISGLDPHQQYYIAMDIVPVDNKRYRYVYHSSKWMVAGNADSPVPPRVYIHPDSPASGETWMRQVISFDKLKLTNNELDDQGHIILHSMHKYQPRVHVIRKDCGDDLSPIKPVPSGEGVKAFSFPETVFTTVTAYQNQQITRLKIDRNPFAKGFRDSGRNRMGLEALVESYAFWRPSLRTLTFEDIPGIPKQGNASSSTLLQGTGNGVPATHPHLLSGSSCSSPAFHLGPNTSQLCSLAPADYSACARSGLTLNRYSTSLAETYNRLTNQAGETFAPPRTPSYVGVSSSTSVNMSMGGTDGDTFSCPQTSLSMQISGMSPQLQYIMPSPSSNAFATNQTHQGSYNTFRLHSPCALYGYNFSTSPKLAASPEKIVSSQGSFLGSSPSGTMTDRQMLPPVEGVHLLSSGGQQSFFDSRTLGSLTLSSSQVSAHMV

SEQ ID NO: 53530 - protein, 145 aa, Homo sapiens
IQDFKGLLLSDYKFSWDRVFQSRGDTGVFLQYTHARLHSLEETFGCGYLNDFNTACLQEPQSVSILQHLLRFDEVLYKSSQDFQPRHIVSYLLTLSHLAAVAHKTLQIKDSPPEVAGARLHLFKAVRSVLANGMKLLGITPVCRM

SEQ ID NO: 53531 - protein, 40 aa, Homo sapiens
KVHLDKAQQNNVEHKVEIFSGVYKKLTGKDVNFEFPEFQL

SEQ ID NO: 53532 - protein, 12 aa, Homo sapiens
LKEGSHIISIRL

SEQ ID NO: 53533 - protein, 142 aa, Homo sapiens
ITTSGPTSEKPTRSHPWTPDDSTDTNGSDNSIPMAYLTLDHQLQPLAPCPNSKESMAVFEQHCKMAQEYMKVQTEIALLLQRKQELVAELDQDEKDQQNTSRLVQEHKKLLDENKSLSTYYQQCKKQLEVIRSQQQKRQGTS

SEQ ID NO: 53534 - protein, 167 aa, Homo sapiens
IRNFNLENRAEREISKMKPSVAPRHPSTNSLLREQISLYPEVKGEIARKDEKLLSFLKDVYVDSKDPVSSLQVKAAETCQEPKEFRLPKDHHFDMINIKSIPKGKISIVEALTLLNNHKLFPETWTAEKIMQEYQLEQKDVNSLLKYFVTFEVEIFPPEDKKAIRSK

SEQ ID NO: 53535 - protein, 36 aa, Homo sapiens
VDSQILPKIKSIPQLQCYLRSVFALTNGIYPHKLVF

SEQ ID NO: 53536 - protein, 70 aa, Homo sapiens
IDWAALAQAWIAQREASGQQSMVEQPPGMMPNGQDMSTMESGPNNHGNFQGDSNFNRMWQPGLLFMFSQF

SEQ ID NO: 53537 - protein, 311 aa, Homo sapiens
KSPAVKRLMKEAAELKDPTDHYHAQPLEDNLFEWHFTVRGPPDSDFDGGVYHGRIVLPPEYPMKPPSIILLTANGRFEVGKKICLSISGHHPETWQPSWSIRTALLAIIGFMPTKGEGAIGSLDYTPEERRALAKKSQDFCCEGCGSAMKDVLLPLKSGSDSSQADQEAKELARQISFKAEVNSSGKTISESDLNHSFSLTDLQDDIPTTFQGATASTSYGLQNSSAASFHQPTQPVAKNTSMSPRQRRAQQQSQRRLSTSPDVIQGHQPRDNHTDHGGSAVLIVILTLALAALIFRRIYLANEYIFDFEL

SEQ ID NO: 53538 - protein, 29 aa, Homo sapiens
ILRDVNALPETLSDALRQWFELVTASDHP

SEQ ID NO: 53539 - protein, 29 aa, Homo sapiens
KLPEYPSKEILKDRLLVALHCGSYGYTMA

SEQ ID NO: 53540 - protein, 40 aa, Homo sapiens
VSSPHQRASAKMKPIEEGAEDDDDVFEPASPNTLKVHQLP

SEQ ID NO: 53541 - protein, 458 aa, Homo sapiens
KTHINIVVIGHVDSGKSTTTGHLIYKCGGIDKRTIEKFEKEAAEMGKGSFKYAWVLDKLKAERERGITIDISLWKFETSKYYVTIIDAPGHRDFIKNMITGTSQADCAVLIVAAGVGEFEAGISKNGQTREHALLAYTLGVKQLIVGVNKMDSTEPPYSQKRYEEIVKEVSTYIKKIGYNPDTVAFVPISGWNGDNMLEPSANMPWFKGWKVTRKDGNASGTTLLEALDCILPPTRPTDKPLRLPLQDVYKIGGIGTVPVGRVETGVLKPGMVVTFAPVNVTTEVKSVEMHHEALSEALPGDNVGFNVKNVSVKDVRRGNVAGDSKNDPPMEAAGFTAQVIILNHPGQISAGYAPVLDCHTAHIACKFAELKEKIDRRSGKKLEDGPKFLKSGDAAIVDMVPGKPMCVESFSDYPPLGRFAVRDMRQTVAVGVIKAVDKKAAGAGKVTKSAQKAQKAK

SEQ ID NO: 53542 - protein, 898 aa, Homo sapiens
IHILMIFWSFVAGVVTFYCSLGPDSLLPNIFFTIKYKPKQLGLQELFPQGHSCAVCGKVKCKRHRPSLLLENYQPWLDLKISSKVDASLSEVLELVLENFVYPWYRDVTDDESFVDELRITLRFFASVLIRRIHKVDIPSIITKKLLKAAMKHIEVIVKARQKVKNTEFLQQAALEEYGPELHVALRSRRDELHYLRKLTELLFPYILPPKATDCRSLTLLIREILSGSVFLPSLDFLADPDTVNHLLIIFIDDSPPEKATEPASPLVPFLQKFAEPRNKKPSVLKLELKQIREQQDLLFRFMNFLKQEGAVHVLQFCLTVEEFNDRILRPELSNDEMLSLHEELQKIYKTYCLDESIDKIRFDPFIVEEIQRIAEGPYIDVVKLQTMRCLFEAYEHVLSLLENVFTPMFCHSDEYFRQLLRGAESPTRNSKLNRGSLSLDDFRNTQKRGESFGISRIGSKIKGVFKSTTMEGAMLPNYGVAEGEDDFIEEGIVVMEDDSPVEAVSTPNTPRNLAAWKISIPYVDFFEDPSSERKEKKERIPVFCIDVERNDRRAVGHEPEHWSVYRRYLEFYVLESKLTEFHGAFPDAQLPSKRIIGPKNYEFLKSKREEFQEYLQKLLQHPELSNSQLLADFLSPNGGETQFLDKILPDVNLGKIIKSVPGKLMKEKGQHLEPFIMNFINSCESPKPKPSRPELTILSPTSENNKKLFNDLFKNNANRAENTERKQNQNYFMEVMTVEGVYDYLMYVGRVVFQVPDWLHHLLMGTRILFKNTLEMYTDYYLQCKLEQLFQEHRLVSLITLLRDAIFCENTEPRSLQDKQKGAKQTFEEMMNYIPDLLVKCIGEETKYESIRLLFDGLQQPVLNKQLTYVLLDIVIQELFPELNKVQKEVTSVTSWM

SEQ ID NO: 53543 - protein, 53 aa, Homo sapiens
LECDISARMLKYRFPAGTMALSSVAQWSSSEDAKIHEKTSRTSGRIFNGKSLG

SEQ ID NO: 53544 - protein, 106 aa, Homo sapiens
RIVNDTYRTDLCLLYPPFMIALACLHVACVVQQKDARQWFAELSVDMEKILEIIRVILKLYEQWKNFDERKEMATILSKMPKPKPPPNSEGEQGPNGSQNSSYSQS

SEQ ID NO: 53545 - protein, 4 aa, Homo sapiens
RKSL

SEQ ID NO: 53546 - protein, 229 aa, Homo sapiens
LVTDKVKKHFQKVMRQEDISEIWFEYEGTPLKWHYPIGLLFDLLASSSALPWNITVHFKSFPEKDLLHCPSKDAIEAHFMSCMKEADALKHKSQVINEMQKKDHKQLWMGLQNDRFDQFWAINRKLMEYPAEENGFRYIPFRIYQTTTERPFIQKLFRPVAADGQLHTLGDLLKEVCPSAIDPEDGEKKNQVMIHGIEPMLETPLQWLSEHLSYPDNFLHISIIPQPTD

SEQ ID NO: 53547 - protein, 16 aa, Homo sapiens
TPPMVVVGIVGYVETP

SEQ ID NO: 53548 - protein, 42 aa, Homo sapiens
KIDLKFIDTTSKFGHGCFQTMEQKKAFMGPLKKDGIAKEEGA

SEQ ID NO: 53549 - protein, 335 aa, Homo sapiens
VMEPGPTAAQRRCSLPPWLPLGLLLWSGLALGALPFGSSPHRVFHDLLSEQQLLEVEDLSLSLLQGGGLGPLSLPPDLPDLDPECRELLLDFANSSAELTGCLVRSARPVRLCQTCYPLFQQVVSKMDNISRAAGNTSESQSCARSLLMADRMQIVVILSEFFNTTWQEANCANCLTNNSEELSNSTVYFLNLFNHTLTCFEHNLQGNAHSLLQTKNYSEVCKNCREAYKTLSSLYSEMQKMNELENKAEPGTHLCIDVEDAMNITRKLWSRTFNCSVPCSDTVPVIAVSVFILFLPVVFYLSSFLHSEQKKRKLILPKRLKSSTSFANIQENSN

SEQ ID NO: 53550 - protein, 4 aa, Homo sapiens
IRHA

SEQ ID NO: 53551 - protein, 16 aa, Homo sapiens
IKRHTPLSKLMKAYCE

SEQ ID NO: 53552 - protein, 58 aa, Homo sapiens
IANVAHTFVVDVAQGTQVTGRKADVIKAAHLCAEAALRLVKPGNQNTQVTEAWNKVAQ

SEQ ID NO: 53553 - protein, 5 aa, Homo sapiens
RILLR

SEQ ID NO: 53554 - protein, 38 aa, Homo sapiens
LWPNPLQYYLMGEGPRRGIRGPPRQPVESARSFRFQSG

SEQ ID NO: 53555 - protein, 429 aa, Homo sapiens
RTTPLQTHSIIISDQVPSDQDAHQYLRLRDQSEATQVMAEPGEGGSETVALPPPPPSEEGGVPQDAAGRGGTPQIRVVGGRGHVAIKAGQEEGQPPAEGLAAASVVMAADRSLKKGVQGGEKALEICGAQRSASELTAGAEAEAEEVKTGKCATVSAAVAERESAEVVKEGLAEKEVMEEQMEVEEQPPEGEEIEVAEEDRLEEEAREEEGPWPLHEALRMDPLEAIQLELDTVNAQADRAFQQLEHKFGRMRRHYLERRNYIIQNIPGFWMTAFRNHPQLSAMIRGQDAEMLRYITNLEVKELRHPRTGCKFKFFFRRNPYFRNKLIVKEYEVRSSGRVVSLSTPIIWRRGHEPQSFIRRNQDLICSFFTWFSDHSLPESDKIAEIIKEDLWPNPLQYYLLREGVRRARRRPLREPVEIPRPFGFQSG

SEQ ID NO: 53556 - protein, 21 aa, Homo sapiens
IVIAFYEERLTWHSCPEDEAQ

SEQ ID NO: 53557 - protein, 60 aa, Homo sapiens
ILPLAPRSECRANSIKEYQKSIWKVYVVSFTVIKTPAKYYSYSKENSSACRMGIVLIPCI

SEQ ID NO: 53558 - protein, 181 aa, Homo sapiens
VLCVLSADKNTTQHPNVTTLAPISNVTSAPVTSLPLVTTPAPETCEGRNSCVSCFNVSVVNTTCFWIECKDESYCSHNSTVSDCQVGNTTDFCSVSTATPVPTANSTAKPTVQPSPSTTSKTVTTSGTTNNTVTPTSQPVRKSTFDAASFIGGIVLVLGVQAVIFFLYKFCKSKERNYHTL

SEQ ID NO: 53559 - protein, 58 aa, Homo sapiens
LEAIRKGIQLRKVEEQREQEAKHERIENDVATILSRRIAVEYSDSEDDSEFDEVDWLE

SEQ ID NO: 53560 - protein, 441 aa, Homo sapiens
VGAPGGVSMFRWLEVLEKEFDKAFVDVDLLLGEIDPDQADITYEGRQKMTSLSSCFAQLCHKAQSVSQINHKLEAQLVDLKSELTETQAEKVVLEKEVHDQLLQLHSIQLQLHAKTGQSADSGTIKAKLSGPSVEELERELEANKKEKMKEAQLEAEVKLLRKENEALRRHIAVLQAEVYGARLAAKYLDKELAGRVQQIQLLGRDMKGPAHDKLWNQLEAEIHLHRHKTVIRACRGRNDLKRPMQAPPGHDQDSLKKSQGVGPIRKVLLLKEDHEGLGISITGGKEHGVPILISEIHPGQPADRCGGLHVGDAILAVNGVNLRDTKHKEAVTILSQQRGEIEFEVVYVAPEVDSDDENVEYEDESGHRYRLYLDELEGGGNPGASCKDTSGEIKVLQGFNKKAVTDTHENGDLGTASETPLDDGASKLDDLHTLYHKKSY

SEQ ID NO: 53561 - protein, 684 aa, Homo sapiens
TQDPAPQPRTPSGGEVWLLSGAAPDHWTAGAMPVGGLLPLFSSPAGGVLGGGLGGGGGRKGSGPAALRLTEKFVLLLVFSAFITLCFGAIFFLPDSSKLLSGVLFHSSPALQPAADHKPGPGARAEDAAEGRARRREEGAPGDPEAALEDNLARIRENHERALREAKETLQKLPEEIQRDILLEKKKVAQDQLRDKAPFRGLPPVDFVPPIGVESREPADAAIREKRAKIKEMMKHAWNNYKGYAWGLNELKPISKGGHSSSLFGNIKGATIVDALDTLFIMEMKHEFEEAKSWVEENLDFNVNAEISVFEVNIRFVGGLLSAYYLSGEEIFRKKAVELGVKLLPAFHTPSGIPWALLNMKSGIGRNWPWASGGSSILAEFGTLHLEFMHLSHLSGNPIFAEKVMNIRTVLNKLEKPQGLYPNYLNPSSGQWGQHHVSVGGLGDSFYEYLLKAWLMSDKTDLEAKKMYFDAVQAIETHLIRKSSSGLTYIAEWKGGLLEHKMGHLTCFAGGMFALGADAAPEGMAQHYLELGAEIARTCHESYNRTFMKLGPEAFRFDGGVEAIATRQNEKYYILRPEVMETYMYMWRLTHDPKYRKWAWEAVEALENHCRVNGGYSGLRDVYLLHESYDDVQQSFFLAETLKYLYLIFSDDDLLPLEHWIFNSEAHLLPILPKDKKEVEIREE

SEQ ID NO: 53562 - protein, 12 aa, Homo sapiens
KLSPSCLYPLLL

SEQ ID NO: 53563 - protein, 462 aa, Homo sapiens
IRCSCDVVEMGSVLGLCSMASWIPCLCGSAPCLLCRCCPSGNNSTVTRLIYALFLLVGVCVACVMLIPGMEEQLNKIPGFCENEKGVVPCNILVGYKAVYRLCFGLAMFYLLLSLLMIKVKSSSDPRAAVHNGFWFFKFAAAIAIIIGAFFIPEGTFTTVWFYVGMAGAFCFILIQLVLLIDFAHSWNESWVEKMEEGNSRCWYAALLSATALNYLLSLVAIVLFFVYYTHPASCSENKAFISVNMLLCVGASVMSILPKIQESQPRSGLLQSSVITVYTMYLTWSAMTNEPETNCNPSLLSIIGYNTTSTVPKEGQSVQWWHAQGIIGLILFLLCVFYSSIRTSNNSQVNKLTLTSDESTLIEDGGARSDGSLEDGDDVHRAVDNERDGVTYSYSFFHFMLFLASLYIMMTLTNWYRYEPSREMKSQWTAVWVKISSSWIGIVLYVWTLVAPLVLTNRDFD

SEQ ID NO: 53564 - protein, 13 aa, Homo sapiens
VWKCPVFAMPMLS

SEQ ID NO: 53565 - protein, 61 aa, Homo sapiens
VLKFAAATGATPIAGRFTPGTFTNQIQAAFWEPRLLVVTDPRADHQPLTEASYVNLPTIAL

SEQ ID NO: 53566 - protein, 21 aa, Homo sapiens
VEAPEQYRFCYDVALEYLESS

SEQ ID NO: 53567 - protein, 49 aa, Homo sapiens
VKTEAAKGTLTYSRMRGMVAILIAFMKQRRMGLNDFIQKIANNSYACKQ

SEQ ID NO: 53568 - protein, 32 aa, Homo sapiens
RERCFLEPRARFYAAEIASALGYLHSLNIVYR

SEQ ID NO: 53569 - protein, 64 aa, Homo sapiens
ITPPFNPNVSGPNDLRHFDPEFTEEPVPNSIGKSPDSVLVTASVKEAAEAFLGFSYAPPTDSFL

SEQ ID NO: 53570 - protein, 100 aa, Homo sapiens
ILIFNIEIPITKGFPVLLHYQTVSEPAVIKRLISVLNKSTGEVTKKKPKFLTKGQNALVELQTQRPIALELYKDFKELGRFMLRYGGSTIAAGVVTEIKE

SEQ ID NO: 53571 - protein, 909 aa, Homo sapiens
RSKSRSQSSSRSRSRSHSRKKRYSSRSRSRTYSRSRSRDRMYSRDYRRDYRNNRGMRRPYGYRGRGRGYYQGGGGRYHRGGYRPVWNRRHSRSPRRGRSRSRSPKRRSVSSQRSRSRSRRSYRSSRSPRSSSSRSSSPYSKSPVSKRRGSQEKQTKKAEGEPQEESPLKSKSQEEPKDTFEHDPSESIDEFNKSSATSGDIWPGLSAYDNSPRSPHSPSPIATPPSQSSSCSDAPMLSTVHSAKNTPSQHSHSIQHSPERSGSGSVGNGSSRYSPSQNSPIHHIPSRRSPAKTIAPQNAPRDESRGRSSFYPDGGDQETAKTGKFLKRFTDEESRVFLLDRGNTRDKEASKEKGSEKGRAEGEWEDQEALDYFSDKESGKQKFNDSEGDDTEETEDYRQFRKSVLADQGKSFATASHRNTEEEGLKYKSKVSLKGNRESDGFREEKNYKLKETGYVVERPSTTKDKHKEEDKNSERITVKKETQSPEQVKSEKLKDLFDYSPPLHKNLDAREKSTFREESPLRIKMIASDSHRPEVKLKMAPVPLDDSNRPASLTKDRLLASTLVHSVKKEQEFRSIFDHIKLPQASKSTSESFIQHIVSLVHHVKEQYFKSAAMTLNERFTSYQKATEEHSTRQKSPEIHRRIDISPSTLRKHTRLAGEERVFKEENQKGDKKLRCDSADLRHDIDRRRKERSKERGDSKGSRESSGSRKQEKTPKDYKEYKSYKDDSKHKREQDHSRSSSSSASPSSPSSREEKESKKEREEEFKTHHEMKEYSGFAGVSRPRGTFFRIRGRGRARGVFAGTNTGPNNSNTTFQKRPKEEEWDPEYTPKSKKYFLHDDRDDGVDYWAKRGRGRGTFQRGRGRFNFKKSGSSPKWTHDKYQGDGIVEDEEETMENNEEKKDRRKEEKE

SEQ ID NO: 53572 - protein, 41 aa, Homo sapiens
LQDFYDSTAGKFNHPEIVQLVSELEAERSTNIAAAASEPHS

SEQ ID NO: 53573 - protein, 32 aa, Homo sapiens
MALLFLLPLVMQGVSRAEMGTADLGPSSVAII

SEQ ID NO: 53574 - protein, 466 aa, Homo sapiens
LGPSSVPTPTNVTIESYNMNPIVYWEYQIMPQVPVFTVEVKNYGVKNSEWIDACINISHHYCNISDHVGDPSNSLWVRVKARVGQKESAYAKSEEFAVCRDGKIGPPKLDIRKEEKQIMIDIFHPSVFVNGDEQEVDYDPETTCYIRVYNVYVRMNGSEIQYKILTQKEDDCDEIQCQLAIPVSSLNSQYCVSAEGVLHVWGVTTEKSKEVCITIFNSSIKGSLWIPVVAALLLFLVLSLVFICFYIKKINPLKEKSIILPKSLISVVRSATLETKPESKYVSLITSYQPFSLEKEVVCEEPLSPATVPGMHTEDNPGKVEHTEELSSITEVVTTEENIPDVVPGSHLTPIERESSSPLSSNQSEPGSIALNSYHSRNCSESDHSRNGFDTDSSCLESHSSLSDSEFPPNNKGEIKTEGQELITVIKAPTSFGYDKPHVLVDLLVDDSGKESLIGYRPTEDSKEFS

SEQ ID NO: 53575 - protein, 108 aa, Homo sapiens
IAGIEEVNMIKDDRTVIHFNNPKVQASLSANTFAITGHAEAKPITEMLPGILSQLGADSLTILKKLAEQFPWQVLDSKAPKPEDIDEEEEDVLDPVEKSDKASKNEAK

SEQ ID NO: 53576 - protein, 49 aa, Homo sapiens
IQASIRRNKETNTVLARLNSELQQQLKDVLEERISLEVQLEQLRPFSHL

SEQ ID NO: 53577 - protein, 27 aa, Homo sapiens
LDFHSSKELSSSTEESKDPSSEKSQLH

SEQ ID NO: 53578 - protein, 55 aa, Homo sapiens
LVPPTPAEIPRAIQSLKKIVNSAQTGSFKQLTVKEAVLNGLVATEVLCGFMSERS

SEQ ID NO: 53579 - protein, 36 aa, Homo sapiens
KDFISRFEGLEISAYMKSSCFLLRPVFTKMAVWGNK

SEQ ID NO: 53580 - protein, 43 aa, Homo sapiens
RIVTADYYMASPLQGLDTCQSPLTQAPVKKVPVVRVFGATPAE

SEQ ID NO: 53581 - protein, 125 aa, Homo sapiens
IDIIKWMERYLRDKTVMIIVAISPKYKQDVEGAESQLDEDEHGLHTKYIHRMMQIEFIKQGSMNFRFIPVLFPNAKKEHVPTWLQNTHVYSWPKNKKNILLRLLREEEYVAPPRGPLPTLQVVPL

SEQ ID NO: 53582 - protein, 213 aa, Homo sapiens
RDTLKALLEFLQRVIDNKEKNKMTVMNVAMVMAPNLFMCHALGLKSSEQREFVMAAGTANTMHLLIKYQKLLWTIPKFIVNQVRKQNTENHKKDKRAMKKLLKKMAYDREKYEKQDKSTNDADVPQGVIRVQAPHLSKVSMAIQLTEELKASDVLARFLSQESGVAQTLKKGEVFLYEIGGNIGERCLDDDTYMKDLYQLNPNAEWVIKSKPL

SEQ ID NO: 53583 - protein, 993 aa, Homo sapiens
KDSSQLGTDATKEKPKEVAENQQNQSSDPEEEKGSQPPPAAESQSSLRRQKREKETSESRGISRFIPPWLKKQKSYTLVVAKDGGDKKEPTQAVVEEQVLDKEEPLPEEQRQAKGDAEEMAQKKQEIKVEVKEEKPSVSKEEKPSVSKVEMQPTELVSKEREEKVKETQEDKLEGGAAKRETKEVQTNELKAEKASQKVTKKTKTVQCKVTLLDGTEYSCDLEKHAKGQVLFDKVCEHLNLLEKDYFGLLFQESPEQKNWLDPAKEIKRQLRNLPWLFTFNVKFYPPDPSQLTEDITRYFLCLQLRQDIASGRLPCSFVTHALLGSYTLQAELGDYDPEEHGSIDLSEFQFAPTQTKELEEKVAELHKTHRGLSPAQADSQFLENAKRLSMYGVDLHHAKDSEGVDIKLGVCANGLLIYKDRLRINRFAWPKILKISYKRSNFYIKVRPAELEQFESTIGFKLPNHRAAKRLWKVCVEHHTFYRLVSPEQPPKAKFLTLGSKFRYSGRTQAQTRQASTLIDRPAPHFERTSSKRVSRSLDGAPIGVMDQSLMKDFPGAAGEISAYGPGLVSIAVVQDGDGRREVRSPTKAPHLQLIEGKKNSLRVEGDNIYVRHSNLMLEELDKAQEDILKHQASISELKRNFMESTPEPRPNEWEKRRITPLSLQTQGSSHETLNIVEEKKRAEVGKDERVITEEMNGKEISPGSGPGEIRKVEPVTQKDSTSLSSESSSSSSESEEEDVGEYRPHHRVTEGTIREEQEYEEEVEEEPRPAAKVVEREEAVPEASPVTQAGASVITVETVIQENVGAQKIPGEKSVHEGALKQDMGEEAEEEPQKVNGEVSHVDIDVLPQIICCSEPPVVKTEMVTISDASQRTEISTKEVPIVQTETKTITYESPQIDGGAGGDSGTLLTAQTITSESVSTTTTTHITKTVKGGISETRIEKRIVITGDGDIDHDQALAQAIREAREQHPDMSVTRVVVHKETELAEEGED

SEQ ID NO: 53584 - protein, 148 aa, Homo sapiens
IGQLSLIPKFLTEVLLPIVKTEFQLLYVYHLVGPFLQRFQQERTRCMIEIGVAFYDMLLNVDQCSTHLNYMDPICDFLYHMKYMFTGDSVKEQVEKIICNLKPALKLRLRFITHISKMEPAAVPPQAMNSGSPAPQSNQVPVSLPVTQ

SEQ ID NO: 53585 - protein, 9 aa, Homo sapiens
INSLDWNLN

SEQ ID NO: 53586 - protein, 5 aa, Homo sapiens
ILPGI

SEQ ID NO: 53587 - protein, 4 aa, Homo sapiens
IIAN

SEQ ID NO: 53588 - protein, 460 aa, Homo sapiens
RLAFPLLLLLLLLLPPPPCPAHSATRFDPTWESLDARQLPAWFDQAKFGIFIHWGVFSVPSFGSEWFWWYWQKEKIPKYVEFMKDNYPPSFKYEDFGPLFTAKFFNANQWADIFQASGAKYIVLTSKHHEGFTLWGSEYSWNWNAIDEGPKRDIVKELEVAIRNRTDLRFGLYYSLFEWFHPLFLEDESSSFHKRQFPVSKTLPELYELVNNYQPEVLWSDGDGGAPDQYWNSTGFLAWLYNESPVRGTVVTNDRWGAGSICKHGGFYTCSDRYNPGHLLPHKWENCMTIDKLSWGYRREAGISDYLTIEELVKQLVETVSCGGNLLMNIGPTLDGTISVVFEERLRQMGSWLKVNGEAIYETHTWRSQNDTVTPDVWYTSKPKEKLVYAIFLKWPTSGQLFLGHPKAILGATEVKLLGHGQPLNWISLEQNGIMVELPQLTIHQMPCKWGWALALTNVI

SEQ ID NO: 53589 - protein, 50 aa, Homo sapiens
LGGLGPCLAADVPCHSVANPGDPGHAPAIVMQITFLLLNRTCASDFLPSA

SEQ ID NO: 53590 - protein, 97 aa, Homo sapiens
VSNIVKEAIESAIGGNAYQHSKVNQWTTNVVEQTLSQLTKLGKPFKYIVTCVIMQKNGAGLHTASSCFWDSSTDGSCTVRWENKTMYCIVSAFGLSI

SEQ ID NO: 53591 - protein, 37 aa, Homo sapiens
IAFVEFENDGKAGAARDALQGFKITTSHAMKITYAKK

SEQ ID NO: 53592 - protein, 488 aa, Homo sapiens
LETTLGDVVIDLYTEERPRACLNFLKLCKIKYYNYCLIHNVQRDFIIQTGDPTGTGRGGESIFGQLYGDQASFFEAEKVPRIKHKKKGTVSMVNNGSDQHGSQFLITTGENLDYLDGVHTVFGEVTEGMDIIKKINETFVDKDFVPYQDIRINHTVILDDPFDDPPDLLIPDRSPEPTREQLDSGRIGADEEIDDFKGRSAEEVEEIKAEKEAKTQAILLEMVGDLPDADIKPPENVLFVCKLNPVTTDEDLEIIFSRFGPIRSCEVIRDWKTGESLCYAFIEFEKEEDCEKAFFKMDNVLIDDRRIHVDFSQSVAKVKWKGKGGKYTKSDFKEYEKEQDKPPNLVLKDKVKPKQDTKYDLILDEQAEDSKSSHSHTSKKHKKKTHHCSEEKEDEDYMPIKNTNQDIYREMGFGHYEEEESCWEKQKSEKRDRTQNRSRSRSRERDGHYSNSHKSKYQTDLYERERSKKRDRSRSPKKSKDKEKSKYR

SEQ ID NO: 53593 - protein, 71 aa, Homo sapiens
ITNVCRDASLMAMRRRIEGLTPEEIRNLSKEEMHMPTTMEDFEMALKKVSKSVSAADIERYEKWIFEFGSC

SEQ ID NO: 53594 - protein, 372 aa, Homo sapiens
VSQKISKTRWRPLPPGSLQTAETFATGSWDNEENYISLWSIGDFGNLDSDGGFEGDHQLLCDIRHHGDVMDLQFFDQERIVAASSTGCVTVFLHHPNNQTLSVNQQWTTAHYHTGPGSPSYSSAPCTGVVCNNPEIVTVGEDGRINLFRADHKEAVRTIDNADSSTLHAVTFLRTPEILTVNSIGQLKIWDFRQQGNEPSQILSLTGDRVPLHCVDRHPNQQHVVATGGQDGMLSIWDVRQGTMPVSLLKAHEAEMWEVHFHPSNPEHLFTCSEDGSLWHWDASTDVPEKSSLFHQGGRSSTFLSHSISNQANVHQSVISSWLSTDPAKDRIEITSLLPSRSLSVNTLDVLGPCLVCGTDAEAIYVTRHLFS

SEQ ID NO: 53595 - protein, 370 aa, Homo sapiens
VAACCSEPRCSVAVVELPRRPAPPAAVLGCYLFNCTARGRNVCKFALHSGYSSYSLSRAPDGAALATARASPRQEKDAPPLSKAGQDVVLHLPTDGVVLDGRESTDDHAIVQYEWALLQGDPSVDMKVPQSGTLKLSHLQEGTYTFQLTVTDTAGQRSSDNVSVTVLRAAYSTGGCLHTCSRYHFFCDDGCCIDITLACDGVQQCPDGSDEDFCQNLGLDRKMVTHTAASPALPRTTGPSEDAGGDSLVEKSQKATAPNKPPALSNTEKRNHSAFWGPESQIIPVMPDSSSSGKNRKEESYIFESKGDGGGGEHPAPETGAVLPLALGLAITALLLLMVACRLRLVKQKLKKARPITSEESDYLINGMYL

SEQ ID NO: 53596 - protein, 86 aa, Homo sapiens
KPPALSNTEKRNHSAFWGPESQIIPVMPDSSSSGKNRKEESYIFESKGDGGGGEHPAPETGKCPPWKPFADCSLLRTACPLAEDIP

SEQ ID NO: 53597 - protein, 37 aa, Homo sapiens
ILVFFVASVGVRWMIGVTEIDKGSAYGNSDSKQKLND

SEQ ID NO: 53598 - protein, 43 aa, Homo sapiens
MRFAYKVQPRNWLLFACHATNEVAQLIQGGRLIKHEMTKTASA

SEQ ID NO: 53599 - protein, 148 aa, Homo sapiens
MPSRLRKTRKLRGHVSHRHGRIGKHRKHPGGRGNAGGLHHHRINFDKYHPGYFGKVGMKHYHLKRNQSFCPTVNLDKLWTLVSEQTRVNAAKNKTGAAPIIDVVRSGYYKVLGKGKLPKQAVTVQAKFFSRRAEEKIKSVGGACVLVA

SEQ ID NO: 53600 - protein, 39 aa, Homo sapiens
IPFQEEGTKKKSGSSATKSSSTEPSLLVSWFTRLKLLTH

SEQ ID NO: 53601 - protein, 197 aa, Homo sapiens
RKNDFYSYEPPSENPPPETGESVCLQLKSGAHLCRVCGCLGPKTCSRCHKAYYCSKEHQTLDWRLGHKQACAQPDHLDHIIPDHNFLFPEFEIVIETEDEIMPEVVEKEDYSEIIGSMGEALEEELDSMAKHESREDKIFQKFKTQIALEPEQILRYGRGIAPIWISGENIPQEKDIPDCPCGAKRILEFQFSDTVY

SEQ ID NO: 53602 - protein, 54 aa, Homo sapiens
TLSSELSQARDENKRTHNDIIHNENMRQGRDKYKTLRQIRQGNTKQRIDEFEAL

SEQ ID NO: 53603 - protein, 16 aa, Homo sapiens
MARVFMRMKLPGYLMG

SEQ ID NO: 53604 - protein, 102 aa, Homo sapiens
IKRDFGSFDKFKEKLTAASVGVQGSGWGWLGFNKERGHLQIAACPNQDPLQGTTGLIPLLGIDVWEHAYYLQYKNVRPDYLKAIWNVINWENVTERYMACKK

SEQ ID NO: 53605 - protein, 561 aa, Homo sapiens
IAAVKMEGPLSVFGDRSTGETIRSQNVMAAASIANIVKSSLGPVGLDKMLVDDIGDVTITNDGATILKLLEVEHPAAKVLCELADLQDKEVGDGTTSVVIIAAELLKNADELVKQKIHPTSVISGYRLACKEAVRYINENLIVNTDELGRDCLINAAKTSMSSKIIGINGDFFANMVVDAVLAIKYTDIRGQPRYPVNSVNILKAHGRSQMESMLISGYALNCVVGSQGMPKRIVNAKIACLDFSLQKTKMKLGVQVVITDPEKLDQIRQRESDITKERIQKILATGANVILTTGGIDDMCLKYFVEAGAMAVRRVLKRDLKRIAKASGATILSTLANLEGEETFEAAMLGQAEEVVQERICDDELILIKNTKARTSASIILRGANDFMCDEMERSLHDALCVVKRVLESKSVVPGGGAVEAALSIYLENYATSMGSREQLAIAEFARSLLVIPNTLAVNAAQDSTDLVAKLRAFHNEAQVNPERKNLKWIGLDLSNGKPRDNKQAGVFEPTIVKVKSLKFATEAAITILRIDDLIKLHPESKDDKHGSYEDAVHSGALND

SEQ ID NO: 53606 - protein, 206 aa, Homo sapiens
IQNDCRDPPDYWTIHGLWPDKSEGCNRSWPFNLEEIKDLLPEMRAYWPDVIHSFPNRSRFWKHEWEKHGTCAAQVDALNSQKKYFGRSLELYRELDLNSVLLKLGIKPSINYYQVADFKDALARVYGVIPKIQCLPPSQDEEVQTIGQIELCLTKQDQQLQNCTEPGEQPSPKQEVWLANGAAESRGLRVCEDGPVFYPPPKKTKH

SEQ ID NO: 53607 - protein, 1188 aa, Homo sapiens
ITASFWQTRSSAAGGRMVWRLVLLALWVWPSTQAGHQDKDTTFDLFSISNINRKTIGAKQFRGPDPGVPAYRFVRFDYIPPVNADDLSKITKIMRQKEGFFLTAQLKQDGKSRGTLLALEGPGLSQRQFEIVSNGPADTLDLTYWIDGTRHVVSLEDVGLADSQWKNVTVQVAGETYSLHVGCDLIDSFALDEPFYEHLQAEKSRMYVAKGSARESHFRGLLQNVHLVFENSVEDILSKKGCQQGQGAEINAISENTETLRLGPHVTTEYVGPSSERRPEVCERSCEELGNMVQELSGLHVLVNQLSENLKRVSNDNQFLWELIGGPPKTRNMSACWQDGRFFAENETWVVDSCTTCTCKKFKTICHQITCPPATCASPSFVEGECCPSCLHSVDGEEGWSPWAEWTQCSVTCGSGTQQRGRSCDVTSNTCLGPSIQTRACSLSKCDTRIRQDGGWSHWSPWSSCSVTCGVGNITRIRLCNSPVPQMGGKNCKGSGRETKACQGAPCPIDGRWSPWSPWSACTVTCAGGIRERTRVCNSPEPQYGGKACVGDVQERQMCNKRSCPVDGCLSNPCFPGAQCSSFPDGSWSCGSCPVGFLGNGTHCEDLDECALVPDICFSTSKVPRCVNTQPGFHCLPCPPRYRGNQPVGVGLEAAKTEKQVCEPENPCKDKTHNCHKHAECIYLGHFSDPMYKCECQTGYAGDGLICGEDSDLDGWPNLNLVCATNATYHCIKDNCPHLPNSGQEDFDKDGIGDACDDDDDNDGVTDEKDNCQLLFNPRQADYDKDEVGDRCDNCPYVHNPAQIDTDNNGEGDACSVDIDGDDVFNERDNCPYVYNTDQRDTDGDGVGDHCDNCPLVHNPDQTDVDNDLVGDQCDNNEDIDDDGHQNNQDNCPYISNANQADHDRDGQGDACDPDDDNDGVPDDRDNCRLVFNPDQEDLDGDGRGDICKDDFDNDNIPDIDDVCPENNAISETDFRNFQMVPLDPKGTTQIDPNWVIRHQGKELVQTANSDPGIAVGFDEFGSVDFSGTFYVNTDRDDDYAGFVFGYQSSSRFYVVMWKQVTQTYWEDQPTRAYGYSGVSLKVVNSTTGTGEHLRNALWHTGNTPGQVRTLWHDPRNIGWKDYTAYRWHLTHRPKTGYIRVLVHEGKQVMADSGPIYDQTYAGGRLGLFVFSQEMVYFSDLKYECRDI

SEQ ID NO: 53608 - protein, 72 aa, Homo sapiens
RTSRPNRNPRITWPTRTNGTSRRQRLHWKRRCNGTQGPTRPRLPRSHRTKWEARKTWRSWQTRSIWVERRKR

SEQ ID NO: 53609 - protein, 76 aa, Homo sapiens
RTSRPNRNPRITWPTRTNGTSRRQRLHWKRRCNGTQGPTRAAGKPRLPRSHRTKWEARKTWRSWQTRSIWVERRKR

SEQ ID NO: 53610 - protein, 48 aa, Homo sapiens
LPEREPFIVPVEPERTAEYEDYGADEPAEEPPEPHRRWRRALPHGPGQ

SEQ ID NO: 53611 - protein, 24 aa, Homo sapiens
IGTPAAAATAQARRAPAGMDPHAR

SEQ ID NO: 53612 - protein, 50 aa, Homo sapiens
TGPRWRGDPALRRRAPCTRPGPGDSPGAGSRPAPMDLDPRGGAALVPSCS

SEQ ID NO: 53613 - protein, 582 aa, Homo sapiens
MMLVRRFRVLILMVFLVACALHIALDLLPRLERRGARPSGEPGCSCAQPAAEVAAPGWAQVRGRPGEPPAASSAAGDAGWPNKHTLRILQDFSSDPSSNLSSHSLEKLPPAAEPAERALRGRDPGALRPHDPAHRPLLRDPGPRRSESPPGPGGDASLLARLFEHPLYRVAVPPLTEEDVLFNVNSDTRLSPKAAENPDWPHAGAEGAEFLSPGEAAVDSYPNWLKFHIGINRYELYSRHNPAIEALLHDLSSQRITSVAMKSGGTQLKLIMTFQNYGQALFKPMKQTREQETPPDFFYFSDYERHNAEIAAFHLDRILDFRRVPPVAGRMVNMTKEIRDVTRDKKLWRTFFISPANNICFYGECSYYCSTEHALCGKPDQIEGSLAAFLPDLSLAKRKTWRNPWRRSYHKRKKAEWEVDPDYCEEVKQTPPYDSSHRILDVMDMTIFDFLMGNMDRHHYETFEKFGNETFIIHLDNGRGFGKYSHDELSILVPLQQCCRIRKSTYLRLQLLAKEEYKLSLLMAESLRGDQVAPVLYQPHLEALDRRLRVVLKAVRDCVERNGLHSVVDDDLDTEHRAASAR

SEQ ID NO: 53614 - protein, 81 aa, Homo sapiens
KGANAKSYYQSSVQYLYRELLVHLDDPERAIQDAILEVLKEGSGLFPDLLVRETEAVIHKHRSATYCEQLLQHVQAVPATQ

SEQ ID NO: 53615 - protein, 123 aa, Homo sapiens
IYPGNCWAFKGSQGYLVVRLSMMIHPAAFTLEHIPKTLSPTGNISSAPKDFAVYGLENEYQEEGQLLGQFTYDQDGESLQMFQALKRPDDTAFQIVELRIFSNWGHPEYTCLYRFRVHGEPVK

SEQ ID NO: 53616 - protein, 9 aa, Homo sapiens
VILPPQPPK

SEQ ID NO: 53617 - protein, 26 aa, Homo sapiens
VATTSVITIVKSTELSSTSVPFSAAS

SEQ ID NO: 53618 - protein, 57 aa, Homo sapiens
VDRQLRFPPSYRNRTASSWEEDWFAKIPLAWRQQLYKLYEADFVLFGYPKPENLLRD

SEQ ID NO: 53619 - protein, 65 aa, Homo sapiens
LENLQQVPTSELHEQVTLSYGMFENKRNAVHVKGPFSVEADPSRFRSIHCHLYPDTPWCPRTAIF

SEQ ID NO: 53620 - protein, 12 aa, Homo sapiens
TSQPRPDSSGSH

SEQ ID NO: 53621 - protein, 174 aa, Homo sapiens
LGSEARGLEEKPTIAFATIPAAGGVIQTVASQMAPGVPGHTVTILQPATPVTLGQHHLPVRAVTQNGKHAVPTNSLAGNAYALTSPLQLLATQASSSAPVVVTRVCEVGPKEPAAAVAATATTTPATATTASASASSTGEPEVKRSRVEEPSGAVTTPAGVIAAAGPQGPGTGE

SEQ ID NO: 53622 - protein, 70 aa, Homo sapiens
THSEEGAEAIRTRATELLTLLKMPSVAQFVLTPSTEVCSPRYHRDANTALPLALRTVSRLVEREAGLMPG

SEQ ID NO: 53623 - protein, 4 aa, Homo sapiens
MFRY

SEQ ID NO: 53624 - protein, 357 aa, Homo sapiens
KLKVCHFKKGTEICNYSYSNTILAVKLNRQRLIVCLEESLYIHNIRDMKVLHTIRETPPNPAGLCALSINNDNCYLAYPGSATIGEVQVFDTINLRAANMIPAHDSPLAALAFDASGTKLATASEKGTVIRVFSIPEGQKLFEFRRGVKRCVSICSLAFSMDGMFLSASSNTETVHIFKLETVKEKPPEEPTTWTGYFGKVLMASTSYLPSQVTEMFNQGRAFATVRLPFCGHKNICSLATIQKIPRLLVGAADGYLYMYNLDPQEGGECALMKQHRLDGSLETTNEILDSASHDCPLVTQTYGAAAGKGTYVPSSPTRLAYTDDLGAVGGACLEDEASALRLDEDSEHPPMILRTD

SEQ ID NO: 53625 - protein, 267 aa, Homo sapiens
LPLHSSKEDAYDGVTSENMRNGLVNSEVHNEDGRNGDVSQFPYVEFTGRDSVTCPTCQGTGRIPRGQENQLVALIPYSDQRLRPRRTKLYVMASVFVCLLLSGLAVFFLFPRSIDVKYIGVKSAYVSYDVQKRTIYLNITNTLNITNNNYYSVEVENITAQVQFSKTVIGKARLNNITIIGPLDMKQIDYTVPTVIAEEMSYMYDFCTLISIKVHNIVLMMQVTVTTTYFGHSEQISQERYQYVDCGRNTTYQLGQSEYLNVLQPQQ

SEQ ID NO: 53626 - protein, 56 aa, Homo sapiens
LEIMIKFNRLNRLTTDFNVIVEALSKSKAEVMEISEDKTKIRRSPSKSLPEVTDEY

SEQ ID NO: 53627 - protein, 83 aa, Homo sapiens
ITRISENQGVPVLIVANKQDLRNSLSLSEIEKLLAMGELSSSTPWHLQPTCAIIGDGLKEGLEKLHDMIIKRRKMLRQQKKKR

SEQ ID NO: 53628 - protein, 458 aa, Homo sapiens
LSFFIYNPRFGPREGQEENKILFYHPNEVEKNEKIRNVGLCEAIVQFTRTFSPSKPAKSLHTQKNRQFFNEPEENFWMVMVVRNPIIEKQSKDGKPVIEYQEEELLDKVYSSVLRQCYSMYKLFNGTFLKAMEDGGVKLLKERLEKFFHRYLQTLHLQSCDLLDIFGGISFFPLDKMTYLKIQSFINRMEESLNIVKYTAFLYNDQLIWSGLEQDDMRILYKYLTTSLFPRHIEPELAGRDSPIRAEMPGNLQHYGRFLTGPLNLNDPDAKCRFPKIFVNTDDTYEELHLIVYKAMSAAVCFMIDASVHPTLDFCRRLDSIVGPQLTVLASDICEQFNINKRMSGSEKEPQFKFIYFNHMNLAEKSTVHMRKTPSVSLTSVHPDLMKILGDINSDFTRVDEDEEIIVKAMSDYWVVGKKSDRRELYVILNQKNANLIEVNEEVKKLCATQFNNIFFLD

SEQ ID NO: 53629 - protein, 65 aa, Homo sapiens
IKHSKSRDSFLKRVKENDQKKKEAKEKGTWVQLKRQPTPPREAHFVRTNGKEPELLEPIPYEFMA

SEQ ID NO: 53630 - protein, 56 aa, Homo sapiens [sequence omitted]

SEQ ID NO: 53631 - protein, 22 aa, Homo sapiens
RVIISAPSADAPMFVVVMNHEK

SEQ ID NO: 53632 - protein, 12 aa, Homo sapiens
IALNDHFVKLIS

SEQ ID NO: 53633 - protein, 449 aa, Homo sapiens
LLLLLLPLLLHESPQPPALRVVATSSDRNFMNKHQKPVLTGQRFKTRKRDEKEKFEPTVFRDTLVQGLNEAGDDLEAVAKFLDSTGSRLDYRRYADTLFDILVAGSMLAPGGTRIDDGDKTKMTNHCVFSANEDHETIRNYAQVFNKLIRRYKYLEKAFEDEMKKLLLFLKAFSETEQTKLAMLSGILLGNGTLPATILTSLFTDSLVKEGIAASFAVKLFKAWMAEKDANSVTSSLRKANLDKRLLELFPVNRQSVDHFAKYFTDAGLKELSDFLRVQQSLGTRKELQKELQERLSQECPIKEVVLYVKEEMKRNDLPETAVIGLLWTCIMNAVEWNKKEELVAEQALKHLKQYAPLLAVFSSQGQSELILLQKVQEYCYDNIHFMKAFQKIVVLFYKADVLSEEAILKWYKEAHVAKGKSVFLDQMKKFVEWLQNAEEESESEGEEN

SEQ ID NO: 53634 - protein, 841 aa, Homo sapiens
ITYASRKRRKPVQKTVKPIPAEGIKSNPSKRHRDRLNTELDRLASLLPFPQDVINKLDKLSVLRLSVSYLRAKSFFDVALKSSPTERNGGQDNCRAANFREGLNLQEGEFLLQALNGFVLVVTTDALVFYASSTIQDYLGFQQSDVIHQSVYELIHTEDRAEFQRQLHWALNPSQCTESGQGIEEATGLPQTVVCYNPDQIPPENSPLMERCFICRLRCLLDNSSGFLAMNFQGKLKYLHGQKKKGKDGSILPPQLALFAIATPLQPPSILEIRTKNFIFRTKHKLDFTPIGCDAKGRIVLGYTEAELCTRGSGYQFIHAADMLYCAESHIRMIKTGESGMIVFRLLTKNNRWTWVQSNARLLYKNGRPDYIIVTQRPLTDEEGTEHLRKRNTKLPFMFTTGEAVLYEATNPFPAIMDPLPLRTKNGTSGKDSATTSTLSKDSLNPSSLLAAMMQQDESIYLYPASSTSSTAPFENNFFNESMNECRNWQDNTAPMGNDTILKHEQIDQPQDVNSFAGGHPGLFQDSKNSDLYSIMKNLGIDFEDIRHMQNEKFFRNDFSGEVDFRDIDLTDEILTYVQDSLSKSPFIPSDYQQQQSLALNSSCMVQEHLHLEQQQQHHQKQVVVEPQQQLCQKMKHMQVNGMFENWNSNQFVPFNCPQQDPQQYNVFTDLHGISQEFPYKSEMDSMPYTQNFISCNQPVLPQHSKCTELDYPMGSFEPSPYPTTSSLEDFVTCLQLPENQKHGLNPQSAIITPQTCYAGAVSMYQCQPEPQHTHVGQMQYNPVLPGQQAFLNKFQNGVLNETYPAELNNINNTQTTTHLQPLHHPSEARPFPDLTSSGFL

SEQ ID NO: 53635 - protein, 32 aa, Homo sapiens
KPLAASLLEALDYDSSDDSDFKVGDASGLADS

SEQ ID NO: 53636 - protein, 25 aa, Homo sapiens
KEDENEAERKNISQELNMEQKNPKK

SEQ ID NO: 53637 - protein, 14 aa, Homo sapiens
ISKLNAHETFRCNF

SEQ ID NO: 53638 - protein, 38 aa, Homo sapiens
LDSSVTEVLGSPRIVTVAAISQDSNPATPNVSTNMEEF

SEQ ID NO: 53639 - protein, 127 aa, Homo sapiens
LSLLLLVFGLIWGLMLLHYTFQQPRHQSSVKLREQILDLSKRYVKALAEENKNTVDVENGASMAGYADLKRTIAVLLDDILQRLVKLENKVDYIVVNGSAANTTNGTSGNLVPVTTNKRTNVSGSIR

SEQ ID NO: 53640 - protein, 32 aa, Homo sapiens
INDNLDKAFEKLQTAIEKLRMEPQWVPISWVY

SEQ ID NO: 53641 - protein, 115 aa, Homo sapiens
TPFELIATEETERRMDFYADPGVSFYVLCPDNGCGDNFHVWSESEDCLPFLQLAQDYISSCGKKTLHEVLEKVFKSFRPLLGLPDADDDAFEEYSADVEEEEPEADHPQMGVSQQ

SEQ ID NO: 53642 - protein, 136 aa, Homo sapiens
KRLFEYILLYKDGVMFQIDQATKQCSKMTLTQPWDPLDIPQNSTFEDQYSIGGPQEQITVQEWSDRKSARSYETWIGIYTVKDCYPVQETFTINYSVILSTRFFDIQLGIKDPSVFTPPSTCQMAQLEKMSEDCSW

SEQ ID NO: 53643 - protein, 69 aa, Homo sapiens
IETWFLDFKVLPQEAEEENRLLIVQDASERAALIPGGLSDGQFYSPPESEAGSEEAEEKQDSEKPLLEL

SEQ ID NO: 53644 - protein, 154 aa, Homo sapiens
ILNYGRLRGTLSALLSWCHLHNNNSTLINKINNLLDAVGQCEEYVLKHLKSITPPSHVVDLLDSIEDMDLCHVVPAEKKIDEAKDERLCENNAEFNKNCSKSHSGIDCSYVECCRTQEHAHSENPSPTWILEQTASLVKQLGLSVDVLQHLKQL

SEQ ID NO: 53645 - protein, 17 aa, Homo sapiens
LGSSELRSPRISYLHFF

SEQ ID NO: 53646 - protein, 741 aa, Homo sapiens
RLMPSPRPVLLRGARAALLLLLPPRLLARPSLLLRRSLSAASCPPISLPAAASRSSMDGAGAEEVLAPLRLAVRQQGDLVRKLKEDKAPQVDVDKAVAELKARKRVLEAKELALQPKDDIVDRAKMEDTLKRRFFYDQAFAIYGGVSGLYDFGPVGCALKNNIIQTWRQHFIQEEQILEIDCTMLTPEPVLKTSGHVDKFADFMVKDVKNGECFRADHLLKAHLQKLMSDKKCSVEKKSEMESVLAQLDNYGQQELADLFVNYNVKSPITGNDLSPPVSFNLMFKTFIGPGGNMPGYLRPETAQGIFLNFKRLLEFNQGKLPFAAAQIGNSFRNEISPRSGLIRVREFTMAEIEHFVDPSEKDHPKFQNVADLHLYLYSAKAQVSGQSARKMRLGDAVEQGVINNTVLGYFIGRIYLYLTKVGISPDKLRFRQHMENEMAHYACDCWDAESKTSYGWIEIVGCADRSCYDLSCHARATKVPLVAEKPLKEPKTVNVVQFEPSKGAIGKAYKKDAKLVMEYLAICDECYITEMEMLLNEKGEFTIETEGKTFQLTKDMINVKRFQKTLYVEEVVPNVIEPSFGLGRIMYTVFEHTFHVREGDEQRTFFSFPAVVAPFKCSVLPLSQNQEFMPFVKELSEALTRHGVSHKVDDSSGSIGRRYARTDEIGVAFGVTIDFDTVNKTPHTATLRDRDSMRQIRAEISELPSIVQDLANGNITWADVEARYPLFEGQETGKKETIEE

SEQ ID NO: 53647 - protein, 266 aa, Homo sapiens
RDTMKGGFTGGDEYQKHFLPRDYLATYYSFDGSPSPEAEMLKFNLECLHKTFGPGGLQGDTLIDIGSGPTIYQVLAACDSFQDITLSDFTDRNREELEKWLKKEPGAYDWTPAVKFACELEGNSGRWEEKEEKLRAAVKRVLKCDVHLGNPLAPAVLPLADCVLTLLAMECACCSLDAYRAALCNLASLLKPGGHLVTTVTLRLPSYMVGKREFSCVALEKEEVEQAVLDAGFDIEQLLHSPQSYSVTNAANNGVCFIVARKKPGP

SEQ ID NO: 53648 - protein, 119 aa, Homo sapiens
IEARKNHGLVFVKDKIFAVGGQNGLGGLDNVEYYDIKLNEWKMVSPMPWKGVTVKCAAVGSIVYVLAGFQGVGRLGHILEYNTETDKWVANSKVRAFPVTSCLICVVDTCGANEETLET

SEQ ID NO: 53649 - protein, 51 aa, Homo sapiens
LSASSSIIATDNVLFTPRDKLTVEELEQFQSKKFTLGKIPLKPPPLELLNV

SEQ ID NO: 53650 - protein, 20 aa, Homo sapiens
MPEEHCCSWWTGPEEFRVKP

SEQ ID NO: 53651 - protein, 63 aa, Homo sapiens
MEPHHMNGSLGSGDIDGLPKNSPNNISGISNPPGTPRDDGELGGSFLHSFQNDNYSPSMTMSV

SEQ ID NO: 53652 - protein, 18 aa, Homo sapiens
LFHHRVWSDRSNFSASWL

SEQ ID NO: 53653 - protein, 186 aa, Homo sapiens
LAMLVLVVSPWSAARGVLRNYWERLLRKLPQSRPGFPSPPWGPALAVQGPAMFTEPANDTSGSKENSSLLDSIFWMAAPKNRRTIEVNRCRRRNPQKLIKVKNNIDVCPECGHLKQKHVLCAYCYEKVCKETAEIRRQIGKQEGGPFKAPTIETVVLYTGETPSEQDQGKRIIERDRKRPSWFTQN

SEQ ID NO: 53654 - protein, 413 aa, Homo sapiens
KNLEGYVGFANLPNQVYRKSVKRGFEFTLMVVGESGLGKSTLINSLFLTDLYSPEYPGPSHRIKKTVQVEQSKVLIKEGGVQLLLTIVDTPGFGDAVDNSNCWQPVIDYIDSKFEDYLNAESRVNRRQMPDNRVQCCLYFIAPSGHGLKPLDIEFMKRLHEKVNIIPLIAKADTLTPEECQQFKKQIMKEIQEHKIKIYEFPETDDEEENKLVKKIKDRLPLAVVGSNTIIEVNGKRVRGRQYPWGVAEVENGEHCDFTILRNMLIRTHMQDLKDVTNNVHYENYRSRKLAAVTYNGVDNNKNKGQLTKSPLAQMEEERREHVAKMKKMEMEMEQVFEMKVKEKVQKLKDSEAELQRRHEQMKKNLEAQHKELEEKRRQFEDEKANWEAQQRILEQQNSSRTLEKNKKKGKIF

SEQ ID NO: 53655 - protein, 14 aa, Homo sapiens
MEDSVFVYSNLFSP

SEQ ID NO: 53656 - protein, 52 aa, Homo sapiens
KPGCSMPEIWDVEDPANAGKTPLCNLLVKDSKPHFTTVFQNSVYKVLEVVKE

SEQ ID NO: 53657 - protein, 248 aa, Homo sapiens
VRWNGSRIALPCRAPHFHIDLDGYLLKVTTKAGLEISWDGDSFVEVMAAPHLKGKLCGLCGNYNGHKRDDLIGGDGNFKFDVDDFAESWRVESNEFCNRPQRKPVPELCQGTVKVKLRAHRECQKLKSWEFQTCHSTVDYATFYRSCVTDMCECPVHKNCYCESFLAYTRACQREGIKVHWEPQQNCAATQCKHGAVYDTCGPGCIKTCDNWNEIGPCNKPCVAGCHCPANLVLHKGRCIKPVLCPQR

SEQ ID NO: 53658 - protein, 335 aa, Homo sapiens
VLHDQNVDKRTCIPMNHLWPNQAPYTVCNSSLSEYGVLGFELGFAMASPNALVLWEAQFGDFHNTAQCIIDQFICPGQAKWVRQNGIVLLLPHGMEGMGPEHSSARPERFLQMCNDDPDVLPDLKEANFDINQLYDCNWVVVNCSTPGNFFHVLRRQILLPFRKPLIIFTPKSLLRHPEARSSFDEMLPGTHFQRVIPEDGPAAQNPENVKRLLFCTGKVYYDLTRERKARDMVGQVAITRIEQLSPFPFDLLLKEVQKYPNAELAWCQEEHKNQGYYDYVKPRLRTTISRAKPVWYAGRDPAAAPATGNKKTHLTELQRLLDTAFDLDVFKNFS

SEQ ID NO: 53659 - protein, 8 aa, Homo sapiens
IADCGQLE

SEQ ID NO: 53660 - protein, 128 aa, Homo sapiens
VKPKIVKKRTKKFIQHQSDQYVKIKRNWRKPRGTDNRVRRRFKGQILMPNIGYGSNKKTKHMLPSGFRKFLVHNIKELEVLLMCNKSYCAEIAHNVSSKNRKAIVETAAQLAIRVTNPNARLRSEENE

SEQ ID NO: 53661 - protein, 9 aa, Homo sapiens
VLAEPAPCG

SEQ ID NO: 53662 - protein, 161 aa, Homo sapiens
LKKEVVGKDLLKGSLLFTAGPLEEERFGFPAFSGISRLTWLVSLFGELSLVSATLEERKEDQYMKMTVCLETEKKSPLSWIEEKGPGLKRNRYLSFHFKSGSLENVPNVGVNKNIFLKDQNIFVQKLLGQFSEKELAAEKKRILHCLGLAEEIQKYCCSRK

SEQ ID NO: 53663 - protein, 381 aa, Homo sapiens
LEEMVEELNSGKVMYAFCRVKDPNSGLPKFVLINWTGEGVNDVRKGACASHVSTMASFLKGAHVTINARAEEDVEPECIMEKVAKASGANYSFHKESGRFQDVGPQAPVGSVYQKTNAVSEIKRVGKDSFWAKAEKEEENRRLEEKRRAEEAQRQLEQERRERELREAARREQRYQEQGGEASPQRTWEQQQEVVSRNRNEQESAVHPREIFKQKERAMSTTSISSPQPGKLRSPFLQKQLTQPETHFGREPAAAISRPRADLPAEEPAPSTPPCLVQAEEEAVYEEPPEQETFYEQPPLVQQQGAGSEHIDHHIQGQGLSGQGLCARALYDYQAADDTEISFDPENLITGIEVIDEGWWRGYGPDGHFGMFPANYVELIE

SEQ ID NO: 53664 - protein, 336 aa, Homo sapiens
MASFLKGAHVTINARAEEDVEPECIMEKVAKASGANYSFHKESGRFQDVGPQAPVGSVYQKTNAVSEIKRVGKDSFWAKAEKEEENRRLEEKRRAEEAQRQLEQERRERELREAARREQRYQEQGGEASPQSRTWEQQQEVVSRNRNEQGSTCASLQESAVHPREIFKQKERAMSTTSISSPQPGKLRSPFLQKQLTQPETHFGREPAAAISRPRADLPAEEPAPSTPPCLVQAEEEAVYEEPPEQETFYEQPPLVQQQGAGSEHIDHHIQGQGLSGQGLCARALYDYQAADDTEISFDPENLITGIEVIDEGWWRGYGPDGHFGMFPANYVELIE

SEQ ID NO: 53665 - protein, 75 aa, Homo sapiens
KVAGQDGSVVQFKIKRHTPLSKLMKAYCKQQGLSMRQIRFRFDGQPIKETDTPAQLEMENEDTIDVFQQQTGGVY

SEQ ID NO: 53666 - protein, 13 aa, Homo sapiens
IDPFSLDALSKKA

SEQ ID NO: 53667 - protein, 13 aa, Homo sapiens
IDPFSLDALSKKA

SEQ ID NO: 53668 - protein, 149 aa, Homo sapiens
LLSIYAYHVEREKERDPEHRALCDLGPWVKCSAALASRWGRGFGLLGSIFGKDGVLNQPNSVFGLIFYILQLLLGMTASAVAALILMTSSIMSVVGSLYLAYILYFVLKEFCIICIVTYVLNFLLLIINYKRLVYLNEAWKRQLQPKQD

SEQ ID NO: 53669 - protein, 8 aa, Homo sapiens
IIHNRHFP

SEQ ID NO: 53670 - protein, 38 aa, Homo sapiens
VWDYGHSVEQYGALGGTARSSVDWQIRQVRALLQAQQA

SEQ ID NO: 53671 - protein, 145 aa, Homo sapiens
KDANSALLSNYEVFQLLTDLKEQRKESGKNKHSSGQQNLNTITYETLKYISKTPCRHQSPEIVREFLTALKSHKLTKAEKLQLLNHRPVTAVEIQLMVEESEERLTEEQIEALLHTVTSILPAEPEAEQKKNTNSNVAMDEEDPA

SEQ ID NO: 53672 - protein, 6 aa, Homo sapiens
LSKISV

SEQ ID NO: 53673 - protein, 355 aa, Homo sapiens
ISSVTVFYLGQHAMECHHRIEERSQPVKLESTRTTVRTGLDLKANKTFAYHKDMPLIFIGGVPRSGTTLMRAMLDAHPDIRCGEETRVIPRILALKQMWSRSSKEKIRLDEAGVTDEVLDSAMQAFLLEIIVKHGEPAPYLCNKDPFALKSLTYLSRLFPNAKFLLMVRDGRASVHSMISRKVTIAGFDLNSYRDCLTKWNRAIETMYNQCMEVGYKKCMLVHYEQLVLHPERWMRTLLKFLQIPWNHSVLHHEEMIGKAGGVSLSKVERSTDQVIKPVNVGALSKWVGKIPPDVLQDMAVIAPMLAKLGYDPYANPPNYGKPDPKIIENTRRVYKGEFQLPDFLKEKPQTEQVE

SEQ ID NO: 53674 - protein, 63 aa, Homo sapiens
KYLYRACKFAEWCLDYGAHGCRIPDRPYSLFEGMAGAIHFLSDVLGPETSRFPAFELDSSKRD

SEQ ID NO: 53675 - protein, 18 aa, Homo sapiens
VNHYYCKRPIYEFKITWW

SEQ ID NO: 53676 - protein, 488 aa, Homo sapiens
KSERRGIHVDQSDLLCKKGCGYYGNPAWQGFCSKCWREEYHKARQKQIQEDWELAERLQREEEEAFASSQSSQGAQSLTFSKFEEKKTNEKTRKVTTVKKFFSASSRVGSKKEIQEAKAPSPSINRQTSIETDRVSKEFIEFLKTFHKTGQEIYKQTKLFLEGMHYKRDLSIEEQSECAQDFYHNVAERMQTRGKVPPERVEKIMDQIEKYIMTRLYKYVFCPETTDDEKKDLAIQKRIRALRWVTPQMLCVPVNEDIPEVSDMVVKAITDIIEMDSKRVPRDKLACITKCSKHIFNAIKITKNEPASADDFLPTLIYIVLKGNPPRLQSNIQYITRFCNPSRLMTGEDGYYFTNLCCAVAFIEKLDAQSLNLSQEDFDRYMSGQTSPRKQEAESWSPDACLGVKQMYKNLDLLSQLNERQERIMNEAKKLEKDLIDWTDGIAREVQDIVEKYPLEIKPPNQPLAAIDSENVENDKLPPPLQPQVYAG

SEQ ID NO: 53677 - protein, 115 aa, Homo sapiens [sequence omitted]

SEQ ID NO: 53678 - protein, 10 aa, Homo sapiens
ILLQCRASPL

SEQ ID NO: 53679 - protein, 59 aa, Homo sapiens
IFTPTNQIRLTNVAVVRMKRARKRFEIACYKNKVVGWRSGLEKDLDEVLQTHSVFVNVS

SEQ ID NO: 53680 - protein, 11 aa, Homo sapiens
RSGGNWTLMRR

SEQ ID NO: 53681 - protein, 34 aa, Homo sapiens
TSMATSPGASRGNTRCPPVWTPPKFPPPCPLRAH

SEQ ID NO: 53682 - protein, 32 aa, Homo sapiens
ITGHGYPDPNYLQNVLAELAAQGVTEDCLEQQ

SEQ ID NO: 53683 - protein, 593 aa, Homo sapiens
IPFRRPSTYGIPRLERILLAKERIRFVIKKHELLSSTREDLQLDKPASGVKEEWYARITKLRKMVDQLFCKKFAEALGSTEAKAVPYQKFEAHPNDLYVEGLPENIPFRSPSWYGIPRLEKIIQVGNRIKFVIKRPELLTHSTTEVTQPRTNTPVKEDWNVRITKLRKQVEEIFNLKFAQALGLTEAVKVPYPVFESNPEFLYVEGLPEGIPFRSPTWFGIPRLERIVHGSNKIKFVVKKPELVISYLPPGMASKINTKALQSPKRPRSPGSNSKVPEIEVTVEGPNNNNPQTSAVRTPTQTNGSNVPFKPRGREFSFEAWNAKITDLKQKVENLFNEKCGEALGLKQAVKVPFALFESFPEDFYVEGLPEGVPFRRPSTFGIPRLEKILRNKAKIKFIIKKPEMFETAIKESTSSKSPPRKINSSPNVNTTASGVEDLNIIQVTIPDDDNERLSKVEKARQLREQVNDLFSRKFGEAIGMGFPVKVPYRKITINPGCVVVDGMPPGVSFKAPSYLEISSMRRILDSAEFIKFTVIRPFPGLVINNQLVDQSESKGPVIQESAEPSQLEVPATEEIKETDGSSQIKQEPDPTW

SEQ ID NO: 53684 - protein, 219 aa, Homo sapiens
KETSNLYKLQFHNVKPECLEAYNKICQEVLPKIHEDKHYPCTLVGTWNTWYGEQDQAVHLWRYEGGYPALTEVMNKLRENKEFLEFRKARSDMLLSRKNQLLLEFSFWNEPVPRSGPNIYELRSYQLRPGTMIEWGNYWARAIRFRQDGNEAVGGFFSQIGQLYMVHHLWAYRDLQTREDIRNAAWHKHGWEELVYYTVPLIQEMESRIMIPLKTSPLQ

SEQ ID NO: 53685 - protein, 512 aa, Homo sapiens
LAVNISAARGLQDVLRTNLGPKGTMKMLVSGAGDIKLTKDGNVLLHEMQIQHPTASLIAKVATAQDDITGDGTTSNVLIIGELLKQADLYISEGLHPRIITEGFEAAKEKALQFLEEVKVSREMDRETLIDVARTSLRTKVHAELADVLTEAVVDSILAIKKQDEPIDLFMIEIMEMKHKSETDTSLIRGLVLDHGARHPDMKKRVEDAYILTCNVSLEYEKTEVNSGFFYKSAEEREKLVKAERKFIEDRVKKIIELKRKVCGDSDKGFVVINQKGIDPFSLDALSKEGIVALRRAKRRNMERLTLACGGVALNSFDDLSPDCLGHAGLVYEYTLGEEKFTFIEKCNNPRSVTLLIKGPNKHTLTQIKDAVRDGLRAVKNAIDDGCVVPGAGAVEVAMAEALIKHKPSVKGRAQLGVQAFADALLIIPKVLAQNSGFDLQETLVKIQAEHSESGQLVGVDLNTGEPMVAAEVGVWDNYCVKKQLLHSCTVIATNILLVDEIMRAGMSSLKG

SEQ ID NO: 53686 - protein, 293 aa, Homo sapiens
LPLLSLLVGAWLKLGNGQATSMVQLQGGRFLMGTNSPDSRDGDGPVREATVKPFAIDIFPVTNKDFRDFVREKKYRTEAEMFGWSFVFEDFVSDELRNKATQPMKSVLWWLPVEKAFWRQPAGPGSGIRERLEHPVLHVSWNDARAYCAWRGKRLPTEEEWEFAARGGLKGQVYPWGNWFQPNRTNLWQGKFPKGDKAEDGFHGVSPVNAFPAQNNYGLYDLLGNVWEWTASPYQAAEQDMRVLRGASWIDTADGSANHRARVTTRMGNTPDSASDNLGFRCAADAGRPPGEL

SEQ ID NO: 53687 - protein, 985 aa, Homo sapiens
RRPHSGIMAQVAMSTLPVEDEESSESRMVVTFLMSALESMCKELAKSKAEVACIAVYETDVFVVGTERGRAFVNTRKDFQKDFVKYCVEEEEKAAEMHKMKSTTQANRMSVDAVEIETLRKTVEDYFCFCYGKALGKSTVVPVPYEKMLRDQSAVVVQGLPEGVAFKHPENYDLATLKWILENKAGISFIIKRPFLEPKKHVGGRVMVTDADRSILSPGGSCGPIKVKTEPTEDSGISLEMAAVTVKEESEDPDYYQYNIQGSHHSSEGNEGTEMEVPAEDSTQHVPSETSEDPEVEVTIEDDDYSPPSKRPKANELPQPPVPEPANAGKRKVREFNFEKWNARITDLRKQVEELFERKYAQAIKAKGPVTIPYPLFQSHVEDLYVEGLPEGIPFRRPSTYGIPRLERILLAKERIRFVIKKHELLNSTREDLQLDKPASGVKEEWYARITKLRKMVDQLFCKKFAEALGSTEAKAVPYQKFEAHPNDLYVEGLPENIPFRSPSWYGIPRLEKIIQVGNRIKFVIKRPELLTHSTTEVTQPRTNTPVKEDWNVRITKLRKQVEEIFNLKFAQALGLTEAVKVPYPVFESNPEFLYVEGLPEGIPFRSPTWFGIPRLERIVRGSNKIKFVVKKPELVISYLPPGMASKINTKALQSPKRPRSPGSNSKVPEIEVTVEGPNNNNPQTSAVRTPTQTNGSNVPFKPRGREFSFEAWNAKITDLKQKVENLFNEKCGEALGLKQAVKVPFALFESFPEDFYVEGLPEGVPFRRPSTFGIPRLEKILRNKAKIKFIIKKPEMFETAIKESTSSKSPPRKINSSPNVNTTASGVEDLNIIQVTIPDDDNERLSKVEKARQLREQVNDLFSRKFGEAIGMGFPVKVPYRKITINPGCVVVDGMPPGVSFKAPSYLEISSMRRILDSAEFIKFTVIRPFPGLVINNQLVDQSESEGPVIQESAEPSQLEVPATEEIKETDGSSQIKQEPDPTW

SEQ ID NO: 53688 - protein, 292 aa, Homo sapiens
RCKFFSLTETPEDYTIIVDEEGFLELPSSEHLSVADATWLALNVVSGGGSFSSSQPIGVTKIAKSVIAPLADQNISVFMLSTYQTDFILVRERDLPFVTHTLSSEFTILRVVNGETVAAENLGITNGFVKPKLVQRPVIHPLSSPSNRFCVTSLDPDTLPAVATLLMDVMFYSNGVKDPMATGDDCGHIRFFSFSLIEGYISLVMDVQTQQRFPSNLLFTSASGELWKMVRIGGQPLGFDECGIVAQISEPLAAADIPAYYISTFKFDHALVPEENINGVISALKVSQAEKH

SEQ ID NO: 53689 - protein, 42 aa, Homo sapiens
ILSMFGSTYICEQLFSIMKLSKTKYCSQLKDSQWDSVLHIAT

SEQ ID NO: 53690 - protein, 93 aa, Homo sapiens
TQHASGQKLASWPSCTPGHMPTLPPYQPASGLCYVQNHFGPNPTSSSVYPASAGTSLGIQPPTPVNSPGTVYSGALGTPGAAGSKESSRVPMP

SEQ ID NO: 53691 - protein, 68 aa, Homo sapiens
LVGYLRVQGVVVPMVHNGYGFFYHIRDDRFVVACSAWKSCPETDAEKLVQLTFCAFHDMIQLMNSTHL

SEQ ID NO: 53692 - protein, 310 aa, Homo sapiens
KDTGETSMLKRPVLLHLHQTAHADEFDCPSELQHTQELFPQWHLPIKIAAIIASLTFLYTLLREVIHPLATSHQQYFYKIPILVINKVLPMVSITLLALVYLPGVIAAIVQLHNGTKYKKFPHWLDKWMLTRKQFGLLSFFFAVLHAIYSLSYPMRRSYRYKLLNWAYQQVQQNKEDAWIEHDVWRMEIYVSLGIVGLAILALLAVTSIPSVSDSLTWREFHYIQSKLGIVSLLLGTIHALIFAWNKWIDIKQFVWYTPPTFMIAVFLPIVVLIFKSILFLPCLRKKILKIRHGWEDVTKINKTEICSQL

SEQ ID NO: 53693 - protein, 47 aa, Homo sapiens
LGKIILFLPCISRKLKRIKKGWEKSQFLEEGMGGTIPHVSPERVTVM

SEQ ID NO: 53694 - protein, 763 aa, Homo sapiens
KSPDHNGEDNFARDFMRLRRLSTKYRTEKIYPTATGEKEENVKKNRYKDILPFDHSRVKLTLKTPSQDSDYINANFIKGVYGPKAYVATQGPLANTVIDFWRMIWEYNVVIIVMACREFEMGRKKCERYWPLYGEDPITFAPFKISCEDEQARTDYFIRTLLLEFQNESRRLYQFHYVNWPDHDVPSSFDSILDMISLMRKYQEHEDVPICIHCSAGCGRTGAICAIDYTWNLLKAGKIPEEFNVFNLIQEMRTQRHSAVQTKEQYELVHRAIAQLFEKQLQLYEIHGAQKIADGVNEINTENMVSSIEPEKQDSPPPKPPRTRSCLVEGDAKEEILQPPEPHPVPPILTPSPPSAFPTVTTVWQDNDRYHPKPVLHMVSSEQHSADLNRNYSKSTELPGKNESTIEQIDKKLERNLSFEIKKVPLQEGPKSFDGNTLLNRGHAIKIKSASPCIADKISKPQELSSDLNVGDTSQNSCVDCSVTQSNKVSVTPPEESQNSDTPPRPDRLPLDEKGHVTWSFHGPENAIPIPDLSEGNSSDINYQTRKTVSLTPSPTTQVETPDLVDHDNTSPLFRTPLSFTNPLHSDDSDSDERNSDGAVTQNKTNISTASATVSAATSTESISTRKVLPMSIARHNIAGTTHSGAEKDVDVSEDSPPPLPERTPESFVLASEHNTPVRSEWSELQSQERSEQKKSEGLITSENEKCDHPAGGIHYEMCIECPPTFSDKREQISENPTEATDIGFGNRCGKPKGPRDPPSEWT

SEQ ID NO: 53695 - protein, 5 aa, Homo sapiens
MGKIC

SEQ ID NO: 53696 - protein, 4 aa, Homo sapiens
MDII

SEQ ID NO: 53697 - protein, 227 aa, Homo sapiens
IASVAGLFAGTLLPNWRKLRLITFNRNEKNLTVYTGLWVKCARYDGSSDCLMYDTTWYSSVDQLDLRVLQFALPLSMLIAMGALLLCLIGMCNTAFRSSVPNIKLAKCLVNSAGCHLVAGLLFFLAGTVSLSPSIWVIFYNIHLNKKFEPVFSFDYAVYVTIASAGGLFMTSLILFIWYCTCKSLPSPFWQPLYSHPPSMHTYSQPYSARSRLSAIEIDIPVVSHTT

SEQ ID NO: 53698 - protein, 11 aa, Homo sapiens
LSRSRPRRSAR

SEQ ID NO: 53699 - protein, 375 aa, Homo sapiens
KFSCPRALKVPSYLNYHFLGEKDCGAPCEPTKVYGLMYFGPEELRFSRTWIGIWSVLCCASTLFTVLTYLVDMRRFSYPERPIIFLSGCYTAVAVAYIAGFLLEDRVVCNDKFAEDGARTVAQGTKKEGCTILFMMLYFFSMASSIWWVILSLTWFLAAGMKWGHEAIEANSQYFHLAAWAVPAIKTITILALGQVDGDVLSGVCFVGLNNVDALRGFVLAPLFVYLFIGTSFLLAGFVSLFRIRTIMKHDGTKTEKLEKLMVRIGVFSVLYTVPATIVIACYFYEQAFRDQWERSWVAQSCKSYAIPCPHLQAGGGAPPHPPMSPDFTVFMIKYLMTLIVGITSGFWIWSGKTLNSWRKFYTRLTNSKQGETTV

SEQ ID NO: 53700 - protein, 27 aa, Homo sapiens
ILLSHFKDSFPMIRRIDSFCDSSVHFL

SEQ ID NO: 53701 - protein, 6 aa, Homo sapiens
RCLLWF

SEQ ID NO: 53702 - protein, 185 aa, Homo sapiens
KQEIHRRSARLRNTKYKSAPAAEKKVSTKGKGRRHIFKLKNPIKAPESVSTIITAESIFYKGVYYQIGDVVSVIDEQDGKPYYAQIRGFIQDQYCEKSAALTWLIPTLSSPRDQFDPASYIIGPEEDLPRKMEYLEFVCHAPSEYFKSRSSPFPTVPTRPEKGYIWTHVGPTPAITIKESVANHL

SEQ ID NO: 53703 - protein, 56 aa, Homo sapiens
LLPDISKVDMHDDSLNTTANLIRHKLKEVISSVPKPPEDKPEDVHTSHPLKQRRRI

SEQ ID NO: 53704 - protein, 61 aa, Homo sapiens
LQQANENRQNSTGKACFGTFLPEEKLNDFRDEQIGQLQELMQEATKPNRQFSISESMKPKF

SEQ ID NO: 53705 - protein, 39 aa, Homo sapiens
LQQEVLTRQKAFDCDVWEKNSSQRAHLVQHQSIHTKENS

SEQ ID NO: 53706 - protein, 5 aa, Homo sapiens
LNDDC

SEQ ID NO: 53707 - protein, 54 aa, Homo sapiens
IHTREKPYKCTKCGKAFTRSSTLTLHHRIHARERASEYSPASLDAFGAFLKSCV

SEQ ID NO: 53708 - protein, 60 aa, Homo sapiens
KPYKCKECGKAFNHSSNFNKHHRIHTGEKPYWCHHCGKTFCSKSNLSKHQRVHTGEGEAP

SEQ ID NO: 53709 - protein, 298 aa, Homo sapiens
VMACGVTGSVSVALHPLVILNISDHWIRMRSQEGRPVQVIGALIGKQEGRNIEVMNSFELLSHTVEEKIIIDKEYYYTKEEQFKQVFKELEFLGWYTTGGPPDPSDIHVHKQVCEIIESPLFLKLNPMTKHTDLPVSVFESVIDIINGEATMLFAELTYTLATEEAERIGVDHVARMTATGSGENSTVAEHLIAQHSAIKMLHSRVKLILEYVKASEAGEVPFNHEILREAYALCHCLPVLSTDKFKTDFYDQCNDVGLMAYLGTITKTCNTMNQFVNKFNVLYDRQGIGRRMRGLFF

SEQ ID NO: 53710 - protein, 152 aa, Homo sapiens
ILDYSVHAERKGSLRYAKGQSQTMATLKGLVQKGVKVDLGIPLELWDEPSVEVTYLKKQCETMLEEFEDIVGDWYFHHQEQPLQNFLCEGHVLPAAETACLQETWTGKEITDGEEKTEGEEEQEEEEEEEEEEGGDKMTKTGSHPKLDREDL

SEQ ID NO: 53711 - protein, 22 aa, Homo sapiens
LVAAANSLDNLCRMDPAWHPWL

SEQ ID NO: 53712 - protein, 376 aa, Homo sapiens
LKTLRIMSLHQFLLEPITCHAWNRDRTQIALSPNNHEVHIYKKNGSQWVKAHELKEHNGHITGIDWAPKSDRIVTCGADRNAYVWSQKDGVWKPTLVILRINRAATFVKWSPLENKFAVGSGARLISVCYFESENDWWVSKHIKKPIRSTVLSLDWHPNNVLLAAGSCDFKCRVFSAYIKEVDEKPASTPWGSKMPFGQLMSEFGGSGTGGWVHGVSFSASGSRLAWVSHDSTVSVADASKSVQVSTLKTEFLPLLSVSFVSENSVVAAGHDCCPMLFNYDDRGCLTFVSKLDIPKQSIQRNMSAMERFRNMDKRATTEDRNTALETLHQNSITQVSIYEVDKQDCRKFCTTGIDGAMTIWDFKTLESSIQGLRIM

SEQ ID NO: 53713 - protein, 690 aa, Homo sapiens
LKTLRIMSLHQFLLEPITCHAWNRDRTQIALSPNNHEVHIYKKNGSQWVKAHELKEHNGHITGIDWAPKSDRIVTCGADRNAYVWSQKDGVWKPTLVILRINRAATFVKWSPLENKFAVGSGARLISVCYFESENDWWVSKHIKKPIRSTVLSLDWHPNNVLLAAGSCDFKCRVFSAYIKEVDEKPASTPWGSKMPFGQLMSEFGGSGTGGWVHGVSFSASGSRLAWVSHDSTVSVADASKSVQVSTLKTEFLPLLSVSFVSENSVVAAGHDCCPMLFNYDDRGCLTFVSKLDIPKQSIQRNMSAMERFRNMDKRATTEDRNTALETLHQNSITSQAAMAYHSFLVEPISCHAWNKDRTQIAICPNNHEVHIYEKSGAKWTKVHELKEHNGQVTGIDWAPESNRIVTCGTDRNAYVWTLKGRTWKPTLVILRINRAARCVRWAPNENKFAVGSGSRVISICYFEQENDWWVCKHIKKPIRSTVLSLDWHPNNVLLAAGSCDFKCRIFSAYIKEVEERPAPTPWGSKMPFGELMFESSSSCGWVHGVCFSASGSRVAWVSHDSTVCLADADKKMAVATLASETLPLLALTFITDNSLVAAGHDCFPVLFTYDAAAGMLSFGGRLDVPKQSSQRGLTARERFQNLDKKASSEGGTAAGAGLDSLHKNSVRSRCSAAARPSARSSAPLAWMAA

SEQ ID NO: 53714 - protein, 355 aa, Homo sapiens
KDRTQIAICPNNHEVHIYEKSGAKWTKVHELKEHNGQVTGIDWAPESNRIVTCGTDRNAYVWTLKGRTWKPTLVILRINRAARCVRWAPNENKFAVGSGSRVISICYFEQENDWWVCKHIKKPIRSTVLSLDWHPNNVLLAAGSCDFKCRIFSAYIKEVEERPAPTPWGSKMPFGELMFESSSSCGWVHGVCFSASGSRVAWVSHDSTVCLADADKKMAVATLASETLPLLALTFITDNSLVAAGHDCFPVLFTYDAAAGMLSFGGRLDVPKQSSQRGLTARERFQNLDKKASSEGGTAAGAGLDSLHKNSVSQISVLSGGKAKCSQFCTTGMDGGMSIWDVKSLESALKDLKIK

SEQ ID NO: 53715 - protein, 102 aa, Homo sapiens
VESLWPIFRIHHQKTRYIFDLFYKRKAISRELYEYCIKEGYADKNLIAKWKKQGYENLCCLRCIQTRDTNFGTNCICRVPKSKLEVGRIIECTHCGCRGCSG

SEQ ID NO: 53716 - protein, 30 aa, Homo sapiens
LEQVTCYKCGEKGHYANRCTKGHLAFLSGQ

SEQ ID NO: 53717 - protein, 720 aa, Homo sapiens
TAAAPRPGVLLLLLSILHPSRPGGVPGAIPGGVPGGVFYPGAGLGALGGGALGPGGKPLKPVPGGLAGAGLGAGLGAFPAVTFPGALVPGGVADAAAAYKAAKAGAGLGGVPGVGGLGVSAGAVVPQPGAGVKPGKVPGVGLPGVYPGGVLPGARFPGVGVLPGVPTGAGVKPKAPGVGGAFAGIPGVGPFGGPQPGVPLGYPIKAPKLPGGYGLPYTTGKLPYGYGPGGVAGAAGKAGYPTGTGVGPQAAAAAAAKAAAKFGAGAAGVLPGVGGAGVPGVPGAIPGIGGIAGVGTPAAAAAAAAAAKAAKYGAAAGLVPGGPGFGPGVVGVPGAGVPGVGVPGAGIPVVPGAGIPGAAVPGVVSPEAAAKAAAKAAKYGARPGVGVGGIPTYGVGAGGFPGFGVGVGGIPGVAGVPGVGGVPGVGGVPGVGISPEAQAAAAAKAAKYGVGTPAAAAAKAAAKAAQFGLVPGVGVAPGVGVAPGVGVAPGVGLAPGVGVAPGVGVAPGVGVAPGIGPGGVAAAAKSAAKVAAKAQLRAAAGLGAGIPGLGVGVGVPGLGVGAGVPGLGVGAGVPGFGAVPGALAAAKAAKYGAAVPGVLGGLGALGGVGIPGGVVGAGPAAAAAAAKAAAKAAQFGLVGAAGLGGLGVGGLGVPGVGGLGGIPPAAAAKAAKYGAAGLGGVLGGAGQFPLGGVAARPGFGLSPIFPGGACLGKACGRKRK

SEQ ID NO: 53718 - skipped

SEQ ID NO: 53719 - protein, 54 aa, Homo sapiens
TEDALRDALDQAQQVEKLMEAMRSCPDKAQTIGNSGSANGIHQQDKAQKQEDKH

SEQ ID NO: 53720 - protein, 44 aa, Homo sapiens
KWPQPWALGQVVTKTMVNTVVANASFTYLTALTDSNIVAIWGRM

SEQ ID NO: 53721 - protein, 20 aa, Homo sapiens
IISIETPNTAPSSKKKDKKE

SEQ ID NO: 53722 - protein, 4 aa, Homo sapiens
KDDE

SEQ ID NO: 53723 - protein, 46 aa, Homo sapiens
KTNSCPLCRHELPTDDYTYEEHRRDKARKQQQQQNRLENLHGAMYT

SEQ ID NO: 53724 - protein, 56 aa, Homo sapiens
LNLNVGSALLLKDVLQSASGQLPATAALNEVGIYKLAQQDVEILLNLRTNWPNTGK

SEQ ID NO: 53725 - protein, 118 aa, Homo sapiens
VLLTGNGNTKVQVLKLLLNLSENPAMTEGLLRAQVDSSFLSLYDSHVAKEILLRVLTLFQNIKNCLKIEGHLAVQPTFTEGSLFFLLHGEECAQKIRALVDHHDAEVKEKVVTIIPKI

SEQ ID NO: 53726 - protein, 482 aa, Homo sapiens
VVLSSAARRRLWGFSESLLIRGAAGRSLYFGENRLRSTQAATQVVLNVPETRVTCLESGLRVASEDSGLSTCTVGLWIDAGSRYENEKNNGTAHFLEHMAFKGTKKRSQLDLELEIENMGAHLNAYTSREQTVYYAKAFSKDLPRAVEILADIIQNSTLGEAEIERERGVILREMQEVETNLQEVVFDYLHATAYQNTALGRTILGPTENIKSISRKDLVDYITTHYKGPRIVLAAAGGVSHDELLDLAKFHFGDSLCTHKGEIPALPPCKFTGSEIRVRDDKMPLAHLAIAVEAVGWAHPDTICLMVANTLIGNWDRSFGGGMNLSSKLAQLTCHGNLCHSFQSFNTSYTDTGLWGLYMVCESSTVADMLHVVQKEWMRLCTSVTESEVARARNLLKTNMLLQLDGSTPICEDIGRQMLCYNRRIPIPELEARIDAVNAETIREVCTKYIYNRSPAIAAVGPIKQLPDFKQIRSNMCWLRD

SEQ ID NO: 53727 - protein, 325 aa, Homo sapiens
KKNKKGKTISLTDFLAEDGGTGGGSTYVSKPVSWADETDDLEGDVSTTWHSNDDDVYRAPPIDRSILPTAPRAAREPNIDRSRLPKSPPYTAFLGNLPYDVTEESIKEFFRGLNISAVRLPREPSNPERLKGFGYAEFEDLDSLLSALSLNEESLSNRRIRVDVADQALDKDRDDPPFGRDRNRDSDKTDTDWRARPATDTFDDYPPRRGDDSFGDKYRDRYDSDRYRDGYRDGPRRDMDRYGGRDRYDDRGSRDYDRGYDSRIGSGRRAFGSGYRRDDDYREGRDCYEDQYDRRDDRSWSSRDDYSRDDYRRDDRGPPPPKDPN

SEQ ID NO: 53728 - protein, 43 aa, Homo sapiens
MDVQAFERLLGPCMEIMKRNIATYEEQLVALFGTNMDIVEPTA

SEQ ID NO: 53729 - protein, 4 aa, Homo sapiens
LACC

SEQ ID NO: 53730 - protein, 255 aa, Homo sapiens
VEIPFSFYYPWELATAPDVRISWRRGHFHRQSFYSTRPPSIHKDYVNRLFLNWTEGQKSGFLRISNLQKQDQSVYFCRVELDTRSSGRQQWQSIEGTKLSITQAVTTTTQRPSSMTTTWRLSSTTTTTGLRVTQGKRRSDSWHISLETAVGVAVAVTVLGIMILGLICLLRWRRRKGQQRTKATTPAREPFQNTEEPYENIRNEGQNTDPKLNPKDDGIVYASLALSSSTSPRAPPSHRPLKSPQNETLYSVLKA

SEQ ID NO: 53731 - protein, 103 aa, Homo sapiens
VHLNWGDEGLKRMFRRIYRHLRPGGILVLEPQPWSSYGKRKTLTETIYKNYYRIQLKPEQFSSYLTSPDVGFSSYELVATPHNTSKGFQRPVYLFHKARSPSH

SEQ ID NO: 53732 - protein, 7 aa, Homo sapiens
IQLLPLS

SEQ ID NO: 53733 - protein, 323 aa, Homo sapiens
IRDARKACGDSTLTQITAGLDPVGRIQMRTRRTLRGHLAKIYAMHWGTDSRLLVSASQDGKLIIWDSYTTNKVHAIPLRSSWVMTCAYAPSGNFVACGGLDNICSIYSLKTREGNVRVSRELPGHTGYLSCCRFLDDNQIITSSGDTTCALWDIETGQQTVGFAGHSGDVMSLSLAPDGRTFVSGACDASIKLWDVRDSMCRQTFIGHESDINAVAFFPNGYAFTTGSDDATCRLFDLRADQELLMYSHDNIICGITSVAFSRSGRLLLAGYDDFNCNIWDAMKGDRAGVLAGHDNRVSCLGVTDDGMAVATGSWDSFLKIWN

SEQ ID NO: 53734 - protein, 138 aa, Homo sapiens
IPSDVKVYNLTHLNPSTEYKICIDIPTIYQKNRKKCVNVTTKGLHPDQKEYEKNNTTTLMACLGGLLGIIGVICLISCLSPEMNCDGGHSYVRNYLQKPTFALGELYPPLINLWEAGKEKSTSLKVKATVIGLPTNMS

SEQ ID NO: 53735 - protein, 57 aa, Homo sapiens
LEYYFPTYENDTLLCTLSDSESDLTAQEQNENVPIISEDTSKLYALKQSSILNQLLL

SEQ ID NO: 53736 - protein, 191 aa, Homo sapiens
MQDQSIWGNPSDGELIRTQPQRLPQLQTSAQVPSGEEIGKIKNGHTGLSNGNGIHHGAKHGSADNRKLSAPVSQKMHRKIQSSLSVNSDISKKSKVNAVFSQKTGSSPEDCCVHCILACLFCEFLTLCNIVLGQASCGICTSEACCCCCGDEMGDDCNCPCDMDCGIMDACCESSDCLEICMECCGICFPS

SEQ ID NO: 53737 - protein, 118 aa, Homo sapiens
RKRLPSRLPRRPNDIYVNMKTDFKAQLARCQKLLDGGARGQNACSEIYIHGLGLAINRAINIALQLQAGSFGSLQVAANTSTVELVDELEPETDTREPLTRIRNNSAIHIRVFRVTPK

SEQ ID NO: 53738 - protein, 542 aa, Homo sapiens
TRAAGGVVVAGAARAWAAGTSRQSEHHNMVWEVKTNQMPNAVQKLLLVMDKRASGMNDSLELLQCNENLPSSPGYNSCDEHMELDDLPELQAVQSDPTQSGMYQLSSDVSHQEYPRSSWNQNTSDIPETTYRENEVDWLTELANIATSPQSPLMQCSFYNRSSPVHIIATSKSLHSYARPPPVSSSSKSEPAFPHHHWKEETPVRHERANSESESGIFCMSSLSDDDDLGWCNSWPSTVWHCFLKGTRLCFHKGSNKEWQDVEDFARAEGCDNEEDLQMGIHKGYGSDGLKLLSHEESVSFGESVLKLTFDPGTVEDGLLTVECKLDHPFYVKNKGWSSFYPSLTVVQHGIPCCEVHIGDVCLPPGHPDAINFDDSGVFDTFKSYDFTPMDSSAVYVLSSMARQRRASLSCGGPGGQDFARSGFSKNCGSPGSSQLSSNSLYAKAVKNHSSGTVSATSPNKCKRPMNAFMLFAKKYRVEYTQMYPGKDNRAISVILGDRWKKMKNEERRMYTLEAKALAEEQKRLNPDCWKRKRTNSGSQQH

SEQ ID NO: 53739 - protein, 22 aa, Homo sapiens
RTHFNLLPTFYSSSEMAEDFFI

SEQ ID NO: 53740 - protein, 497 aa, Homo sapiens
KRGHFNRISHGLQGLSAVPLRTYADQPIDADVTVIGSGPGGYVAAIKAAQLGFKTVCIEKNETLGGTCLNVGCIPSKALLNNSHYYHMAHGKDFASRGIEMSEVRLNLDKMMEQKSTAVKALTGGIAHLFKQNKVVHVNGYGKITGKNQVTATKADGGTQVIDTKNILIATGSEVTPFPGITIDEDTIVSSTGALSLKKVPEKMVVIGAGVIGVELGSVWQRLGADVTAVEFLGHVGGVGIDMEISKNFQRILQKQGFKFKLNTKVTGATKKSDGKIDVSIEAASGGKAEVITCDVLLVCIGRRPFTKNLGLEELGIELDPRGRIPVNTRFQTKIPNIYAIGDVVAGPMLAHKAEDEGIICVEGMAGGAVHIDYNCVPSVIYTHPEVAWVGKSEEQLKEEGIEYKVGKFPFAANSRAKTNADTDGMVKILGQKSTDRVLGAHILGPGAGEMVNEAALALEYGASCEDIARVCHAHPTLSEAFREANLAASFGKSINF

SEQ ID NO: 53741 - protein, 114 aa, Homo sapiens
IVEPYIAWGYPNLKSVNELIYKSGYGKINKKRIALTDNALIARSLGKYGIICMEDLIHEIYTVGKRFKEANNFLWPFKLSSPRGGMKKKTTHFVEGGDAGNREDQINRLIRRMN

SEQ ID NO: 53742 - protein, 229 aa, Homo sapiens
LSQPPEDELDRLTKKLVHDMNHPPSGEYFGQCGGCGEDVVGDGAGVVALDRVFHVGCFVCSTCRAQLRGQHFYAVERRAYCEGCYVATLEKCATCSQPILDRILRAMGKAYHPGCFTCVVCHRGLDGIPFTVDATSQIHCIEDFHRKFAPRCSVCGGAIMPEPGQEETVRIVALDRSFHIGCYKCEECGLLLSSEGECQGCYPLDGHILCKACSAWRIQELSATVTTDC

SEQ ID NO: 53743 - protein, 34 aa, Homo sapiens
LEKPRVTTMVDGRYLVVSLSNGTIHIFRVRSPDS

SEQ ID NO: 53744 - protein, 28 aa, Homo sapiens
TPSSGTKLEMHRERRNSEEKNFSVNDSF

SEQ ID NO: 53745 - protein, 154 aa, Homo sapiens
LAQHTLQALQSELDSLRADNIKLFEKIKFLQSYPGRGSGSDDTELRYSSQYEERLDPFSSFSKRERQRKYLSLSPWDKATLSMGRLVLSNKMARTIGFFYTLFLHCLVFLVLYKLAWSESMERDCATFCAKKFADHLHKFHENDNGAAAGDLWQ

SEQ ID NO: 53746 - protein, 169 aa, Homo sapiens
RKMHWGTLCGFLWLWPYLFYVQAVPIQKVQDDTKTLIKTIVTRINDISHTQSVSSKQKVTGLDFIPGLHPILTLSKMDQTLAVYQQILTSMPSRNVIQISNDLENLRDLLHVLAFSKSCHLPWASGLETLDSLGGVLEASGYSTEVVALSRLQGSLQDMLWQLDLSPGC

SEQ ID NO: 53747 - protein, 115 aa, Homo sapiens [sequence omitted]

SEQ ID NO: 53748 - protein, 25 aa, Homo sapiens
LGALLGNSTDPAVFTDLASINNSEF

SEQ ID NO: 53749 - protein, 20 aa, Homo sapiens
IWGYPKSKAVPAFSSAGRSF

SEQ ID NO: 53750 - protein, 99 aa, Homo sapiens
LKHFCCFDCDSILAGEIYVMVNDKPVCKPCYVKNHAVVCQGCHNAIDPEVQRVTYNNFSWHASTECFLCSCCSKCLIGQKFMPVEGMVFCSVECKKRMS

SEQ ID NO: 53751 - protein, 155 aa, Homo sapiens
IYKPNNKAMADELSEKQVYDAHTKEIDLVNRDPKHLNDDVVKIDFEDVIAEPEGTHSFDGIWKASFTTFTVTKYWFYRLLSALFGIPMALIWGIYFAILSFLHIWAVVPCIKSFLIEIQCISRVYSIYVHTVCDPLFEAVGKIFSNVRINLQKEI

SEQ ID NO: 53752 - protein, 271 aa, Homo sapiens [sequence omitted]

SEQ ID NO: 53753 - protein, 16 aa, Homo sapiens
IFKHFQIWRLITKFLF

SEQ ID NO: 53754 - protein, 60 aa, Homo sapiens
IKLENYFEELLKNLYPEKRFPKPEFRNESEDNKFSDDSDDDFVQPRKKRLKSIEERQLLK

SEQ ID NO: 53755 - protein, 12 aa, Homo sapiens
TRPWCAEIASAG

SEQ ID NO: 53756 - protein, 4 aa, Homo sapiens
ITTV

SEQ ID NO: 53757 - protein, 10 aa, Homo sapiens
ISLPRSYRYI

SEQ ID NO: 53758 - protein, 96 aa, Homo sapiens
LRYLSAATGRPYRDTAAYRYLVKAFRAHRVTSEKLCRAQHELHFQAATYLCLLRSIRKHVALHQEFHGKGERSVEESAGLVGLKLPHQPGGKGWEP

SEQ ID NO: 53759 - protein, 441 aa, Homo sapiens
LRYLSAATGRPYRDTAAYRYLVKAFRAHRVTSEKLCRAQHELHFQAATYLCLLRSIRKHVALHQEFHGKGDTTRQRIKFSDDRVCKSHLLNCCPHDVLSGTRMDLGECLKVHDLALRADYEIASKEQDFFFELDAMDHLQSFIADCDRRTEVAKKRLAETQEEISAEVAAKAERVHELNEEIGKLLAKVEQLGAEGNVEESQKVMDEVEKARAKKREAEEVYRNSMPASSFQQQKLRVCEVCSAYLGLHDNDRRLADHFGGKLHLGFIEIREKLEELKRVVAEKQEKRNQERLKRREEREREEREKLRRSRSHSKNPKRSRSREHRRHRSRSMSRERKRRTRSKSREKRHRHRSRSSSRSRSRSHQRSRHSSRDRSRERSKRRSSKERFRDQDLASCDRDRSSRDRSPRDRDRKDKKRSYESANGRSEDRRSSEEREAGEI

SEQ ID NO: 53760 - protein, 409 aa, Homo sapiens
RARSAPHPRPSARYAAAMSAQAQMRAMLDQLMGTSRDGDTTRQRIKFSDDRVCKSHLLNCCPHDVLSGTRMDLGECLKVHDLALRADYEIASKEQDFFFELDAMDHLQSFIADCDRRTEVAKKRLAETQEEISAEVAAKAERVHELNEEIGKLLAKVEQLGAEGNVEESQKVMDEVEKARAKKREAEEVYRNSMPASSFQQQKLRVCEVCSAYLGLHDNDRRLADHFGGKLHLGFIEIREKLEELKRVVAEKQEKRNQERLKRREEREREEREKLRRSRSHSKNPKRSRSREHRRHRSRSMSRERKRRTRSKSREKRHRHRSRSSSRSRSRSHQRSRHSSRDRSRERSKRRSSKERFRDQDLASCDRDRSSRDRSPRDRDRKDKKRSYESANGRSEDRRSSEEREAGEI

SEQ ID NO: 53761 - protein, 27 aa, Homo sapiens
RPEGRTYADYESVNECMEGVCKMYEDM

SEQ ID NO: 53762 - protein, 66 aa, Homo sapiens
IEPRYRQFPQLTRSQVFQSEFFSGLMWFWILWRFWHDSEEVLGHFPYPDPSQWTDEELGIPPDDED

SEQ ID NO: 53763 - protein, 6 aa, Homo sapiens
IALRMC

SEQ ID NO: 53764 - protein, 55 aa, Homo sapiens
LLKHQRIHTGERPYTCGECGKSFRYKESLKDHLRVHSGGPGPGAPRQLPPPPERD

SEQ ID NO: 53765 - protein, 5 aa, Homo sapiens
IMGTC

SEQ ID NO: 53766 - protein, 527 aa, Homo sapiens
RQKREEMRLEAERIAYQRNDDDEEEAARERRRRARQERLRQKQEEESLGQVTDQVEVNAQNSVPDEEAKTTTTNTQVEGDDEAAFLERLARREERRQKRLQEALERQKEFDPTITDASLSLPSRRMQNDTAENETTEKEEKSESRQERYEIEETETVTKSYQKNDWRDAEENKKEDKEKEEEEEEKPKRGSIGENQIKDEKIKKDKEPKEEVKSFMDRKKGFTEVKSQNGEFMTHKLKHTENTFSRPGGRASVDTKEAEGAPQVEAGKRLEELRRRRGETESEEFEKLKQKQQEAALELEELKKKREERRKVLEEEEQRRKQEEADRKLREEEEKRRLKEEIERRRAEAAEKRQKMPEDGLSDDKKPFKCFTPKGSSLKIEERAEFLNKSVQKSSGVKSTHQAAIVSKIDSRLEQYTSAIEGTKSAKPTKPAASDLPVPAEGVRNIKSMWEKGNVFSSPTAAGTPNKETAGLKVGVSSRINEWLTKTPDGNKSPAPKPSDLRPGDVSSKRNLWEKQSVDKVTSPTKV

SEQ ID NO: 53767 - protein, 331 aa, Homo sapiens
IKDEKIKKDKEPKEEVKSFMDRKKGFTEVKSQNGEFMTHKLKHTENTFSRPGGRASVDTKEAEGAPQVEAGKRLEELRRRRGETESEEFEKLKQKQQEAALELEELKKKREERRKVLEEEEQRRKQEEADRKLREEEEKRRLKEEIERRRAEAAEKRQKMPEDGLSDDKKPFKCFTPKGSSLKIEERAEFLNKSVQKSSGVKSTHQAAIVSKIDSRLEQYTSAIEGTKSAKPTKPAASDLPVPAEGVRNIKSMWEKGNVFSSPTAAGTPNKETAGLKVGVSSRINEWLTKTPDGNKSPAPKPSDLRPGDVSSKRNLWEKQSVDKVTSPTKV

SEQ ID NO: 53768 - protein, 45 aa, Homo sapiens
INAFGESLQKKLLDIEGLYSKVRSRYSFIQALVRRIRGLLRISRN

SEQ ID NO: 53769 - protein, 21 aa, Homo sapiens
ICGQTFDDEERLLAHQKKHDV

SEQ ID NO: 53770 - protein, 68 aa, Homo sapiens
RVLSAMKHVLNLYLLGVVLTLLSIFVRVMESLEGLLESPSPGTSWTTRSQLANTEPTKGLPDHPSRSM

SEQ ID NO: 53771 - protein, 8 aa, Homo sapiens
MSRWESHS

SEQ ID NO: 53772 - protein, 9 aa, Homo sapiens
VFCLCSRPV

SEQ ID NO: 53773 - protein, 89 aa, Homo sapiens
LRDYGRYDMAQLRFKKGQCLSGNFYVRGDGTRVYFFTQEELDTLFTTAGLEKVQNLVDRRLQVNRGKQLTMYRVWIQCKYCKPLLSSTS

SEQ ID NO: 53774 - protein, 322 aa, Homo sapiens
KETDLIIMDLRQFLMCLSLCTAFALSKPTEKKDRVHHEPQLSDKVHNDAQSFDYDHDAFLGAEEAKTFDQLTPEESKERLGMIVDKIDADKDGFVTEGELKSWIKHAQKKYIYDNVENQWQEFDMNQDGLISWDEYRNVTYGTYLDDPDPDDGFNYKQMMVRDERRFKMADKDGDLIATKEEFTAFLHPEEYDYMKDIVVQETMEDIDKNADGFIDLEEYIGDMYSHDGNTDEPEWVKTEREQFVEFRDKNRDGKMDKEETKDWILPSDYDHAEAEARHLVYESDQNKDGKLTKEEIVDKYDLFVGSQATDFGEALVRHDEF

SEQ ID NO: 53775 - protein, 114 aa, Homo sapiens
KLIAVIGDEDTVTGFLLGGIGELNKNRHPNFLVVEKDTTINEIEDTFRQFLNRDDIGIILINQYIAEMVRHALDAHQQSIPAVLEIPSKEHPYDAAKDSILRRARGMFTAEDLR

SEQ ID NO: 53776 - protein, 563 aa, Homo sapiens
ISVSVSAPAFYAPQKKFGPVVAPKPKVNPFRPGDSEPPPAPGAQRAQMGRVGEIPPPPPEDFPLPPPPLAGDGDDAEGALGGAFPPPPPPIEESFPPAPLEEEIFPSPPPPPEEEGGPEAPIPPPPQPREKVSSIDLEIDSLSSLLDDMTKNDPFKARVSSGYVPPPVATPFSSKSSTKPAAGGTAPLPPWKSPSSSQPLPQVPAPAQSQTQFHVQPQPQPKPQVQLHVQSQTQPVSLANTQPRGPPASSPAPAPKFSPVTPKFTPVASKFSPGAPGGSGSQPNQKLGHPEALSAGTGSPQPPSFTYAQQREKPRVQEKQHPVPPPAQNQNQVRSPGAPGPLTLKEVEELEQLTQQLMQDMEHPQRQNVAVNELCGRCHQPLARAQPAVRALGQLFHIACFTCHQCAQQLQGQQFYSLEGAPYCEGCYTDTLEKCNTCGEPITDRMLRATGKAYHPHCFTCVVCARPLEGTSFIVDQANRPHCVPDYHKQYAPRCSVCSEPIMPEPGRDETVRVVALDKNFHMKCYKCEDCGKPLSIEADDNGCFPLDGHVLCRKCHTARAQT

SEQ ID NO: 53777 - protein, 11 aa, Homo sapiens
LEKNKKKGKIF

SEQ ID NO: 53778 - protein, 39 aa, Homo sapiens
IVIDGSGALFGTLQGNTREVLHKFTVDLPKKHSRGVLPV

SEQ ID NO: 53779 - protein, 73 aa, Homo sapiens
TVGNIGRQLAMLIPFCEELNLKTTWLFHKTRSNYRVFLKSPIVIESSKPPILRARKILEENLTVDYDKDYLFS

SEQ ID NO: 53780 - protein, 30 aa, Homo sapiens
KEPAHALAFQQKFHRHMIDLSHINVALIVE

SEQ ID NO: 53781 - protein, 27 aa, Homo sapiens
RAMGVADEALGNVRTVRAFAMEQREEE

SEQ ID NO: 53782 - protein, 55 aa, Homo sapiens
LAFPFILILTVPLRMVVLTRIFTDREMKCLDANEAEPVFDEREGVDEYNEMPMPV

SEQ ID NO: 53783 - protein, 37 aa, Homo sapiens
IQHGCPGEGCGLAPTPNREPANGTNPSAELHRSPSLL

SEQ ID NO: 53784 - protein, 216 aa, Homo sapiens
LALKWHPDKNPENKEEAERKFKQVAEAYEVLSDAKKRDIYDKYGKEGLNGGGGGGSHFDSPFEFGFTFRNPDDVFREFFGGRDPFSFDFFEDPFEDFFGNRRGPRGSRSRGTGSFFSAFSGFPSFGSGFSSFDTGFTSFGSLGHGGLTSFSSTSFGGSGMGNFKSISTSTKMVNGRKITTKRIVENGQERVEVEEDGQLKSLTINGKEQLLRLDNK

SEQ ID NO: 53785 - protein, 298 aa, Homo sapiens
KWHPDKNPENKEEAERKFKQVAEAYEVLSDAKKRDIYDKYGKEGLNGGGGGGSHFDSPFEFGFTFRNPDDVFREFFGGRDPFSFDFFEDPFEDFFGNRRGPRGSRSRGTGSFFSAFSGFPSFGSGFSSFDTGFTSFGSLGHGGLTSFSSTSFGGSGMGNFKSISTSTKMVNGRKITTKRIVENGQERVEVEEDGQLKSLTINGVADDDALAEERMRRGQNALPAQPAGLRPPKPPRPASLLRHAPHCLSEEEGEQDRPRAPGPWDPLASAAGLKEGGKRKKQKQREESKKKKSTKGNH

SEQ ID NO: 53786 - protein, 760 aa, Homo sapiens
LDQIWDDLRAGIQQVYTRQSMAKSRYMELYTHVYNYCTSVHQSNQARGAGVPPSKSKKGQTPGGAQFVGLELYKRLKEFLKNYLTNLLKDGEDLMDESVLKFYTQQWEDYRFSSKVLNGICAYLNRHWVRRECDEGRKGIYEIYSLALVTWRDCLFRPLNKQVTNAVLKLIEKERNGETINTRLISGVVQSYVELGLNEDDAFAKGPTLTVYKESFESQFLADTERFYTRESTEFLQQNPVTEYMKKAEARLLEEQRRVQVYLHESTQDELARKCEQVLIEKHLEIFHTEFQNLLDADKNEDLGRMYNLVSRIQDGLGELKKLLETHIHNQGLAAIEKCGEAALNDPKMYVQTVLDVHKKYNALVMSAFNNDAGFVAALDKACGRFINNNAVTKMAQSSSKSPELLARYCDSLLKKSSKNPEEAELEDTLNQVMVVFKYIEDKDVFQKFYAKMLAKRLVHQNSASDDAEASMISKLKQACGFEYTSKLQRMFQDIGVSKDLNEQFKKHLTNSEPLDLDFSIQVLSSGSWPFQQSCTFALPSELERSYQRFTAFYASRHSGRKLTWLYQLSKGELVTNCFKNRYTLQASTFQMAILLQYNTEDAYTVQQLTDSTQIKMDILAQVLQILLKSKLLVLEDENANVDEVELKPDTLIKLYLGYKNKKLRVNINVPMKTEQKQEQETTHKNIEEDRKLLIQAAIVRIMKMRKVLKHQQLLGEVLTQLSSRFKPRVPVIKKCIDILIEKEYLERVDGEKDTYSYLA

SEQ ID NO: 53787 - protein, 23 aa, Homo sapiens
RSCWTTGCSWFPWNSWTSWLQRH

SEQ ID NO: 53788 - protein, 31 aa, Homo sapiens
RIIKPEASRKESSEVYFLATQYHGRKGTVKQ

SEQ ID NO: 53789 - protein, 53 aa, Homo sapiens [sequence omitted]

SEQ ID NO: 53790 - protein, 8 aa, Homo sapiens
IFSLGPGG

SEQ ID NO: 53791 - protein, 46 aa, Homo sapiens
LEGFLETLFPQYKFRELFNKLHSRSKQMQKYKQKLQTTQAPSLQKR

SEQ ID NO: 53792 - protein, 130 aa, Homo sapiens
KRGKKSAGCGGGGGAGGGGGSSSGGGSPQSYEELQTQRVMANVRERQRTQSLNEAFAALRKIIPTLPSDKLSKIQTLKLAARYIDFLYQVLQSDELDSKMASCSYVAHERLSYAFSVWRMEGAWSMSASH

SEQ ID NO: 53793 - protein, 170 aa, Homo sapiens
MEINMGDELEFEVFRLDSDAAGVFCIRGKLNITSLQFKRSEVSEEVTENGTEEAAKKPKKKKKKKDPETYEVDSGTTKLADDADDTPMEESALQNTNNANGIWEEEPKKKKKKKKHQEVQDQDPVFQGSDSSGYQSDHKKKKKKRKHSEEAEFTPPLKCSPKRKGKSNFL

SEQ ID NO: 53794 - protein, 610 aa, Homo sapiens
VAAPPAIDFPAEGPDPEYDESDVPAEIQVLKEPLQQPTFPFAVANQLLLVSLLEHLSHVHEPNPLRSRQVFKLLCQTFIKMGLLSSFTCSDEFSSLRLHHNRAITHLMRSAKERVRQDPCEDISRIQKIRSREVALEAQTSRYLNEFEELAILGKGGYGRVYKVRNKLDGQYYAIKKILIKGATKTVCMKVLREVKVLAGLQHPNIVGYHTAWIEHVHVIQPRADRAAIELPSLEVLSDQEEDREQCGVKNDESSSSSIIFAEPTPEKEKRFGESDTENQNNKSVKYTTNLVIRESGELESTLELQENGLAGLSASSIVEQQLPLRRNSHLEESFTSTEESSEENVNFLGQTEAQYHLMLHIQMQLCELSLWDWIVERNKRGREYVDESACPYVMANVATKIFQELVEGVFYIHNMGIVHRDLKPRNIFLHGPDQQVKIGDFGLACTDILQKNTDWTNRNGKRTPTHTSRVGTCLYASPEQLEGSEYDAKSDMYSLGVVLLELFQPFGTEMERAEVLTGLRTGQLPESLRKRCPVQAKYIQHLTRRNSSQRPSAIQLLQSELFQNSGNVNLTLQMKIIEQEKEIAELKKQLNLLSQDKGVRDDGKDGGVG

SEQ ID NO: 53795 - protein, 13 aa, Homo sapiens
IRWSVLCNKKNPD

SEQ ID NO: 53796 - protein, 373 aa, Homo sapiens
IRRRKKELIDDIERLKYEIAEVMTEIDNLTSVEESKTTQRNKQIAMGRKKFNMDPKKGIQFLIENDLLQSSPEDVAQFLYKGEGLNKTVIGDYLGERDEFNIKVLQAFVELHEFADLNLVQALRQFLWSFRLPGEAQKIDRMMEAFASRYCLCNPGVFQSTDTCYVLSFAIIMLNTSLHNHNVRDKPTAERFIAMNRGINEGGDLPEELLRNLYESIKNEPFKIPEDDGNDLTHTFFNPDREGWLLKLGGRVKTWKRRWFILTDNCLYYFEYTTDKEPRGIIPLENLSIREVEDPRKPNCFELYNPSHKGQVIKACKTEADGRVVEGNHVVYRISAPSPEEKEEWMKSIKASISRDPFYDMLATRKRRIANKK

SEQ ID NO: 53797 - protein, 41 aa, Homo sapiens
MFSKQTIEFKKMLKSTSDGLQITLGLLALQPFELANTLCHS

SEQ ID NO: 53798 - protein, 200 aa, Homo sapiens
LAAIVILLLKIWKTRSCAGISGKSQLLFALVFTTRYLDLFTSFISLYNTSMKVIYLACSYATVYLIYLKFKATYDGNHDTFRVEFLVVPVGGLSFLVNHDFSPLEILWTFSIYLESVAILPQLFMISKTGEAETITTHYLFFLGLYRALYLVNWIWRFYFEGFFDLIAVVAGVVQTILYCDFFYLYITKVLKGKKLSLPA

SEQ ID NO: 53799 - protein, 76 aa, Homo sapiens
IHHRIHSGEKPFECNECGKAFSRMSYLTVHYRTHSGEKPYECTECGKKFYHKSAFNSHQRIHRRGNMNVIDVGRLL

SEQ ID NO: 53800 - protein, 458 aa, Homo sapiens; identical to SEQ ID NO: 53628

SEQ ID NO: 53801 - protein, 78 aa, Homo sapiens
LLRALSDDGVSDLEDPTLTPLKDTERFGIVQRLFASADISLERLKSSVKAVILKDSKVFPLLLCITLNGLCALGREHS

SEQ ID NO: 53802 - protein, 56 aa, Homo sapiens
IWRQSADSMEDVCSGSDKRWDIIQSLVGWHKALHRRICSRVELVLTYDRMYQNKCF

SEQ ID NO: 53803 - protein, 403 aa, Homo sapiens
KTLPETSLPNYATNLKDKSSLVSSLYKVIQEPQSELLEPVCHQLFEFYRSGEEQLLQFTLQFLPELIWCYLAVSASRNVHSSGCIEALLLGVYNLEIVDKQGHTKVLSFTIPSLSKPSVYHEPSSIGSMALTESALSQHGLSKVVYSGPHPQREMLTAQNRFEVLTFLLLCYNAALTYMPSVSLQSLCQICSRICVCGYPRQHVRKYKGISSRIPVSSGFMVQMLTGIYFAFYNGEWDLAQKALDDIIYRAQLELYPEPLLVANAIKASLPHGPMKSNKEGTRCIQVEITPTSSRISRNAVTSMSIRGHRWKRHEQPDNNNDATELGILVIPEISVTNVAGERTGNGEKGRTLGEIDAQHIQGVQETATDPRTESKGLPEIRRQKSVRKMMEDGINSPGRVQF

SEQ ID NO: 53804 - protein, 381 aa, Homo sapiens
TSPVRVRPRRSLSSRSAAGNRAEATESAMEKTLETVPLERKKREKEQFRKLFIGGLSFETTEESLRNYYEQWGKLTDCVVMRDPASKRSRGFGFVTFSSMAEVDAAMAARPHSIDGRVVEPKRAVAREESGKPGAHVTVKKLFVGGIKEDTEEHHLRDYFEEYGKIDTIEIITDRQSGKKRGFGFVTFDDHDPVDKIVLQKYHTINGHNAEVRKALSRQEMQEVQSSRSGRGGNFGFGDSRGGGGNFGPGPGSNFRGGSDGYGSGRGFGDGYNGYGGGPGGGNFGGSPGYGGGRGGYGGGGPGYGNQGGGYGGGYDNYGGGNYGSGNYNDFGNYNQQPSNYGPMKSGNFGGSRNMGGPYGGGNYGPGGSGGSGGYGGRSRY

SEQ ID NO: 53805 - protein, 70 aa, Homo sapiens
KRCPYTKYQIRELEREFFFSVYINKEKRLQLSRMLNLTDRQVKIWFQNRRMKEKKINRDRLQYYSANPLL

SEQ ID NO: 53806 - protein, 354 aa, Homo sapiens
VGPPGGGGGHRGERGGRSMAASLRLLGAASGLRYWSRRLRPAAGSFAAVCSRSVASKTPVGFIGLGNMGNPMAKNLMKHGYPLIIYDVFPDACKEFQDAGEQVVSSPADVAEKADRIITMLPTSINAIEAYSGANGILKKVKKGSLLIDSSTIDPAVSKELAKEVEKMGAVFMDAPVSGGVGAARSGNLTFMVGGVEDEFAAAQELLGCMGSNVVYCGAVGTGQAAKICNNMLLAISMIGTAEAMNLGIRLGLDPKLLAKILNMSSGRCWSSDTYNPVPGVMDGVPSANNYQGGFGTTLMAKDLGLAQDSATSTKSPILLGSLAHQIYRMMCAKGYSKKDFSSVFQFLREEETF

SEQ ID NO: 53807 - protein, 59 aa, Homo sapiens
KNVNGIKYHAKNGHRTQIRVRKPFKCRCGKSYKTAQGLRHHTINFHPPVSAEIIRKMQQ

SEQ ID NO: 53808 - protein, 95 aa, Homo sapiens
LDEQEGVKSGMYVVIEVKVATQEGKEITCRSYLMTNYESAPPSPQYKKIICMGAKENGLPLEYQEKLKAIEPNDYTGKVSEEIEDIIKKGETQTL

SEQ ID NO: 53809 - protein, 22 aa, Homo sapiens
KTDKKDHSNIGNDSKKTDDSQE

SEQ ID NO: 53810 - protein, 97 aa, Homo sapiens
KTDKKDHSNIGNDSKKTDGTKQRSHGSPAPSTSSTCRLTLPVIKPPLRHFKRPAYASSSYAPSVSKKTDEHPARYKMLDQRIKMKKIQNISHNWNRK

SEQ ID NO: 53811 - protein, 79 aa, Homo sapiens
LPLELVDKCIGSRIHIVMKSDKEIVGTLLGFDDFVNMVLEDVTEFEITPEGRRITKLDQILLNGNNITMLVPGGEGPEV

SEQ ID NO: 53812 - protein, 203 aa, Homo sapiens
TDLPEDVKWIDITPDMMVQERPLDVDCKRLSPDRCKCKKVKPTLATYLSKNYSYVIHAKIKAVQRSGCNEVTTVVDVKEIFKSSSPIPRTQVPLITNSSCQCPHILPHQDVLIMCYEWRSRMMLLENCLVEKWRDQLSKRSIQWEERLQEQRRTVQDKKKTAGRTSRSNPPKPKGKPPAPKPASPKKNIKTRSAQKRTNPKRV

SEQ ID NO: 53813 - protein, 651 aa, Homo sapiens
LLAVFAAVLHWSHITHLFENDRHFSHLSTLEREMAFRTEMGLYYSYFKTIVEAPSFLNGVWMIMNDKLTEYPLVINTLKRFNLYPEVILASWYRIYTKIMDLIGIQTKICWTVTRGEGLSPIESCEGLGDPACFYVAVIFILNGLMMALFFIYGTYLSGSRLGGLVTVLCFFFNHGECTRVMWTPPLRESFSYPFLVLQMLLVTHILRATKLYRGSLIALCISNVFFMLPWQFAQFVLLTQIASLFAVYVVGYIDICKLRKIIYIHMISLALCFVLMFGNSMLLTSYYASSLVIIWGILAMKPHFLKINVSELSLWVIQGCFWLFGTVILKYLTSKIFGIADDAHIGNLLTSKFFSYKDFDTLLYTCAAEFDFMEKETPLRYTKTLLLPVVLVVFVAIVRKIISDMWGVLAKQQTHVRKHQFDHGELVYHALQLLAYTALGILIMRLKLFLTPHMCVMASLICSRQLFGWLFCKVHPGAIVFAILAAMSIQGSANLQTQWNIVGEFSNLPQEELIEWIKYSTKPDAVFAGAMPTMASVKLSALRPIVNHPHYEDAGLRARTKIVYSMYSRKAAEEVKRELIKLKVNYYILEESWCVRRSKPGCSMPEIWDVEDPANAGKTPLCNLLVKDSKPHFTTVFQNSVYKVLEVVKE

SEQ ID NO: 53814 - protein, 83 aa, Homo sapiens
REASQELPPGFLYKVETLHDFEAANSDELTLQRGDVVLVVPSDSEADQDAGWLVGVKESDWLQYRDLATYKGLFPENFTRRLD

SEQ ID NO: 53815 - protein, 89 aa, Homo sapiens; identical to SEQ ID NO: 52948

SEQ ID NO: 53816 - protein, 107 aa, Homo sapiens
ICCKKQFFVSFKDIGWNDWIIAPSGYHANYCEGECPSHIAGTSGSSLSFHSTVINHYRMRGHSPFANLKSCCVPTKLRPMSMLYYDDGQNIIKKDIQNMIVEECGCS

SEQ ID NO: 53817 - protein, 29 aa, Homo sapiens
MSTTNMAIGDMSSLLTSLAEESKFLAVMQ

SEQ ID NO: 53818 - protein, 43 aa, Homo sapiens
RQLSPHKYYFLVGYSETLLSYFYKCPVRLHLQTVPSKVVYKYL

SEQ ID NO: 53819 - protein, 107 aa, Homo sapiens
LLFEGEKKITINKDTKVPNACLFTINKEDHTLGNIIKSQCDLKDPQVLFAGYKVPHPLEHKIIIRVQTTPDYSPQEAFTNAITDLISELSLLEERFRTCLLPLRLLP

SEQ ID NO: 53820 - protein, 121 aa, Homo sapiens
VSDIFRYSSMEDHLEILEWTLRVRHISPTAPDTLGCYPFYKTDPFIFPECPHVYFCGNTPSFGSKIIRGPEDQTVLLVTVPDFSATQTACLVNLRSLACQPISFSGFGAEDDDLGGLGLGP

SEQ ID NO: 53821 - protein, 183 aa, Homo sapiens
KTHINIVVIGHVDSGKSTTTGHLIYKCGGIDKRTIEKFEKEAAEMGKGSFKYAWVLDKLKAERERGITIDISLWKFETSKYYVTIIDAPGHRDFIKNMITGTSQADCAVLIVAAGVGEFEAGISKNGQTREHALLAYTLGVKQLIVGVNKMDSTEPPYSQKRYEEIVKESALTLRKLATTPTQ

SEQ ID NO: 53822 - protein, 103 aa, Homo sapiens
KGRGHVQPIRCTNCARCVPKDNAIKKFVIRNIVEAAAVRDISEASVFDAYVLPKLCVKLHYCVSCVIHSKVVRNRSREARKDRTPPPRFRPAGAAARPPPKPM

SEQ ID NO: 53823 - protein, 211 aa, Homo sapiens
LLLLALCATGAQGLYFHIGETEKRCFIEEIPDETMVIGNYRTQMWDKQKEVFLPSTPGLGMHVEVKDPDGKVVLSRQYGSEGRFTFTSHTPGDHQICLHSNSTRMALFAGGKLRVHLDIQVGEHANNYPEIAAKDKLTELQLRARQLLDQVEQIQKEQDYQRYREERFRLTSESTNQRVLWWSIAQTVILILTGIWQMRHLKSFFEAKKLV

SEQ ID NO: 53824 - protein, 106 aa, Homo sapiens
IFETIVNNKLFFNVSIILFLNKMDLLVEKVKTVSIKKHFPDFRGDPHRLEDVQRYLVQCFDRKRRNRSKPLFHHFTTAIDTENVRFVFHAVKDTILQENLKDIMLQ

SEQ ID NO: 53825 - protein, 40 aa, Homo sapiens
IFPLLHEGLTDVIRDVPLVHLDEITLFKSRVAEEPPNLWW

SEQ ID NO: 53826 - protein, 360 aa, Homo sapiens
MCKAGFAGDDAPRAVFPSIVGRPRHQGVMVGMGQKDSYVGDEAQSKRGILTLKYPIEHGIVTNWDDMEKIWHHTFYNELRVAPEEHPVLLTEAPLNPKANREKMTQIMFETFNTPAMYVAIQAVLSLYASGRTTGIVMDSGDGVTHTVPIYEGYALPHAILRLDLAGRDLTDYLMKILTERGYSFTTTAEREIVRDIKEKLCYVALDFEQEMATAASSSSLEKSYELPDGQVITIGNERFRCPEALFQPSFLGMESCGIHETTFNSIMKCDVDIRKDLYANTVLSGGTTMYPGIADRMQKEITALAPSTMKIKIIAPPERKYSVWIGGSILASLSTFQQMWISKQEYDESGPSIVHRKCF

SEQ ID NO: 53827 - protein, 86 aa, Homo sapiens
VEALPRPVPQNLPQPQMPPYAFAHPPFPLPPVRPVFNNFPLNMGPIPAPYVPPLPNVRVNYDFGPIHMPLEHNLPMHFGPQPRHRF

SEQ ID NO: 53828 - protein, 36 aa, Homo sapiens
VPPLPNVRVNYDFGPIHMPLEHNLPMHFGPQPRHRF

SEQ ID NO: 53829 - protein, 314 aa, Homo sapiens
IPFPNVLPDFSKASEAASPLPDSPGDKLVIVKFVQDTSKFWYKADISREQAIAMLKDKEPGSFIVRDSHSFRGAYGLAMKVATPPPSVLQLNKKAGDLANELVRHFLIECTPKGVRLKGCSNEPYFGSLTALVCQHSITPLALPCKLLIPERDPLEEIAESSPQTAANSAAELLKQGAACNVWYLNSVEMESLTGHQAIQKALSITLVQEPPPVSTVVHFKVSAQGITLTDNQRKLFFRRHYPVNSVIFCALDPQDRKWIKDGPSSKVFGFVARKQGSATDNVCHLFAEHDPEQPASAIVNFVSKVMIGSPKKV

SEQ ID NO: 53830 - protein, 164 aa, Homo sapiens
VELLSMSSSSRIVTHDIPIKVIPRKLWKDLQEPVVPDPDVSIYLPVLKTMKSVVEKMKNISNHLVIEANLDGELNLKIETELVCVTTHFKDLGNPPLASESTHEDRNVEHMAEVHIDIRKLLQFLAGQQVNPTKALCNIVNNKMVHFDLLHEDVSLQYFIPALS

SEQ ID NO: 53831 - protein, 54 aa, Homo sapiens
KTSEMNTDKQYFCRTHLGHLLNPGELVLGFDLASCNLNDEHVNKMNSDRVPDVV

SEQ ID NO: 53832 - protein, 42 aa, Homo sapiens
LGKSTLINSLFLTDLYSPEYPGPSHRIKKTVQNTHAGLERCY

SEQ ID NO: 53833 - protein, 86 aa, Homo sapiens
ISNVKIPKHLTDAYFKKQQLRKPRHQEGNIFDTEKEKYEITEQRKIDQKAVDSQILPKVKAISQLQGYLRSVFALTNGIYPHKLVF

SEQ ID NO: 53834 - protein, 20 aa, Homo sapiens
IHTGEKLYKPEKCDNNFDNT

SEQ ID NO: 53835 - protein, 72 aa, Homo sapiens
RLAFLRWEFPNFNSRSKDLLGRFVLARRHIVAAGFLIVDVPFYEWLELKSEWQKGAYLKDKMRKAVAEELAK

SEQ ID NO: 53836 - protein, 285 aa, Homo sapiens
TLWAAALTLLVLLRGPPVARAGASSAGLGPVVRCEPCDARALAQCAPPPAVCAELVREPGCGCCLTCALSEGQPCGIYTERCGSGLRCQPSPDEARPLQALLDGRGLCVNASAVSRLRAYLLPAPPAPGNASESEEDRSAGSVESPSVSSTHRVSDPKFHPLHSKIIIIKKGHAKDSQRYKVDYESQSTDTQNFSSESKRETEYGPCRREMEDTLNHLKFLNVLSPRGVHIPNCDKKGFYKKKQCRPSKGRKRGFCWCVDKYGQPLPGYTTKGKEDVHCYSMQSK

SEQ ID NO: 53837 - protein, 33 aa, Homo sapiens
MWSSNMPYFAQKTAKDMTSSWLQPRFIFLFVVN

SEQ ID NO: 53838 - protein, 158 aa, Homo sapiens
LLLECTEAKKHCWYFEGLYPTYYICRSYEDCCGSRCCVRALSIQRLWYFWFLLMMGVLFCCGAGFFIRRRMYPPPLIEEPAFNVSYTRQPPNPGPGAQQPGPPYYTDPGGPGMNPVGNSMAMAFQVPPNSPQGSVACPPPPAYCNTPPPPYEQVVKAK

SEQ ID NO: 53839 - protein, 30 aa, Homo sapiens
IQVSDFVRYHYNGTFLDGTLFDSSHNRMKT

SEQ ID NO: 53840 - protein, 153 aa, Homo sapiens
IVLGSGQVVLGMDMGLREMCVGEKRTVIIPPHLGYGEAGVDGEVPGSAVLVFDIELLELVAGLPEGYMFIWNGEVSPNLFEEIDKDGNGEVLLEEFSEYIHAQVASGKGKLAPGFDAELIVKNMFTNQDRNGDGKVTAEEFKLKDQEAKQDEL

SEQ ID NO: 53841 - protein, 35 aa, Homo sapiens; identical to SEQ ID NO: 39195

SEQ ID NO: 53842 - protein, 248 aa, Homo sapiens
IFTPTNQIRLTNVAVVRMKRAGKRFEIACYKNKVVGWRSGVEKDLDEVLQTHSVFVNVSKGQVAKKEDLISAFGTDDQTEICKQILTKGEVQVSDKERHTQLEQMFRDIATIVADKCVNPETKRPYTVILIERAMKDIHYSVKTNKSTKQQALEVIKQLKEKMKIERAHMRLRFILPVNEGKKLKEKLKPLIKVIESEDYGQQLEIVCLIDPGCFREIDELIKKETKGKGSLEVLNLKDVEEGDEKFE

SEQ ID NO: 53843 - protein, 624 aa, Homo sapiens
LYPQESPSRECKELDGLWSFRADFSDNRRRGFEEQWYRRPLWESGPTVDMPVPSSFNDISQDWRLRHFVGWVWYEREVILPERWTQDLRTRVVLRIGSAHSYAIVWVNGVDTLEHEGGYLPFEADISNLVQVGPLPSRLRITIAINNTLTPTTLPPGTIQYLTDTSKYPKGYFVQNTYFDFFNYAGLQRSVLLYTTPTTYIDDITVTTSVEQDSGLVNYQISVKGSNLFKLEVRLLDAENKVVANGTGTQGQLKVPGVSLWWPYLMHERPAYLYSLEVQLTAQTSLGPVSDFYTLPVGIRTVAVTKSQFLINGKPFYFHGVNKHEDADIRGKGFDWPLLVKDFNLLRWLGANAFRTSHYPYAEEVMQMCDRYGIVVIDECPGVGLALPQFFNNVSLHHHMQVMEEVVRRDKNHPAVVMWSVANEPASHLESAGYYLKMVIAHTKSLDPSRPVTFVSNSNYAADKGAPYVDVICLNSYYSWYHDYGHLELIQLQLATQFENWYKKYQKPIIQSEYGAETIAGFHQDPPLMFTEEYQKSLLEQYHLGLDQKRRKYVVGELIWNFADFMTEQSPTRVLGNKKGIFTRQRQPKSAAFLLRERYWKIANETRYPHSVAKSQCLENSLFT

SEQ ID NO: 53844 - protein, 79 aa, Homo sapiens
IPVWDQEFLKVAQGTLFELIRAANYLDIKGLLDVTCKTVANMIKGKTPEEIRKTFNIKNDFTEEEEAQVRKENQWCEEK

SEQ ID NO: 53845 - protein, 90 aa, Homo sapiens
KKQKLAKERAGLSKLPDLKDAEAVQKFFLEEIQLGEELLAQGEYEKGVDHLTNGIAVCGQPQQLLQALQQTLPPLVFQMLLTKLPTIREF

SEQ ID NO: 53846 - protein, 65 aa, Homo sapiens
IAHVLTVINQTQKENLRKFYKGKKYKPLDLRPKKTRAMRRRLNKHEENLKTKKQQRKERLYLLRQ

SEQ ID NO: 53847 - skipped

SEQ ID NO: 53848 - protein, 25 aa, Homo sapiens
KKVCTHPRKKWVQKYISLLKTPKQL

SEQ ID NO: 53849 - protein, 39 aa, Homo sapiens
TDRVSKEFIEFLKTFHKTGQEIYKQTKLFLEGMHYKRVG

SEQ ID NO: 53850 - protein, 112 aa, Homo sapiens
VPWHEEVVQFVRELVDLIPEYEIACEHEHSNCLLIAHRKFKIGGEWWTWIDYNRFQELIQEYEDSGGSKTFSAKDYMARTPHWALFGANERSFDPKDTRHQRKNKSKAISGC

SEQ ID NO: 53851 - protein, 128 aa, Homo sapiens
VKYRFSWPFREPVTRDEAEDYYDVITHPMDFQTVQNKCSCGSYRSVQEFLTDMKQVFTNAEVYNCRGSHVLSCMVKTEQCLVALLHKHLPGHPYVRRKRKKFPDRLAEDEGDSEPEAVGQSRGRRQKK

SEQ ID NO: 53852 - protein, 438 aa, Homo sapiens [sequence omitted]

SEQ ID NO: 53853 - skipped

SEQ ID NO: 53854 - protein, 399 aa, Homo sapiens
VRLESRGKCEEAGECPYQVSLPPLTIQLPKQFSRIEEVFKEVQNLKEIVNSLKKSCQDCKLQADDNGDPGRNGLLLPSTGAPGEVGDNRVRELESEVNKLSSELKNAKEEINVLHGRLEKLNLVNMNNIENYVDSKVANLTFVVNSLDGKCSKCPSQEQIQSRPVQHLIYKDCSDYYAIGKRSSETYRVTPDPKNSSFEVYCDMETMGGGWTVLQARLDGSTNFTRTWQDYKAGFGNLRREFWLGNDKIHLLTKSKEMILRIDLEDFNGVELYALYDQFYVANEFLKYRLHVGNYNGTAGDALRFNKHYNHDLKFFTTPDKDNDRYPSGNCGLYYSSGWWFDACLSANLNGKYYHQKYRGVRNGIFWGTWPGVSEAHPGGYKSSFKEAKMMIRPKHFKP

SEQ ID NO: 53855 - protein, 46 aa, Homo sapiens
IPDTYNPDDDKIYFFFRESSQEGSTSDKTILSRVGRVCKENLCFED

SEQ ID NO: 53856 - protein, 87 aa, Homo sapiens
VALTCYFWKKNQKLEYKYSKLVMTTNSKECELPAADSCAIMEGEDNEEEVVYSNKQSLLGKLKSLATKEKEDHFESVQLKTSRSPNI

SEQ ID NO: 53857 - protein, 42 aa, Homo sapiens; identical to SEQ ID NO: 53689

SEQ ID NO: 53858 - protein, 467 aa, Homo sapiens
IPFRRPSTYGIPRLERILLAKERIRFVIKKHELLSSTREDLQLDKPASGVKEEWYARITKLRKMVDQLFCKKFAEALGSTEAKAVPYQKFEAHPNDLYVEGLPENIPFRSPSWYGIPRLEKIIQVGNRIKFVIKRPELLTHSTTEVTQPRTNTPVKEDWNVRITKLRKQVEEIFNLKFAQALGLTEAVKVPYPVFESNPEFLYVEGLPEGIPFRSPTWFGIPRLERIVRGSNKIKFVVKKPELVISYLPPGMASKINTKALQSPKRPRSPGSNSKVPEIEVTVEGPNNNNPQTSAVRTPTQTNGSNVPFKPRGREFSFEAWNAKITDLKQKVENLFNEKCGEALGLKQAVKVPFALFESFPEDFYVEGLPEGVPFRRPSTFGIPRLEKILRNKAKIKFIIKKPEMFETAIKESTSSKSPPRKINSSPNVNTTASGVEDLNIIQVTIPDDDNERLSKVEKAVAKRTSE

SEQ ID NO: 53859 - protein, 78 aa, Homo sapiens
LILVTLISAFVFPQLPPKPLNIFFAVCISLSSITACILIYWYRQGDLEPKFRKLIYYIIFSIIMLCICANLYFHDVGR

SEQ ID NO: 53860 - protein, 164 aa, Homo sapiens
LYGYFAAVAGQDGQIDADELQRCLTQSGIAGGYKPFNLETCRLMVSMLDRDMSGTMGFNEFKELWAVLNGWRQHFISFDTDRSGTVDPQELQKALTTMGFRLSPQAVNSIAKRYSTNGKITFDDYIACCVKLRALTDSFRRRDTAQQGVVNFPYDDFIQCVMSV

SEQ ID NO: 53861 - protein, 44 aa, Homo sapiens
ISTLKSRIKELVNAGCNLSTLNITLLSWSKKRYEAKLKKLSRFA

SEQ ID NO: 53862 - protein, 196 aa, Homo sapiens
KGFYTAPDAKLITLASLLLQIVYGNYESKKHKQGFLNEENLKSIVPVTKLKSKAPHWTNRILHEYKNLSTSEGVSKEMHHLQRMFLQNCWEIPTYGAAFFTGQIFTKASPSNHKVIPVYVGVNIKGLHLLNMETKALLISLKYGCFMWQLGDTDTCFQIHSMENKMSFIVHTKQAGLVVKLLMKLNGQLMPTERNS

SEQ ID NO: 53863 - protein, 73 aa, Homo sapiens
IKGLHLLNMETKALLISLKYGCFMWQLGDTDTCFQIHSMENKMSFIVHTKQAGLVVKLLMKLNGQLMPTERNS

SEQ ID NO: 53864 - protein, 464 aa, Homo sapiens
LVYLIRLAAGHLVQLPAGVKSPPYIFSPIPFLGHAIAFGKSPIEFLENAYEKYGPVFSFTMVGKTFTYLLGSDAAALLFNSKNEDLNAEDVYSRLTTPVFGKGVAYDVPNPVFLEQKKMLKSGLNIAHFKQHVSIIEKETKEYFESWGESGEKNVFEALSELIILTASHCLHGKEIRSQLNEKVAQLYADLDGGFSHAAWLLPGWLPLPSFRRRDRAHREIKDIFYKAIQKRRQSQEKIDDILQTLLDATYKDGRPLTDDEVAGMLIGLLLAGQHTSSTTSAWMGFFLARDKTLQKKCYLEQKTVCGENLPPLTYDQLKDLNLLDRCIKETLRLRPPIMIMMRMARTPQTVAGYTIPPGHQVCVSPTVNQRLKDSWVERLDFNPDRYLQDNPASGEKFAYVPFGAGRHRCIGENFAYVQIKTIWSTMLRLYEFDLIDGYFPTVNYTTMIHTPENPVIRYKRRSK

SEQ ID NO: 53865 - protein, 222 aa, Homo sapiens
LTTYLDKVPEPGVPTETIKDMMFQLLRGLDFLHSHRVVHRDLKPQNILVTSSGQIKLADFGLARIYSFQMALTSVVVTLWYRAPEVLLQSSYATPVDLWSVGCIFAEMFRRKPLFRGSSDVDQLGKILDVIGLPGEEDWPRDVALPRQAFHSKSAQPIEKFVTDIDELGKDLLLKCLTFNPAKRISAYSALSHPYFQDLERCKENLDSHLPPSQNTSELNTA

SEQ ID NO: 53866 - protein, 48 aa, Homo sapiens
KTVLTCTTFPSIFPGVPLTLHLRVQQAGFRECSVQKRKNCRESSPSFC

SEQ ID NO: 53867 - protein, 68 aa, Homo sapiens
RKHKKKRLVQSPNSYFMDVKCPRCYKITTVFSHAQTVVLCVGCSTVLCQPIGGKARLTEGCSFRRKQH

SEQ ID NO: 53868 - protein, 10 aa, Homo sapiens
MLSHSSSSSS

SEQ ID NO: 53869 - protein, 413 aa, Homo sapiens
MSPATTGTFLLTVYSIFSKVHSDRNVYPSAGVLFVHVLEREYFKGEFPPYPKPGEISNDPITFNTNLMGYPDRPGWLRYIQRTPYSDGVLYGSPTAENVGKPTIIEITAYNRRTFETARHNLIINIMSAEDFPLPYQAEFFIKNMNVEEMLASEVLGDFLGAVKNVWQPERLNAINITSALDRGGRVPLPINDLKEGVYVMVGADVPFSSCLREVENPQNQLRCSQEMEPVITCDKKFRTQFYIDWCKISLVDKTKQVSTYQEVIRGEGILPDGGEYKPPSDSLKSRDYYTDFLITLAVPSAVALVLFLILAYIMCCRREGVEKRNMQTPDIQLVHHSAIQKSTKELRDMSKNREIAWPLSTLPVFHPVTGEIIPPLHTDNYDSTNMPLMQTQQNLPHQTQIPQQQTTGKWYP

SEQ ID NO: 53870 - protein, 366 aa, Homo sapiens
RPERGSAPGSRAMGRLVAVGLLGIALALLGERLLALRNRLKASREVESVDLPHCHLIKGIEAGSEDIDILPNGLAFFSVGLKFPGLHSFAPDKPGGILMMDLKEEKPRARELRISRGFDLASFNPHGISTFIDNDDTVYLFVVNHPEFKNTVEIFKFEEAENSLLHLKTVKHELLPSVNDITAVGPAHFYATNDHYFSDPFLKYLETYLNLHWANVVYYSPNEVKVVAEGFDSANGINISPDDKYIYVADILAHEIHVLEKHTNMNLTQLKVLELDTLVDNLSIDPSSGDIWVGCHPNGQKLFVYDPNNPPSSEVLRIQNILSEKPTVTTVYANNGSVLQGSSVASVYDGKLLIGTLYHRALYCEL

SEQ ID NO: 53871 - protein, 410 aa, Homo sapiens
KAARFVLRSAGSLNGAGLVPREVEHFSRYSPSPLSMKQLLDFGSENACERTSFAFLRQELPVRLANILKEIDILPTQLVNTSSVQLVKSWYIQSLMDLVEFHEKSPDDQKALSDFVDTLIKVRNRHHNVVPTMAQGIIEYKDACTVDPVTNQNLQYFLDRFYMNRISTRMLMNQHILIFSDSQTGNPSHIGSIDPNCDVVAVVQDAFECSRMLCDQYYLSSPELKLTQVNGKFPDQPIHIVYVPSHLHHMLFELFKNAMRATVEHQENQPSLTPIEVIVVLGKEDLTIKISDRGGGVPLRIIDRLFSYTYSTAPTPVMDNSRNAPLAGFGYGLPISRLYAKYFQGDLNLYSLSGYGTDAIIYLKALSSESIEKLPVFNKSAFKHYQMSSEADDWCIPSREPKNLAKEVAM

SEQ ID NO: 53872 - protein, 4 aa, Homo sapiens
METS

SEQ ID NO: 53873 - protein, 27 aa, Homo sapiens
IPPYESYEKLYEKLLTAVEETCGFAVE

SEQ ID NO: 53874 - protein, 49 aa, Homo sapiens
IKHQRIHTGEKPYKCLECGERFRQSTHLIRHQRIHQNKVLSAGRGGSRL

SEQ ID NO: 53875 - protein, 5 aa, Homo sapiens
MTFPC

SEQ ID NO: 53876 - protein, 755 aa, Homo sapiens
ISEEMAFRTICVLVGVFICSICVKGSSQPQARVYLTFDELRETKTSEYFSLSHHPLDYRILLMDEDQDRIYVGSKDHILSLNINNISQEALSVFWPASTIKVEECKMAGKDPTHGCGNFVRVIQTFNRTHLYVCGSGAFSPVCTYLNRGRRSEDQVFMIDSKCESGKGRCSFNPNVNTVSVMINEELFSGMYIDFMGTDAAIFRSLTKRNAVRTDQHNSKWLSEPMFVDAHVIPDGTDPNDAKVYFFFKEKLTDNNRSTKQIHSMIARICPNDTGGLRSLVNKWTTFLKARLVCSVTDEDGPETHFDELEDVFLLETDNPRTTLVYGIFTTSSSVFKGSAVCVYHLSDIQTVFNGPFAHKEGPNHQLISYQGRIPYPRPGTCPGGAFTPNMRTTKEFPDDVVTFIRNHPLMYNSIYPIHKRPLIVRIGTDYKYTKIAVDRVNAADGRYHVLFLGTDRGTVQKVVVLPTNNSVSGELILEELEVFKNHAPITTMKISSKKQQLYVSSNEGVSQVSLHRCHIYGTACADCCLARDPYCAWDGHSCSRFYPTGKRRSRRQDVRHGNPLTQCRGFNLKAYRNAAEIVQYGVKNNTTFLECAPKSPQASIKWLLQKDKDRRKEVKLNERIIATSQGLLIRSVQGSDQGLYHCIATENSFKQTIAKINFKVLDSEMVAVVTDKWSPWTWASSVRALPFHPKDIMGAFSHSEMQMINQYCKDTRQQHQQGDESQKMRGDYGKLKALINSRKSRNRRNQLPES

SEQ ID NO: 53877 - protein, 913 aa, Homo sapiens
VLNELNWTSALDEVFKKNREEDPSLLWQVFGSATGLARYYPASPWVDNSRTPNKIDLYDVRRRPWYIQGAASPKDMLILVDVSGSVSGLTLKLIRTSVSEMLETLSDDDFVNVASFNSNAQDVSCFQHLVQANVRNKKVLKDAVNNITAKGITDYKKGFSFAFEQLLNYNVSRANCNKIIMLFTDGGEERAQEIFNKYNKDKKVRVFTFSVGQHNYDRGPIQWMACENKGYYYEIPSIGAIRINTQEYLDVLGRPMVLAGDKAKQVQWTNVYLDALELGLVITGTLPVFNITGQFENKTNLKNQLILGVMGVDVSLEDIKRLTPRFTLCPNGYYFAIDPNGYVLLHPNLQPKNPKSQEPVTLDFLDAELENDIKVEIRNKMIDGESGEKTFRTLVKSQDERYIDKGNRTYTWTPVNGTDYSLALVLPTYSFYYIKAKLEETITQARSKKGKMKDSETLKPDNFEESGYTFIAPRDYCNDLKISDNNTEFLLNFNEFIDRKTPNNPSCNADLINRVLLDAGFTNELVQNYWSKQKNIKGVKARFVVTDGGITRVYPKEAGENWQENPETYEDSFYKRSLDNDNYVFTAPYFNKSGPGAYESGIMVSKAVEIYIQGKLLKPAVVGIKIDVNSWIENFTKTSIRDPCAGPVCDCKRNSDVMDCVILDDGGFLLMANHDDYTNQIGRFFGEIDPSLMRHLVNISVYAFNKSYDYQSVCEPGAAPKQGAGHRSAYVPSVADILQIGWWATAAAWSILQQFLLSLTFPRLLEAVEMEDDDFTASLSKQSCITEQTQYFFDNDSKSFSGVLDCGNCSRIFHGEKLMNTNLIFIMVESKGTCPCDTRLLIQAEQTSDGPNPCDMVKQPRYRKGPDVCFDNNVLEDYTDCGGVSGLNPSLWYIIGIQFLLLWLVSGSTHRLL

SEQ ID NO: 53878 - protein, 530 aa, Homo sapiens
IRNKMIDGESGEKTFRTLVKSQDERYIDKGNRTYTWTPVNGTDYSLALVLPTYSFYYIKAKLEETITQARYSETLKPDNFEESGYTFIAPRDYCNDLKISDNNTEFLLNFNEFIDRKTPNNPSCNADLINRVLLDAGFTNELVQNYWSKQKNIKGVKARFVVTDGGITRVYPKEAGENWQENPETYEDSFYKRSLDNDNYVFTAPYFNKSGPGAYESGIMVSKAVEIYIQGKLLKPAVVGIKIDVNSWIENFTKTSIRDPCAGPVCDCKRNSDVMDCVILDDGGFLLMANHDDYTNQIGRFFGEIDPSLMRHLVNISVYAFNKSYDYQSVCEPGAAPKQGAGHRSAYVPSVADILQIGWWATAAAWSILQQFLLSLTFPRLLEAVEMEDDDFTASLSKQSCITEQTQYFFDNDSKSFSGVLDCGNCSRIFHGEKLMNTNLIFIMVESKGTCPCDTRLLIQAEQTSDGPNPCDMVKQPRYRKGPDVCFDNNVLEDYTDCGGVSGLNPSLWYIIGIQFLLLWLVSGSTHRLL

SEQ ID NO: 53879 - skipped

SEQ ID NO: 53880 - protein, 4 aa, Homo sapiens
MFLI

SEQ ID NO: 53881 - protein, 58 aa, Homo sapiens
IHTGENPYECSECGKAFRYSSALVRHQRIHTGEKPLNGIGMSKSSLRVTTELNIREST

SEQ ID NO: 53882 - protein, 34 aa, Homo sapiens
LSSPSNRFCVTSLDPDTLPAVATLLMDVMSYFNG

SEQ ID NO: 53883 - protein, 118 aa, Homo sapiens
MAVGKNKRLTKGGKKGAKKKVVDPFSKKDWYDVKAPAMFSIRNIGKTLVTRTQGTKIASDGLKGRVFEVSLADLQNDEVAFRKFRLITEDVQGKNCLTSMAWILPVTKCVPWSKNGRQ

SEQ ID NO: 53884 - protein, 50 aa, Homo sapiens
KHAIHRRHIEARRVCVTFRELSAEFGPGGRQQELGQELLRIALSFQGRPV

SEQ ID NO: 53885 - protein, 95 aa, Homo sapiens
KDTKVPNACLFTINKEDHTLGNIIKSQLLKDPQVLFAGYKVPHPLEHKIIIRVQTTPDYSPQEAFTNAITDLISELSLLEERFRVAIKDKQEGIE

SEQ ID NO: 53886 - protein, 105 aa, Homo sapiens
LLFEGEKITINKDTKVPKACLFTINKEDHTLGNIIKSQLLKDPQVLFAGYKVPHPLEHKIIIRVQTTPDYSPQEAFTNAITDLISELSLLEERFRTCLLPLRLLP

SEQ ID NO: 53887 - protein, 55 aa, Homo sapiens
LSILLAVLLTVLLAVLIYTCFNSCRSTSLSGPEEAGSVRRYTTHLAFSTPAEGAS

SEQ ID NO: 53888 - protein, 105 aa, Homo sapiens
LLFEGEKITINKDTKVPNACLFTINKEDHTLGNIIKSQLLKDPQVLFAGYKVPHPLEHKIIIRVQTTPDYSPQEAFTNAITDLISELSLLEERFRTCLLPLRLLP

SEQ ID NO: 53889 - protein, 106 aa, Homo sapiens
LLFEGEKITINKDTKVPNACLFTINKEDHTLGNIIKSRACFPFAFCRDCQFPEASPATLPVQPAELCPRAHQLCAPALKRHLGGEAHPVHLHAGAASRPVQQPQHL

SEQ ID NO: 53890 - protein, 31 aa, Homo sapiens
LPQSTSAMCPSSQTTPWRGGSPCPPSRWSSL

SEQ ID NO: 53891 - protein, 55 aa, Homo sapiens; identical to SEQ ID NO: 53887

SEQ ID NO: 53892 - protein, 20 aa, Homo sapiens
MVKAKKAAQEQVLNASRAKK

SEQ ID NO: 53893 - protein, 44 aa, Homo sapiens
LLTLVGHDDQLDGPKYKCTVSLDFIRAIARTVNFDIIKYLYDFL

SEQ ID NO: 53894 - protein, 53 aa, Homo sapiens
LKPWSLFDVLVEKYGWPHEDAAQFTDFLIPMLEMVPEKRASAGECLRHPWLNS

SEQ ID NO: 53895 - protein, 154 aa, Homo sapiens
VAMEAVLNELVSVEDLLKFEKKFQSEKAAGSVSKSTQFEYAWCLVRSKYNDDIRKGIVLLEELLPKGSKEEQRDYVFYLAVGNYRLKEYEKALKYVRGLLQTEPQNNQAKELERLIDKAMKKDGLVGMAIVGGMALGVAGLAGLIGLAVSKSKS

SEQ ID NO: 53896 - protein, 14 aa, Homo sapiens
KRVIALEGDIVRFP

SEQ ID NO: 53897 - protein, 26 aa, Homo sapiens
LWPPERWQKLESVLPPERLPVQREEE

SEQ ID NO: 53898 - protein, 166 aa, Homo sapiens
KNGSFCSRLIIVLDSENSTPWVKEVRKINDQYIAVQGAELIKTVDIEEADPPQLGDFTKDWVEYNCNSSNNICWTEKGRTVKAVYGVSKRWSDYTLHLPTGSDVAKHWMLHFPRITYPLVHLANWLCGLNLFWICKTCFRCLKRLKMSWFLPTVLDTGQGFKLVKS

SEQ ID NO: 53899 - protein, 52 aa, Homo sapiens
LSLVLMSLLLVLPVVEAVEAGDAIALLLGVVLSITGICACLGVYARKRNGQM

SEQ ID NO: 53900 - protein, 56 aa, Homo sapiens
IWRAATPTLTTFPTIRVGSDVWGERSLAAARRRARQVLRVNLEPMVRLRRFPVPRA

SEQ ID NO: 53901 - protein, 801 aa, Homo sapiens
LQDGCYSDFLNEDFDVKTYTSQSIHQAVIAEQLAKLAQGISQLDRELHLQVVARHEDLLAQATGIESLEGVLQMMQTRIGALQGAVDRIKAKIVEPYNKIVARTAQLARLQVACDLLRRIIRILNLSKRLQGQLQGGSREITKAAQSLNELDYLSQGIDLSGIEVIENDLLFIARARLEVENQAKRLLEQGLETQNPTQVGTALQVFYNLGTLKDTITSVVDGYCATLEENINSALDIKVLTQPSQSAVRGGPGRSTMPTPGNTAALRASFWTNMEKLMDHIYAVCGQVQHLQKVLAKKRDPVSHICFIEEIVKDGQPEIFYTFWNSVTQALSSQFHMATNSSMFLKQAFEGEYPKLLRLYNDLWKRLQQYSQHIQGNFNASGTTDLYVDLQHMEDDAQDIFIPKKPDYDPEKALKDSLQPYEAAYLSKSLSRLFDPINLVFPPGGRNPPSSDELDGIIKTIASELNVAAVDTNLTLAVSKNVAKTIQLYSVKSEQLLSTQGDASQVIGPLTEGQRRNVAVVNSLYKLHQSVTKVVSSQSSFPLAAEQTIISALKAIHALMENAVQPLLTSVGDAIEAIIITMHQEDFSGSLSSSGKPDVPCSLYMKELQGFIARVMSDYFKHFECLDFVFDNTEAIAQRAVELFIRHASLIRPLGEGGKMRLAADFAQMELAVGPFCRRVSDLGKSYRMLRSFRPLLFQASEHVASSPALGDVIPFSIIIQFLFTRAPAELKSPFQRAEWSHTRFSQWLDDHPSEKDRLLLIRGALEAYVQSVRSREGKEFAPVYPIMVQLLQKAMSALQ

SEQ ID NO: 53902 - protein, 12 aa, Homo sapiens
INEKCHKLKNQT

SEQ ID NO: 53903 - protein, 226 aa, Homo sapiens
RVAGAAKLVVAVAVFLLTFYVISQVFEIKMDASLGNLFARSALDTAARSTKPPRYKCGISKACPEKHFAFKMASGAANVVGPKICLEDNVLMSGVKNNVGRGINVALANGKTGEVLDTKYFDMWGGDVAPFIEFLKAIQDGTIVLMGTYDDGATKLNDEARRLIADLGSTSITNLGFRDNWVFCGGKGIKTKSPFEQHIKNNKDTNKYEGWPEVVEMEGCIPQKQD

SEQ ID NO: 53904 - skipped

SEQ ID NO: 53905 - protein, 181 aa, Homo sapiens
KQLYCKLCKRQFTSKQNLTKHIELHTDGNNIYVKFYKCPLCTYETRRKRDVIRHITVVHKKSSRYLGKITASLEIRAIKKPIDFVLNKVAKRGPSRDEAKHSDSKHDGTSNSPSKKYEVADVGIEVKVTKNFSLHRCNKCGKAFAKKTYLEHHKKTHKANASNSPEGNKTKGRSTRSKALV

SEQ ID NO: 53906 - protein, 42 aa, Homo sapiens
RKKAKGNKTETRFNQLVEQYKQKLLGPSKGAPLAKRSKWFDS

SEQ ID NO: 53907 - protein, 110 aa, Homo sapiens
KKDVHMPKHPELADKNVPNLHVMKAMQSLKSRGYVKEHFAWRHFYWYLTNEGIQYLRDYLHLPPEIVPATLPRSRPETGRPWPKGLYVRSAVLPGADKKAEAGAGSATEF

SEQ ID NO: 53908 - protein, 53 aa, Homo sapiens
VGLPTAMAAKMLLDGEIGAKGLMGPFSKEIYGPILERIKAEGIIYTTQSTIKP

SEQ ID NO: 53909 - protein, 169 aa, Homo sapiens
VVKLIESKHEVTILGGLNEFVVKFYGPQGTPYEGGVWKVRVDLPDKYPFKSPSIGFMNKIFHPNIDEASGTVCLDVINQTWTALYDLTNIFESFLPQLLAYPNPIDPLNGDAAAMYLHRPEEYKQKIKEYIQKYATEEALKEQEEGTGDSSSESSMSDFSEDEAQDMEL

SEQ ID NO: 53910 - protein, 549 aa, Homo sapiens
IDRTIKMRKETEARKVVLAWGLLNVSMAGMIYTEMTGKLISSYYNVTYWPLWYIELALASLFSLNALFDFWRYFKYTVAPTSLVVSPGQQTLLGLKTAVVQTTPPHDLAATQIPPAPPSPSIQGQSVLSYSPSRSPSTSPKFTTSCMTGYSPQLQGLSSGGSGSYSPGVTYSPVSGYNKLASFSPSPPSPYPTTVGPVESSGLRSRYRSSPTVYNSPTDKEDYMTDLRTLDTFLRSEEEKQHRVKLGSPDSTSPSSSPTFWNYSRSMGDYAQTLKKFQYQLACRSQAPCANKDEADLSSKQAAEEVWARVAMNRQLLDHMDSWTAKFRNWINETILVPLVQEIESVSTQMRRMGCPELQIGEASITSLKQAALVKAPLIPTLNTIVQYLDLTPNQEYLFERIKELSQGGCMSSFRWNRGGDFKGRKWDTDLPTDSAIIMHVFCTYLDSRLPPHPKYPDGKTFTSQHFVQTPNKPDVTNENVFCIYQSAINPPHYELIYQRHVYNLPKGRNNMFHTLLMFLYIIKTKESGMLGRVNLGLSGVNILWIFGE

SEQ ID NO: 53911 - protein, 202 aa, Homo sapiens
IRLSENVIDRMKESSPSGSKSQRYSGAYGASVSDEELKRRVAEELALEQAKKESEDQKRLKQAKELDRERAAANEQLTRAILRERICSEEERAKAKHLARQLEEKDRVLKKQDAFYKEQLARLEERSSEFYRVTTEQYQKAAEEVEAKFKRYESHPVCADLQAKILQCYRENTHQTLKCSALATQYMHCVNHAKQSMLEKGG

SEQ ID NO: 53912 - protein, 59 aa, Homo sapiens
VTLRKFVSLIFSILYFQNPFTLWHWLGTLFVFIGTLMYTEVWNNLGTTKSEPQKDSKKN

SEQ ID NO: 53913 - protein, 301 aa, Homo sapiens
LGLGTWKSPPGQVTEAVKVAIDVGYRHIDCAHVYQNENEVGVAIQEKLREQVVKREELFIVSKLWCTYHEKGLVKGACQKTLSDLKLDYLDLYLIHWPTGFKPGKEFFPLDESGNVVPSDTNILDTWAAMEELVDEGLVKAIGISNFNHLQVEMILNKPGLKYKPAVNQIECHPYLTQEKLIQYCQSKGIVVTAYSPLGSPDRPWAKPEDPSLLEDPRIKAIAAKHNKTTAQVLIRFPMQRNLVVIPKSVTPERIAENFKVFDFELSSQDMTTLLSYNRNWRVCALLSCTSHKDYPFHEEF

SEQ ID NO: 53914 - protein, 13 aa, Homo sapiens
LTPSVCTVPSPGS

SEQ ID NO: 53915 - protein, 6 aa, Homo sapiens
KDDLAG

SEQ ID NO: 53916 - protein, 31 aa, Homo sapiens
VDWSTAMDCGTCLTASMDGKIKLTTLLAHKA

SEQ ID NO: 53917 - protein, 68 aa, Homo sapiens
IMHLNHTANPTSNSNFLDLNLPPQHNTGLGGIPVAGEEEVKVSTMPLSTSSHSLQQGQQPTSLHTTVA

SEQ ID NO: 53918 - protein, 23 aa, Homo sapiens
MKRGTDSCPTQDAAFSLQPSEAE

SEQ ID NO: 53919 - protein, 119 aa, Homo sapiens
VMCDKEFMWALKNGDLDEVKDYVAKGEDVNRTLEGGRKPLHYAADCGQLEILEFLLLKGADINAPDKHHITPLLSAVYEGHVSCVKLLLSKGADKTVKGPDGLTAFEATDNQAIKALLQ

SEQ ID NO: 53920 - protein, 73 aa, Homo sapiens
VKLFSELPLAKKKETYDWYPNHHTYAELMQTLRFLGLYRDEHQDFMDEQKRLKKLRGKEKPKKGEGKRAAKRK

SEQ ID NO: 53921 - protein, 518 aa, Homo sapiens
VLESGEQGVLQWDRKLSELSEPGDGEALMYHTHFSELLDEFSQNVLGQLLNDPFLSEKSVSMEVEPSPTSPAPLIQAEHSYSLCEEPRAQSPFTHITTSDSFNDDEVESEKWYLSTDFPSTSIKTEPVTDEPPPGLVPSVTLTITAISTPLEKEEPPLEMNTGVDSSCQTIIPKIKLEPHEVDQFLNFSPKEAPVDHLHLPPTPPSSHGSDSEGSLSPNPRLHPFSLPQTHSPSRAAPRAPSALSSSPLLTAPHKLQGSGPLVLTEEEKRTLIAEGYPIPTKLPLSKSEEKALKKIRRKIKNKISAQESRRKKKEYMDSLEKKVESCSTENLELRKKVEVLENTNRTLLQQLQKLQTLVMGKVSRTCKLAGTQTGTCLMVVVLCFAVAFGSFFQGYGPYPSATKMALPSQHSLQEPYTASVVRSRNLLIYEEHSPPEESSSPGSAGELGGWDRGSSLLRVSGLESRPDVDLPHFIISNETSLEKSVLLELQQHLVSAKLEGNETLKVVELDRRVNTTF

SEQ ID NO: 53922 - protein, 161 aa, Homo sapiens
LKSHGLFGLNENQLRILLLQNDPCLLPEVCLLYNKGEALYGYCNLKDKCNKFHVCKSFVKGECKLQTCKRSHQLIHAASLKLLQDQGLNIPSVVNFQIISTYKHMKLHKMLENTDNSSPSTEHSQGLEKQGVHAAGAAEAGPLASVPAQSAKKPCPVSCEK

SEQ ID NO: 53923 - protein, 44 aa, Homo sapiens
TQKHHLLEHQRAHTGERPYPCTHCAKCFRYKQSLKYHLRTHTGE

SEQ ID NO: 53924 - protein, 130 aa, Homo sapiens
LEEFHKHPPVQWAFQETSVESAVDTPFPAGIFVRLEFKLQQTSCRKRDWKKPECKVRPNGRKRKCLACIKLGSEDKVLGRLVHCPIETQVLREAEEHQETQCLRVQRAGEDPHSFYFPGQFAFSKALPRS

SEQ ID NO: 53925 - protein, 82 aa, Homo sapiens
KEECRAYMQMLRKLFTAIRALFLAVCVLKVIVSLVSLGVGLRNLCGQSSQPLNEEGSEKRLLGENSVPPSPSREQTSTAIVL

SEQ ID NO: 53926 - protein, 52 aa, Homo sapiens
MYPATTSLVNVVPKLNATGRDLLQNLLKCNPVQRISAEEALQHPYFSDFCPP

SEQ ID NO: 53927 - protein, 380 aa, Homo sapiens
LSFGMCSSALVVFVFGALTEWLRFYNKWLYCCLWIVNGLLQSTGWPCVVAVMGNWFGKAGRGVVFGLWSACASVGNILGACLASSVLQYGYEYAFLVTASVQFAGGIVIFFGLLVSPEEIGLSGIEAEENFEEDSHRPLINGGENEDEYEPNYSIQDDSSVAQVKAISFYQACCLPGVIPYSLAYACLKLVNYSFFFWLPFYLSNNFGWKEAEADKLSIWYDVGGIIGGTLQGFISDVLQKRAPVLALSLLLAVGSLIGYSRSPNDKSINALLMTVTGFFIGGPSNMISSAISADLGRQELIQRSSEALATVTGIVDGSGSIGAAVGQYLVSLIRDKLGWMWVFYFFILMTSCTIVFISPLIVREIFSLVLRRQAHILRE

SEQ ID NO: 53928 - protein, 421 aa, Homo sapiens
RYFMHGVCKEGDNCRYSHDLSDSPYSVVCKYFQRGYCIYGDRCRYEHSKPLKQEEATATELTTKSSLAASSSLSSIVGPLVEMNTGEAESRNSNFATVGAGSEDWVNAIEFVPGQPYCGRTAPSCTEAPLQGSVTKEESEKEQTAVETKKQLCPYAAVGECRYGENCVYLHGDSCDMCGLQVLHPMDAAQRSQHIKSCIEAHEKDMELSFAVQRSKDMVCGICMEVVYEKANPSERRFGILSNCNHTYCLKCIRKWRSAKQFESKIIKSCPECRITSNFVIPSEYWVEEKEEKQKLILKYKEAMSNKACRYFDEGRGSCPFGGNCFYKHAYPDGRREEPQRQKVGTSSRYRAQRRNHFWELIEERENSNPFDNDEEEVVTFELGEMLLMLLAAGGDDELTDSEDEWDLFHDELEDFYDLDL

SEQ ID NO: 53929 - protein, 52 aa, Homo sapiens
IFRKKAKTTKKIVLRLECIEPNCRSKRMLAIKRCKHFELGGGKKRKGQVIQF

SEQ ID NO: 53930 - protein, 645 aa, Homo sapiens
RPRKAFLLLLLLGLVQLLAVAGAEGPDEDSSNRENAIEDEEEEEEEDDDEEEDDLEVKEENGVLVLNDANFDNFVADKDTVLLEFYAPWCGHCKQFAPEYEKIANILKDKDPPIPVAKIDATSASVLASRFDVSGYPTIKILKKGQAVDYEGSRTQEEIVAKVREVSQPDWTPPPEVTLVLTKENFDEVVNDADIILVEFYAPWCGHCKKLAPEYEKAAKELSKRSPPIPLAKVDATAETDLAKRFDVSGYPTLKIFRKGRPYDYNGPREKYGIVDYMIEQSGPPSKEILTLKQVQEFLKDGDDVIIIGVFKGESDPAYQQYQDAANNLREDYKFHHTFSTEIAKFLKVSQGQLVVMQPEKFQSKYEPRSHMMDVQQGSTQDSAIKDFVLKYALPLVGHRKVSNDAKRYTRRPLVVVYYSVDFSFDYRAATQFWRSKVLEVAKDFPEYTFAIADEEDYAGEVKDLGLSESGEDVNAAILDESGKKFAMEPEEFDSDTLREFVTAFKKGKLKPVIKSQPVPKNNKGPVKVVVGKTFDSIVMDPKKDVLIEFYAPWCGHCKQLEPVYNSLAKKYKGQKGLVIAKMDATANDVPSDRYKVEGFPTIYFAPSGDKKNPVKFEGGDRDLEHLSKFIEEHATKLSRTKEEL

SEQ ID NO: 53931 - protein, 26 aa, Homo sapiens
KFSEIPQRLTALLLPPDPIVINHVIR

SEQ ID NO: 53932 - protein, 7 aa, Homo sapiens
RSHRRRG

SEQ ID NO: 53933 - protein, 49 aa, Homo sapiens
VDRIVRAEVHRLVVVNEADSIVGIISLSDILQALILTPAGAKQKETETE

SEQ ID NO: 53934 - protein, 796 aa, Homo sapiens
VYALGYLGLSFSWVLLALALLAWCRRSRGLKALRLCRALALLEDEERVVRLGVRACDLPAWVHFPDTERAEWLNKTVKHMWPFICQFIEKLFRETIEPAVRGANTHLSTFSFTKVDVGQQPLRINGVKVYTENVDKRQIILDLQISFVGNCEIDLEIKRYFCRAGVKSIQIHGTMRVILEPLIGDMPLVGALSIFFLRKPLLEINWTGLTNLLDVPGLNGLSDTIILDIISNYLVLPNRITVPLVSEVQIAQLRFPVPKGVLRIHFIEAQDLQGKDTYLKGLVKGKSDPYGIIRVGNQIFQSRVIKENLSPKWNEVYEALVYEHPGQELEIELFDEDPDKDDFLGSLMIDLIEVEKERLLDEWFTLDEVPKGKLHLRLEWLTLMPNASNLDKVLTDIKADKDQANDGLSSALLILYLDSARNLPSGKKISSNPNPVVQMSVGHKAQESKIRYKTNEPVWEENFTFFIHNPKRQDLEVEVRDEQHQCSLGNLKVPLSQLLTSEDMTVSQRFQLSNSGPNSTIKMKIALRVLHLEKRERPPDHQHSAQVKRPSVSKEGRKTSIKSHMSGSPGPGGSNTAPSTPVIGGSDKPGMEEKAQPPEAGPQGLHDLGRSSSSLLASPGHISVKEPTPSIASDISLPIATQELRQRLRQLENGTTLGQSPLGQIQLTIRHSSQRNKLIVVVHACRNLIAFSEDGSDPYVRMYLLPDKRRSGRRKTHVSKKTLNPVFDQSFDFSVSLPEVQRRTLDVAVKNSGGFLSKDKGLLGKVLVALASEELAKGWTQWYDLTEDGTRPQAMT

SEQ ID NO: 53935 - protein, 234 aa, Homo sapiens
ILAFMLGLFHMPLDECEELYRKLGSDVFSQNVIVGTVKMSWSHAFYDSQTWENILKDRMGSALMIETARNPTCPKVAADGGLLLNNPSALAMHECKCLWPDVPLECIVSLGTGRYESDVRNTVTYTSLKTKLSNVINSATDTEEVHIMLDGLLPPDTYFRFNPVMCENIPLDESRNEKLDQLQLEGLKYIERNEQKMKKVAKILSQEKTTLQKINDWIKLKTDMYEGLPFFSKL

SEQ ID NO: 53936 - protein, 151 aa, Homo sapiens
LNNPSALAMHECKCLWPDVPLECIVSLGTGRYESDVRNTVTYTSLKTKLSNVINSATDTEEVHIMLDGLLPPDTYFRFNPVMCENIPLDESRNEKLDQLQLEGLKYIERNEQKMKKVAKILSQEKTTLQKINDWIKLKTDMYEGLPFFSKL

SEQ ID NO: 53937 - protein, 11 aa, Homo sapiens
ILSQHSLSPVC

SEQ ID NO: 53938 - protein, 143 aa, Homo sapiens
VDIATQGWFIGLMCAVALLILILLIVCFIRRNKGGKYPVKEKEDAHADPEIQPMKEDDGTFGEYSDAEDHKPLKKGSRTPSDRTVKKEDSDDSLVDYGEGVNGQFNEDGSFIGQYSGKKEKEPAEGNESSEAPSPVNAMNSFV

SEQ ID NO: 53939 - protein, 49 aa, Homo sapiens
IGRPSVNGLAYAEYVIYRGEQAYPEYLITYQIMKPEAPSQTATAAEQKT

SEQ ID NO: 53940 - protein, 196 aa, Homo sapiens
LMVGTSLGVLVALPVPRLQGIPKVTGRGMVSYHAHNSPVKFIVLATALHEKDKDKSRDSLAPGPEPQDEDQKDALPSGGAGSSLSQGDPDAAIWLGDSLGSMTQKSDLSSSSGSLSLSHGSSSLEHRSEDSTIYDLLKDPVSLRSKARRAKKAKASSALVVCGGQGHRRVHRKARQPHQEELAPTVMVWQIPLLNI

SEQ ID NO: 53941 - protein, 113 aa, Homo sapiens
LSQGDPDAAIWLGDSLGSMTQKSDLSSSSGSLSLSHGSSSLEHRSEDSTIYDLLKDPVSLRSKARRAKKAKASSALVVCGGQGHRRVHRKARQPHQEELAPTVMVWQIPLLNI

SEQ ID NO: 53942 - protein, 328 aa, Homo sapiens
LPTGSFPFLLLLLLLCIQLGGGQKKKENLLAEKVEQLMEWSSRRSIFRMNGDKFRKFIKAPPRNYSMIVMFTALQPQRQCSVCRQANEEYQILANSWRYSSAFCNKLFFSMVDYDEGTDVFQQLNMNSAPTFMHFPPKGRPKRADTFDLQRIGFAAEQLAKWIADRTDVHIRVFRPPNYSGTIALALLVSLVGGLLYLRRNNLEFIYNKTGWAMVSLCIVFAMTSGQMWNHIRGPPYAHKNPHNGQVSYIHGSSQAQFVAESHIILVLNAAITMGMVLLNEAATSKGDVGKRRIICLVGLGLVVFFFSFLLSIFRSKYHGYPYSFLIK

SEQ ID NO: 53943 - protein, 389 aa, Homo sapiens
KSASSSAAGSPGGLTSLQQQKQRLIESLRNSHSSIAEIQKDVEYRLPFTINNLTININILLPPQFPQEKPVISVYPPIRHHLMDKQGVYVTSPLVNNFTMHSDLGKIIQSLLDEFWKNPPVLAPTSTAFPYLYSNPSGMSPYASQGFPFLPPYPPQEANRSITSLSVADTVSSSTTSHTTAKPAAPSFGVLSNLPLPIPTVDASIPTSQNGFGYKMPDVPDAFPELSELSVSQLTDMNEQEEVLLEQFLTLPQLKQIITDKDDLVKSIEELARKNLLLEPSLEAKRQTVLDKYELLTQMKSTFEKKMQRQHELSESCSASALQARLKVAAHEAEEESDNIAEDFLEGKMEIDDFLSSFMEKRTICHCRRAKEEKLQQAIAMHSQFHAPL

SEQ ID NO: 53944 - protein, 20 aa, Homo sapiens
ISSSISSTRSKQEYHFFICC

SEQ ID NO: 53945 - protein, 330 aa, Homo sapiens
KPKIPKMKDRDSANSAPKTQSIMMQVLDKGRFQKPAATLSLLAGQTVELRCKGSRIGWSYPAYLDTFKDSRLSVKQNERYGQLTLVNSTSADTGEFSCWVQLCSGYICRKDEAKTGSTYIFFTEKGELFVPSPSYFDVVYLNPDRQAVVPCRVTVLSAKVTLHREFPAKEIPANGTDIVYDMKRGFVYLQPHSEHQGVVYCRAEAGGRSQISVKYQLLYVAVPSGPPSTTILASSNKVKSGDDISVLCTVLGEPDVEVEFTWIFPGQKDERPVTIQDTWRLIHRGLGHTTRISQSVITVEDFETIDAGYYICTAQNLQGQTTVATTVEFS

SEQ ID NO: 53946 - skipped

SEQ ID NO: 53947 - protein, 280 aa, Homo sapiens
KSYMKFLKKILARENEEEDVRTIDSAVGSGSVAESTSLNIDVQSEASDTTARDPQQEPMEEIENLKKQHDLLKRMLQQQEQLRALQGRQAALLALQHKAEQAIAVMDDSVVAETAGSLSGVSITSELNEELNDLIQRFHNQLRDSQPPAVPDNRRQAESLSLTREVSQSRKPSASERLPDEKVELFSKMRVLQEKKQKMDKLLGELHTLRDQHLNNSSSSPQRSVDQRSTSAPSASVGLAPVVNGESNSLTSSVPYPTASLVSQNESENEGHLNPSEKLQ

SEQ ID NO: 53948 - protein, 130 aa, Homo sapiens
LSKAETQALTNYGSGEDENEDEEMEEFEEGPVDVQTSLQANTEATEENEHDEQEAESGNISQKSDEEDFVKVEDLPLKLTIYSEADLRKKMVEEEQKNHLSGEICEMQTEELAGNSETLKEPETVGAQSI

SEQ ID NO: 53949 - protein, 136 aa, Homo sapiens
KESPPTVDSTQQPNPLPLRLPEMEPLVPRVKEVKSAQETPESSLAGSPDTESPVLVNDYEAESGNISQKSDEEDFVKVEDLPLKLTIYSEADLRKKMVEEEQKNHLSGEICEMQTEELAGNSETLKEPETVGAQSI

SEQ ID NO: 53950 - protein, 68 aa, Homo sapiens
KSDEEDFVKVEDLPLKLTIYSEADLRKKMVEEEQKNHLSGEICEMQTEELAGNSETLKEPETVGAQSI

SEQ ID NO: 53951 - protein, 26 aa, Homo sapiens
MGFMPVTYKDPAYFRDPKVYNIRYPE

SEQ ID NO: 53952 - protein, 82 aa, Homo sapiens
LQTSPSSVFTSKSFCSLQTPDGVHCLVGFTLTHRRFNYKDNTDLIEFKTLSEEEIEKVLKNIFNISLQRKLVPKHGDRFFTI

SEQ ID NO: 53953 - protein, 437 aa, Homo sapiens
MDKGRRSYGDILHRMKDLCRYMNNFDSEAHAKYKNQVVYSTMLVFFKNAFQYVNSIQPSLFQGPNAPSQVPLVLLEDVSNVYGDVEIDRNKHIHKKRKLAEGREKTMSSDDEDCSAKGRNRHIVVNKAELANSTEVLESFKLARESWELLYSLEFLDKEFTRICLAWKTDTWLWLRIFLTDMIIYQGQYKKAIASLHHLAALQGSISQPQITGQGTLEHQRALIQLATCHFALGEYRMTCEKVLDLMCYMVLPIQDGGKSQEEPSKVKPKFRKGSDLKLLPCTSKAIMPYCLHLMLACFKLRAFTDNRDDMALGHVIVLLQQEWPRGENLFLKAVNKICQQGNFQYENFFNYVTNIDMLEEFAYLRTQEGGKIHLELLPNQGMLIKHHTVTRGITKGVKEDFRLAMERQVSRCGENLMVVLHRFCINEKILLLQTLT

SEQ ID NO: 53954 - protein, 68 aa, Homo sapiens
ILLQDTTKEPLDLPDNPRNRHFTNSVPNPRISDAELEAELEKLSLSEGGLVPSSKSPKRQLEPTLKPL

SEQ ID NO: 53955 - protein, 105 aa, Homo sapiens
LSTVLNIIIFEDCRNQWSMSRPLLGLILLNEKYFSDLRNSIVNSQPPEKQQAMHLCFENLMEGIERNLLTKNRDRFTQNLSAFRREVNDSMKNSTYGVNSNDMMS

SEQ ID NO: 53956 - protein, 16 aa, Homo sapiens
RGGRRRPKKRFYRHRK

SEQ ID NO: 53957 - protein, 419 aa, Homo sapiens
KAVVQVFEGTSGIDAKKTSCEFTGDILRTPVSEDMLGRVFNGSGKPIDRGPVVLAEDFLDIMGQPINPQCRIYPEEMIQTGISAIDGMNSIARGQKIPIFSAAGLPHNEIAAQICRQAGLVKKSKDVVDYSEENFAIVFAAMGVNMETARFFKSDFEENGSMDNVCLFLNLANDPTIERIITPRLALTTAEFLAYQCEKHVLVILTDMSSYAEALREVSAAREEVPGRRGFPGYMYTDLATIYERAGRVEGRNGSITQIPILTMPNDDITHPIPDLTGYITEGQIYVDRQLHNRQIYPPINVLPSLSRLMKSAIGEGMTRKDHADVSNQLYACYAIGKDVQAMKAVVGEEALTSDDLLYLEFLQKFERNFIAQGPYENRTVFETLDIGWQLLRIFPKEMLKRIPQSTLSEFYPRDSAKH

SEQ ID NO: 53958 - protein, 149 aa, Homo sapiens
RPSMDSEGGSLLLDEDSEVFKMLQENREGRAAPRQSSSFRLLQEALEAEERGGTPAFLPSSLSPQSSLPASRALATPPKLHTCEKCSTSIANQAVRIQEGRYRHPGCYTCADCGLNLKMRGHFWVGDELYCEKHARQRYSAPATLSSRA

SEQ ID NO: 53959 - protein, 4 aa, Homo sapiens
LALI

SEQ ID NO: 53960 - protein, 25 aa, Homo sapiens
LQLEIQRVVEKADSWVEKEEPAPSN

SEQ ID NO: 53961 - protein, 32 aa, Homo sapiens
MGQNVADYMRYLMEQDEDAYKKQFSQYIKKTA

SEQ ID NO: 53962 - protein, 56 aa, Homo sapiens
IPGCFSWVSSSGTSSLSSQQECGTFYRLIKIKDMFFGQQPELKICWNRVRDHFSCS

SEQ ID NO: 53963 - protein, 5 aa, Homo sapiens
LETCQ

SEQ ID NO: 53964 - protein, 187 aa, Homo sapiens
KTQKSVKIAPGAVVCVESEIRGDVTIGPRTVIHPKARIIAEAGPIVIGEGNLIEEQALIINAYPDNITPDTEDPEPKPMIIGTNNVFEVGCYSQAMKMGDNNVIESKAYVGRNVILTSGCIIGACCNLNTFEVIPENTVIYGADCLRRVQTERPQPQTLQLDFLMKILPNYHHLKKTMKGSSTPVKN

SEQ ID NO: 53965 - protein, 64 aa, Homo sapiens
ISEQFTAMFRRKAFLHWYTGEGMDEMEFTEADSNMNDLVSEYQQYQDATAEEEEDFGEEAKEEA

SEQ ID NO: 53966 - protein, 223 aa, Homo sapiens
RTGKMNNGGKAEKENTPSEANLQEEEVRTLFVSGLPLDIKPRELYLLFRPFKGYEGSLIKLTSKQPVGFVSFDSRSEAEAAKNALNGIRFDPEIPQTLRLEFAKANTKMAKNKLVGTPNPSTPLPNTVPQFIAREPYELTVPALYPSSPEVWAPYPLYPAELAPALPPPAFTYPASLHAQCFSPEAKPNTPVFCPLLQQIRFVSGNVFVTYQPTADQQRELPC

SEQ ID NO: 53967 - protein, 200 aa, Homo sapiens
RTGKMNNGGKAEKENTPSEANLQEEEVRTLFVSGLPLDIKPRELYLLFRPFKGYEGSLIKLTSKQPVGFVSFDSRSEAEAAKNALNGIRFDPEIPQTLRLEFAKANTKMAKNKLVGTPNPSTPLPNTVPQFIAREPYELTVPALYPSSPEVWAPYPLYPAELAPALPPPAFTYPASLHAQMRWLPPSEATSQGWKSRQFC

SEQ ID NO: 53968 - protein, 997 aa, Homo sapiens
VRRFPRRRPASMPGVARLPLLLGLLLLPRPGRPLDLADYTYDLAEEDDSEPLNYKDPCKAAAFLGDIALDEEDLRAFQVQQAVDLRRHTARKSSIKAAVPGNTSTPSCQSTNGQPQRGACGRWRGRSRSRRAATSRPERVWPDGVIPFVIGGNFTGSQRAVFRQAMRHWEKHTCVTFLERTDEDSYIVFTYRPCGCCSYVGRRGGGPQAISIGKNCDKFGIVVHELGHVVGFWHEHTRPDRDRHVSIVRENIQPGQEYNFLKMEPQEVESLGETYDFDSIMHYARNTFSRGIFLDTIVPKYEVNGVKPPIGQRTRLSKGDIAQARKLYKCPACGETLQDSTGNFSSPEYPNGYSAHMHCVWRISVTPGEKIILNFTSLDLYRSRLCWYDYVEVRDGFWRKAPLRGRFCGSKLPEPIVSTDSRLWVEFRSSSNWVGKGFFAVYEAICGGDVKKDYGHIQSPNYPDDYRPSKVCIWRIQVSEGFHVGLTFQSFEIERHDSCAYDYLEVRDGHSESSTLIGRYCGYEKPDDIKSTSSRLWLKFVSDGSINKAGFAVNFFKEVDECSRPNRGGCEQRCLNTLGSYKCSCDPGYELAPDKRRCEAACGGFLTKLNGSITSPGWPKEYPPNKNCIWQLVAPTQYRISLQFDFFETEGNDVCKYDFVEVRSGLTADSKLHGKFCGSEKPEVITSQYNNMRVEFKSDNTVSKKGFKAHFFSDKDECSKDNGGCQQDCVNTFGSYECQCRSGFVLHDNKHDCKEAGCDHKVTSTSGTITSPNWPDKYPSKKECTWAISSTPGHRVKLTFMEMDIESQPECAYDHLEVFDGRDAKAPVLGRFCGSKKPEPVLATGSRMFLRFYSDNSVQRKGFQASHATECGGQVRADVKTKDLYSHAQFGDNNYPGGVDCEWVIVAEEGYGVELVFQTFEVEEETDCGYDYMELFDGYDSTAPRLGRYCGSGPPEEVYSAGDSVLVKFHSDDTITKKGFHLRYTSTKFQDTLHSRK

SEQ ID NO: 53969 - protein, 706 aa, Homo sapiens
LADYTYDLAEEDDSEPLNYKDPCKAAAFLGDIALDEEDLRAFQVQQAVDLRRHTARKSSIKAAVPGNTSTPSCQSTNGQPQRGACGRWRGRSRSRRAATSRPERVWPDGVIPFVIGGNFTGSQRAVFRQAMRHWEKHTCVTFLERTDEDSYIVFTYRPCGCCSYVGRRGGGPQAISIGKNCDKFGIVVHELGHVVGFWHEHTRPDRDRHVSIVRENIQPGQEYNFLKMEPQEVESLGETYDFDSIMHYARNTFSRGIFLDTIVPKYEVNGVKPPIGQRTRLSKGDIAQARKLYKCPACGETLQDSTGNFSSPEYPNGYSAHMHCVWRISVTPGEKIILNFTSLDLYRSRLCWYDYVEVRDGFWRKAPLRGRFCGSKLPEPIVSTDSRLWVEFRSSSNWVGKGFFAVYEAICGGDVKKDYGHIQSPNYPDDYRPSKVCIWRIQVSEGFHVGLTFQSFEIERHDSCAYDYLEVRDGHSESSTLIGRYCGYEKPDDIKSTSSRLWLKFVSDGSINKAGFAVNFFKEVDECSRPNRGGCEQRCLNTLGSYKCSCDPGYELAPDKRRCEAACGGFLTKLNGSITSPGWPKEYPPNKNCIWQLVAPTQYRISLQFDFFETEGNDVCKYDFVEVRSGLTADSKLHGKFCGSEKPEVITSQYNNMRVEFKSDNTVSKKGFKAHFFSEKRPALQPPRGRPHQLKFRVQKRNRTPQ

SEQ ID NO: 53970 - protein, 61 aa, Homo sapiens
LQNNNLLSIIRAHEAQDAGYRMYRKSQATGFPSLITIFSAPNYLDVYNNKESATHSFDYPQ

SEQ ID NO: 53971 - protein, 116 aa, Homo sapiens
KEIIRNKIRAIGKMARVFSILRQESESVLTLKGLTPTGTLPLGVLSGGKQTIETAIRGFSLQHKIRSFEEARGLDRINERMPPRKDSIHAGGPMKSVTSAHSHAAHRSDQGKKAHS

SEQ ID NO: 53972 - protein, 30 aa, Homo sapiens
MQQCDDGWFVGVSRRTQKFGTFPGNYVAPV

SEQ ID NO: 53973 - protein, 38 aa, Homo sapiens
KTGSPGQRGAMGPKGEPGIQGPPGLPGPPGPPGSQSFY

SEQ ID NO: 53974 - protein, 217 aa, Homo sapiens
VTTSWLNSFKSPQVYLKEEEEKNEKRQKLVRKKQQEAQGEKASRYIENVLKPHQEMKLRKLEERFYQMTGEAWKLSSGHKLGGDEGTSQTSFETSNREAAKSQNLPKPLTEFPSPAEQPTCKEIPDLPEEPSQTAEEVVTVALRCPSGNVLRRRFLKSYSSQVLFDWMTRIGYHISLYSLSTSFPRRPLAVEGGQSLEDIGITVDTVLILEEKEQTN

SEQ ID NO: 53975 - protein, 41 aa, Homo sapiens
KALSAKHKGKMPLRGPLQRKRAYVEIEYEQETEPVAKAKTT

SEQ ID NO: 53976 - protein, 575 aa, Homo sapiens
RREMSYQGKKNIPRITSDRLLIKGGKIVNDDQSFYADIYMEDGLIKQIGENLIVPGGVKTIEAHSRMVIPGGIDVHTRFQMPDQGMTSADDFFQGTKAALAGGTTMIIDHVVPEPGTSLLAAFDQWREWADSKSCCDYSLHVDISEWHKGIQEEMEALVKDHGVNSFLVYMAFKDRFQLTDCQIYEVLSVIRDIGAIAQVHAENGDIIAEEQQRILDLGITGPEGHVLSRPEEVEAEAVNRAITIANQTNCPLYITKVMSKSSAEVIAQARKKGTVVYGEPITASLGTDGSHYWSKNWAKAAAFVTSPPLSPDPTTPDFLNSLLSCGDLQVTGSAHCTFNTAQKAVGKDNFTLIPEGTNGTEERMSVIWDKAVVTGKMDENQFVAVTSTNAAKVFNLYPRKGRIAVGSDADLVIWDPDSVKTISAKTHNSSLEYNIFEGMECRGSPLVVISQGKIVLEDGTLHVTEGSGRYIPRKPFPDFVYKRIKARSRLAELRGVPRGLYDGPVCEVSVTPKTVTPASSAKTSPAKQQAPPVRNLHQSGFSLSGAQIDDNIPRRTTQRIVAPPGGRANITSLG

SEQ ID NO: 53977 - protein, 562 aa, Homo sapiens
VPAAVSLLPPADPLRQANRLPIRVLKMLSAHTGHLLHPEYLQPLSSTPVSPIELDAKKSPLALLAQTCSQIGKPDPPPSSKLNSVAAAANGLGAEKDPGRSAPGAASAAAALKQLGDSPAEDKSSFKPYSKGSGGGDSRKDSGSSSVSSTSSSSSSSPGDKAGFRVPSAACPPFPPHGAPVSASSSSSSPGGSRGGSPHHSDCKNGGGVGGGELDKKDQEPKPSPEPAAVSRGGGGEPGAHGGAESGASGRKSEPPSALVGAGHVAPVSPYKPGHSVFPLPPSSIGYHGSIVGAYAGYPSQFVPGLDPSKSGLVGGQLSGGLGLPPGKPPSSSPLTGASPPSFLQGLCRDPYCLGGYHGASHLGGSSCSTCSAHDPAGPSLKAGGYPLVYPGHPLQPAALSSSAAQAALPGHPLYTYGFMLQNEPLPHSCNWVAASGPCDKRFATSEELLSHLRTHTALPGAEKLLAAYPGASGLGSAAAAAAAAASCHLHLPPPAAPGSPGSLSLRNPHTLGLSRYHPYGKSHLSTAGGLAVPSLPTAGPYYSPYALYGQRLASASALGYQ

SEQ ID NO: 53978 - protein, 345 aa, Homo sapiens
LDKGSLMAQLGAVVAVASSFFCASLFSAVHKIEEGHIGVYYRGGALLTSTSGPGFHLMLPFITSYKSVQTTLQTDEVKNVPCGTSGGVMIYFDRIEVVNFLVPNAVYDIVKNYTADYDKALIFNKIHHELNQFCSVHTLQEVYIELFDQIDENLKLALQQDLTSMAPGLVIQAVRVTKPNIPEAIRRNYELMESEKTKLLIAAQKQKVVEKEAETERKKALIEAEKVAQVAEITYGQKVMEKETEKKISEIEDAAFLAREKAKADAECYTAMKIAEANKLKLTPEYLQLMKYKAIASNSKIYFGKDIPNMFMDSAGSVSKQFEGLADKLSFGLEDEPLETATKEN

SEQ ID NO: 53979 - protein, 248 aa, Homo sapiens
VARRPRDLPAIQPRLVAVSKTKPADMVIEAYGHGQRTFGENYVQELLEKASNPKILSLCPEIKWHFIGHLQKQNVNKLMAVPNLFMLETVDSVKLADKVNSSWQRKGSPERLKVMVQINTSGEESKHGLPPSETIAIVEHINAKCPNLEFVGLMTIGSFGHDLSQGPNPDFQLLLSLREELCKKLNIPADQVELSMGMSADFQHAVEVGSTNVRIGSTIFGERDYSKKPTPDKCAADVKAPLEVAQEH

SEQ ID NO: 53980 - protein, 104 aa, Homo sapiens
IPATRRVVLGDGVQLPPGDYSTTPGGTLFSTTPGGTRIIYDRKFLMECRNSPVTKTPPRDLPTIPGVTSPSSDEPPMEASQSHLRNSPEDKRAGGEESQFEMDI

SEQ ID NO: 53981 - protein, 23 aa, Homo sapiens
MFLSQVEAKETFSSMSGTKLTFH

SEQ ID NO: 53982 - protein, 38 aa, Homo sapiens
ILFPGTKCLVGRPCPPLPSSELLPDRPVASPGEMRNQR

SEQ ID NO: 53983 - protein, 19 aa, Homo sapiens
MFTLPSTLRSNAKTNHQRK

SEQ ID NO: 53984 - protein, 755 aa, Homo sapiens
LSFSSDSEGNFETPEAETPIRSPFKESCDPSLGLAGPGAKSQESQEADEQLVAEVVEKCSSKTCSKPSENEVPQQAIDSHSVKNFREEPEHDFSKISIVRPFSIETKDSTDISAVLGTKAAHGCVTAVSGKALPSSPPDALQDEAMTEGSMGVTLEASAEADLKAGNSCPELVPSRRSKLRKPKPVPLRKKAIGGEFSDTNAAVEGTPLPKASYHFSPEELDENTSPLLGDARFQKSPPDLKETPGTLSSDTNDSGVELGEESRSSPLKLEFDFTEDTGNIEARKALPRKLGRKLGSTLTPKIQKDGISKSAGLEQPTDPVARDGPLSQTSSKPDPSQWESPSFNPFGSHSVLQNSPPLSSEGSYHFDPDNFDESMDPFKPTTTLTSSDFCSPTGNHVNEILESPKKAKSRLITSGCKVKKHETQSLALDACSRDEGAVISQISDISNRDGHATDEEKLASTSCGQKSAGAEVKGEPEEDLEYFECSNVPVSTINHAFSSSEAGIEKETCQKMEEDGSTVLGLLESSAEKAPVSVSCGGESPLDGICLSESDKTAVLTLIREEIITKEIEANEWKKKYEETRQEVLEMRKIVAEYEKTIAQMIEDEQRTSMTSQKSFQQLTMEKEQALADLNSVERSLSDLFRRYENLKGVLEGFKKNEEALKKCAQDYLARVKQEEQRYQALKIHAEEKLDKANEEIAQVRTKAKAESAALHAGLRKEQMKVESLERALQQKNQEIEELTKICDELIAKLGKTD

SEQ ID NO: 53985 - protein, 43 aa, Homo sapiens
LKNVHLRLVLNLQKMKCHSRPLTLTQSRISEKNLNMILAKFPS

SEQ ID NO: 53986 - protein, 80 aa, Homo sapiens
LSWDVGKINPQKLPSLKGTMSLQAGASKPDENPTINLQFKIQQLAISGLKVNRLDMYGEKYKPFKGIKYMTKAGKFQVRT

SEQ ID NO: 53987 - protein, 155 aa, Homo sapiens
VRQQLEGRGGGAGCPVLAMRPQQAPVSGKVFIQRDYSSGTRCQFQTKFPAELENRIDRQQFEETVRTLNNLYAEAEKLGGQSYLEGCLACLTAYTIFLCMETHYEKVLKKVSKYIQEQNEKIYAPQGLLLTDPIERGLRVIEITIYEDRGMSSGR

SEQ ID NO: 53988 - protein, 50 aa, Homo sapiens
LPRTQVTAKKGCLREKSVQRIPMPDASGVTLSTRSMRHCVPASLSFWQRL

SEQ ID NO: 53989 - protein, 8 aa, Homo sapiens
LVLSGRTI

SEQ ID NO: 53990 - protein, 116 aa, Homo sapiens
IRKEKEMKCEETHAPNSNWVYVMLPSKKTVRMPSVTQRLRDPDINPCLSESDASTRCLDENNYDRERCSTYFLRYKNCRRFWNSIVMQRRKNGVKPFMPTAAERDEILRAVGNMPY

SEQ ID NO: 53991 - protein, 171 aa, Homo sapiens
KRFSGTVRLKSTPHPKFSVCVLGDQQHCDEAKAIDIPHMDIKTLKNLNKNKKLVKKLVKKYDAFLASESLIKQIPRILSPGLNKAGKFPSLLTQNENMVAKVDEVKSTIKFQMKKVLCLAVAVGHVKMTDDELVYNTHLAVNFLGSLLKKNWQNVRALYIKSTMGKPQRLY

SEQ ID NO: 53992 - protein, 272 aa, Homo sapiens
KAAKDVFNKGYGFGMVKIDLKTKSCSGVEFSTSGHAYTDTGKASGNLETKYKVCNYGLTFTQKWNTDNTLGTEISWENKLAEGLKLTLDTIFVPNTGKKSGKLKASYKRDCFSVGSNVDIDFSGPTIYGWAVLAFEGWLAGYQMSFDTAKSKLSQNNFALGYKAADFQLHTHVNDGTEFGGSIYQKVNEKIETSINLAWTAGSNNTRFGIAAKYMLDCRTSLSAKVNNASLIGLGYTQTLRPGVKLTLSALIDGKNFSAGGHKVGLGFELEA

SEQ ID NO: 53993 - protein, 26 aa, Homo sapiens
RSQIDFISFNRWEELQCRRSQGWLGI

SEQ ID NO: 53994 - protein, 63 aa, Homo sapiens
RNKRRIMRIFSVPPTEETLSEPNFYDTISKIRLRQQLEMYSISRKYDYQQPQNQADSVQLSLE

SEQ ID NO: 53995 - protein, 687 aa, Homo sapiens
VEDLTNGVVMAQVLQKIDPAYFDENWLNRIKTEVGDNWRLKISNLKKILKGILDYNHEILGQQINDFTLPDVNLIGEHSDAAELGRMLQLILGCAVNCEQKQEYIQAIMMMEESVQHVVMTAIQELMSKESPVSAGNDAYVDLDRQLKKTTEELNEALSAKEEIAQRCHELDMQVAALQEEKSSLLAENQVLMERLNQSDSIEDPNSPAGRRHLQLQTQLEQLQEETFRLEAAKDDYRIRCEELEKEISELRQQNDELTTLADEAQSLKDEIDVLRHSSDKVSKLEGQVESYKKKLEDLGDLRRQVKLLEEKNTMYMQNTVSLEEELRKANAARSQLETYKRQVVELQNRLSEESKKADKLDFEYKRLKEKVDSLQKEKDRLRTERDSLKETIEELRCVQAQEGQLTTQGLMPLGSQESSDSLAAEIVTPEIREKLIRLQHENKMLKLNQEGSDNEKIALLQSLLDDANLRKNELETENRLVNQRLLEVQSQVEELQKSLQDQGSKAEDSVLLKKKLEEHLEKLHEANNELQKKRAIIEDLEPRFNNSSLKIEELQEALRKKEEEMKQMEERYKKYLEKAKSVIRTLDPKQNQGAAPEIQALKNQLQERDRLFHSLEKEYEKTKSQREMEEKYIVSAWYNMGMTLHKKAAEDRLASTGSGQSFLARQRQATSSRRSYPGHVQPATAR

SEQ ID NO: 53996 - protein, 569 aa, Homo sapiens
LTVYWKSECCYHCLFQVLVNVPQSPKAGKPSAAAASVSTQHGSILQLNDTLEEKEVCRLEYRFGEFGNYSLLVKNIHNGVSEIACDLAVNEDPVDSNLPVSIAFLIGLAVIIVISFLRLLLSLDDFNNWISKAISSRETDRLINSELGSPSRTDPLDGDVQPATWRLSALPPRLRSVDTFRGIALILMVFVNYGGGKYWYFKHASWNGLTVADLVFPWFVFIMGSSIFLSMTSILQRGCSKFRLLGKIAWRSFLLICIGIIIVNPNYCLGPLSWDKVRIPGVLQRLGVTYFVVAVLELLFAKPVPEHCASERSCLSLRDITSSWPQWLLILVLEGLWLGLTFLLPVPGCPTGYLGPGGIGDFGKYPNCTGGAAGYIDRLLLGDDHLYQHPSSAVLYHTEVAYDPEGILGTINSIVMAFLGVQAGKILLYYKARTKDILIRFTAWCCILGLISVALTKVSENEGFIPVNKNLWSLSYVTTLSSFAFFILLVLYPVVDVKGLWTGTPFFYPGMNSILVYVGHEVFENYFPFQWKLKDNQSHKEHLTQNIVATALWVLIAYILYRKKIFWKI

SEQ ID NO: 53997 - protein, 801 aa, Homo sapiens [sequence omitted]

SEQ ID NO: 53998 - protein, 165 aa, Homo sapiens
LPSAAGLHPTGHQSKEELGRAMQVAKVSTASVGRFQERLPKEKVPRGSGKKRKFQPLFGDFAAEKKNQLELLRVMNSKKPQLDVTRATNKQMREEDQEEAAKRRKMSQKGKRKGGRQGPGGKRKGGPPSQGGKRKGGLGGKMNSGPPGLGGKRKGGQRPGGKRRK

SEQ ID NO: 53999 - protein, 14 aa, Homo sapiens
RGAFFPLTKRTVLS

SEQ ID NO: 54000 - protein, 124 aa, Homo sapiens
LIKERREKRANAGKTLVKNNPKKPEMPNMLEILKEMNSVKLRSVKRSEQDVKPKPVDATDPAALIAEALKKKFAYRYRSDSQDEVEKGIPKSESEATSERVLFGPHMLKPTGKMKALIENVSDS

SEQ ID NO: 54001 - protein, 4 aa, Homo sapiens
IPEV

SEQ ID NO: 54002 - protein, 62 aa, Homo sapiens
LETTGPQERQALSVLLLPWKKPAPTMPSATSKSSLRPPQKQMLSCFLYSCRTTSNHPNTREH

SEQ ID NO: 54003 - protein, 17 aa, Homo sapiens
VYLLLLMIVRTTSFLLL

SEQ ID NO: 54004 - protein, 33 aa, Homo sapiens
MRNMTLPLRRRKEVPLPPYLCSSASSLFPELFL

SEQ ID NO: 54005 - protein, 161 aa, Homo sapiens
IMLPFLFFSTLFSSIFTEAQKQYWVCNSSDASISYTYCDKMQYPISINVNPCIELKRSKGLLHIFYIPRRDLKQLYFNLYITVNTMNLPKRKEVICRGSDDDYSFCRALKGETVNTTISFSFKGIKFSKGKYKCVVEAISGSPEEMLFCLEFVILHQPNSN

SEQ ID NO: 54006 - protein, 108 aa, Homo sapiens
VGIALRKMGAMAKPDCIITCDGKNLTIKTESTLKTTQFSCTLGEKFEETTADGRKTQTVCNFTDGALVQHQEWDGKESTITRKLKDGKLVVECVMNNVTCTRIYEKVE

SEQ ID NO: 54007 - protein, 279 aa, Homo sapiens
KTFDSSRQRAEGTDIPTVKPLKPRPEPPKKPSNWRRKHEEFIATIRAAKGLDQALKEGGKLPPPPPPSYDPDYIQCPYCQRRFNENAADRHINFCKEQAARISNKGKFSTDTKGKPTSRTQVYKPPALKKSNSPGTASSGSSRLPQPSGAGKTVVGVPSGKVSSSSSSLGNKLQTLSPSHKGIAAPHAGANVKPRNSTPPSLARNPAPGVLTNKRKTYTESYIARPDGDCASSLNGGNIKGIEGHSPGNLPKFCHECGTKYPVEWAKFCCECGIRRMIL

SEQ ID NO: 54008 - protein, 182 aa, Homo sapiens
IPTMAKTAMAYKEKMKELSMLSLICSCFYPEPRNINIYTYDDMEVKQINKRASGQAFELILKPPSPISEAPRTLASPKKKDLSLEEIQKKLEAAEERRKSQEAQVLKQLAEKREHEREVLQKALEENNNFSKMAEEKLILKMEQIKENREANLAAIIERLQEKERHAAEVRRNKELQVELSG

SEQ ID NO: 54009 - protein, 239 aa, Homo sapiens
LVNEINAYAATETPHLKLGLMNFADEFAKLQDYRQAEVERLEAKVVEPLKTYGTIVKMKRDDLKATLTARNREAKQLTQLERTRQRNPSDRHVISQAETELQRAAMDASRTSRHLEETINNFERQKMKDIKTIFSEFITIEMLFHGKALEVYTAAYQNIQNIDEDEDLEVFRNSLYAPDYSSRLDIVRANSKSPLQRSLSAKCVSGTGQVSTCRLRKDQQAEDDEDDELDVTEEENFLK

SEQ ID NO: 54010 - protein, 55 aa, Homo sapiens
IRHAVGNNEFGTVDHERLSKMLSLPEELARMYRDDITIIVVQFNSHVVGAYQNQE

SEQ ID NO: 54011 - protein, 713 aa, Homo sapiens
LRQRKKPKSSENKESAKEEKISDIPIPERAPKHVLFQRFAKIFIGCLAAVTSGMMYALYLSAYHERKFWFSNRQELEREITFQGDSAIYYSYYKDMLKAPSFERGVYELTHNNKTVSLKTINAVQQMSLYPELIASILYQATGSNEIIEPVYFYIGIVFGLQGIYVTALFVTSWLMSGTWLAGMLTVAWFVINRVDTTRIEYSIPLRENWALPYFACQIAALTGYLKSNLNTYGERFCYLLMSASTYTFMMMWEYSHYLLFLQAISLFLLDTFSVEQSDKVYEVYKIYIFSLFLGYLLQFENPALLVSPLLSLVAALMLAKCLQLNVKKGSFVAKIIKVINFYLVCTLTITLNIIMKMFVPHKENGHMLKFLEVKFGLNMTKNFTMNWLLCQESLQAPSQDFFLRLTQSSLLPFYILVLIICFLSMLQVIFRRINGKSLKETVTLEDGRIGERPEIIYHVIHTILLGSLAMVIEGLKYIWIPYVCMLAAFGVCSPELWMTLFKWLRLRTVHPILLALILSMAVPTIIGLSLWKEFFPRLMTELMELQEFYDPDTVELMTWIKRQAPVAAVFAGSPQLMGAIKLCTGWMVTSLPLYNDDDLLKRNENIYQIYSKRSAEDIYKILTSYKANYLIVEDAICNEVGPMRGCRVKDLLDIANGHMVCEEGDKLTYSKYGRFCHEVKINYSPYVNYFTRVYWNRSYFVYKINTVISFQS

SEQ ID NO: 54012 - protein, 330 aa, Homo sapiens
RVFFTLGSRLPCGLAPRRFFSYGTKILYQNTEALQSKFFSPLQKAMLPPNSFQGKVAFITGGGTGLGKGMTTLLSSLGAQCVIASRKMDVLKATAEQISSQTGNKVHAIQCDVRDPDMVQNTVSELIKVAGHPNIVINNAAGNFISPTERLSPNAWKTITDIVLNGTAFVTLEIGKQLIKAQKGAAFLSITTIYAETGSGFVVPSASAKAGVEAMSKSLAAEWGKYGMRFNVIQPGPIKTKGAFSRLDPTGTFEKEMIGRIPCGRLGTVEELANLAAFLCSDYASWINGAVIKFDGGEEVLISGEFNDLRKVTKEQWDTIEELIRKTKGS

SEQ ID NO: 54013 - protein, 200 aa, Homo sapiens
LLGVWYLIINAVVLLILLSALADPDQYNFSSSELGGDFEFMDDANMCIAIAISLLMILICAMATYGAYKQRAAWIIPFFCYQIFDFALNMLVAITVLIYPNSIQEYIRQLPPNFPYRDDVMSVNPTCLVLIILLFISIILTFKGYLISCVWNCYRYINGRNSSDVLVYVTSNDTTVLLPPYDDATVNGAAKEPPPPYVSA

SEQ ID NO: 54014 - protein, 48 aa, Homo sapiens
LEEKHDQCKCENLIMFQNLANEEVRKLTQRLEEMTQRMEALENRLRYR

SEQ ID NO: 54015 - protein, 369 aa, Homo sapiens
TTHPLTHRSQELRGAAATEGFLYVLLSHWVFVGAPRPPASDSWKKGLVPSAPPASRKMGSKALPAPIPLHPSLQLTNYSFLQAVNTFPATVDHLQGLYGLSAVQTMHMNHWTLGYPNVHEITRSTITEMAAAQGLVDARFPFPALPFTTHLFHPKQGAIAHVLPALHKDRPRFDFANLAVAATQEDPPKMGDLSKLSPGLGSPISGLSKLTPDRKPSRGRLPSKTKKEFICKFCGRHFTKSYNLLIHERTHTDERPYTCDICHKAFRRQDHLRDHRYIHSKEKPFKCQECGKGFCQSRTLAVHKTLHMQESPHKCPTCGRTFNQRSNLKTHLLTHTDIKPYSCEQCGKVFRRNCDLRRHSLTHTPRQDF

SEQ ID NO: 54016 - protein, 15 aa, Homo sapiens
ISQKKLKKQKLMAQE

SEQ ID NO: 54017 - protein, 61 aa, Homo sapiens
KRFLLPSQSSKPVRICDFCYDLLSAGDMATCQPARSDSYSQSLKSPLNDMSDDDDDDDSSD

SEQ ID NO: 54018 - protein, 185 aa, Homo sapiens
VLKELETLGKDLYGAKLIAQKCQVRNCPHFKNAVSGSECLLSMVEEGNPHHYFVATQDQNLSVKVKKKPGVPLMFIIQNTMVLDKPSPKTIAFVKAVESGQLVSVHEKESIKHLKEEQGLVKNTEQSRRKKRKKISGPNPLSCLKKKKKAPDTQSSASEKKRKRKRIRNRSNPKVLSEKQNAEGE

SEQ ID NO: 54019 - protein, 24 aa, Homo sapiens
LKKEYELEITSDSQSPKDDAANPE

SEQ ID NO: 54020 - protein, 204 aa, Homo sapiens
LGNMRRAWILLTLGLVACVSAESRAELTSDKDMYLDNSSIEEASGVYPIDDDDYASASGSGADEDVESPELTTSRPLPKILLTSAAPKVETTTLNIQNKIPAQTKSPEETDKEKVHLSDSERKMDPAEEDTNVYTEKHSDSLFKRTEVLAAVIAGGVIGFLFAIFLILLLVYRMRKKDEGSYDLGERKPSSAAYQKAPTKEFYA

SEQ ID NO: 54021 - protein, 44 aa, Homo sapiens
VNGSSQAPTSGKYCRLCDIQFNNLSNFITHKKFYCSSHAAEHVK

SEQ ID NO: 54022 - skipped

SEQ ID NO: 54023 - protein, 227 aa, Homo sapiens
LLLLLLQLPAPSSASEIPKGKQKAQLRQREVVDLYNGMCLQGPAGVPGRDGSPGANGIPGTPGIPGRDGFKGEKGECLRESFEESWTPNYKQCSWSSLNYGIDLGKIAECTFTKMRSNSALRVLFSGSLRLKCRNACCQRWYFTFNGAECSGPLPIEAIIYLDQGSPEMNSTINIHRTSSVEGLCEGIGAGLVDVAIWVGTCSDYPKGDASTGWNSVSRIIIEELPK

SEQ ID NO: 54024 - protein, 442 aa, Homo sapiens
KMLSRNPDNYVRETKLDLQRVPRNYDPALHPFEVPREYIRALNATKLERVFAKPFLASLDGHRDGVNCLAKHPEKLATVLSGACDGEVRIWNLTQRNCIRTIQAHEGFVRGICTRFCGTSFFTVGDDKTVKQWKMDGPGYGDEEEPLHTILGKTVYTGIDHHWKEAVFATCGQQVDIWDEQRTNPICSMTWGFDSISSVKFNPIETFLLGSCASDRNIVLYDMRQATPLKKVILDMRTNTICWNPMEAFIFTAANEDYNLYTFDMRALDTPVMVHMDHVSAVLDVDYSPTGKEFVSASFDKSIRIFPVDKSRSREVYHTKRMQHVICVKWTSDSKYIMCGSDEMNIRLWKANASEKLGVLTSREKAAKDYNQKLKEKFQHYPHIKRIARHRHLPKSIYSQIQEQRIMKEARRRKEVNRIKHSKPGSVPLVSEKKKHVVAVVK

SEQ ID NO: 54025 - protein, 84 aa, Homo sapiens
IHPQFRRKFRVIRADSYLKNFASDRSHMKDSSGNWREPPPPYPCIETGDSKMNLNDFISMDPKVGWGAVYTLSEFTHRFGSKNC

SEQ ID NO: 54026 - protein, 9 aa, Homo sapiens
IYLSGCTNI

SEQ ID NO: 54027 - protein, 93 aa, Homo sapiens
MVIEEATIDSATKQTSGATTEADWVPLELCFGIPLFSSELNRKVCRKIAAHGLCRKESLQNLLHSSRKLSLQVLNFVHSFQVTKTKKSKWYLY

SEQ ID NO: 54028 - protein, 36 aa, Homo sapiens
MGVPLPAKNLIFKDGVLSEWSGRSPSSLLIANLHLQ

SEQ ID NO: 54029 - protein, 24 aa, Homo sapiens
VKSYAPHVDHIVLDLECCPCPSVG

SEQ ID NO: 54030 - protein, 282 aa, Homo sapiens
VSSFRRHFPVLFVSACLFILPVLLSYVLWHHYALNTWLFAVTAFCVELCLKVIVSLTVYTLFMIDGYYNVLWEKLDDYVYYVRSTGSIIEFIFGVVMFGNGAYTMMFESGSKIRAFMMCLHAYFNIYLQAKNGWKTFMNRRTAVKKINSLPEIKGSRLQEINDVCAICYHEFTTSARITPCNHYFHALCLRKWLYIQDTCPMCHQKVYIEDDIKDNSNVSNNNGFIPPNETPEEAVREAAAESDRELNEDDSTDCDDDVQRERNGVIQHTGAAAEEFNDDTD

SEQ ID NO: 54031 - protein, 57 aa, Homo sapiens
LTSRHEVVPALDAGSSDSSSRQHRPGHGPLSSPYDHGLYPSSTGGHLLTPPILQVAM

SEQ ID NO: 54032 - protein, 141 aa, Homo sapiens
RGGVTARPVGVVVPRGTPTPRGVLSTRGPVSRGRGLLTPRARGVPPTGYRPPPPPPTQETYGEYDYDDGYGTAYDEQSYDSYDNSYSTPAQSGADYYDYGHGLSEETYDSYGQEEWTNSRHKAPSARTAKGVYRDQPYGRY

SEQ ID NO: 54033 - protein, 170 aa, Homo sapiens
LTHQQKVLRLYKRALRHLESWCVQRDKYRYFACLMRARFEEHKNEKDMAKATQLLKEAEEEFWYRQHPQPYIFPDSPGGTSYERYDCYKVPEWCLDDWHPSEKAMYPDYFAKREQWKKLRRESWEREVKQLQEETPPGGPLTEALPPARKEGDLPPLWWYIVTRPRERPM

SEQ ID NO: 54034 - protein, 613 aa, Homo sapiens
LESGRLSVLLLVPHFGENLKPTRADNLRLDRCHQRSLGTMWTFLGIATFTYFYKKFGDFITLANREVLLCVLVFLSLGLVLSYRCRHRNGGLLGRQQSGSQFALFSDILSGLPFIGFFWAKSPPESENKEQLEARRRRKGTNISETSLIGTAACTSTSSQNDPEVIIVGAGVLGSALAAVLSRDGRKVTVIERDLKEPDRIVGEFLQPGGYHVLKDLGLGDTVEGLDAQVVNGYMIHDQESKSEVQIPYPLSENNQVQSGRAFHHGRFIMSLRKAAMAEPNAKFIEGVVLQLLEEDDVVMGVQYKDKETGDIKELHAPLTVVADGLFSKFRKSLVSNKVSVSSHFVGFLMKNAPQFKANHAELILANPSPVLIYQISSSETRVLVDIRGEMPRNLREYMVEKIYPQIPDHLKEPFLEATDNSHLRSMPASFLPPSSVKKRGVLLLGDAYNMRHPLTGGGMTVAFKDIKLWRKLLKGIPDLYDDAAIFEAKKSFYWARKTSHSFVVNILAQALYELFSATDDSLHQLRKACFLYFKLGGECVAGPVGLLSVLSPNPLVLIGHFFAVAIYAVYFCFKSEPWITKPRALLSSGAVLYKACSVIFPLIYSEMKYMVH

SEQ ID NO: 54035 - protein, 38 aa, Homo sapiens
KWSVHSRNARNARRKRRERRYWPSRSTGYPRRRWFTRT

SEQ ID NO: 54036 - protein, 130 aa, Homo sapiens
MEIFQLLRNMQLPNGVTYHTGTYQDRLTKLQDNLRQLSVLFRKLRLVYDKCNENCGGMDPIPVEQLIPYVEEDGSKNDDRAGPPRFASEERREIAEVNKKLKQKNQQLKQIMDQLRNLIWDINAMLAMRN

SEQ ID NO: 54037 - protein, 257 aa, Homo sapiens
ICTAVEGDNCVFDGVIYRSGEKFQPSCKFQCTCRDGQIGCVPRCQLDVLLPEPNCPAPRKVEVPGECCEKWICGPDEEDSLGGLTLAAYRPEATLGVEVSDSSVNCIEQTTEWTACSKSCGMGFSTRVTNRNRQCEMLKQTRLCMVRPCEQEPEQPTDKKGKKCLRTKKSLKAIHLQFKNCTSLHTYKPRFCGVCSDGRCCTPHNTKTIQAEFQCSPGQIVKKPVMVIGTCTCHTNCPKNNEAFLQELELKTTRGKM

SEQ ID NO: 54038 - protein, 810 aa, Homo sapiens
LRPRYKRLVDNIFPEDPKDGLVKTDMEKLTFYAVSAPEKLDRIGSYLAERLSRDVVRHRSGYVLIAMEALDQLLMACHSQSIKPFVESFLHMVAKLLESGEPKLQVLGTNSFVKFANIEEDTPSYHRRYDFFVSRFSAMCHSCHSDPEIRTEIRIAGIRGIQGVVRKTVNDELRATIWEPQHMDKIVPSLLFNMQKIEEVDSRIGPPSSPSATDKEENPAVLAENCFRELLGRATFGNMNNAVRPVFAHLDHHKLWDPNEFAVHCFKIIMYSIQAQYSHHVIQEILGHLDARKKDAPRVRAGIIQVLLEAVAIAAKGSIGPTVLEVFNTLLKHLRLSVEFEANDLQGGSVGSVNLNTSSKDNDEKIVQNAIIQTIGFFGSNLPDYQRSEIMMFIMGKVPVFGTSTHTLDISQLGDLGTRRIQIMLLRSLLMVTSGYKAKTIVTALPGSFLDPLLSPSLMEDYELRQLVLEVMHNLMDRHDNRAKLRGIRIIPDVADLKIKREKICRQDTSFMKKNGQQLYRHIYLGCKEEDNVQKNYELLYTSLALITIELANEEVVIDLIRLAIALQDSAIINEDNLPMFHRCGIMALVAAYLNFVSQMIAVPAFCQHVSKVIEIRTMEAPYFLPEHIFRDKCMLPKSLEKHEKDLYFLTNKIAESLGGSGYSVERLSVPYVPQVTDEDRLSRRKSIVDTVSIQVDILSNNVPSDDVVSNTEEITFEALKKAIDTSGMEEQEKEKRRLVIEKFQKAPFEEIAAQCESKANLLHDRLAQILELTIRPPPSPSGTLTITSGHAQYQSVPVYEMKFPDLCVY

SEQ ID NO: 54039 - protein, 367 aa, Homo sapiens
KSFLVSGDNYPPPNPGYPGGPQPPMPPYAQPPYPGAPYPQPPFQPSPYGQPGYPHGPSPYPQGGYPQGPYPQGGYPQGPYPQEGYPQGPYPQGGYPQGPYPQSPFPPNPYGQPQVFPGQDPDSPQHGNYQEEGPPSYYDNQDFPATNWDDKSIRQAFIRKVFLVLTLQLSVTLSTVSVFTFVAEVKGFVRENVWTYYVSYAVFFISLIVLSCCGDFRRKHPWNLVALSVLTASLSYMVGMIASFYNTEAVIMAVGITTAVCFTVVIFSMQTRYDFTSCMGVLLVSMVVLFIFAILCIFIRNRILEIVYASLGALLFTCFLAVDTQLLLGNKQLSLSPEEYVFAALNLYTDIINIFLYILTIIGRAKE

SEQ ID NO: 54040 - protein, 604 aa, Homo sapiens
LRLNAPLCVLSYVAGIAWFLALVFPPLTQRTYMSENAMGSTMVEEQFAGGDRARAFARDFAAHRKKSGALPVAWLERTMRSVGLEVYTQSFSRKLPFPDETHERYMVSGTNVYGILRAPRAASTESLVLTVPCGSDSTNSQAVGLLLALAAHFRGQIYWAKDIVFLVTEHDLLGTEAWLEAYHDVNVTGMQSSPLQGRAGAIQAAVALELSSDVVTSLDVAVEGLNGQLPNLDLLNLFQTFCQKGGLLCTLQGKLQPEDWTSLDGPLQGLQTLLLMVLRQASGRPHGSHGLFLRYRVEALTLRGINSFRQYKYDLVAVGKALEGMFRKLNHLLERLHQSFFLYLLPGLSRFVSIGLYMPAVGFLLLVLGLKALELWMQLHEAGMGLEEPGGAPGPSVPLPPSQGVGLASLVAPLLISQAMGLALYVLPVLGQHVATQHFPVAEAEAVVLTLLAIYAAGLALPHNTHRVVSTQAPDRGWMALKLVALIYLALQLGCIALTNFSLGFLLATTMVPTAALAKPHGPRTLYAALLVLTSPAATLLGSLFLWRELQEAPLSLAEGWQLFLAALAQGVLEHHTYGALLFPLLSLGLYPCWLLFWNVLFWK

SEQ ID NO: 54041 - protein, 313 aa, Homo sapiens
LGPRGAGLPGARARGLLCSARPGQLPLRTPQAVALSSKSGLSRGRKVMLSALGMLAAGGAGLAMALHSAVSASDLELHPPSYPWSHRGLLSSLDHTSIRRGFQVYKQVCASCHSMDFVAYRHLVGVCYTEDEAKELAAEVEVQDGPNEDGEMFMRPGKLFDYFPKPYPNSEAARAANNGALPPDLSYIVRARHGGEDYVFSLLTGYCEPPTGVSLREGLYFNPYFPGQAIAMAPPIYTDVLEFDDGTPATMSQIAKDVCTFLRWASEPEHDHRKRMGLKMLMMMALLVPLVYTIKRHKWSVLKSRKLAYRPPK

SEQ ID NO: 54042 - protein, 39 aa, Homo sapiens
LFELGEGSYFSEGDGFAEDPTISLLTGSEPPKAKDPTVS

SEQ ID NO: 54043 - protein, 441 aa, Homo sapiens
TPARPVLTHLLVALFGMGSWAAVNGIWVELPVVVKELPEGWSLPSYVSVLVALGNLGLLVVTLWRRLAPGKDEQVPIRVVQVLGMVGTALLASLWHHVAPVAGQLHSVAFLALAFVLALACCASNVTFLPFLSHLPPRFLRSFFLGQGLSALLPCVLALVQGVGRLECPPAPINGTPGPPLDFLERFPASTFFWALTALLVASAAAFQGLLLLLPPPPSVPTGELGSGLQVGAPGAEEEVEESSPLQEPPSQAAGTTPGPDPKAYQLLSARSACLLGLLAATNALTNGVLPAVQSFSCLPYGRLAYHLAVVLGSAANPLACFLAMGVLCRSLAGLGGLSLLGVFCGGYLMALAVLSPCPPLVGTSAGVVLVVLSWVLCLGVFSYVKVAASSLLHGGGRPALLAAGVAIQVGSLLGAVAMFPPTSIYHVFHSRKDCADPCDS

SEQ ID NO: 54044 - protein, 48 aa, Homo sapiens
LTPERTRWAMKAAQRRKNKRIRRKRGTGPLWQMEARRPQRNSPQKKFP

SEQ ID NO: 54045 - protein, 91 aa, Homo sapiens
IGAIRTLRSKRTPLPRKRQLMHSLFGDYRAQMEAEWREALRALRAAAYSAQVQPVDGATRKKSQRVCRPRSIWRAKATLDMPDEEFRFNFF

SEQ ID NO: 54046 - protein, 30 aa, Homo sapiens
KKKLQKPVEIAEDATLEETLVKKKKKKDSK

SEQ ID NO: 54047 - protein, 4 aa, Homo sapiens
VADD

SEQ ID NO: 54048 - protein, 59 aa, Homo sapiens
LYTMLIKWVNKTGRDASVHTLLDALETLGERLAKQKIEDHLLSSGKFMYLEGNADSAMS

SEQ ID NO: 54049 - protein, 87 aa, Homo sapiens
LAELTGVTVELPEEPQRLLEQAEAEGCQRRRLLVPVNDADSADISTLLDASATLEEGHAKETIQDQLVGSEKLFYEEDEAGSATSCL

SEQ ID NO: 54050 - protein, 155 aa, Homo sapiens
IETQYFAELLMTSGVVLCEGVKWLSFHSGYDFGYLIKILTNSNLPEEELDFFEILRLFFPVIYDVKYLMKSCKNLKGGLQEVAEQLELERIGPQHQAGSDSLLTGMAFFKMREMFFEDHIDDAKYCGHLYGLGSGSSYVQNGTGNAYEEEANKQS

SEQ ID NO: 54051 - protein, 28 aa, Homo sapiens
VDRGLQKINLSSFRTNVQRCSSMVHHKS

SEQ ID NO: 54052 - protein, 24 aa, Homo sapiens
LQKINLSSFRTNVQRCSSMVHHKS

SEQ ID NO: 54053 - protein, 402 aa, Homo sapiens
RVAAHSGPSGGSAMRRVTLFLNGSPKNGKVVAVYGTLSDLLSVASSKLGIKATSVYNGKGGLIDDIALIRDDDVLFVCEGEPFIDPQTDSKPPEGLLGFHTDWLTLNVGGRYFTTTRSTLVNKEPDSMLAHMFKDKGVWGNKQDHRGAFLIDRSPEYFEPILNYLRHGQLIVNDGINLLGVLEEARFFGIDSLIEHLEVAIKNSQPPEDHSPISRKEFVRFLLATPTKSELRCQGLNFSGADLSRLDLRYINFKMANLSRCNLAHANLCCANLERADLSGSVLDCANLQGVKMLCSNAEGASLKLCNFEDPSGLKANLEGANLKGVDMEGSQMTGINLRVATLKNAKLKNCNLRGATLAGTDLENCDLSGCDLQEANLRGSNVKGAIFEEMLTPLHMSQSVR

SEQ ID NO: 54054 - protein, 149 aa, Homo sapiens
INSYGSQLGVSISESTQGNNQGYIRNTSSISPRGYSSSSTPQQSNYSTSSNSMNGYSNVPMANLGVPGSPGFLNGSPTGSPYGIMSSSPTVGSSSTSSILPFSSSVFPAVKQKSAFAPVIRPQGSPSPACSSGNGNGFRAMTGLVVPPM

SEQ ID NO: 54055 - protein, 391 aa, Homo sapiens
LHRGQLSLFCLEDKELLCCSCQADPRHQGHRVQPVKDTAHDFRAKCRNMEHALREKAKAFWAMRRSYEAIAKHNQVEAAWLEGRIRQEFDKLREFLRVEEQAILDAMAEETRQKQLLADEKMKQLTEETEVLAHEIERLQMEMKEDDVSFLMKHKSRKRRLFCTMEPEPVQPGMLIDVCKYLGSLQYRVWKKMLASVESVPFSFDPNTAAGWLSVSDDLTSVTNHGYRVQVENPERFSSAPCLLGSRVFSQGSHAWEVALGGLQSWRVGVVRVRQDSGAEGHSHSCYHDTRSGFWYVCRTQGVEGDHCVTSDPATSPLVLAIPRRLRVELECEEGELSFYDAERHCHLYTFHARFGEVRPYFYLGGARGAGPPEPLRICPLHISVKEELDG

SEQ ID NO: 54056 - protein, 37 aa, Homo sapiens
LYLLRLRRIHRRTPRSSSAAALWMEEGLPAQNAPGTL

SEQ ID NO: 54057 - protein, 777 aa, Homo sapiens
KTGMERPLCSHLCSCLAMLALLSPLSLAQYDSWPHYPEYFQQPAPEYHQPQAPANVAKIQLRLAGQKRKHSEGRVEVYYDGQWGTVCDDDFSIHAAHVVCRELGYVEAKSWTASSSYGKGEGPIWLDNLHCTGNEATLAACTSNGWGVTDCKHTEDVGVVCSDKRIPGFKFDNSLINQIENLNIQVEDIRIRAILSTYRKRTPVMEGYVEVKEGKTWKQICDKHWTAKNSRVVCGMFGFPGERTYNTKVYKMFASRRKQRYWPFSMDCTGTEAHISSCKLGPQVSLDPMKNVTCENGLPAVVSCVPGQVFSPDGPSRFRKAYKPEQPLVRLRGGAYIGEGRVEVLKNGEWGTVCDDKWDLVSASVVCRELGFGSAKEAVTGSRLGQGIGPIHLNEIQCTGNEKSIIDCKFNAESQGCNHEEDAGVRCNTPAMGLQKKLRLNGGRNPYEGRVEVLVERNGSLVWGMVCGQNWGIVEAMVVCRQLGLGFASNAFQETWYWHGDVNSNKVVMSGVKCSGTELSLAHCRHDGEDVACPQGGVQYGAGVACSETAPDLVLNAEMVQQTTYLEDRPMFMLQCAMEENCLSASAAQTDPTTGYRRLLRFSSQIHNNGQSDFRPKNGRHAWIWHDCHRHYHSMEVFTHYDLLNLNGTKVAEGHKASFCLEDTECEGDIQKNYECANFGDQGITMGCWDMYRHDIDCQWVDITDVPPGDYLFQVVINPNFEVAESDYSNNIMKCRSRYDGHRIWMYNCHIGGSFSEETEKKFEHFSGLLNNQLSPQ

SEQ ID NO: 54058 - protein, 177 aa, Homo sapiens
TCQEQRLQGEVVAFDYQSKMLALKCPSSSGKPNHADILLINLQYVSEVEIINDRTETPPPLASLNVSKLASKARTEKEEKLSQAYAISAGVSLEGQQLFQTIHKTIKDCKWQEKNIVVMEEVVITPPYQVENCKGKEGSALSHVRKIVEKHFRDVESQKILQRSQAQQPQKEAALSS

SEQ ID NO: 54059 - protein, 178 aa, Homo sapiens
KHGWPEDIWFHVDKLSSAHVYLRLHKGENIEDIPKEVLMDCAHLVKANSIQGCKMNNVNVVYTPWSNLKKTADMDVGQIGFHRQKDVKIVTVEKKVNEILNRLEKTKVERFPDLAAEKECRDREERNEKKAQIQEMKKREKEEMKKKREMDELRSYSSLMKVENMSSNQDGNDSDEFM

SEQ ID NO: 54060 - protein, 499 aa, Homo sapiens
LQGVMENKAMYLHTVSDCDTSSICEDSFDGRSLSKLNLCEDGPCHKRRASICCTQLGSLSALKHAVLGLYLLVFLILVGIFILAVSRPRSSPDDLKALTRNVNRLNESFRDLQLRLLQAPLQADLTEQVWKVQDALQNQSDSLLALAGAVQRLEGALWGLQAQAVQTEQAVALLRDRTGQQSDTAQLELYQLQVESNSSQLLLRRHAGLLDGLARRVGILGEELADVGGVLRGLNHSLSYDVALHRTRLQDLRVLVSNASEDTRRLRLAHVGMELQLKQELAMLNAVTEDLRLKDWEHSIALRNISLAKGPPGPKGDQGDEGKEGRPGIPGLPGLRGLPGERGTPGLPGPKGDDGKLGATGPMGMRGFKGDRGPKGEKGEKGDRAGDASGVEAPMMIRLVNGSGPHEGRVEVYHDRRWGTVCDDGWDKKDGDVVCRMLGFRGVEEVYRTARFGQGTGRIWMDDVACKGTEETIFRCSFSKWGVTNCGHAEDASVTCNRH

SEQ ID NO: 54061 - protein, 214 aa, Homo sapiens
MVTAVPGRLPVMTMIPDVDCLLWAIGRVPNTKDLSLNKLGIQTDDKGHIIVDEFQNTNVKGIYAVGDVCGKALLTPVAIAAGRKLAHRLFEYKEDSKLDYNNIPTVVFSHPPIGTVGLTEDEAIHKYGIENVKTYSTSFTPMYHAVTKRKTKCVMKMVCANKEEKVVGIHMQGLGCDEMLQGFAVAVKMGATKADFDNTVAIHPTSSEELVTLR

SEQ ID NO: 54062 - protein, 20 aa, Homo sapiens
IGPPWTTRRSPRSWTSGSSS

SEQ ID NO: 54063 - protein, 300 aa, Homo sapiens
LDQWVEQLNECKQLNENQVRTLCEKAKEILTKESNVQEVRCPVTVCGDVHGQFHDLMELFRIGGKSPDTNYLFMGDYVDRGYYSVETVTLLVALKVRYPERITILRGNHESRQITQVYGFYDECLRKYGNANVWKYFTDLFDYLPLTALVDGQIFCLHGGLSPSIDTLDHIRALDRLQEVPHEGPMCDLLWSDPDDRGGWGISPRGAGYTFGQDISETFNHANGLTLVSRAHQLVMEGYNWCHDRNVVTIFSAPNYCYRCGNQAAIMELDDTLKYSFLQFDPAPRRGEPHVTRRTPDYFL

SEQ ID NO: 54064 - protein, 28 aa, Homo sapiens
LGCRLSAAALGWCAVVRPRLTAASATQM

SEQ ID NO: 54065 - protein, 29 aa, Homo sapiens
LSVLSMKSLKERLTKIQHILTYFSRDQSK

SEQ ID NO: 54066 - protein, 59 aa, Homo sapiens
IEPCGPGKSKLTYMCRVDLRGHMPEWYTKSFGHLCAAEVVKIRDSFSNQNTETKDTKSR

SEQ ID NO: 54067 - protein, 18 aa, Homo sapiens
LFSAAVMALLMYGILPYV

SEQ ID NO: 54068 - protein, 33 aa, Homo sapiens
KEVVHFQKEKDDVSERGYVILPNDYFEIVEVPA

SEQ ID NO: 54069 - protein, 222 aa, Homo sapiens
IATLVYALFRNVHQNIHPENQELVRVLREQLQTEQDAPAATRQQFYTDMYCPICLHQASFPVETNCGHLFCGACIIAYWRYGSWLGAISCPICRQTVTLLLTVFGEDDQSQDVLRLHQDINDYNRRFSGQPRSIMERIMDLPTLLRHAFREMFSVGGLFWMFRIRIILCLMGAFFYLISPLDFVPEALFGILGFLDDFFVIFLLLIYISIMYREVITQRLTR

SEQ ID NO: 54070 - protein, 37 aa, Homo sapiens
INPLGGFVHYGEVTNDFVMLKCCVVGTKRQALILHKS

SEQ ID NO: 54071 - protein, 117 aa, Homo sapiens
MFVIAFLSPLSLIFLAKFLKKADTRDSRQACLAASLALALNGVFTNTIKLIVGRPRPDFFYRCFPDGLAHSDLMCTGDKDVVNEGRKSFPSGHSSCMNIIWTLPYACFHIIEFNLES

SEQ ID NO: 54072 - protein, 205 aa, Homo sapiens
MFVIAFLSPLSLIFLAKFLKKADTRDSRQACLAASLALALNGVFTNTIKLIVGRPRPDFFYRCFPDGLAHSDLMCTGDKDVVNEGRKSFPSGHSSFAFAGLAFASFYLAGKLHCFTPQGRGKSWRFCAFLSPLLFAAVIALSRTCDYKHHWQDVLVGSMIGMTFAYVCYRQYYPPLTDAECHKPFQDKLVLSTAQKPGDSYCFDI

SEQ ID NO: 54073 - protein, 8 aa, Homo sapiens
LVALYGFK

SEQ ID NO: 54074 - protein, 152 aa, Homo sapiens
KCNMSPVVKIEQVFALQNATGDGKFIDQFVYSTKGIGNKTEISVRGQDRLIISTPNQRNEKPTQSVSSPEATSGSTGSVEKKQQRRSIRTRSESEKSTEVVPKKKIKKEQVETVPQATVKTGLQKGSADRGVQGSVRFSDSSVSAAIEETVD

SEQ ID NO: 54075 - protein, 26 aa, Homo sapiens
TVPVLQSGTPRRRGLRRAMEPGLQGK

SEQ ID NO: 54076 - protein, 867 aa, Homo sapiens
KESEAPPLRSGGGGHKVWRPRVADGSPPPAPPPGHQLRLHCSRPGWRRRAPSAAGSRAPAAELLRPRQDPNRARGRRAGAGDAGTRPLAQATADSPEAEPPRRARVSLKRRIELTVEYPWRCGALSPTSNCRTGMWSWKCLLFWAVLVTATLCTARPSPTLPEQDALPSSEDDDDDDDSSSEEKETDNTKPNRMPVAPYWTSPEKMEKKLHAVPAAKTVKFKCPSSGTPNPTLRWLKNGKEFKPDHRIGGYKVRYATWSIIMDSVVPSDKGNYTCIVENEYGSINHTYQLDVVERSPHRPILQAGLPANKTVALGSNVEFMCKVYSDPQPHIQWLKHIEVNGSKIGPDNLPYVQILKTAGVNTTDKEMEVLHLRNVSFEDAGEYTCLAGNSIGLSHHSAWLTVLEALEERPAVMTSPLYLEIIIYCTGAFLISCMVGSVIVYKMKSGTKKSDFHSQMAVHKLAKSIPLRRQVTVSADSSASMNSGVLLVRPSRLSSSGTPMLAGVSEYELPEDPRWELPRDRLVLGKPLGEGCFGQVVLAEAIGLDKDKPNRVTKVAVKMLKSDATEKDLSDLISEMEMMKMIGKHKNIINLLGACTQDGPLYVIVEYASKGNLREYLQARRPPGLEYCYNPSHNPEEQLSSKDLVSCAYQVARGMEYLASKKCIHRDLAARNVLVTEDNVMKIADFGLARDIHHIDYYKKTTNGRLPVKWMAPEALFDRIYTHQSDVWSFGVLLWEIFTLGGSPYPGVPVEELFKLLKEGHRMDKPSNCTNELYMMMRDCWHAVPSQRPTFKQLVEDLDRIVALTSNQEYLDLSMPLDQYSPSFPDTRSSTCSSGEDSVFSHEPLPEEPCLPRHPAQLANGGLKRR

SEQ ID NO: 54077 - protein, 20 aa, Homo sapiens
KEDRAHCGVSMEMWSLVTNL

SEQ ID NO: 54078 - protein, 278 aa, Homo sapiens
VSFQSDIGPYQSGRFYTKPPQCVDIPADLRLCHNVGYKKMVLPNLLEHETMAEVKQQASSWVPLLNKNCHAGTQVFLCSLFAPVCLDRPIYPCRWLCEAVRDSCEPVMQFFGFYWPEMLKCDKFPEGDVCIAMTPPNATEASKPQGTTVCPPCDNELKSEAIIEHLCASEFALRMKIKEVKKENGDKKIVPKKKKPLKLGPIKKKDLKKLVLYLKNGADCPCHQLDNLSHHFLIMGRKVKSQYLLTAIHKWDKKNKEFKNFMKKMKNHECPTFQSVFK

SEQ ID NO: 54079 - protein, 558 aa, Homo sapiens
KRGLCCVLLLCGAVFVSPSQEIHARFRRGARSYQVICRDEKTQMIYQQHQSWLRPVLRSNRVEYCWCNSGRAQCHSVPVKSCSEPRCFNGGTCQQALYFSDFVCQCPEGFAGKCCEIDTRATCYEDQGISYRGTWSTAESGAECTNWNSSALAQKPYSGRRPDAIRLGLGNHNYCRNPDRDSKPWCYVFKAGKYSSEFCSTPACSEGNSDCYFGNGSAYRGTHSLTESGASCLPWNSMILIGKVYTAQNPSAQALGLGKHNYCRNPDGDAKPWCHVLKNRRLTWEYCDVPSCSTCGLRQYSQPQFRIKGGLFADIASHPWQAAIFAKHRRSPGERFLCGGILISSCWILSAAHCFQERFPPHHLTVILGRTYRVVPGEEEQKFEVEKYIVHKEFDDDTYDNDIALLQLKSDSSRCAQESSVVRTVCLPPADLQLPDWTECELSGYGKHEALSPFYSERLKEAHVRLYPSSRCTSQHLLNRTVTDNMLCAGDTRSGGPQANLHDACQGDSGGPLVCLNDGRMTLVGIISWGLGCGQKDVPGVYTKVTNYLDWIRDNMRP

SEQ ID NO: 54080 - protein, 68 aa, Homo sapiens
IAYARIEGDMIVCAAYAHELPKYGVKVGLTNYAATYCTGLLLAHRLLNRFGMDKIYEGQVEVTGDNTM

SEQ ID NO: 54081 - protein, 4 aa, Homo sapiens
IPIT

SEQ ID NO: 54082 - protein, 29 aa, Homo sapiens
TSRAVFDCRCLGRRSRSRRRRRRRRGLRS

SEQ ID NO: 54083 - protein, 283 aa, Homo sapiens
KNAAGALDLLKELKNIPMTLELLQSTRIGMSVNAIRKQSTDEEVTSLAKSLIKSWKKLLDGPSTEKDLDEKKKEPAITSQNSPEAREESTSSGNVSNRKDETNARDTYVSSFPRAPSTSDSVRLKCREMLAAALRTGDDYIAIGADEEELGSQIEEAIYQEIRNTDMKYKNRVRSRISNLKDAKNPNLRKNVLCGNIPPDLFARMTAEEMASDELKEMRKNLTKEAIREHQMAKTGGTQTDLFTCGKCKKKNCTYTQVQTRSADEPMTTFVVCNECGNRWKFC

SEQ ID NO: 54084 - protein, 368 aa, Homo sapiens
IDGRLKELREQLKELTKQYEKSENDLKALRSVGQIVGEVFKQLTEEKFIVKATNGPRYVVGCRRQLDKSKLKPGTRVALDMTTLTIMRYLPREVDPLIYNMSHEDPENVSYSEIGGLSEQIRELREVIELPLTNPELFQRVGIIPPKGCLLYGPPGTGKTLLARAIASQLDCNFLKVVSSSIVDKYIGESAHLIREMFNYARDHQPCIIFMDEIDAIGGRRFSEGTSADREIQRTLTELLNQMDGFDTLHRVKMIMATNRPDTLDPALLCPGRLDRKIHIDLPNEQTRLDILKIHAGPITKHGEIDYEAIVKLSDGFNGADLRNVCTEAGMFAIRADHDFVVQEDFMKAVRKVADSKKLEAKLDYKPV

SEQ ID NO: 54085 - protein, 24 aa, Homo sapiens
IKVTLATLKMSVQPTVSLGGFEIT

SEQ ID NO: 54086 - protein, 74 aa, Homo sapiens
KRSPQLEDEAKELQKRYGGFMRRVGRPEWWMDYQKRYGGFLKRFAEALPSDEEGESYSKEVPEMEKRYGGFMRF

SEQ ID NO: 54087 - protein, 125 aa, Homo sapiens
KTLDLLTMKNLDSKVNIIPVIAKADTVSKTELHKFKIKFMSELVSNGVQIYQFPTDDDTIAKVNAAMNGQLPFAVVGSMDEIKVGNKMVKARQYPWGVVQVENENHCDFVKLREMFICTNMEDLR

SEQ ID NO: 54088 - protein, 80 aa, Homo sapiens
KEKEAILKEAERKLQAKFEHLKRLHQEERMKLEEQRRLLEEEIIAFSKKKATSEIFHSQSFLATGSNLSKDKDHKNSNFL

SEQ ID NO: 54089 - protein, 354 aa, Homo sapiens
IRLSPLGVAVFCLLGLGVLYHLYSGFLAGRFSLFGLGGEPGGGAAGPAAAADGGTVDLREMLAVSVLAAVRGGDEVRRVRESNVLHEKSKGKTREGAEDKMTSGDVLSNRKMFYLLKTAFPSVQINTEEHVDAADQEVILWDHKIPEDILKEVTTPKEVPAESVTVWIDPLDATQEYTEDLRKYVTTMVCVAVNGKPMLGVIHKPFSEYTAWAMVDGGSNVKARSSYNEKTPRIVVSRSHSGMVKQVALQTFGNQTTIIPAGGAGYKVLALLDVPDKSQEKADLYIHVTYIKKWDICAGNAILKALGGHMTTLSGEEISYTGSDGIEGGLLASIRMNHQALVRKLPDLEKTGHK

SEQ ID NO: 54090 - protein, 476 aa, Homo sapiens
LALCLLVRRTRRPGEPPLIKGWLPYLGVVLNLRKDPLRFMKTLQKQHGDTFTVLLGGKYITFILDPFQYQLVIKNHKQLSFRVFSNKLLEKAFSISQLQKNHDMNDELHLCYQFLQGKSLDILLESMMQNLKQVFEPQLLKTTSWDTAELYPFCSSIIFEITFTTIYGKVIVCDNNKFISELRDDFLKFDDKFAYLVSNIPIELLGNVKSIREKIIKCFSSEKLAKMQGWSEVFQSRQDVLEKYYVHEDLEIGAHHLGFLWASVANTIPTMFWAMYYLLRHPEAMAAVRDEIDRLLQSTGQKKGSGFPIHLTREQLDSLICLESSIFEALRLSSYSTTIRFVEEDLTLSSETGDYCVRKGDLVAIFPPVLHGDPEIFEAPEEFRYDRFIEDGKKKTTFFKRGKKLKCYLMPFGTGTSKCPGRFFALMEIKQLLVILLTYFDLEIIDDKPIGLNYSRLLFGIQYPDSDVLFRYKVKS

SEQ ID NO: 54091 - protein, 275 aa, Homo sapiens [sequence omitted]

SEQ ID NO: 54092 - protein, 103 aa, Homo sapiens
MDRHLRDQSTEQSPSDLPQRKTEVVSSSAKSGSLQTGLPESFPLTGGTENLNTETTDGCVADALGAAFATRSKAQRGNSVEELEEMDSQDAEMTNTTEPMDHS

SEQ ID NO: 54093 - protein, 31 aa, Homo sapiens
MFSFKQQEDSSLAITVTAVYIVMSRKGPCLP

SEQ ID NO: 54094 - protein, 130 aa, Homo sapiens
VAGGGGAGGSAGGGGKKPLPAKGSAAECKQSQRNAANARERARMRVLSKAFSRLKTSLPWVPPDTKLSKLDTLRLASSYIAHLRQLLQEDRYENGYVHPVNLTWPFVVSGRPDSDTKEVSAANRLCGTTA

SEQ ID NO: 54095 - protein, 97 aa, Homo sapiens
LSPDVYQEMEASRHKVISGTTLGYLSPKDMNQPSSSFFSISPTSNSSATIARELLMNGTSSTAEAIGLKGSSPTPPCSPVQPSKQLEYLARIQGFQV

SEQ ID NO: 54096 - protein, 83 aa, Homo sapiens
IVKREHALTSGTIKAMLSGPGQFAENETNEVNFREIPSHVLSKVCMYFTYKVRYTNSSTEIPEFPIAPEIALELLMAANFLDC

SEQ ID NO: 54097 - protein, 58 aa, Homo sapiens
MIIDKLEEDISSSMTSSTAATRPPVTLRLVVPASQCGSLIGKGGCKIKEIRESTGAQV

SEQ ID NO: 54098 - protein, 72 aa, Homo sapiens
IPNDLIGCIIGRQGAKINEIRQMSGAQIKIANPVEGSTDRQVTITGSAASISLAQYLINVRLSSETGGMGSS

SEQ ID NO: 54099 - protein, 5 aa, Homo sapiens
MKIPC

SEQ ID NO: 54100 - protein, 43 aa, Homo sapiens
INPLGGFVHYGEVTNDFVMLKGCVVVTKKRVLTLHKSLLVQTK

SEQ ID NO: 54101 - protein, 372 aa, Homo sapiens
IRKKSTKSPPVLSHEFVLQNHADIVSCVAMVFLLGLMFEITAKASIIFVTLQYNVTLPATEEQATESVSLYYYGIKDLATVFFYMLVAIIIHAVIQEYMLDKINRRMHFSKTKHSKFNESGQLSAFYLFACVWGTFILISENYISDPTILWRAYPHNLMTFQMKFFYISQLAYWLHAFPELYFQKTKKEDIPRQLVYIGLYLFHIAGAYLLNLNHLGLVLLVLHYFVEFLFHISRLFYFSNEKYQKGFSLWAVLFVLGRLLTLILSVLTVGFGLARAENQKLDFSTGNFNVLAVRIAVLASICVTQAFMMWKFINFQLRRWREHSAFQAPAVKKKPTVTKGRSSKKGTENGVNGTLTSNVADSPRNKKEKSS

SEQ ID NO: 54102 - protein, 284 aa, Homo sapiens
LQRVERLSNRVVRVLGCNPGPMTLQGTNTYLVGTGPRRILIDTGEPAIPEYISCLKQALTEFNTAIQEIVVTHWHRDHSGGIGDICKSINNDTTYCIKKLPRNPQREEIIGNGEQQYVYLKDGDVIKTEGATLRVLYTPGHTDDHMALLLEEENAIFSGDCILGEGTTVFEDLYDYMNSLKELLKIKADIIYPGHGPVIHNAEAKIQQYISHRNIREQQILTLFRENFEKSFTVMELVKIIYKNTPENLHEMAKHNLLLHLKKLEKEGKIFSNTDPDKKWKAHL

SEQ ID NO: 54103 - protein, 256 aa, Homo sapiens
LVCVLAALCFASLALVRRYLHHLLLWVESLDSLLGVLLFVVGFIVVSFPCGWGYIVLNVAAGYLYGFVLGMGLMMVGVLIGTFIAHVVCKRLLTAWVAARIQSSEKLSAVIRVVEGGSGLKVVALARLTPIPFGLQNAVFSITDLSLPNYLMASSVGLLPTQLLNSYLGTTLRTMEDVIAEQSVSGYFVFCLQIIISIGLMFYVVHRAQVELNAAIVACEMELKSSLVKGNQPNTSGSSFYNKRTLTFSGGGINVV

SEQ ID NO: 54104 - protein, 66 aa, Homo sapiens
TNGMQAFSQGLNEQQQQQSPVKKERIKYSRDFLLKLSSVSICRKKPDFLPDHPIVLQKPENNQSFK

SEQ ID NO: 54105 - protein, 40 aa, Homo sapiens
RRFRATYVSWAIAYLLGLICLIRACYWGAIRVSYPEHSFA

SEQ ID NO: 54106 - protein, 50 aa, Homo sapiens
LQAQQQGDTPAVSSSVTPNSGAGSPMDTPPAATPRSTTPGTPSTIETTPR

SEQ ID NO: 54107 - protein, 161 aa, Homo sapiens
RLNKMFVGEVSSSSNQEPEFNEKEDDEWILVDFIDTCTGFSAEEEEEEEDISEESPTEHPSVFSCLPASLECLADTSDSCFLQFESCPMEESWFITPPPCFTAGGLTTIKVETSPMENLLIEHPSMSVYAVHNSCPGLSEATRGTDELHSPSSPRARKSCL

SEQ ID NO: 54108 - protein, 58 aa, Homo sapiens
LEQPKSFRPSQWIKEHSERQPLNRNSLRRQNLTRDCHPRQVKHNGWVVHQPCPRQYNY

SEQ ID NO: 54109 - protein, 48 aa, Homo sapiens [sequence omitted]

SEQ ID NO: 54110 - protein, 9 aa, Homo sapiens
MKQKNKLVG

SEQ ID NO: 54111 - protein, 72 aa, Homo sapiens
MNLPFKANVNEILDFFHGYRIIPDSVSIQYNEQGLPTGEAIVAMINYNEAMAAIKDLNDRPVGPRKVKLTLL

SEQ ID NO: 54112 - protein, 23 aa, Homo sapiens
VAKNNKNMAFKLKSKSCHDLSVL

SEQ ID NO: 54113 - protein, 24 aa, Homo sapiens
IENDQSISRNHAVLTANFSVTNLV

SEQ ID NO: 54114 - protein, 133 aa, Homo sapiens
KKRELKEDSLWSAKEISNNDKLQDDSEMLPKKLLLTEFRSLVIKNSTSRNPSGINDDYGQLKNFKKFKKVTYPGAGKLPHIIGGSDLIAHHARKNTELEEWLRQEMEVQNQHAKEESLADDLFRYNPYLKRRR

SEQ ID NO: 54115 - protein, 69 aa, Homo sapiens
KKFKKVTYPGAGKLPHIIGGSDLIAHHARKNTELEEWLRQEMEVQNQHAKEESLADDLFRYNPYLKRRR

SEQ ID NO: 54116 - protein, 754 aa, Homo sapiens
KNAKSSGNSSSSGSGSGSTSAGSSSPGARRETKHGGHKNGRKGGLSGTSFFTWFMVIALLGVWTSVAVVWFDLVDYEEVLGKLGIYDADGDGDFDVDDAKVLLGLKERSTSEPAVPPEEAEPHTEPEEQVPVEAEPQNIEDEAKEQIQSLLHEMVHAEHVEGEDLQQEDGPTGEPQQEDDEFLMATDVDDRFETLEPEVSHEETEHSYHVEETVSQDCNQDMEEMMSEQENPDSSEPVVEDERLHHDTDDVTYQVYEEQAVYEPLENEGIEITEVTAPPEDNPVEDSQVIVEEVSIFPVEEQQEVPPETNRKTDDPEQKAKVKKKKPKLLNKFDKTIKAELDAAEKLRKRGKIEEAVNAFKELVRKYPQSPRARYGKAQCEDDLAEKRRSNEVLRGAIETYQEVASLPDVPADLLKLSLKRRSDRQQFLGHMRGSLLTLQRLVQLFPNDTSLKNDLGVGYLLIGDNDNAKKVYEEVLSVTPNDGFAKVHYGFILKAQNKIAESIPYLKEGIESGDPGTDDGRFYFHLGDAMQRVGNKEAYKWYELGHKRGHFASVWQRSLYNVNGLKAQPWWTPKETGYTELVKSLERNWKLIRDEGLAVMDKAKGLFLPEDENLREKGDWSQFTLWQQGRRNENACKGAPKTCTLLEKFPETTGCRRGQIKYSIMHPGTHVWPHTGPTNCRLRMHLGLVIPKEGCKIRCANETKTWEEGKVLIFDDSFEHEVWQDASSFRLIFIVDVWHPELTPQQRRSLPAI

SEQ ID NO: 54117 - protein, 59 aa, Homo sapiens
LFKVKERHLFLTYLGRAQYDPAKPNYISLDKLVSIPDEIFCEEIAKASVQDFEKFLKTL

SEQ ID NO: 54118 - protein, 117 aa, Homo sapiens
RKMVAAKKTKKSLESINSRLQLVMKSGKYVLGYKQTLKMIRQGKAKLVILANNCPALRKSEIEYYAMLAKTGVHHYSGNNIELGTACGKYYRVCTLAIIDPGDSDIIRSMPEQTGEK

SEQ ID NO: 54119 - protein, 131 aa, Homo sapiens
RVISTAKAPGAIGPYSQAVLVDRTIYISGQIGMDPSSGQLVSGGVAEEAKQALKNMGEILKAAGCDFTNVVKTTVLLADINDFNTVNEIYKQYFKSNFPARAAYQVAALPKGSRIEIEAVAIQGPLTTASL

SEQ ID NO: 54120 - protein, 367 aa, Homo sapiens
LDELSLNFTYGAPGAGNGSLSGDWYRRNQIHLFGVLLAILGNLVISISLNIQKYSHLQLAQQEHPRPYFKSVLWWGGVLLMAVGETGNFAAYGFAPITLIAPLGCVSVTGSAIISVTFLKDNLRASDLLGTTLAFAGTYLLVNFAPNITQAISARTVQYYLVGWQFLIYVILEILIFCILLYFYKRKGMKHMVILLTLVAILASLTVISVKAVSGMITFSVMDKMQLTYPIFYIMFIIMIASCVFQVKFLNQATKLYNTTTVVPVNHIFFTISAIIAGIIFYQEFLGAPFLTVFIYLFGCFLSFLGVFLVTRNREKEHLQQSYIDFGNIPGKQMLDKIQPDSHSLSYGTLPDGSDSTKSQSGEKKEV

SEQ ID NO: 54121 - protein, 57 aa, Homo sapiens
KSKPMFFCHRWSIGKAIDFAASLARLKNDNNKFTAKAVSHYFRRSLTLGSYFGNLDC

SEQ ID NO: 54122 - protein, 114 aa, Homo sapiens
LELKKLHASVKLLTMAKNKLRGPKSRNVFHIASQKNFKAKNKAKPVTTNLKKINIMNEEKVNRVNKAFVNVQKELAHFAKSISLEPLQKELIPQQRHESKPVNVDEATRLMALL

SEQ ID NO: 54123 - protein, 44 aa, Homo sapiens
INKDQPANPTEEYAQLLIALIAQTAKDIHVLIDSLPSEESTAAL

SEQ ID NO: 54124 - protein, 307 aa, Homo sapiens
LYYWQQTEDDLTVTIRLPEDSTKEDIQIQFLPDHINIVLKDHQFLEGKLYSSIDHESSTWIIKESNSLEISLIKKNEGLTWPELVIGDKQGELIRDSAQCAAIAERLMHLTSEELNPNPDKEKPPCNAQELEECDIFFEESSSLCRFDGNTLKTTHVVNLGSNQYLFSVIVDPKEMPCFCLRHDVDALLWQPHSSKQDDMWEHIATFNALGYVQASKRDKKFFACAPNYSYAALCECLRRVFIYRQPAPMSTVLYNRKEGRQVGQVAKQQVASLETNDPILGFQATNERLFVLTTKNLFLIKVNTEN

SEQ ID NO: 54125 - protein, 28 aa, Homo sapiens
VYNIGALLRGCCVVALHSLRRTAFRIKT

SEQ ID NO: 54126 - skipped

SEQ ID NO: 54127 - protein, 465 aa, Homo sapiens [sequence omitted]

SEQ ID NO: 54128 - protein, 451 aa, Homo sapiens
TAEMKGFIDDANYSVGLLDEGTNLGNVIDNYVYEHTLTGKNAFFVGDLGKIVKKHSQWQNVVAQIKPFYTVKCNSAPAVLEILAALGTGFACSSKNEMALVQELGVPPENIIYISPCKQVSQIKYAAKVGVNILTCDNEIELKKIARNHPNAKVLLHIATEDNIGGEEGNMKFGTTLKNCRHLLECAKELDVQIIGVKFHVSSACKESQVYVHALSDARCVFDMAGEIGFTMNMLDIGGGFTGTEFQLEEVNHVISPLLDIYFPEGSGVKIISEPGSYYVSSAFTLAVNIIAKKVVENDKFPSGVEKTGSDEPAFMYYMNDGVYGSFASKLSEDLNTIPEVHKKYKEDEPLFTSSLWGPSCDELDQIVESCLLPELNVGDWLIFDNMGADSFHEPSAFNDFQRPAIYYMMSFSDWYEMQDAGITSDSMMKNFFFVPSCIQLSQEDSFSAEA

SEQ ID NO: 54129 - protein, 39 aa, Homo sapiens
LGFWRVLLLIFVIALLSLGIAYYVSGVLPFVENQPELVH

SEQ ID NO: 54130 - protein, 21 aa, Homo sapiens
LNGSSISRKSEDDEKLKRRKD

SEQ ID NO: 54131 - protein, 114 aa, Homo sapiens
IDFREFIIALSVTSRGKLEQKLKWAFSMYDLDGNGYISKAEMLEIVQAIYKMVSSVMKMPEDESTPEKRTEKIFRQMDTNRDGKLSLEEFIRGAKSDPSIVRLLQCDPSSAGQF

SEQ ID NO: 54132 - protein, 5 aa, Homo sapiens
IIAVK

SEQ ID NO: 54133 - protein, 5 aa, Homo sapiens
MASFL

SEQ ID NO: 54134 - protein, 48 aa, Homo sapiens
VPTLSFFQNTMATVVRVRQTSTTQTLCREMLHTWNRISLPRNFNIWNM

SEQ ID NO: 54135 - protein, 261 aa, Homo sapiens
LCILATCGSKMSDIGDWFRSIPAITRYWFAATVAVPLVGKLGLISPAYLFLWPEAFLYRFQIWRPITATFYFPVGPGTGFLYLVNLYFLYQYSTRLETGAFDGRPADYLFMLLFNWICIVITGLAMDMQLLMIPLIMSVLYVWAQLNRDMIVSFWFGTRFKACYLPWVILGFNYIIGGSVINELIGNLVGHLYFFLMFRYPMDLGGRNFLSTPQFLYRWLPSRRGGVSGFGVPPASMRRAADQNGGGGRHNWGQGFRLGDQ

SEQ ID NO: 54136 - protein, 13 aa, Homo sapiens
KWLEQTPCQLQHL

SEQ ID NO: 54137 - protein, 180 aa, Homo sapiens
IKSFFPHSGKDCLLCFPETLPESSLFSVEANSSNSQKNEKALTNIQNCMAEKRETVLIETQLKACASFIRTRLLLQFTQPQQTSFALERNLRTQQEIEDKMKGFSFKEDTLLLIAEVMGEDIPEKIKDEVHPEVKCVGSVALTALVTVSSEEFEDKWFRKIKDHFCPFENQFHTEIQILA

SEQ ID NO: 54138 - protein, 4110 aa, Homo sapiens
LSAADRCGAALAGHQLIRGLGQECVLSSSPAVLALQTSLVFSRDFGLLVFVRKSLNSIEFRECREEILKFLCIFLEKMGQKIAPYSVEIKNTCTSVYTKDRAAKCKIPALDLLIKLLQTFRSSRLMDEFKIGELFSKFYGELALKKKIPDTVLEKVYELLGLLGEVHPSEMINNAENLFRAFLGELKTQMTSAVREPKLPVLAGCLKGLSSLLCNFTKSMEEDPQTSREIFNFVLKAIRPQIDLKRYAVPSAGLRLFALHASQFSTCLLDNYVSLFEVLLKWCAHTNVELKKAALSALESFLKQVSNMVAKNAEMHKNKLQYFMEQFYGIIRNVDSNNKELSIAIRGYGLFAGPCKVINAKDVDFMYVELIQRCKQMFLTQTDTGDDRVYQMPSFLQSVASVLLYLDTVPEVYTPVLEHLVVMQIDSFPQYSPKMQLVCCRAIVKVFLALAAKGPVLRNCISTVVHQGLIRICSKPVVLPKGPESESEDHRASGEVRTGKWKVPTYKDYVDLFRHLLSSDQMMDSILADEAFFSVNSSSESLNHLLYDEFVKSVLKIVEKLDLTLEIQTVGEQENGDEAPGVWMIPTSDPAANLHPAKPKDFSAFINLVEFCREILPEKQAEFFEPWVYSFSYELILQSTRLPLISGFYKLLSITVRNAKKIKYFEGVSPKSLKHSPEDPEKYSCFALFVKFGKEVAVKMKQYKDELLASCLTFLLSLPHNIIELDVRAYVPALQMAFKLGLSYTPLAEVGLNALEEWSIYIDRHVMQPYYKDILPCLDGYLKTSALSDETKNNWEVSALSRAAQKGFNKVVLKHLKKTKNLSSNEAISLEEIRIRVVQMLGSLGGQINKNLLTVTSSDEMMKSYVAWDREKRLSFAVPFREMKPVIFLDVFLPRVTELALTASDRQTKVAACELLHSMVMFMLGKATQMPEGGQGAPPMYQLYKRTFPVLLRLACDVDQVTRQLYEPLVMQLIHWFTNNKKFESQDTVALLEAILDGIVDPVDSTLRDFCGRCIREFLKWSIKQITPQQQEKSPVNTKSLFKRLYSLALHPNAFKRLGASLAFNNIYREFREEESLVEQFVFEALVIYMESLALAHADEKSLGTIQQCCDAIDHLCRIIEKKHVSLNKAKKRRLPRGFPPSASLCLLDLVKWLLAHCGRPQTECRHKSIELFYKFVPLLPGNRSPNLWLKDVLKEEGVSFLINTFEGGGCGQPSGILAQPTLLYLRGPFSLQATLCWLDLLLAALECYNTFIGERTVGALQVLGTEAQSSLLKAVAFFLESIAMHDIIAAEKCFGTGAAGNRTSPQEGERYNYSKCTVVVRIMEFTTTLLNTSPEGWKLLKKDLCNTHLMRVLVQTLCEPASIGFNIGDVQVMAHLPDVCVNLMKALKMSPYKDILETHLREKITAQSIEELCAVNLYGPDAQVDRSRLAAVVSACKQLHRAGLLHNILPSQSTDLHHSVGTELLSLVYKGIAPGDERQCLPSLDLSCKQLASGLLELAFAFGGLCERLVSLLLNPAVLSTASLGSSQGSVIHFSHGEYFYSLFSETINTELLKNLDLAVLELMQSSVDNTKMVSAVLNGMLDQSFRERANQKHQGLKLATTILQHWKKCDSWWAKDSPLETKMAVLALLAKILQIDSSVSFNTSHGSFPEVFTTYISLLADTKLDLHLKGQAVTLLPFFTSLTGGSLEELRRVLEQLIVAHFPMQSREFPPGTPRFNNYVDCMKKFLDALELSQSPMLLELMTEVLCREQQHVMEELFQSSFRRIARRGSCVTQVGLLESVYEMFRKDDPRLSFTRQSFVDRSLLTLLWHCSLDALREFFSTIVVDAIDVLKSRFTKLNESTFDTQITKKMGYYKILDVMYSRLPKDDVHAKESKINQVFHGSCITEGNELTKTLIKLCYDAFTENMAGENQLLERRRLYHCAAYNCAISVICCVFNELKFYQGFLFSEKPEKNLLIFENLIDLKRRYNFPVEVEVPMERKKKYIEIRKEAREAANGDSDGPSYMSSLSYLADSTLSEEMSQFDFSTGVQSYSYSSQDPRPATGRFRRREQRDPTVHDDVLELEMDELNRHECMAPLTALVKHMHRSLGPPQGEEDSVPRDLPSWMKFLHGKLGNPIVPLNIRLFLAKLVINTEEVFRPYAKHWLSPLLQLAASENNGGEGIHYMVVEIVATILSWTGLATPTGVPKDEVLANRLLNFLMKHVFHPKRAVFRHNLEIIKTLVECWKDCLSIPYRLIFEKFSGKDPNSKDNSVGIQLLGIVMANDLPPYDPQCGIQSSEYFQALVNNMSFVRYKEVYAAAAEVLGLILRYVMERKNILEESLCELVAKQLKQHQNTMEDKFIVCLNKVTKSFPPLADRFMNAVFFLLPKFHGVLKTLCLEVVLCRVEGMTELYFQLKSKDFVQVMRHRDDERQKVCLDIIYKMMPKLKPVELRELLNPVVEFVSHPSTTCREQMYNILMWIHDNYRDPESETDNDSQEIFKLAKDVLIQGLIDENPGLQLIIRNFWSHETRLPSNTLDRLLALNSLYSPKIEVHFLSLATNFLLEMTSMSPDYPNPMFEHPLSECEFQEYTIDSDWRFRSTVLTPMFVETQASQGTLQTRTQEGSLSARWPVAGQIRATQQQHDFTLTQTADGRSSFDWLTGSSTDPLVDHTSPSSDSLLFAHKRSERLQRAPLKSVGPDFGKKRLGLPGDEVDNKVKGAAGRTDLLRLRRRFMRDQEKLSLMYARKGVAEQKREKEIKSELKMKQDAQVVLYRSYRHGDLPDIQIKHSSLITPLQAVAQRDPIIAKQLFSSLFSGILKEMDKFKTLSEKNNITQKLLQDFNRFLNTTFSFFPPFVSCIQDISCQHAALLSLDPAAVSAGCLASLQQPVGIRLLEEALLRLLPAELPAKRVRGKARLPPDVLRWVELAKLYRSIGEYDVLRGIFTSEIGTKQITQSALLAEARSDYSEAAKQYDEALNKQDWVDGEPTEAEKDFWELASLDCYNHLAEWKSLEYCSTASIDSENPPDLNKIWSEPFYQETYLPYMIRSKLKLLLQGEADQSLLTFIDKAMHGELQKAILELHYSQELSLLYLLQDDVDRAKYYIQNGIQSFMQNYSSIDVLLHQSRLTKLQSVQALTEIQEFISFISKQGNLSSQVPLKRLLNTWTNRYPDAKMDPMNIWDDIITNRCFFLSKIEEKLTPLPEDNSMNVDQDGDPSDRMEVQEQEEDISSLIRSCKFSMKMKMIDSARKQNNFSLAMKLLKELHKESKTRDDWLVSWVQSYCRLSHCRSRSQGCSEQVLTVLKTVSLLDENNVSSYLSKNILAFRDQNILLGTTYRIIANALSSEPACLAEIEEDKARRILELSGSSSEDSEKVIAGLYQRAFQHLSEAVQAAEEEAQPPSWSCGPAAGVIDAYMTLADFCDQQLRKEEENASVIDSAELQAYPALVVEKMLKALKLNSNEARLKFPRLLQIIERYPEETLSLMTKEISSVPCWQFISWISHMVALLDKDQAVAVQHSVEEITDNYPQAIVYPFIISSESYSFKDTSTGHKNKEFVARIKSKLDQGGVIQDFINALDQLSNPELLFKDWSNDVRAELAKTPVNKKNIEKMYERMYAALGDPKAPGLGAFRRKFIQTFGKEFDKHFGKGGSKLLRMKLSDFNDITNMLLLKMNKDSKPPGNLKECSPWMSDFKVEFLRNELEIPGQYDGRGKPLPEYHVRIAGFDERVTVMASLRRPKRIIIRGHDEREHPFLVKGGEDLRQDQRVEQLFQVMNGILAQDSACSQRALQLRTYSVVPMTSRLGLIEWLENTVTLKDLLLNTMSQEEKAAYLSDPRAPPCEYKDWLTKMSGKHDVGAYMLMYKGANRTETVTSFRKRESKVPADLLKRAFVRMSTSPEAFLALRSHFASSHALICISHWILGIGDRHLNNFMVAMETGGVIGIDFGHAFGSATQFLPVPELMPFRLTRQFINLMLPMKETGLMYSIMVHALRAFRSDPGLLTNTMDVFVKEPSFDWKNFEQKMLKKGGSWIQEINVAEKNWYPRQKICYAKRKLAGANPAVITCDELLLGHEKAPAFRDYVAVARGSKDHNIRAQEPESGLSEETQVKCLMDQATDPNILGRTWEGWEPWM

SEQ ID NO: 54139 - protein, 22 aa, Homo sapiens
KPIVFIIHSFLSAKITRLGLVA

SEQ ID NO: 54140 - protein, 178 aa, Homo sapiens
VLSTTEVDFAFTVWQSFPERIVGYPARSHFWDNSKERWGYTSKWTNDYSMVLTGAAIYHKYYHYLYSHYLPASLKNMVDQLANCEDILMNFLVSAVTKLPPIKVTQKKQYKETMMGQTSRASRWADPDHFAQRQSCMNTFASWFGYMPLIHSQMRLDPVLFKDQVSILRKKYRDIERL

SEQ ID NO: 54141 - protein, 398 aa, Homo sapiens
LLCCALVFLDISIKWTTQETFPPKYLHYDEETSHQLLCDKCPPGTYLKQHCTAKWKTVCAPCPDHYYTDSWHTSDECLYCSPVCKELQYVKQECNRTHNRVCECKEGRYLEIEFCLKHRSCPPGFGVVQAGTPERNTVCKRCPDGFFSNETSSKAPCRKHTNCSVFGLLLTQKGNATHDNICSGNSESTQKCGIDVTLCEEAFFRFAVPTKFTPNWLSVLVDNLPGTKVNAESVERIKRQHSSQEQTFQLLKLWKHQNKDQDIVKKIIQDIDLCENSVQRHIGHANLTFEQLRSLMESLPGKKVGAEDIEKTIKACKPSDQILKLLSLWRIKNGDQDTLKGLMHALKHSKTYHFPKTVTQSLKKTIRFLHSFTMYKLYQKLFLEMIGNQVQSVKISCL

SEQ ID NO: 54142 - protein, 108 aa, Homo sapiens
IENTTDCLSTMASVCRVMLETPEYRSRFTNEETVSFCLRVMVGVIILYDHVHPVGAFAKTSKIDMKGCIKVLKDQPPNSVEGLLNALRYTTKHLNDETTSKQIKSMLQ

SEQ ID NO: 54143 - protein, 107 aa, Homo sapiens
VVLMGLPLAQALDCHVCAYNGDNCFNPMRCPAMVAYCMTTRTYYTPTRMKVSKSCVPRCFETVYDGYSKHASTTSCCQYDLCNGTGLATPATLALAPILLATLWGLL

SEQ ID NO: 54144 - protein, 40 aa, Homo sapiens
LSLSRLSPEHRRLRSPAQYQVVLSERLQALVNSLCAGQSP

SEQ ID NO: 54145 - protein, 330 aa, Homo sapiens
LDEKSGSFVSDLSSYCNKEVYNKENLFNSLNYDVAAKKRKKDMLNSKTKTQYFHQEKWIYVHKGSTKERHGYCTLGEAFNRLDFSTAILDSRRFNYVVRLLELIAKSQLTSLSGIAQKNFMNILEKVVLKVLEDQQNIRLIRELLQTLYTSLCTLVQRVGKSVLVGNINMWVYRMETILHWQQQLNNIQITRPAFKGLTFTDLPLCLQLNIMQRLSDGRDLVSLGQAAPDLHVLSEDRLLWKKLCQYHFSERQIRKRLILSDKGQLDWKKMYFKLVRCYPRKEQYGDTLQLCKHCHILSWKGTDHPCTANNPESCSVSLSPQDFINLFKF

SEQ ID NO: 54146 - protein, 178 aa, Homo sapiens
MEALNTAQGARDFIYSLHSTERSCLLKELHRFESIAIAQEKLEAPPPTPGQLRYVFIHNAIPFIGFGFLDNAIMIVAGTHIEMSIGIILGISTMAAAALGNLVSDLAGLGLAGYVEALASRLGLSIPDLTPKQVDMWQTRLSTHLGKAVGVTIGCILGMFPLIFFGGGEEDEKLETKS

SEQ ID NO: 54147 - protein, 25 aa, Homo sapiens
LRFSMALAPGQRAIFSASRWALPFP

SEQ ID NO: 54148 - protein, 751 aa, Homo sapiens
IEKECSALGGLFQTIISDMKGSYPVWEDFINKAGKLQSQLRTTVVAAAAFLDAFQKVADMATNTRGGTREIGSALTRMCMRHRSIEAKLRQFSSALIDCLINPLQEQMEEWKKVANQLDKDHAKEYKKARQEIKKKSSDTLKLQKKAKKGRGDIQPQLDSALQDVNDKYLLLEETEKQAVRKALIEERGRFCTFISMLRPVIEEEISMLGEITHLQTISEDLKSLTMDPHKLPSSSEQVILDLKGSDYSWSYQTPPSSPSTTMSRKSSVCSSLNSVNSSDSRSSGSHSHSPSSHYRYRSSNLAQQAPVRLSSVSSHDSGFISQDAFQSKSPSPMPPEAPNQLSNGFSHYSLSSESHVGPTGAGLFPHCLPASRLLPRVTSVHLPDYAHYYTIGPGMFPSSQIPSWKDWAKPGPYDQPLVNTLQRRKEKREPDPNGGGPTTASGPPAAAEEAQRPRSMTVSAATRPGEEMEACEELALALSRGLQLDTQRSSRDSLQCSSGYSTQTTTPCCSEDTIPSQVSDYDYFSVSGDQEADQQEFDKSSTIPRNSDISQSYRRMFQAKRPASTAGLPTTLGPAMVTPGVATIRRTPSTKPSVRRGTIGAGPIPIKTPVIPVKTPTVPDLPGVLPAPPDGPEERGEHSPESPSVGEGPQGVTSMPSSMWSGQASVNPPLPGPKPSIPEEHRQAIPESEAEDQEREPPSATVSPGQIPESDPADLSPRDTPQGEDMLNAIRRGVKLKKTTTNDRSAPRFS

SEQ ID NO: 54149 - protein, 367 aa, Homo sapiens
KIQDWQSMYQSTHIPIPKFTPVDESVTFIGRLCREILRITDPKMTCHIDQLNTWYDMKTHQEVTSSRLFSEIQTTLGTFGLNGLDRLLCFMIVKELQNFLSMFQKIILRDRTVQDTLKTLMNAVSPLKSIVANSNKIYFSAIAKTQKIWTAYLEAIMKVGQMQILRQQIANELNYSCRFDSKHLAAALENLNKALLADIEAHYQDPSLPYPKEDNTLLYEITAYLEAAGIHNPLNKIYITTKRLPYFPIVNFLFLIAQLPKLQYNKNLGMVCRKPTDPVDWPPLVLGLLTLLKQFHSRYTEQFLALIGQFICSTVEQCTSQKIPEIPADVVGALLFLEDYVRYTKLPRRVAEAHVPNFIFDEFRTVL

SEQ ID NO: 54150 - protein, 6 aa, Homo sapiens
LGRCRF

SEQ ID NO: 54151 - protein, 32 aa, Homo sapiens
LTRDLGVLDVIFHPTQPWVFSSGADGTVRLFT

SEQ ID NO: 54152 - protein, 51 aa, Homo sapiens
IPLAWFVGRFFQGNYGNAAVWLSLIIGQPIAVLMYVHDYYVLNYEAPAAEA

SEQ ID NO: 54153 - protein, 58 aa, Homo sapiens
VDRRTLQNAVRNVLDGELLNRYLYLSTMERSELAKKIGTTPDIILDDLLETDRVTAHF

SEQ ID NO: 54154 - protein, 26 aa, Homo sapiens
LLHNVGLLGGWTVLLLLSLYEDDITF

SEQ ID NO: 54155 - protein, 222 aa, Homo sapiens
RMFHGIPATPGIGAPGNKPELYEEVKLYKNAREREKYDNMAELFAVVKTMQALEKAYIKDCVSPSEYTAACSRLLVQYKAAFRQVQGSEISSIDEFCRKFRLDCPLAMERIKEDRPITIKDDKGNLNRCIADVVSLFITVMDKLRLEIRAMDEIQPDLRELMETMHRMSHLPPDFEGRQTVSQWLQTLSGMSASDELDDSQVRQMLFDLESAYNAFNRFLHA

SEQ ID NO: 54156 - protein, 68 aa, Homo sapiens
VTILIVAVFTANTYGMWGGAMLGVAGLLSRLEEDRLLLLPKEDVCRWALAVGSWAYCRALHTQRLQWE

SEQ ID NO: 54157 - protein, 45 aa, Homo sapiens
LAFELSACFEYGPGAPALPSHVRWQGRRLALTMDLAPLLLAARSP

SEQ ID NO: 54158 - protein, 189 aa, Homo sapiens
RESSYGPEIDSHDFVLRMNKAPTAGFEADVGTKTTHHLVYPESFRELGDNVSMILVPFKTIDLEWVVSAITTGTISHTYIPVPAKIRVKQDKILIYHPAFIKYVFDNWLQGHGRYPSTGILSVIFSMHVCDEVDLYGFGADSKGNWHHYWENNPSAGAFRKTGVHDADFESNVTATLASINKIRIFKGR

SEQ ID NO: 54159 - protein, 243 aa, Homo sapiens
VFRAHVKHRKGAARLRAVDFAERHGYIKGIVKDIIHDPGRGAPLAKVVFRDPYRFKKRTELFIAAEGIHTGQFVYCGKKAQLNIGNVLPVGTMPEGTIVCCLEEKPGDRGKLARASGNYATVISHNPETKKTRVKLPSGSKKVISSANRAVVGVVAGGGRIDKPILKAGRAYHKYKAKRNCWPRVRGVAMNPVEHPFGGGNHQHIGKPSTIRRDAPAGRKVGLIAARRTGRLRGTKTVQEKEN

SEQ ID NO: 54160 - protein, 33 aa, Homo sapiens
ICIWDRPPGLADQRGSSSNVCCGGCNSIPASSW

SEQ ID NO: 54161 - protein, 76 aa, Homo sapiens
LPHVADFRWRVDVAISTSALARSLQPSVLMQLKLSDGSAYRFEVPTAKFQELRYSVALVLKEMADLEKRCERRLQD

SEQ ID NO: 54162 - protein, 21 aa, Homo sapiens
IQFGLLEEKRAHERQRPALGL

SEQ ID NO: 54163 - protein, 71 aa, Homo sapiens
VHMNDNVLHSAFEVGARKVVSCLSTCIFPDKTTYPIDETMIHNGPPHNSNFGYSYAKRMIDVQNRSSRPSC

SEQ ID NO: 54164 - protein, 59 aa, Homo sapiens
MDFHGEVTFDTTKSDGQFKKTASNSKLRTYLPDFRFTPFKQAVKETCAWFTDNYEQARK

SEQ ID NO: 54165 - protein, 554 aa, Homo sapiens
IALQVNGQQGGGSEPAAAAAVVAAGDKWKPPQGTDSIKMENGQSTAAKLGLPPLTPEQQEALQKAKKYAMEQSIKSVLVKQTIAHQQQQLTNLQMAAVTMGFGDPLSPLQSMAAQRQRALAIMCRVYVGSIYYELGEDTIRQAFAPFGPIKSIDMSWDSVTMKHKGFAFVEYEVPEAAQLALEQMNSVMLGGRNIKVGRPSNIGQAQPIIDQLAEEARAFNRIYVASVHQDLSDDDIKSVFEAFGKIKSCTLARDPTTGKHKGYGFIEYEKAQSSQDAVSSMNLFDLGGQYLRVGKAVTPPMPLLTPATPGGLPPAAAVAAAAATAKITAQEAVAGAAVLGTLGTPGLVSPALTLAQPLGTLPQAVMAAQAPGVITGVTPARPPIPVTIPSVGVVNPILASPPTLGLLEPKKEKEEEELFPESERPEMLSEQEHMSISGSSARHMVMQKLLRKQESTVMVLRNMVDPKDIDDDLEGEVTEECGKFGAVNRVIIYQEKQGEEEDAEIIVKIFVEFSIASETHKAIQALNGRWFAGRKVVAEVYDQERFDNSDLSA

SEQ ID NO: 54166 - protein, 4683 aa, Homo sapiens
VAGMLMPRDQLRAIYEVLFREGVMVAKKDRRPRSLHPHVPGVTNLQVMRAMASLRARGLVRETFAWCHFYWYLTNEGIAHLRQYLHLPPEIVPASLQRVRRPVAMVMPARRTPHVQAVQGPLGSPPKRGPLPTEEQRVYRRKELEEVSPETPVVPATTQRTLARPGPEPAPATDERDRVQKKTFTKWVNKHLIKAQRHISDLYEDLRDGHNLISLLEVLSGDSLPREKGRMRFHKLQNVQIALDYLRHRQVKLVNIRNDDIADGNPKLTLGLIWTIILHFQISDIQVSGQSEDMTAKEKLLLWSQRMVEGYQGLRCDNFTSSWRDGRLFNAIIHRHKPLLIDMNKVYRQTNLENLDQAFSVAERDLGVTRLLDPEDVDVPQPDEKSIITYVSSLYDAMPRVPDVQDGVRANELQLRWQEYRELVLLLLQWMRHHTAAFEERRFPSSFEEIEILWSQFLKFKEMELPAKEADKNRSKGIYQSLEGAVQAGQLKVPPGYHPLDVEKEWGKLHVAILEREKQLRSEFERLECLQRIVTKLQMEAGLCEEQLNQADALLQSDVRLLAAGKVPQRAGEVERDLDKADSMIRLLFNDVQTLKDGRHPQGEQMYRRVYRLHERLVAIRTEYNLRLKAGVAAPATQVAQVTLQSVQRRPELEDSTLRYLQDLLAWVEENQHRVDGAEWGVDLPSVEAQLGSHRGLHQSIEEFRAKIERARSDEGQLSPATRGAYRDCLGRLDLQYAKLLNSSKARLRSLESLHSFVAAATKELMWLNEKEEEEVGFDWSDRNTNMTAKKESYSALMRELELKEKKIKELQNAGDRLLREDHPARPTVESFQAALQTQWSWMLQLCCCIEAHLKENAAYFQFFSDVREAEGQLQKLQEALRRKYSCDRSATVTRLEDLLQDAQDEKEQLNEYKGHLSGLAKRAKAVVQLKPRHPAHPMRGRLPLLAVCDYKQVEVTVHKGDECQLVGPAQPSHWKVLSSSGSEAAVPSVCFLVPPPNQEAQEAVTRLEAQHQALVTLWHQLHVDMKSLLAWQSLRRDVQLIRSWSLATFRTLKPEEQRQALHSLELHYQAFLRDSQDAGGFGPEDRLMAEREYGSCSHHYQQLLQSLEQGAQEESRCQRCISELKDIRLQLEACETRTVHRLRLPLDKEPARECAQRIAEQQKAQAEVEGLGKGVARLSAEAEKVLALPEPSPAAPTLRSELELTLGKLEQVRSLSAIYLEKLKTISLVIRGTQGAEEVLRAHEEQLKEAQAVPATLPELEATKASLKKLRAQAEAQQPTFDALRDELRGAQEVGERLQQRHGERDVEVERWRERVAQLLERWQAVLAQTDVRQRELEQLGRQLRYYRESADPLGAWLQDARRRQEQIQAMPLADSQAVREQLRQEQALLEEIERHGEKVEECQRFAKQYINAIKDYELQLVTYKAQLEPVASPAKKPKVQSGSESVIQEYVDLRTHYSELTTLTSQYIKFISETLRRMEEEERLAEQQRAEERERLAEVEAALEKQRQLAEAHAQAKAQAEREAKELQQRMQEEVVRREEAAVDAQQQKRSIQEELQQLRQSSEAEIQAKARQAEAAERSRLRIEEEIRVVRLQLEATERQRGGAEGELQALRARAEEAEAQKRQAQEEAERLRRQVQDESQRKRQAEVELASRVKAEAEAAREKQRALQALEELRLQAEEAERRLRQAEVERARQVQVALETAQRSAEAELQSKRASFAEKTAQLERSLQEEHVAVAQLREEAERRAQQQAEAERAREEAERELERWQLKANEALRLRLQAEEVAQQKSLAQAEAEKQKEEAEREARRRGKAEEQAVRQRELAEQELEKQRQLAEGTAQQRLAAEQELIRLRAETEQGEQQRQLLEEELARLQREAAAATQKRQELEAELAKVRAEMEVLLASKARAEEESRSTSEKSKQRLEAEAGRFRELAEEAARLRALAEEAKRQRQLAEEDAARQRAEAERVLAEKLAAIGEATRLKTEAEIALKEKEAENERLRRLAEDEAFQRRRLEEQAAQHKADIEERLAQLRKASDSELERQKGLVEDTLRQRRQVEEEILALKASFEKAAAGKAELELELGRIRSNAEDTLRSKEQAELEAARQRQLAAEEERRRREAEERVQKSLAAEEEAARQRKAALEEVERLKAKVEEARRLRERAEQESARQLQLAQEAAQKRLQAEEKAHAFAVQQKEQELQQTLQQEQSVLDQLRGEAEAARRAAEEAEEARVQAEREAAQSRRQVEEAERLKQSAEEQAQARAQAQAAAEKLRKEAEQEAARRAQAEQAALRQKQAADAEMEKHKKFAEQTLRQKAQVEQELTTLRLQLEETDHQKNLLDEELQRLKAEATEAARQRSQVEEELFSVRVQMEELSKLKARIEAENRALILRDKDNTQRFLQEEAEKMKQVAEEAARLSVAAQEAARLRQLAEEDLAQQRALAEKMLKEKMQAVQEATRLKAEAELLQQQKELAQEQARRLQEDKEQMAQQLAEETQGFQRTLEAERQRQLEMSAEAERLKLRVAEMSRAQARAEEDAQRFRKQAEEIGEKLHRTELATQEKVTLVQTLEIQRQQSDHDAERLREAIAELEREKEKLQQEAKLLQLKSEEMQTVQQEQLLQETQALQQSFLSEKDSLLQRERFIEQEKAKLEQLFQDEVAKAQQLREEQQRQQQQMEQERQRLVASMEEARRRQHEAEEGVRRKQEELQQLEQQRRQQEELLAEENQRLREQLQLLEEQHRAALAHSEEVTASQVAATKTLPNGRDALDGPAAEAEPEHSFDGLRRKVSAQRLQEAGILSAEELQRLAQGHTTVDELARREDVRHYLQGRSSIAGLLLKATNEKLSVYAALQRQLLSPGTALILLEAQAASGFLLDPVRNRRLTVNEAVKEGVVGPELHHKLLSAERAVTGYKDPYTGQQISLFQAMQKGLIVREHGIRLLEAQIATGGVIDPVHSHRVPVDVAYRRGYFDEEMNRVLADPSDDTKGFFDPNTHENLTYLQLLERCVEDPETGLCLLPLTDKAAKGGELVYTDSEARDVFEKATVSAPFGKFQGKTVTIWEIINSEYFTAEQRRDLLRQFRTGRITVEKIIKIIITVVEEQEQKGRLCFEGLRSLVPAAELLESRVIDRELYQQLQRGERSVRDVAEVDTVRRALRGANVIAGVWLEEAGQKLSIYNALKKDLLPSDMAVALLEAQAGTGHIIDPATSARLTVDEAVRAGLVGPEFHEKLLSAEKAVTGYRDPYTGQSVSLFQALKKGLIPREQGLRLLDAQLSTGGIVDPSKSHRVPLDVACARGCLDEETSRALSAPRADAKAYSDPSTGEPATYGELQQRCRPDQLTGLSLLPLSEKAARARQEELYSELQARETFEKTPVEVPVGGFKGRTVTVWELISSEYFTAEQRQELLRQFRTGKVTVEKVIKILITIVEEVETLRQERLSFSGLRAPVPASELLASGVLSRAQFEQLKDGKTTVKDLSELGSVRTLLQGSGCLAGIYLEDTKEKVSIYEAMRRGLLRATTAALLLEAQAATGFLVDPVRNQRLYVHEAVKAGVVGPELHEQLLSAEKAVTGYRDPYSGSTISLFQAMQKGLVLRQHGIRLLEAQIATGGIIDPVHSHRVPVDVAYQRGYFSEEMNRVLADPSDDTKGFFDPNTHENLTYRQLLERCVEDPETGLRLLPLKGAEKAEVVETTQVYTEEETRRAFEETQIDIPGGGSHGGSTMSLWEVMQSDLIPEEQRAQLMADFQAGRVTKERMIIIIIEIIEKTEIIRQQGLASYDYVRRRLTAEDLFEARIISLETYNLLREGTRSLREALEAESAWCYLYGTGSVAGVYLPGSRQTLSIYQALKKGLLSAEVARLLLEAQAATGFLLDPVKGERLTVDEAVRKGLVGPELHDRLLSAERAVTGYRDPYTEQTISLFQAMKKELIPTEEALRLLDAQLATGGIVDPRLGFHLPLEVAYQRGYLNKDTHDQLSEPSEVRSYVDPSTDERLSYTQLLRRCRRDDGTGQLLLPLSDARKLTFRGLRKQITMEELVRSQVMDEATALQLREGLTSIEEVTKNLQKFLEGTSCIAGVFVDATKERLSVYQAMKKGIIRPGTAFELLEAQAATGYVIDPIKGLKLTVEEAVRMGIVGPEFKDKLLSAERAVTGYKDPYSGKLISLFQAMKKGLILKDHGIRLLEAQIATGGIIDPEESHRLPVEVAYKRGLFDEEMNEILTDPSDDTKGFFDPNTEENLTYLQLMERCITDPQTGLCLLPLKEKKRERKTSSKSSVRKRRVVIVDPETGKEMSVYEAYRKGLIDHQTYLELSEQECEWEEITISSSDGVVKSMIIDRRSGRQYDIDDAIAKNLIDRSALDQYRAGTLSITEFADMLSGNAGGFRSRSSSVGSSSSYPISPAVSRTQLASWSDPTEETGPVAGILDTETLEKVSITEAMHRNLVDNITGQRLLEAQACTGGIIDPSTGERFPVTDAVNKGLVDKIMVDRINLAQKAFCGFEDPRTKTKMSAAQALKKGWLYYEAGQRFLEVQYLTGGLIEPDTPGRVPLDEALQRGTVDARTAQKLRDVGAYSKYLTCPKTKLKISYKDALDRSMVEEGTGLRLLEAAAQSTKGYYSPYSVSGSGSTAGSRTGSRTGSRAGSRRGSFDATGSGFSMTFSSSSYSSSGYGRRYASGSSASLGGPESAVA

SEQ ID NO: 54167 - protein, 5 aa, Homo sapiens
MSPRH

SEQ ID NO: 54168 - protein, 67 aa, Homo sapiens
LLAQPGCNGHLEDNDGSTALSIALEAGHKDIAVLLYAHVNFAKAQSPGTPRLGRKTSPGPTHRGSFD

SEQ ID NO: 54169 - protein, 920 aa, Homo sapiens
RQETEEKILLDPNSEEVSEKDAKQIIETAKQDVDDEYSMQYSARGSQSYYTVAHAISERVEKQSALLINGTLKHYQLQGLEWMVSLYNNNLNGILADEMGLGKTIQTIALITYLMEHKRLNGPYLIIVPLSTLSNWTYEFDKWAPSVVKISYKGTPAMRRSLVPQLRSGKFNVLLTTYEYIIKDKHILAKIRWKYMIVDEGHRMKNHHCKLTQVLNTHYVAPRRILLTGTPLQNKLPELWALLNFLLPTIFKSCSTFEQWFNAPFAMTGERVDLNEEETILIIRRLHKVLRPFLLRRLKKEVESQLPEKVEYVIKCDMSALQKILYRHMQAKGILLTDGSEKDKKGKGGAKTLMNTIMQLRKICNHPYMFQHIEESFAEHLGYSNGVINGAELYRASGKFELLDRILPKLRATNHRVLLFCQMTSLMTIMEDYFAFRNFLYLRLDGTTKSEDRAALLKKFNEPGSQYFIFLLSTRAGGLGLNLQAADTVVIFDSDWNPHQDLQAQDRAHRIGQQNEVRVLRLCTVNSVEEKILAAAKYKLNVDQKVIQAGMFDQKSSSHERRAFLQAILEHEEENEEEDEVPDDETLNQMIARREEEFDLFMRMDMDRRREDARNPKRKPRLMEEDELPSWIIKDDAEVERLTCEEEEEKIFGRGSRQRRDVDYSDALTEKQWLRAIEDGNLEEMEEEVRLKKRKRRRNVDKDPAKEDVEKAKKRRGRPPAEKLSPNPPKLTKQMNAIIDTVINYKDSSGRQLSEVFIQLPSRKELPEYYELIRKPVDFKKIKERIRNHKYRSLGDLEKDVMLLCHNAQTFNLEGSQIYEDSIVLQSVFKSARQKIAKEEESEDESNEEEEEEDEEESESEAKSVKVKIKLNKKDDKGRDKGKGKKRPNRGKAKPVVSDFDSDEEQDEREQSEGSGTDDE

SEQ ID NO: 54170 - protein, 310 aa, Homo sapiens
VFPSSPRCPQLPGGGAQMYSHGIELACQKQKEFVKSSVACKWNLAEAQQKLGSLALHNSESLDQEHAKAQTAVSELRQREEEWRQKEEALVQREKMCLWSTDAISKDVFNKSFINQDKRKDTEDEDKSESFMQKYEQKIRHFGMLSRWDDSQRFLSDHPYLVCEETAKYLILWCFHLEAEKKGALMEQIAHQAVVMQFIMEMAKNCNVDPRGCFRLFFQKAKAEEEGYFEAFKNELEAFKSRVRLYSQSQSFQPMTVQNHVPHSGVGSIGLLESLPQNPDYLQYSISTALCSLNSVVHKEDDEPKMMDTV

SEQ ID NO: 54171 - protein, 58 aa, Homo sapiens
LLGPLSPYTIEFLRHLKSFFQIMFKIETKPCGEELKGGDKVLMTCVGIGFSNLSKTLK

SEQ ID NO: 54172 - protein, 94 aa, Homo sapiens
LRLKPPPGRNFSCVFWNTHVRELTLASIDLQSQMEPRTHPTWLLHIFIPFCIIAFIFIATVIALRKQLCQKLYSSKDTTKRPVTTTKREVNSAI

SEQ ID NO: 54173 - protein, 85 aa, Homo sapiens
LSPTKDFWLHANNKEHSVELHKCEKPLPDQAFFVLHNMHSNCVSFECKTDPGVFIGVKDNHLALIKVDSSENLCTENILFKLSET

SEQ ID NO: 54174 - protein, 21 aa, Homo sapiens
IPNEILQTLLDLFFPGYSKGR

SEQ ID NO: 54175 - protein, 10 aa, Homo sapiens
VSALSSASIW

SEQ ID NO: 54176 - protein, 104 aa, Homo sapiens
IESIKWMIEEKATITSRGSSLSGSLCSLLESQSTSLRGSYNSLHDGSDGLDGISVGSYLDTLADDVPGHQTPSDLDQFSDSSLIEDSQALHKRPKLDSEYYCFG

SEQ ID NO: 54177 - protein, 142 aa, Homo sapiens
IQLLWDNINLHQEPREPLYVSWRNFNSEKKSSLLSEEQQETSTLVETIRQSIQHNNVLKPINLLSQQMKPGMKRQRSLYREILFLSLVSLGRENIDIEAFDNEYGIAYNSLSSEILERLQKIDAPPSASVEWCRKCFGAPLI

SEQ ID NO: 54178 - protein, 63 aa, Homo sapiens
LLLQKEPWKEQTQKFIDWLFSIMESPKEALSAQSRDLLKATLLSLRVLPEFKKKAVWTRAYGW

SEQ ID NO: 54179 - protein, 237 aa, Homo sapiens
IEEGELILSVNILYPVIFHKHKEHKPYQTMLVLGSQKLTQLRDSIRCVSDLQIGGEFSNTPDQAPEHISKDLYKSAFFYFEGTFYNDKRYPECRDLSRTIIEWSESHDRGYGKFQTARMEDFTFNDLCIKLGFPYLYCHQGDCEHVIVITDIRLVHHDDCLDRTLYPLLIKKHWLWTRKCFVCKMYTARWVTNNDSFAPEDPCFFCDVCFRMLHYDSEGNKLGEFLAYPYVDPGTFN

SEQ ID NO: 54180 - protein, 169 aa, Homo sapiens
VQKSQSTAQNLTSDIQRLQLDLQKMELLESKMTEEQHSLKSKIKQMTTDLEIYNDLPALKSSGEEKIKKLHQERMILSTHRNAFKKIMEKQNIEYEALKTQLQENETHSQLTNLERKWQHLEQNNFAMKEFIATKSQESDYQPIKKNVTKQIAEYNKTIVDALHSTSGN

SEQ ID NO: 54181 - protein, 50 aa, Homo sapiens
LSPRDDGYSTKDSYSSRDYPSSHDTRAYAPPPRDYTYRDYGHSSSRVDYP

SEQ ID NO: 54182 - protein, 16 aa, Homo sapiens
RTWTEASLLFTWHWEH

SEQ ID NO: 54183 - protein, 194 aa, Homo sapiens
IFGPPNTLYEGGYFKAHIKFPIDYPYSPPTFRFLTKMWHPNIYENGDVCISILHPPVDDPQSGELPSERWNPTQNVRTILLSVISLLNEPNTFSPANVDASVMFRKWRDSKGKDKEYAEIIRKQVSATKAEAEKDGVKVPTTLAEYCIKTKVPSNDNSSDLLYDDLYDDDIDDEDEEEEDADCYDDDDSGNEES

SEQ ID NO: 54184 - protein, 420 aa, Homo sapiens
IAEAEAKVNSKSGPEGDSKMSFSKTHSTATMPPPINPILASLQHNSILTPTRVSSSATKQKVLSPPHIKADFNLADFECEEDPFDNLELKTIDEKEELRNILVGTTGPIMAQLLDNNLPRGGSGSVLQDEEVLASLERATLDFKPLHKPNGFITLPQLGNCEKMSLSSKVSLPPIPAVSNIKSLSFPKLDSDDSNQKTAKLASTFHSTSCLRNGTFQNSLKPSTQSSASELNGHHTLGLSALNLDSGTEMPALTSSQMPSLSVLSVCTEESSPPNTGPTVTPPNFSVSQVPNMPSCPQAYSELQMLSPSERQCVETVVNMGYSYECVLRAMKKKGENIEQILDYLFAHGQLCEKGFDPLLVEEALEMHQCSEEKMMEFLQLMSKFKEMGFELKDIKEVLLLHNNDQDNALEDLMARAGAS

SEQ ID NO: 54185 - protein, 408 aa, Homo sapiens
VATALVSASSPCPQAWGPPGVQYGQPGRSVKLCCPGVTAGDPVSWFRDGEPKLLQGPDSGLGHELVLAQADSTDEGTYICQTLDGALGGTVTLQLGYPPARPVVSCQAADYENFSCTWSPSQISGLPTRYLTSYRKKTVLGADSQRRSPSTGPWPCPQDPLGAARCVVHGAEFWSQYRINVTEVNPLGASTRLLDVSLQSILRPDPPQGLRVESVPGYPRRLRASWTYPASWPCQPHFLLKFRLQYRPAQHPAWSTVEPAGLEEVITDAVAGLPHAVRVSARDFLDAGTWSTWSPEAWGTPSTGTIPKEIPAWGQLHTQPEVEPQVDSPAPPRPSLQPHPRLLDHRDSVEQVAVLASLGILSFLGLVAGALALGLWLRLRRGGKDGSPKPGFLASVIPVDRRPGAPNL

SEQ ID NO: 54186 - protein, 42 aa, Homo sapiens
IPKAWVLGLSDSSGQASRSSKPVEDPGGLRQIPPIILSCWCG

SEQ ID NO: 54187 - protein, 16 aa, Homo sapiens
IRKENPVVVGEKIQKI

SEQ ID NO: 54188 - protein, 265 aa, Homo sapiens
LSGVLGDRANPDLRAHPGNAAHPGSGATEPRRRPPLKDQRERTRAGSLPLGALYTAAVAAFVLYKCLQGKDETAVLHEEASKQQPLQSEQQLAQLTQQLAQTEQHLNNLMAQLDPLFERVTTLAGAQQELLNMKLWTIHELLQDSKPDKDMEASEPGEGSGGESAGGGDKVSETGTFLISPHTEASRPLPEDFCLKEDEEEIGDSQAWEEPTNWSTETWNLATSWEVGRGLRRRCSQAVAKGPSHSLGWEGGTTAEGRLKQSLFS

SEQ ID NO: 54189 - protein, 201 aa, Homo sapiens
KKVYVGGLESRVLKYTAQNMELQNKVQLLEEQNLSLLDQLRKLQAMVIEISNKTSSSSTCILVLLVSFCLLLVPAMYSSDTRGSLPAEHGVLSRQLRALPSEDPYQLELPALQSEVPKDSTHQWLDGSDCVLQAPGNTSCLLHYMPQAPSAEPPLEWPFPDLFSEPLCRGPILPLQANLTRKGGWLPTGSPSVILQDRYSG

SEQ ID NO: 54190 - protein, 120 aa, Homo sapiens
RGSLPAEHGVLSRQLRALPSEDPYQLELPALQSEVPKDSTHQWLDGSDCVLQAPGNTSCLLHYMPQAPSAEPPLEWPFPDLFSEPLCRGPILPLQANLTRKGGWLPTGSPSVILQDRYSG

SEQ ID NO: 54191 - protein, 140 aa, Homo sapiens
IGDAYMVVSGLPGRNGQRHAPEIARMALALLDAVSSFRIRHRPHDQLRLRIGVHTGPVCAGVVGLKMPRYCLFGDTVNTASRMESNGQALKIHVSSTTKDALDELGCFQLELRGDVEMKGKGKMRTYWLLGERKGPPGLL

SEQ ID NO: 54192 - protein, 13 aa, Homo sapiens
IDIVENRFIGMKS

SEQ ID NO: 54193 - protein, 369 aa, Homo sapiens
LALKYHPDKNPNEGEKFKQISQAYEVLSDAKKRELYDKGGEQAIKEGGAGGGFGSPMDIFDMFFGGGGRMQRERRGKNVVHQLSVTLEDLYNGATRKLALQKNVICDKCEGRGGKKGAVECCPNCRGTGMQIRIHQIGPGMVQQIQSVCMECQGHGERISPKDRCKSCNGRKIVREKKILEVHIDKGMKDGQKITFHGEGDQEPGLEPGDIIIVLDQKDHAVFTRRGEDLFMCMDIQLVEALCGFQKPISTLDNRTIVITSHPGQIVKHGDIKCVLNEGMPIYRRPYEKGRLIIEFKVNFPENGFLSPDKLSLLEKLLPERKEVEETDEMDQVELVDFDPNQERRRHYNGEAYEDDEHHPRGGVQCQTS

SEQ ID NO: 54194 - protein, 406 aa, Homo sapiens
VERDRVYLASLETLDNGKPFQESYALDLDEVIKVYRYFAGWADKWHGKTIPMDGQHFCFTRHEPVGVCGQIIPWNFPLVMQGWKLAPALATGNTVVMKVAEQTPLSALYLASLIKEAGFPPGVVNIITGYGPTAGAAIAQHVDVDKVAFTGSTEVGHLIQKAAGDSNLKRVTLELGGKSPSIVLADADMEHAVEQCHEALFFNMGQCCCAGSRTFVEESIYNEFLERTVEKAKQRKVGNPFELDTQQGPQVDKEQFERVLGYIQLGQKEGAKLLCGGERFGERGFFIKPTVFGGVQDDMRIAKEEIFGPVQPLFKFKKIEEVVERANNTRYGLAAAVFTRDLDKAMYFTQALQAGTVWVNTYNIVTCHTPFGGFKESGNGRELGEDGLKAYTEVKTVTIKVPQKNS

SEQ ID NO: 54195 - protein, 74 aa, Homo sapiens
MNEEGKLYAKKECNEDCNFKELILENHYNTYAAAKWTHNGGEMFVALNQKGIPVRGKKTKKEQKTAHFLPMAIT

SEQ ID NO: 54196 - protein, 325 aa, Homo sapiens
VRLMKVFVTRRIPAEGRVALARAADCEVEQWDSDEPIPAKELERGVAGAHGLLCLLSDHVDKRILDAAGANLKVISTMSVGIDHLALDEIKKRGIRVGYTPDVLTDTTAELAVSLLLTTCRRLPEAIEEVKNGGWTSWKPLWLCGYGLTQSTVGIIGLGRIGQAIARRLKPFGVQRFLYTGRQPRPEEAAEFQAEFVSTPELAAQSDFIVVACSLTPATEGLCNKDFFQKMKETAVFINISRGDVVNQDDLYQALASGKIAAAGLDVTSPEPLPTNHPLLTLKNCVILPHIGSATHRTRNTMSLLAANNLLAGLRGEPMPSELKL

SEQ ID NO: 54197 - protein, 157 aa, Homo sapiens
LPSDVESRDRQARCIWFLDTLIKFRAHRVVKRKSALGPGVPHIINTKLLKHFTCLTYNNGRLRNLISDSMKAKITAYVIILALHIHDFQIDLTVLQRDLKLSEKRMMEIAKAMRLKISKRRVSVAAGSEEDHKLGTLSLPLPPAQTSDRLAKRRKIT

SEQ ID NO: 54198 - protein, 36 aa, Homo sapiens
LYSHNDVVLTTKFSPTHCQIASGCLSGRVSLYQPKF

SEQ ID NO: 54199 - protein, 83 aa, Homo sapiens
LMFLSAIVMMKNRRSITVEQHIGNIFMFSKVANAILFFRLDIRMGLLYITLCIVFLMTCKPPPPHIWALSISSTSMIKPLMRN

SEQ ID NO: 54200 - protein, 61 aa, Homo sapiens
KGKGTRDKVLIRIMVSRSEVDMLKIRSEFKRKYGKSLYYYIQQDTKGDYQKALLYLCGGDD

SEQ ID NO: 54201 - protein, 314 aa, Homo sapiens
VMPNTAMKKKVLLMGKSGSGKTSMRSIIFANYIARDTRRLGATIDVEHSHVRFLGNLVLNLWDCGGQDTFMENYFTSQRDNIFRNVEVLIYVFDVESRELEKDMHYYQSCLEAILQNSPDAKIFCLVHKMDLVQEDQRDLIFKEREEDLRRLSRPLECACFRTSIWDETLYKAWSSIVYQLIPNVQQLEMNLRNFAQIIEADEVLLFERATFLVISHYQCKEQRDVHRFEKISNIIKQFKLSCSKLAASFQSMEVRNSNFAAFIDIFTSNTYVMVVMSDPSIPSAATLINIRNARKHFEKLERVDGPKHSLLMR

SEQ ID NO: 54202 - protein, 944 aa, Homo sapiens
LAPGSAGALCCNHSKDNQMCRDVCEQIFSSKSESRLKHLLQRAPDYCPETMVEIWNCMNSSLPGVFKKSDGWVGLGCCELAIALECRQACKQASSKNDISKVCRKEYENALFSCISRNEMGSVCCSYAGHHTNCREYCQAIFRTDSSPGPSQIKAVENYCASISPQLIHCVNNYTQSYPMRNPTDSLYCCDRAEDHACQNACKRILMSKKTEMEIVDGLIEGCKTQPLPQDPLWQCFLESSQSVHPGVTVHPPPSTGLDGAKLHCCSKANTSTCRELCTKLYSMSWGNTQSWQEFDRFCEYNPVEVSMLTCLADVREPCQLGCRNLTYCTNFNNRPTELFRSCNAQSDQGAMNDMKLWEKGSIKMPFINIPVLDIKKCQPEMWKAIACSLQIKPCHSKSRGSIICKSDCVEILKKCGDQNKFPEDHTAESICELLSPTDDLKNCIPLDTYLRPSTLGNIVEEVTHPCNPNPCPANELCEVNRKGCPSGDPCLPYFCVQGCKLGEASDFIVRQGTLIQVPSSAGEVGCYKICSCGQSGLLENCMEMHCIDLQKSCIVGGKRKSHGTSFSIDCNVCSCFAGNLVCSTRLCLSEHSSEDDRRTFTGLPCNCADQFVPVCGQNGRTYPSACIARCVGLQDHQFEFGSCMSKDPCNPNPCQKNQRCIPKPQVCLTTFDKFGCSQYECVPRQLACDQVQDPVCDTDHMEHNNLCTLYQRGKSLSYKGPCQPFCRATEPVCGHNGETYSSVCAAYSDRVAVDYYGDCQAVGVLSEHSSVAECASVKCPSLLAAGCKPIIPPGACCPLCAGMLRVLFDKEKLDTIAKVTNKKPITVLEILQKIRMHVSVPQCDVFGYFSIESEIVILIIPVDHYPKALQIEACNKEAEKIESLINSDSPTLASHVPLSALIISQVQVSSSVPSAGVRARPSCHSLLLPLSLGLALHLLWTYN

SEQ ID NO: 54203 - protein, 141 aa, Homo sapiens
LKAHNEYRQKHGVPPLKLCKNLNREAQQYSEALASTRILKHSPESSRGQCGENLAWASYDQTGKEVADRWYSEIKNYNFQQPGFTSGTGHFTAMVWKNTKKMGVGKASASDGSSFVVARYFPAGNVVNEGFFEENVLPPKK

SEQ ID NO: 54204 - protein, 208 aa, Homo sapiens
VAGAGEEDPAAAFLAQQESEIAGIENDEAFAILDGGAPGPQPHGEPPGGPDAVDGVMNGEYYQESNGPTDSYAAISQVDRLQSEPESIRKWREEQMERLEALDANSRKQEAEWKEKAIKELEEWYARQDEQLQKTKANNSTNINHPCYSLEQAAEEAFVNDIDESSPGTEWERVARLCDFNPKSSKQAKDVSRMRSVLISLKQAPLVH

SEQ ID NO: 54205 - protein, 66 aa, Homo sapiens
LGIGTNQKQSLQQSRPLFIMEEPMDTSEPLSALPFTGQQSFEPSGKFGQYPSMQMNHIQALGKWRT

SEQ ID NO: 54206 - protein, 165 aa, Homo sapiens
LSDNDVEKSASPKRIDFIPVSPAPSPTRGIGKQCFSPSLQSFVSSNGLPPSPIPSPTTRFTTRRSQSPINCIRPSVLGPLKRKCEMETEYQPKRFFQGITNMLSSDVAQLSDPGVCVSSDTLDGNSSSAGSSCNSPAKVSTTTDSPVSPAQAASPFIPLDELSSK

SEQ ID NO: 54207 - protein, 62 aa, Homo sapiens
TPNKQIWLSSPSSGPKRYDWTGKNWVYSHDGVSLHELLAAELTKALKTKLDLSSLAYSGKDA

SEQ ID NO: 54208 - protein, 1188 aa, Homo sapiens
VRGDRGFPPRRELSGWLRAPGMEELIWEQYTVTLQKDSKRGFGIAVSGGRDNPHFENGETSIVISDVLPGGPADGLLQENDRVVMVNGTPMEDVLHSFAVQQLRKSGKVAAIVVKRPRKVQVAALQASPPLDQDDRAFEVMDEFDGRSFRSGYSERSRLNSHGGRSRSWEDSPERGRPHERARSRERDLSRDRSRGRSLERGLDQDHARTRDRSRGRSLERGLDHDFGPSRDRDRDRSRGRSIDQDYERAYHRAYDPDYERAYSPEYRRGARHDARSRGPRSRSREHPHSRSPSPEPRGRPGPIGVLLMKSRANEEYGLRLGSQIFVKEMTRTGLATKDGNLHEGDIILKINGTVTENMSLTDARKLIEKSRGKLQLVVLRDSQQTLINIPSLNDSDSEIEDISEIESNRSFSPEERRHQYSDYDYHSSSEKLKERPSSREDTPSRLSRMGATPTPFKSTGDIAGTVVPETNKEPRYQEDPPAPQPKAAPRTFLRPSPEDEAIYGPNTKMVRFKKGDSVGLRLAGGNDVGIFVAGIQEGTSAEQEGLQEGDQILKVNTQDFRGLVREDAVLYLLEIPKGEMVTILAQSRADVYRDILACGRGDSFFIRSHFECEKETPQSLAFTRGEVFRVVDTLYDGKLGNWLAVRIGNELEKGLIPNKSRAEQMASVQNAQRDNAGDRADFWRMRGQRSGVKKNLRKSREDLTAVVSVSTKFPAYERVLLREAGFKRPVVLFGPIADIAMEKLANELPDWFQTAKTEPKDAGSEKSTGVVRLNTVRQIIEQDKHALLDVTPKAVDLLNYTQWFPIVIFFNPDSRQGVKTMRQRLNPTSNKSSRKLFDQANKLKKTCAHLFTATINLNSANDSWFGSLKDTIQHQQGEAVWVSEGKMEGMDDDPEDRMSYLTAMGADYLSCDSRLISDFEDTDGEGGAYTDNELDEPAEEPLVSSITRSSEPVQHEESIRKPSPEPRAQMRRAASSDQLRDNSPPPAFKPEPPKAKTQNKEESYDFSKSYEYKSNPSAVAGNETPGASTKGYPPPVAAKPTFGRSILKPSTPIPPQEGEEVGESSEEQDNAPKSVLGKVKIFEKMDHKARLQRMQELQEAQNARIEIAQKHPDIYAVPIKTHKPDPGTPQHTSSRPPEPQKAPSRPYQDTRGSYGSDAEEEEYRQQLSEHSKRGYYGQSARYRDTEL

SEQ ID NO: 54209 - protein, 29 aa, Homo sapiens
IPFTRSSQSQRAGNLHPFLVILPETRPCC

SEQ ID NO: 54210 - protein, 19 aa, Homo sapiens
RAITGASLADIMAKRNQKP

SEQ ID NO: 54211 - protein, 56 aa, Homo sapiens
KAQREQAIRAAKEAKKAKQASKKTAMATAKAPTKAAPKQKIVKPVKVSAPQVGGKR

SEQ ID NO: 54212 - protein, 223 aa, Homo sapiens
VGPSKPVSQPRRNIVGCRIQHGWKEGNGPVTQWKGTVLDQVPVNPSLYLIKYDGFDCVYGLELNKDERVSALEVLPDRVATSRISDAHLADTMIGKAVEHMFETEDGSKDEWRGMVLARAPVMNTWFYITYEKDPVLYMYQLLDDYKEGDLRIMPDSNDSPPAEREPGEVVDSLVGKQVEYAKEDGSKRTGMVIHQVEAKPSVYFIKFDDDFHIYVYDLVKTS

SEQ ID NO: 54213 - protein, 361 aa, Homo sapiens
LREHYQYVGKLAGRLKEASEGSTLTTVLFLVICSFIVLENLMVLIAIWKNNKFHNRMYFFIGNLALCDLLAGIAYKVNILMSGKKTFSLSPTVWFLREGSMFVALGASTCSLLAIAIERHLTMIKMRPYDANKRHRVFLLIGMCWLIAFTLGALPILGWNCLHNLPDCSTILPLYSKKYIAFCISIFTAILVTIVILYARIYFLVKSSSRKVANHNNSERSMALLRTVVIVVSVFIACWSPLFILFLIDVACRVQACPILFKAQWFIVLAVLNSAMNPVIYTLASKEMRRAFFRLVCNCLVRGRGARASPIQPALDPSRSKSSSSNNSSHSPKVKEDLPHTAPSSCIMDKNAALQNGIFCN

SEQ ID NO: 54214 - protein, 108 aa, Homo sapiens
IENPADVSVISSRNTGQRAVLKFAAATGATPIAGHFTPGTFTNQIQAAFREPWLLVVTDPRADHQPLTEASYVNLPTIALCNTDSPMRYVDIAIPCNNKGAHSVGLMW

SEQ ID NO: 54215 - protein, 42 aa, Homo sapiens
VPSVPIQQFPTEDWSAQPATEDWSAAPTAQATEWVGATTDWS

SEQ ID NO: 54216 - protein, 212 aa, Homo sapiens
KPPPKPVKPGQVKVFRALYTFEPRTPDELYFEEGDIIYITDMSDTNWWKGTSKGRTGLIPSNYVAEQAESIDNPLHEAAKRGNLSWLRECLDNRVGVNGLDKAGSTALYWACHGGHKDIVEMLFTQPNIELNQQNKLGDTALHAAAWKGYADIVQLLLAKGARTDLRNIEKKLAFDMATNAACASLLKKKQGTDAVRTLSNAEDYLDDEDSD

SEQ ID NO: 54217 - protein, 58 aa, Homo sapiens
VKFTRVLLTVLIAFTKKETSAVAEAQKLMVQAADLLSAIHNSLHHGIQAQNDTTKGGL

SEQ ID NO: 54218 - protein, 65 aa, Homo sapiens
KHFQQAKMILENIPNPDHEVNRILKVAKPNFVVMKLLAGGHKKESKVPPEFDFSAHKYFPVVKLV

SEQ ID NO: 54219 - protein, 27 aa, Homo sapiens
KTISLTDFLAEDGGTGGGRTYVSKPVS

SEQ ID NO: 54220 - protein, 43 aa, Homo sapiens
IELHRKRYGYRLDYHEKKRKKESREAHERSKKAKKMIGLKAKL

SEQ ID NO: 54221 - protein, 158 aa, Homo sapiens
MEEPTVVEESQGTPEEESPAKVPELEVEEETQVQEMTLDEWKNLQEQTRPKPEFNIRKPESTVPSKAVVIHKSKYRDDMVKDDYEDDSHVFRKPANDITSQLEINFGNLPRPGRGARGGTRGGRGRIRRAENYGPRAEVVMQDVAPNPDDPEDFPALS

SEQ ID NO: 54222 - protein, 23 aa, Homo sapiens
LADSEDEWDLFHDELEDFYDLDL

SEQ ID NO: 54223 - protein, 16 aa, Homo sapiens
IHDFMSEYLIELSKVN

SEQ ID NO: 54224 - protein, 35 aa, Homo sapiens
MEVLNKKKMYWERKLQTFTKEWPVSSFNRPFPNSP

SEQ ID NO: 54225 - protein, 34 aa, Homo sapiens
VKTQETHECDACGEAFNCRISLIQHQKLHTAWMQ

SEQ ID NO: 54226 - protein, 102 aa, Homo sapiens
KDMFNFKRAQEDISRLRRKLETTKKPDNVPKCDEILMEEIKDYKARLTCPCCNMRKKDAVLTKCFHVFCFECVKTRYDTRQRKCPKCNAAFGANDFHRIYIG

SEQ ID NO: 54227 - protein, 35 aa, Homo sapiens
LNRYYPQILTNKEAEKVLRSSGTPRHPCVCGSVTS

SEQ ID NO: 54228 - protein, 1045 aa, Homo sapiens
MLGYLAALAKACFGGNIELFVFFNGALEKARLHEWVKRQGNERQTAQQIVSHVQNKGTPPPKVWFLPPVCMAHCIRLALIRFHVKVAQSIEDHHQEVIGFCRENGFHGLVAYDSDYALCNIPYYFSAHALKLSRNGKSLTTSQYLMHEVAKQLDLNPNRFPIFAALLGNHILPDEDLASFHWSLLGPEHPLASLKVRAHQLVLPPCDVVIKAVADYVRNIQDTSDLDAIAKDVFQHSQSRTDDKVIRFKRAIGYYSATSKPMSFHPPHYLAARPGPFGMPGMVPPHVPPQMLNIPQTSLQAKPVAPQVPSPGGAPGQGPYPYSLSEPAPLTLDTSGKNLTEQNSYSNIPHEGKHTPLYERSSPINPAQSGSPNHVDSAYFPGSSTSSSSDNDEGSGGATNHISGNKIGWEKTGSHSEPQARGDPGDQTKAEGSSTASSGSQLAEGKGSQMGTVQPIPCLLSMPTRNHMDITTPPLPPVAPEVLRVAEHRHKKGLMYPYIFHVLTKGEIKIAVSIEDEANKDLPPAALLYRPVRQYVYGVLFSLAESRKKTERLAFRKNRLPPEFSPVIIKEWAAYKGKSPQTPELVEALAFREWTCPNLKRLWLGKAVEDKNRRMRAFLACMRSDTPAMLNPANVPTHLMVLCCVLRYMVQWPGARILRRQELDAFLAQALSPKLYEPDQLQELKIENLDPRGIQLSALFMSGVDMALFANDACGQPIPWEHCCPWMYFDGKLFQSKLLKASREKTPLIDLCDGQADQAAKVEKMRQSVLEGLSFSRQSHTLPFPPPPALPFYPASAYPRHFGPVPPSQGRGRGFAGVCGFGGPYGETVATGPYRAFRVAAASGHCGAFSGSDSSRTSKSQGGVQPIPSQGGKLEIAGTVVGHWAGSRRGRGGRGPFPLQVVSVGGPARGRPRGVISTPVIRTFGRGGRYYGRGYKNQAAIQGRPPYAASAEEVAKELKSKSGESKSSAMSSDGSLAENGVMAEEKPAPQMNGSTGDARAPSHSESALNNDSKTCNTNPHLNALSTDSACRREAALEAAVLNKEE

SEQ ID NO: 54229 - protein, 18 aa, Homo sapiens
KQRLGKILKIHRNGKLLL

SEQ ID NO: 54230 - protein, 738 aa, Homo sapiens
LAGVLEADLPNYKSKILRLLCTVARLLPEKLTIYTTLVGLLNARNYNFGGEFVEAMIRQLKESLKANNYNEAVYLVRFLSDLVNCHVIAAPSMVAMFENFVSVTQEEDVPQVRRDWYVYAFLSSLPWVGKELYEKKDAEMDRIFANTESYLKRRQKTHVPMLQVWTADKPHPQEEYLDCLWAQIQKLKKDRWQERHILRPYLAFDSILCEALQHNLPPFTPPPHTEDSVYPMPRVIFRMFDYTDDPEGPVMPGSHSVERFVIEENLHCIIKSHWKERKTCAAQLVSYPGKNKIPLNYHIVEVIFAELFQLPAPPHIDVMYTTLLIELCKLQPGSLPQVLAQATEMLYMRLDTMNTTCVDRFINWFSHHLSNFQFRWSWEDWSDCLSQDPESPKPKFVREVLEKCMRLSYHQRILDIVPPTFSALCPANPTCIYKYGDESSNSLPGHSVALCLAVAFKSKATNDEIFSILKDVPNPNQDDDDDEGFSFNPLKIEVFVQTLLHLAAKSFSHSFSALAKFHEVFKTLAESDEGKLHVLRVMFEVWRNHPQMIAVLVDKMIRTQIVDCAAVANWIFSSELSRDFTRLFVWEILHSTIRKMNKHVLKIQKELEEAKEKLARQHKRRSDDDDRSSDRKDGVLEEQIERLQEKVESAQSEQKNLFLVIFQRFIMILTEHLVRCETDGTSVLTPWYKNCIERLQQIFLQHHQIIQQYMVTLENLLFTAELDPHILAVFQQFCALQA

SEQ ID NO: 54231 - protein, 275 aa, Homo sapiens
KPGRLSPLRPRRGKLSLKRGEEGNMDMKRRIHLELRNRTPAAVRELVLDNCKSNDGKIEGLTAEFVNLEFLSLINVGLISVSNLPKLPKLKKLELSENRIFGGLDMLAEKLPNLTHLNLSGNKLKDISTLEPLKKLECLKSLDLFNCEVTNLNDYRESVFKLLPQLTYLDGYDREDQEAPDSDAEVDGVDEEEEDEEGEDEEDEDDEDGEEEEFDEEDDEDEDVEGDEDDDEVSEEEEEFGLDEEDEDEDEDEEEEEGGKGEKRKRETDDEGEDD

SEQ ID NO: 54232 - protein, 357 aa, Homo sapiens
LELELCPGRWVGGQHPCFIIAEIGQNHQGDLDVAKRMIRMAKECGADCAKFQKSELEFKFNRKALERPYTSKHSWGKTYGEHKRHLEFSHDQYRELQRYAEEVGIFFTASGMDEMAVEFLHELNVPFFKVGSGDTNNFPYLEKTAKKGRPMVISSGMQSMDTMKQVYQIVKPLNPNFCFLQCTSAYPLQPEDVNLRVISEYQKLFPDIPIGYSGHETGIAISVAAVALGAKVLERHITLDKTWKGSDHSASLEPGELAELVRSVRLVERALGSPTKQLLPCEMACNEKLGKSVVAKVKIPEGTILTMDMLTVKVGEPKGYPPEDIFNLVGKKVLVTVEEDDTIMEELVDNHGKKIKS

SEQ ID NO: 54233 - protein, 33 aa, Homo sapiens
MEEERREHVAKMKKMELEMEQVFEMKVKEKVQN

SEQ ID NO: 54234 - protein, 7 aa, Homo sapiens
IKVLELV

SEQ ID NO: 54235 - protein, 16 aa, Homo sapiens
LSNVLAAMRKAAAKKD

SEQ ID NO: 54236 - protein, 15 aa, Homo sapiens
IQKNSCTENYRKKGG

SEQ ID NO: 54237 - protein, 114 aa, Homo sapiens
VLVLLLLAVLYEGIKVGKAKLLNQVLVNLPTSISQQTIAETDGDSAGSDSFPVGRTHHRWYLCHFGQSLIHVIQVVIGYFIMLAVMSYNTWIFLGVVLGSAVGYYLAYPLLSTA

SEQ ID NO: 54238 - protein, 193 aa, Homo sapiens
LEKMDHSHHMGMSYMDSNSTMQPSHHHPTTSASHSHGGGDSSMMMMPMTFYFGFKNVELLFSGLVINTAGEMAGAFVAVFLLAMFYEGLKIARESLLRKSQVSIRYNSMPVPGPNGTILMETHKTVGQQMLSFPHLLQTVLHIIQVVISYFLMLIFMTYNGYLCIAVAAGAGTGYFLFSWKKAVVVDITEHCH

SEQ ID NO: 54239 - protein, 155 aa, Homo sapiens
VYDIAFHQDGSLAGTGGLDAFGRVWDLRTGRCIMFLEGHLKEIYGINFSPNGYHIATGSGDNTCKVWDLRQRRCVYTIPAHQNLVTGVKFEPIHGNFLLTGAYDNTAKIWTHPGWSPLKTLAGHEGKVMGLDISSDGQLIATCSYDRTFKLWMAE

SEQ ID NO: 54240 - protein, 37 aa, Homo sapiens
LAQKRIFGLMEKDSYPRFLRSDLYLDLINQKKMSPPL

SEQ ID NO: 54241 - skipped

SEQ ID NO: 54242 - protein, 492 aa, Homo sapiens
LLLLVLAAAAAAAAALLPGATALQCFCHLCTKDNFTCVTDGLCFVSVTETTDKVIHNSMCIAEIDLIPRDRPFVCAPSSKTGSVTTTYCCNQDHCNKIELPTTVKSSPGLGPVELAAVIAGPVCFVCISLMLMVYICHNRTVIHHRVPNEEDPSLDRPFISEGTTLKDLIYDMTTSGSGSGLPLLVQRTIARTIVLQESIGKGRFGEVWRGKWRGEEVAVKIFSSREERSWFREAEIYQTVMLRHENILGFIAADNKDNGTWTQLWLVSDYHEHGSLFDYLNRYTVTVEGMIKLALSTASGLAHLHMEIVGTQGKPAIAHRDLKSKNILVKKNGTCCIADLGLAVRHDSATDTIDIAPNHRVGTKRYMAPEVLDDSINMKHFESFKRADIYAMGLVFWEIARRCSIGGIHEDYQLPYYDLVPSDPSVEEMRKVVCEQKLRPNIPNRWQSCEALRVMAKIMRECWYANGAARLTALRIKKTLSQLSQQEGIKM

SEQ ID NO: 54243 - protein, 99 aa, Homo sapiens
ISNMPGPTPSGTNVGSSGRSPSKAVAARAAGSTVRQRKNASCGTRSAGRTTSAGTGGMWRFYTEDSPGLKVGPVPVLVMSLLFIASVFMLHIWGKYTRS

SEQ ID NO: 54244 - protein, 64 aa, Homo sapiens
IGGMVGGPIGLLAGFKVAGIAAALGGGVLGFTGGKLIQRKKQKMMEKLTSSCPDLPSQTDKKCS

SEQ ID NO: 54245 - protein, 78 aa, Homo sapiens
KGTSGTKSTKHSVLKQIYGCSHEGKIHHPTRSVKASSVLRLNSVSNLQCIHLLENSGRSKNFSYNLQSATQPKNKTKP

SEQ ID NO: 54246 - protein, 625 aa, Homo sapiens
LLFILFCIGMGFICGFSIATGAAARLVSGYDSYGNICGQKNTKLEAIPNSGMDHTQRKYVFFLDPCNLDLINRKIKSVALCVAACPRQELKTLSDVQKFAEINGSALCSYNLKPSEYTTSPKSSVLCPKLPVPASAPIPFFHRCAPVNISCYAKFAEALITFVSDNSVLHRLISGVMTSKEIILGLCLLSLVLSMILMVIIRYISRVLVWILTILVILGSLGGTGVLWWLYAKQRRSPKETVTPEQLQIAEDNLRALLIYAISATVFTVILFLIMLVMRKRVALTIALFHVAGKVFIHLPLLVFQPFWTFFALVLFWVYWIMTLLFLGTTGSPVQNEQGFVEFKISGPLQYMWWYHVVGLIWISEFILACQQMTVAGAVVTYYFTRDKRNLPFTPILASVNRLIRYHLGTVAKGSFIITLVKIPRMILMYIHSQLKGKENACARCVLKSCICCLWCLEKCLNYLNQNAYTATAINSTNFCTSAKDAFVILVENALRVATINTVGDFMLFLGKVLIVCSTGLAGIMLLNYQQDYTVWVLPLIIVCLFAFLVAHCFLSIYEMVVDVLFLCFAIDTKYNDGSPGREFYMDKVLMEFVENSRKAMKEAGKGGVADSRELKPMASGASSA

SEQ ID NO: 54247 - protein, 137 aa, Homo sapiens
MQNSGSYSISQFQSRMIRWTKLRINMLPATIICEPISECFVASLIIGWAAHHVFRWDIMVFFMCHCLAWFIFDYIQLRGVQGGTLCFSKLDYAVAWFIRESMTIYIFLSALWDPTISWRTGRYRLRCGGTAEEILDV

SEQ ID NO: 54248 - protein, 404 aa, Homo sapiens
ITGASRGIGKAIALKAAKDGANIVIAAKTAQPHPKLLGTIYTAAEEIEAVGGKALPCIVDVRDEQQISAAVEKAIKKFGGIDILVNNASAISLTNTLDTPTKRLDLMMNVNTRGTYLASKACIPYLKKSKVAHILNISPPLNLNPVWFKQHCAYTIAKYGMSMYVLGMAEEFKGEIAVNALWPKTAIHTAAMDMLGGPGIESQCRKVDIIADAAYSIFQKPKSFTGNFVIDENILKEEGIENFDVYAIKPGHPLQPDFFLDEYPEAVSKKVESTGAVPEFKEEKLQLQPKPRSGAVEETFRIVKDSLSDDVVKATQAIYLFELSGEDGGTWFLDLKSKGGNVGYGEPSDQADVVMSMTTDDFVKMFSGKLKPTMAFMSGKLKIKGNMALAIKLEKLMNQMNARL

SEQ ID NO: 54249 - protein, 55 aa, Homo sapiens
ILHFPKGGGYSVLIREGLTCPVGIALTPKGQLLVLDCWDHCIKIYSYHLRRYSTP

SEQ ID NO: 54250 - protein, 34 aa, Homo sapiens
IFWRRLRKALLDGKSWNPEGTVGTGCNWQEATSI

SEQ ID NO: 54251 - protein, 60 aa, Homo sapiens
VNENILHKPSILQEKPSTEGYIAVVLPKFEESKSITEGLLTQKQYEEVMVKRINATTATS

SEQ ID NO: 54252 - protein, 60 aa, Homo sapiens
KAKDSLRKVRTNSMNKLKKSKDTVSEDTIRLIEKQISQMADDTVAELDRHLAVKTKELLG

SEQ ID NO: 54253 - protein, 222 aa, Homo sapiens
KEIGLLKQLNHPNIIKYLDSFIEDNELNIVLELADAGDLSQMIKYFKKQKRLIPERTVWKYFVQLCSAVEHMHSRRVMHRDIKPANVFITATGVVKLGDLGLGRFFSSETTAAHSLVGTPYYMSPERIHENGYNFKSDIWSLGCLLYEMAALQSPFYGDKMNLFSLCQKIEQCDYPPLPGEHYSEKLRELVSMCICPDPHQRPDIGYVHQVAKQMHIWMSST

SEQ ID NO: 54254 - protein, 72 aa, Homo sapiens
LKVLTNFKSSEIEQAVQSLDRNGVDLLMKYIYKGFEKPTENSSAVLLQWHEKALAVGGLGSIIRVLTARKTV

SEQ ID NO: 54255 - protein, 201 aa, Homo sapiens
VFDANTLTWSQPETLGNPPSPRHGHVMVAAGTKLFIHGGLAGDRFYDDLHCIDISDMKWQKLNPTGAAPAGCAAHSAVAMGKHVYIFGGMTPAGALDTMYQYHTEEQHWTLLKFDTLLPPGRLDHSMCIIPWPVTCASEKEDSNSLTLNHEAEKEDSADKVMSHSGDSHEESQTATLLCLVFGGMNTEGEIYDDCIVTVVD

SEQ ID NO: 54256 - protein, 54 aa, Homo sapiens
VLVFVLIKANPPCLLSTVQYISSFYASCLSGEESYWWMQFTAAVEFIKTIDDRK

SEQ ID NO: 54257 - protein, 54 aa, Homo sapiens
ILGGVSLNEMRCAYEVTQANGKWEVLIGSTHILTPQKLLDTLKKLNKTDEEISS

SEQ ID NO: 54258 - protein, 321 aa, Homo sapiens [sequence omitted]

SEQ ID NO: 54259 - protein, 533 aa, Homo sapiens
LQTNAGYLEQVKRQRGDPQTQLEAMELYLARSGLQVEDLDRLNIIHVTGTKGKGSTCAFTECILRSYGLKTGFFSSPHLVQVRERIRINGQPISPELFTKYFWRLYHRLEETKDGSCVSMPPYFRFLTLMAFHVFLQEKVDLAVVEVGIGGAYDCTNIIRKPVVCGVSSLGIDHTSLLGDTVEKIAWQKGGIFKQGVPAFTVLQPEGPLAVLRDRAQQISCPLYLCPMLEALEEGGPPLTLGLEGEHQRSNAALALQLAHCWLQRQDRHGAGEPKASRPGLLWQLPLAPVFQPTSHMRLGLRNTEWPGRTQVLRRGPLTWYLDGAHTASSAQACVRWFRQALQGRERPSGGPEVRVLLFNATGDRDPAALLKLLQPCQFDYAVFCPNLTEVSSTGNADQQNFTVTLDQVLLRCLEHQQHWNHLDEEQASPDLWSAPSPEPGGSASLLLAPHPPHTCSASSLVFSCISHALQWISQGRDPIFQPPSPPKGLLTHPVAHSGASILREAAAIHVLVTGSLHLVGGVLKLLEPALSQ

SEQ ID NO: 54260 - protein, 349 aa, Homo sapiens
IAWQKGGIFKQGVPAFTVLQPEGPLAVLRDRAQQISCPLYLCPMLEALEEGGPPLTLGLEGEHQRSNAALALQLAHCWLQRQDRHGAGEPKASRPGLLWQLPLAPVFQPTSHMRLGLRNTEWPGRTQVLRRGPLTWYLDGAHTASSAQACVRWFRQALQGRERPSGGPEVRVLLFNATGDRDPAALLKLLQPCQFDYAVFCPNLTEVSSTGNADQQNFTVTLDQVLLRCLEHQQHWNHLDEEQASPDLWSAPSPEPGGSASLLLAPHPPHTCSASSLVFSCISHALQWISQGRDPIFQPPSPPKGLLTHPVAHSGASILREAAAIHVLVTGSLHLVGGVLKLLEPALSQ

SEQ ID NO: 54261 - protein, 40 aa, Homo sapiens
LQKGLLAAGSAAMALYNPYRHGKAARASPPWGRLGAVSCG

SEQ ID NO: 54262 - protein, 80 aa, Homo sapiens
IKKHRVTLPGQEEPWDIRNLLIWIKKNLLKERPELFIQGDSVRPGILVLINDADWELLGELDYQLQDQDSVLFISTLHGG

SEQ ID NO: 54263 - protein, 88 aa, Homo sapiens [sequence omitted]

SEQ ID NO: 54264 - protein, 43 aa, Homo sapiens
MLMLIREQLLEGDFTVNMRLLQDYPITDVCQILQKAKELQDSK

SEQ ID NO: 54265 - protein, 65 aa, Homo sapiens
LILEAAGGQIELRTYVMPNAPVDEAIPLERFLVPIESIERASGLLFVPNILARAGSLKAITAGSK

SEQ ID NO: 54266 - protein, 68 aa, Homo sapiens
LQSLPSRVGELTNLTQIELRGNRLECLPVELGECPLLKRSGLVVEEDLFNTLPPEVKERLWRADKEQA

SEQ ID NO: 54267 - protein, 175 aa, Homo sapiens
ITHSFKVQTLARSLGLQMPVVVQSMYIFKQPHFGGEVSPHQDASFLYTEPLGRVLGVWIAVEDATLENGCLWFIPGSHTSGVSRRMVRAPVGSAPGTSFLGSEPARDNSLFVPTPVQRGALVLIHGEVVHKSKQNLSDRSRQAYTFHLMEASGTTWSPENWLQPTAELPFPQLYT

SEQ ID NO: 54268 - protein, 29 aa, Homo sapiens
KSTSLSKASPESQEPLIQLVQAFVRHMQR

SEQ ID NO: 54269 - protein, 404 aa, Homo sapiens
LAYSGGLDTSCILVWLKEQGYDVIAYLANIGQKEDFEEARKKALKLGAKKVFIEDVSREFVEEFIWPAIQSSALYEDRYLLGTSLARPCIARKQVEIAQREGAKYVSHGATGKGNDQVRFELSCYSLAPQIKVIAPWRMPEFYNRFKGRNDLMEYAKQHGIPIPVTPKNPWSMDENLMHISYEAGILENPKNQAPPGLYTKTQDPAKAPNTPDILEIEFKKGVPVKVTNVKDGTTHQTSLELFMYLNEVAGKHGVGRIDIVENRFIGMKSRGIYETPAGTILYHAHLDIEAFTMDREVRKIKQGLGLKFAELVYTGFWHSPECEFVRHCIAKSQERVEGKVQVSVLKGQVYILGRESPLSLYNEELVSMNVQGDYEPTDATGFININSLRLKEYHRLQSKVTAK

SEQ ID NO: 54270 - protein, 497 aa, Homo sapiens
TVITEEFKVPDKMVGFIIGRGGEQISRIQAESGCKIQIASESSGIPERPCVLTGTPESIEQAKRLLGQIVDRCRNGPGFHNDIDSNSTIQEILIPASKVGLVIGRGGETIKQLQERTGVKMVMIQDGPLPTGADKPLRITGDAFKVQQAREMVLEIIREKDQADFRGVRGDFNSRMGGGSIEVSVPRFAVGIVIGRNGEMIKKIQNDAGVRIQFKPDDGISPERAAQVMGPPDRCQHAAHIISELILTAQERDGFGGLAAARGRGRGRGDWSVGAPGGVQEITYTVPADKCGLVIGKGGENIKSINQQSGAHVELQRNPPPNSDPNLRRFTIRGVPQQIEVARQLIDEKVGGTNLGAPGAFGQSPFSQPPAPPHQNTFPPRSSGCFPNMAAKVNGNPHSTPVSGPPAFLTQGWGSTYQAWQQPTQQVPSQQSQPQSSQPNYSKAWEDYYKKQSHAASAAPQASSPPDYTMAWAEYYRQQVAFYGQTLGQAQAHSQEQ

SEQ ID NO: 54271 - protein, 473 aa, Homo sapiens
ISRIQAESGCKIQIASESSGIPERPCVLTGTPESIEQAKRLLGQIVDRCRNGPGFHNDIDSNSTIQEILIPASKVGLVIGRGGETIKQLQERTGVKMVMIQDGPLPTGADKPLRITGDAFKVQQAREMVLEIIREKDQADFRGVRGDFNSRMGGGSIEVSVPRFAVGIVIGRNGEMIKKIQNDAGVRIQFKPDDGISPERAAQVMGPPDRCQHAAHIISELILTAQERDGFGGLAAARGRGRGRGDWSVGAPGGVQEITYTVPADKCGLVIGKGGENIKSINQQSGAHVELQRNPPPNSDPNLRRFTIRGVPQQIEVARQLIDEKVGGTNLGAPGAFGQSPFSQPPAPPHQNTFPPRSSGCFPNMAAKVNGNPHSTPVSGPPAFLTQGWGSTYQAWQQPTQQVPSQQSQPQSSQPNYSKAWEDYYKKQSHAASAAPQASSPPDYTMAWAEYYRQQVAFYGQTLGQAQAHSQEQ

SEQ ID NO: 54272 - protein, 282 aa, Homo sapiens
KPLSERLGRDTKKHLVVPGDTITTDTGFMRGHGTYMGEEKLIASVAGSVERVNKLICVKALKTRYIGEVGDIVVGRITEVQQKRWKVETNSRLDSVLLLSSMNLPGGELRRRSAEDELAMRGFLQEGDLISAEVQAVFSDGAVSLHTRSLKYGKLGQGVLVQVSPSLVKRQKTHFHDLPCGASVILGNNGFIWIYPTPEHKEEEAGGFIANLEPVSLADREVISRLRNCIISLVTQRMMLYDTSILYCYEASLPHQIKDILKPEIMEEIVMETRQRLLEQEG

SEQ ID NO: 54273 - protein, 74 aa, Homo sapiens
LPPGQSLSVGAPRRIPPPGSQPPVLNTSREPSQMEMKGFHFADSKQNVPSGGPVPSPQTYRQNNEWMRNPAWEP

SEQ ID NO: 54274 - protein, 24 aa, Homo sapiens
KSLSPHELKALRWKDSWDILIRKH

SEQ ID NO: 54275 - protein, 34 aa, Homo sapiens
LLHDSIARHPAPEDPDWIKRLLQSPCPFCDSPVF

SEQ ID NO: 54276 - protein, 458 aa, Homo sapiens
KTHINIVVIGHVDSGKSTTTGHLIYKCGGIDKRTIEKFEKEAAEMGKGSFKYAWVLDKLKAERERGITIDISLWKFETSKYYVTIIDAPGHRDFIKNMITGTSQADCAVLIVAAGVGEFEAGISKNGQTREHALLAYTLGVKQLIVGVNKMDSTEPPYSQKRYEEIVKEVSTYIKKIGYNPDTVAFVPISGWNGDNMLEPSANMPWFKGWKVTRKDGNASGTTLLEALDCILPPTRPTDKPLRLPLQDVYKIGGIGTVPVGRVETGVLKPGMVVTFAPVNVTTEVKSVEMHHEALSEALPGDNVGFKVKNVSVKDVRRGNVAGDSKNDPPMEAAGFTAQVIILNHPGQISAGYAPVLDCHMAHIACKFAELKEKIDRRSGKKLEDGPKFLKSGDAAIVDMVPGKPMCVESFSDYPPLGRFAVRDMRQTVAVGVIKAVDKKAAGAGKVTKSAQKAQKAK

SEQ ID NO: 54277 - protein, 252 aa, Homo sapiens
TALMIRESEDSTDFNDKILNEPLKHSDFFNVKELFSVRSLFDARVHLGHKAGCRHRFMEPYIFGSRLDHDIIDLEQTATHLQLALNFTAHMAYRKGIILFISRNRQFSYLIENMARDCGEYAHTRYFRGGMLTNARLLFGPTVRLPDLIIFLHTLNNIFEPHVAVRDAAKMNIPTVGIVDTNCNPCLITYPVPGNDDSPLAVHLYCRLFQTAITRAKEKRQQVEALYRLQGQKEPGDQGPAHPPGADMSHSL

SEQ ID NO: 54278 - protein, 17 aa, Homo sapiens
IPHAGHRWKCQTVRVHA

SEQ ID NO: 54279 - protein, 201 aa, Homo sapiens
IPPTVDGMLGGYGHISSIDINSSRKFLQRFLREGPNKTGTSCALDCGAGIGRITKRLLLPLFREVDMVDITEDFLVQAKTYLGEEGKRVRNYFCCGLQDFTPEPDSYDVIWIQWVIGHLTDQHLAEFLRRCKGSLRPNGIIVIKDNMAQEGVILDDVDSSVCRDLDVVRRIICSAGLSLLAEERQENLPDEIYHVYSFALR

SEQ ID NO: 54280 - protein, 59 aa, Homo sapiens
LSPDYLSWTASSPYSTVPPYSPGSSGPATPGVNMANSIASLRLKAKEFSLHHSQVPTVN

SEQ ID NO: 54281 - protein, 307 aa, Homo sapiens
VGLAIGAASAITGYLSYNDIYCRFAECCREERPLNASALKLDLEEKLFGQHLATEVIFKALTGFRNNKNPKKPLTLSLHGWAGTGKNFVSQIVAENLHPKGLKSNFVHLFVSTLHFPHEQKIKLYQDQLQKWIRGNVSACANSVFIFDEMDKLHPGIIDAIKPFLDYYEQVDGVSYRKAIFIFLSNAGGDLITKTALDFWRAGRKREDIQLKDLEPVLSVGVFNNKHSGLWHSGLIDKNLIDYFIPFLPLEYRHVKMCVRAEMRARGSAIDEDIVTRVAEEMTFFPRDEKIYSDKGCKTVQSRLDFH

SEQ ID NO: 54282 - protein, 2443 aa, Homo sapiens
KELSTLRRQKLEDSYRFQFFQRDAEELEKWIQEKLQIASDENYKDPTNLQGKLQKHQAFEAEVQANSGAIVKLDETGNLMISEGHFASETIRTRLMELHRQWELLLEKMREKGIKLLQAQKLVQYLRECEDVMDWINDKEAIVTSEELGQDLEHVEVLQKKFEEFQTDMAAHEERVNEVNQFAAKLIQEQHPEEELIKTKQDEVNAAWQRLKGLALQRQGKLFGAAEVQRFNRDVDETISWIKEKEQLMASDDFGRDLASVQALLRKHEGLERDLAALEDKVKALCAEADRLQQSHPLSATQIQVKREELITNWEQIRTLAAERHARLNDSYRLQRFLADFRDLTSWVTEMKALINADELASDVAGAEALLDRHQEHKGEIDAHEDSFKSADESGQALLAAGHYASDEVREKLTVLSEERAALLELWELRRQQYEQCMDLQLFYRDTEQVDNWMSKQEAFLLNEDLGDSLDSVEALLKKHEDFEKSLSAQEEKITALDEFATKLIQNNHYAMEDVATRRDALLSRRNALHERAMRRRAQLADSFHLQQFFRDSDELKSWVNEKMKTATDEAYKDPSNLQGKVQKHQAFEAELSANQSRIDALEKAGQKLIDVNHYAKDEVAARMNEVISLWKKLLEATELKGIKLREANQQQQFNRNVEDIELWLYEVEGHLASDDYGKDLTNVQNLQKKHALLEADVAAHQDRIDGITIQARQFQDAGHFDAENIKKKQEALVARYEALKEPMVARKQKLADSLRLQQLFRDVEDEETWIREKEPIAASTNRGKDLIGVQNLLKKHQALQAEIAGHEPRIKAVTQKGNAMVEEGHFAAEDVKAKLHELNQKWEALKAKASQRRQDLEDSLQAQQYFADANEAESWMREKEPIVGSTDYGKDEDSAEALLKKHEALMSDLSAYGSSIQALREQAQSCRQQVAPTDDETGKELVLALYDYQEKSPREVTMKKGDILTLLNSTNKDWWKVEVNDRQGFVPAAYVKKLDPAQSASRENLLEEQGSIALRQEQIDNQTRITKEAGSVSLRMKQVEELYHSLLELGEKRKGMLEKSCKKFMLFREANELQQWINEKEAALTSEEVGADLEQVEVLQKKFDDFQKDLKANESRLKDINKVAEDLESEGLMAEEVQAVQQQEVYGMMPRDETDSKTASPWKSARLMVHTVATFNSIKELNERWRSLQQLAEERSQLLGSAHEVQRFHRDADETKEWIEEKNQALNTDNYGHDLASVQALQRKHEGFERDLAALGDKVNSLGETAERLIQSHPESAEDLQEKCTELNQAWSSLGKRADQRKAKLGDSHDLQRFLSDFRDLMSWINGIRGLVSSDELAKDVTGAEALLERHQEHRTEIDARAGTFQAFEQFGQQLLAHGHYASPEIKQKLDILDQERADLEKAWVQRRMMLDQCLELQLFHRDCEQAENWMAAREAFLNTEDKGDSLDSVEALIKKHEDFDKAINVQEEKIAALQAFADQLIAAGHYAKGDISSRRNEVLDRWRRLKAQMIEKRSKLGESQTLQQFSRDVDEIEAWISEKLQTASDESYKDPTNIQSKHQKHQAFEAELHANADRIRGVIDMGNSLIERGACAGSEDAVKARLAALADQWQFLVQKSAEKSQKLKEANKQQNFNTGIKDFDFWLSEVEALLASEDYGKDLASVNNLLKKHQLLEADISAHEDRLKDLNSQADSLMTSSAFDTSQVKDKRDTINGRFQKIKSMAASRRAKLNESHRLHQFFRDMDDEESWIKEKKLLVGSEDYGRDLTGVQNLRKKHKRLEAELAAHEPAIQGVLDTGKKLSDDNTIGKEEIQQRLAQFVEHWKELKQLAAARGQRLEESLEYQQFVANVEEEEAWINEKMTLVASEDYGDTLAAIQGLLKKHEAFETDFTVHKDRVNDVCTNGQDLIKKNNHHEENISSKMKGLNGKVSDLEKAAAQRKAKLDENSAFLQFNWKADVVESWIGEKENSLKTDDYGRDLSSVQTLLTKQETFDAGLQAFQQEGIANITALKDQLLAAKHVQSKAIEARHASLMKRWSQLLANSAARKKKLLEAQSHFRKVEDLFLTFAKKASAFNSWFENAEEDLTDPVRCNSLEEIKALREAHDAFRSSLSSAQADFNQLAELDRQIKSFRVASNPYTWFTMEALEETWRNLQKIIKERELELQKEQRRQEENDKLRQEFAQHANAFHQWIQETRTYLLDGSCMVEESGTLESQLEATKRKHQEIRAMRSQLKKIEDLGAAMEEALILDNKYTEHSTVGLAQQWDQLDQLGMRMQHNLEQQIQARNTTGVTEEALKEFSMMFKHFDKDKSGRLNHQEFKSCLRSLGYDLPMVEEGEPDPEFEAILDTVDPNRDGHVSLQEYMAFMISRETENVKSSEEIESAFRALSSEGKPYVTKEELYQNLTREQADYCVSHMKPYVDGKGRELPTAFDYVEFTRSLFVN

SEQ ID NO: 54283 - protein, 514 aa, Homo sapiens
LRGSGSWGCSRLRFGPPAYRRFSSGGAYPNIPLSSPLPGVPKPVFATVDGQEKFETKVTTLDNGLRVASQNKFGQFCTVGILINSGSRYEAKYLSGIAHFLEKLAFSSTARFDSKDEILLTLEKHGGICDCQTSRDTTMYAVSADSKGLDTVVALLADVVLQPRLTDEEVEMTRMAVQFELEDLNLRPDPEPLLTEMIHEAAYRENTVGLHRFCPTENVAKINREVLHSYLRNYYTPDRMVLAGVGVEHEHLVDCARKYLLGVQPAWGSAEAVDIDRSVAQYTGGIAKLERDMSNVSLGPTPIPELTHIMVGLESCSFLEEDFIPFAVLNMMMGGGGSFSAGGPGKGMFSRLYLNVLNRHHWMYNATSYHHSYEDTGLLCIHASADPRQVREMVEIITKEFILMGGTVDTVELERAKTQLTSMLMMNLESRPVIFEDVGRQVLATRSRKLPHELCTLIRNVKPEDVKRVASKMLRGKPAVAALGDLTDLPTYEHIQTALSSKDGRLPRTYRLFR

SEQ ID NO: 54284 - protein, 17 aa, Homo sapiens
ISFLEEQLGSCSCKKDS

SEQ ID NO: 54285 - protein, 107 aa, Homo sapiens
RGRKGRGAKGIGFLTSGWRFVQIKEMVPEFVVPDLTGFKLKPYVSYLAPESEETPLTAAQLFSEAVAPAIEKDFKDGTFDPDNLEKYGFEPTQEGKLFQLYPRNFLR

SEQ ID NO: 54286 - protein, 29 aa, Homo sapiens
LAQRQASAAQEAQEDGLPDTSSAAAADPL

SEQ ID NO: 54287 - protein, 117 aa, Homo sapiens
IPDVDIDSDGVFKYVLIRVHSAPRSGAPAAESKEIVRGYKWAEYHADIYDKVSGDMQKQGCDCECLGGGRISHQSQDKKIHVYGYSMAYGPAQHAISTEKIKAKYPDYEVTWANDGY

SEQ ID NO: 54288 - protein, 624 aa, Homo sapiens
KQLSRLQRNMILFLLAFLLFCGLLFYINLADHWKALAFRLEEEQKMRPEIAGLKPANPPVLPAPQKADTDPENLPEISSQKTQRHIQRGPPHLQIRPPSQDLKDGTQEEATKRQEAPVDPRPEGDPQRTVISWRGAVIEPEQGTELPSRRAEVPTKPPLPPARTQGTPVHLNYRQKGVIDVFLHAWKGYRKFAWGHDELKPVSRSFSEWFGLGLTLIDALDTMWILGLRKEFEEARKWVSKKLHFEKDVDVNLFESTIRILGGLLSAYHLSGDSLFLRKAEDFGNRLMPAFRTPSKIPYSDVNIGTGVAHPPRWTSDSTVAEVTSIQLEFRELSRLTGDKKFQEAVEKVTQHIHGLSGKKDGLVPMFINTHSGLFTHLGVFTLGARADSYYEYLLKQWIQGGKQETQLLEDYVEAIEGVRTHLLRHSEPSKLTFVGELAHGRFSAKMDHLVCFLPGTLALGVYHGLPASHMELAQELMETCYQMNRQMETGLSPEIVHFNLYPQPGRRDVEVKPADRHNLLRPETVESLFYLYRVTGDRKYQDWGWEILQSFSRFTRVPSGGYSSINNVQDPQKPEPRDKMESFFLGETLKYLFLLFSDDPNLLSLDAYVFNTEAHPLPIWTPA

SEQ ID NO: 54289 - protein, 19 aa, Homo sapiens
VARALAGSQAPRRALGGGA

SEQ ID NO: 54290 - protein, 55 aa, Homo sapiens
IASRNEFDRTIAETEAAYLKILESSQTLLSVLKREAGNLTKATAPDQKSSGGRDS

SEQ ID NO: 54291 - protein, 444 aa, Homo sapiens
REIVHLQAGQCGNQIGAKFWEVISDEHGIDPTGTYHGDSDLQLERINVYYNEATGGKYVPRAVLVDLEPGTMDSVRSGPFGQIFRPDNFVFGQSGAGNNWAKGHYTEGAELVDSVLDVVRKEAESCDCLQGFQLTHSLGGGTGSGMGTLLISKIREEYPDRIMNTFSVVPSPKVSDTVVEPYNATLSVHQLVENTDETYCIDNEALYDICFRTLKLTTPTYGDLNHLVSATMSGVTTCLRFPGQLNADLRKLAVNMVPFPRLHFFMPGFAPLTSRGSQQYRALTVPELTQQMFDAKNMMAACDPRHGRYLTVAAVFRGRMSMKEVDEQMLNVQNKNSSYFVEWIPNNVKTAVCDIPPRGLKMSATFIGNSTAIQELFKRISEQFTAMFRRKAFLHWYTGEGMDEMEFTEAESNMNDLVSEYQQYQDATAEEEGEFEEEAEEEVA

SEQ ID NO: 54292 - protein, 12 aa, Homo sapiens
KRRWLLFHRWRP

SEQ ID NO: 54293 - protein, 18 aa, Homo sapiens
ISSSSVVQAMVAESPPRV

SEQ ID NO: 54294 - protein, 177 aa, Homo sapiens
VKTGKCLKTLPAHSDPVSAVHFNRDGSLIVSSSYDGLCRIWDTASGQCLKTLIDDDNPPVSFVKFSPNGKYILAATLDNTLKLWDYSKGKCLKTYTGHKNEKYCIFANFSVTGGKWIVSGSEDNLVYIWNLQTKEIVQKLQGHTDVVISTACHPTENIIASAALENDKTIKLWKSDC

SEQ ID NO: 54295 - protein, 336 aa, Homo sapiens [sequence omitted]

SEQ ID NO: 54296 - protein, 28 aa, Homo sapiens
KQGGQRRTGSSWAYRSSRPHRTARPLWS

SEQ ID NO: 54297 - protein, 48 aa, Homo sapiens
IDIPFQNKYSHISMLDYNPKDRALYAWNNGHQILYNVTLFHVIRSDEL

SEQ ID NO: 54298 - protein, 48 aa, Homo sapiens
KDDTERTNRLVLLGRNLDKDILKQLFIATVTETEKQWTTRFQEDQVCT

SEQ ID NO: 54299 - protein, 101 aa, Homo sapiens
IAEHPAGHLVLKWLIEQDKKMKENGREGCFAKTLVEHVGMKNLKSWASVNRGAIILSSLLQSCDLEVANKVKAALKSLIPTLEKTKSTSKGIEILLEKLST

SEQ ID NO: 54300 - protein, 205 aa, Homo sapiens
VSSRITTHFELKHLSSGDLLRDNMLRGTEIGVLAKAFIDQGKLIPDDVMTRLALHELKNLTQYSWLLDGFPRTLPQAEALDRAYQIDTVINLNVPFEVIKQRLTARWIHPASGRVYNIEFNPPKTVGIDDLTGEPLIQREDDKPETVIKRLKAYEDQTKPVLEYYQKKGVLETFSGTETNKIWPYVYAFLQTKVPQRSQKASVTP

SEQ ID NO: 54301 - protein, 85 aa, Homo sapiens
LSFLCDLIESNHPVVIGPNNSNLPKIISIIAEGKINETINYEDPCAKRLANVVRQVQTSEDLWLECVSQLDDEQQEALQELLNFA

SEQ ID NO: 54302 - protein, 120 aa, Homo sapiens
KVEAEFQSMGSRLSQPFESYITAPPGTAAAPAKPAPPATPGAPTSPAEHRLLKTCWSCRVLSGLGLMGAGGYVYWVARKPMKMGYPPSPWTITQMVIGLSIATWGIVVMADPKGKAYRVV

SEQ ID NO: 54303 - protein, 41 aa, Homo sapiens
IFQTVKMLRTQRPAMVQTEDQYQFSYRAALEYLGSFDHYAT

SEQ ID NO: 54304 - protein, 57 aa, Homo sapiens
IYVKTVFAKGAASEDGRLKRGDQIIAVNGQSLEGVTHEEAVAILKRTKGTVTLMVLS

SEQ ID NO: 54305 - protein, 489 aa, Homo sapiens
ICLTQDEFHPFIEALLPHVRAIAYTWFNLQARKRKYFKKHEKRMSKDEERAVKDELLSEKPEIKQKWASRLLAKLRKDIRQEYREDFVLTVTGKKHPCCVLSNPDQKGKIRRIDCLRQADKVWRLDLVMVILFKGIPLESTDGERLMKSPHCTNPALCVQPHHITVSVKELDLFLAYYVQEQDSGQSGSPSHNDPAKNPPGYLEDSFVKSGVFNVSELVRVSRTPITQGTGVNFPIGEIPSQPYYHDMNSGVNLQRSLSSPPSSKRPKTISIDENMEPSPTGDFYPSPSSPAAGSRTWHERDQDMSSPTTMKKPEKPLFSSASPQDSSPRLSTFPQHHHPGIPGVAHSVISTRTPPPPSPLPFPTQAILPPAPSSYFSHPTIRYPPHLNPQDTLKNYVPSYDPSSPQTSQPNGSGQVVGKVPGHFTPVLAPSPHPSAVRPVTLSMTDTKPITTSTEAYTASGTSQANRYVGLSPRDPSFLHQQQSWYLG

SEQ ID NO: 54306 - protein, 17 aa, Homo sapiens
KCQIGHPSYRPMSKITV

SEQ ID NO: 54307 - protein, 161 aa, Homo sapiens
VNRCIEALDELASLQVTMQQAQKHTEMITTLKKIRRFKVSQVIMEKSTMLYNKFKNMFLVGEGDSVITQVLNKSLAEQRQHEEANKTKDQGKKGPNKKLEKEQTGSKTLNGGSDAQDGNQPQHNGESNEDSKDNHEASTKKKPSSEERETEISLKDSTLDN

SEQ ID NO: 54308 - protein, 12 aa, Homo sapiens
IDAAEGPSDIPD

SEQ ID NO: 54309 - protein, 16 aa, Homo sapiens
LDLDVCLKNNGHFLTS

SEQ ID NO: 54310 - protein, 54 aa, Homo sapiens
ISFPATGCQKLIEMDDECKLRTFYEKRTATKVAADTLGEEWKGYVVRISGGNDK

SEQ ID NO: 54311 - protein, 11 aa, Homo sapiens
IWMFDKYGLLV

SEQ ID NO: 54312 - protein, 717 aa, Homo sapiens
IYPHGLIATGGNDHNICIFSLDSPMPLYILKGHKNTVCSLSSGKFGTLLSGSWDTTAKVWLNDKCMMTLQGHTAAVWAVKILPEQGLMLTGSADKTVKLWKAGRCERTFSGHEDCVRGLAILSETEFLSCANDASIRRWQITGECLEVYYGHTNYIYSISVFPNCRDFVTTAEDRSLRIWKHGECAQTIRLPAQSIWCCCVLDNGDIVVGASDGIIRVFTESEDRTASAEEIKAFEKELSHATIDSKTGDLGDINAEQLPGREHLNEPGTREGQTRLIRDGEKVEAYQWSVSEGRWIKIGDVVGSSGANQQTSGKVLYEGKEFDYVFSIDVNEGGPSYKLPYNTSDDPWLTAYNFLQKNDLNPMFLDQVAKFIIDNTKGQMLGLGNPSFSDPFTGGGRYVPGSSGSSNTLPTADPFTGAGRYVPGSASMGTTMAGVDPFTGNSAYRSAASKTMNIYFPKKEAVTFDQANPTQILGKLKELNGTAPEEKKLTEDDLILLEKILSLICNSSSEKPTVQQLQILWKAINCPEDIVFPALDILRLSIKHPSVNENFCNEKEGAQFSSHLINLLNPKGKPANQLLALRTFCNCFVGQAGQKLMMSQRESLMSHAIELKSGSNKNIHIALATLALNYSVCFHKDHNIEGKAQCLSLISTILEVVQDLEATFRLLVALGTLISDDSNAVQLAKSLGVDSQIKKYSSVSEPAKVSECCRFILNLL

SEQ ID NO: 54313 - protein, 86 aa, Homo sapiens
MEKFWNKFLENKSPWRKMVHGVYKKSIFVFTHVLVPVWIIHYYMKYHVSEKPYGIVEKKSRIFPGDTILETGEVIPPMKEFPDQHH

SEQ ID NO: 54314 - protein, 46 aa, Homo sapiens
VCWLVRQDSRHQRIRLPHLEAVVIGRGPETKITDKKCSRQQVESRV

SEQ ID NO: 54315 - protein, 108 aa, Homo sapiens
IVDFAGSSKLRFRLGYHAIPSMSHVHLHVISQDFDSPCLKNKKHWNSFNTEYFLESQAVIEMVQEAGRVTVRDGMPELLKLPLRCHECQQLLPSIPQLKEHLRKHWTQ

SEQ ID NO: 54316 - protein, 217 aa, Homo sapiens
IPFRNRQEHLKYWLYYLHPVLQRQQLDYGIYVINQAGDTIFNRAKLLNVGFQEALKDYDYTCFVFSDVDLIPMNDHNAYRCFSQPRHISVAMDKFGFSLPYVQYFGGVSALSKQQFLTINGFPNNYWGWGGEDDDIFNRLVFRGMSISRPNAVVGRCRMIRHSRDKKNEPNPQRFDRIAHTKETMLSDGLNSLTYQVLDVQRYPLYTQITVDIGTPS

SEQ ID NO: 54317 - protein, 125 aa, Homo sapiens
LLGLALGRLEGGSARHVVFSGSGRAAGKAVSCAEIVKRRVPGLHQLTKLRFLQTEDSWVPASPDTGLDPLTVRRHVPAVWVLLSRDPLDPNECGYQPPGAPPGLGSMPSSSCGPRSRRRARDTRS

SEQ ID NO: 54318 - protein, 50 aa, Homo sapiens
KASSTKGRMVMSRGGELVMVPNVEAILEDFAVLGEGLVQTVEARSERWTV

SEQ ID NO: 54319 - protein, 213 aa, Homo sapiens
VALLFHKMMFETIPMFSGGTCNPQFVVCQLKVKMYSSNSGPTRWEDKFMYFEFPQPLPVCGDIKVEFFHKQNKMLKKDKMFHFWVNTFFIPGPEETSEKVENGSLCDQEIDSICSIERADNDKEYLVLTLTKNDLDKANKDKANRYFSPNFKVKLYFTKTVEEPSNPEASSSTSVTPDVSDNEPDHYRYSDTTDSDPENEPFDEDQHTQITKV

SEQ ID NO: 54320 - protein, 51 aa, Homo sapiens
LENHYNTYAAAKWTNNGGEMFVALNQKGIPVRGKKTKKEQKTAHFLPMAIT

SEQ ID NO: 54321 - protein, 32 aa, Homo sapiens [sequence omitted]

SEQ ID NO: 54322 - protein, 208 aa, Homo sapiens
LAVAAVLTQVVWLWLGTQSFVFQREEIAQLARQYAGLDHELAFSRLIVELRRLHPGHVLPDEELQWVFVNAGGWMGAMCLLHASLSEYVLLFGTALGSRGHSGRYWAEISDTIISGTFHQWREGTTKSEVFYPGETVVHGPGEATAVEWGPNTWMVEYGRGVIPSTLAFALADTVFSTQDFLTLFYTLRSYARGLRLELTTYLFGQDP

SEQ ID NO: 54323 - protein, 46 aa, Homo sapiens
RNLLSVAYKNVVGARRSSWSIVSSIEQKTEGAEKKTADGSRIQREN

SEQ ID NO: 54324 - protein, 16 aa, Homo sapiens
LSYSQGVRTPSPTPLL

SEQ ID NO: 54325 - protein, 7 aa, Homo sapiens
RRSSGAG

SEQ ID NO: 54326 - protein, 344 aa, Homo sapiens
LLRGSLLASGRAPRRASSGLPRNTVVLFVPQQEAWVVERMGRFHRILEPGLNILIPVLDRIRYVQSLKEIVINVPEQSAVTLDNVTLQIDGVLYLRIMDPYKASYGVEDPEYAVTQLAQTTMRSELGKLSLDKVFRERESLNASIVDAINQAADCWGIRCLRYEIKDIHVPPRVKESMQMQVEAERRKRATVLESEGTRESAINVAEGKKQAQILASEAEKAEQINQAAGEASAVLAKAKAKAEAIRILAAALTQHNGDAAASLTVAEQYVSAFSKLAKDSNTILLPSNPGDVTSMVAQAMGVYGALTKAPVPGTPDSLSSGSSRDVQGTDASLDEELDRVKMS

SEQ ID NO: 54327 - protein, 12 aa, Homo sapiens
MQVLMRNLIESR

SEQ ID NO: 54328 - protein, 130 aa, Homo sapiens
VTDGNEVAKAQQATPGGAAPTIFSRILDKSLPADILYEDQQCLVFRDVAPQAPVHFLVIPKKPIPRISQAEEEDQQLLGHLLLVAKQTAKAEGLGDGYRLVINDGKLGAQSVYHLHIHVLGGRQLQWPPG

SEQ ID NO: 54329 - protein, 135 aa, Homo sapiens
RRRFPPYYMRRPYGRRPQYSNPPVQGEVMEGADNQGAGEQGRPVRQNTYRGYRPRFRRGPPRQRQPREDGNDEDKENQGDETQGQQPPQRRYRRNFNCRRRHPENPKPQDGKETKAADPPAENSSTPEAERGRTE

SEQ ID NO: 54330 - protein, 45 aa, Homo sapiens
IVKDVIRQQALSSVQDVDVVVSDLVDPALLGAASMVLDYTTRRIY

SEQ ID NO: 54331 - protein, 169 aa, Homo sapiens
KRYVPVKGDHVIGIVTAKSGDIFKVDVGGSEPASLSYLSFEGATKRNRPNVQVGDLIYGQFVVANKDMEPEMVCIDSCGRANGMGVIGQDGLLFKVTLGLIRKLLAPDCEIIQEVGKLYPLEIVFGMNGRIWVKAKTIQQTLILANILEACEHMTSDQRKQIFSRLAES

SEQ ID NO: 54332 - protein, 49 aa, Homo sapiens
KNATNVEQAFMTMAAEIKKQMGPGAASGGERPNLKIDSTPVKPAGGGCC

SEQ ID NO: 54333 - protein, 4 aa, Homo sapiens
LDSI

SEQ ID NO: 54334 - protein, 62 aa, Homo sapiens
LNDSSKQGYSQETKRLKRTPVPDSLGLEMEHRFIDQVLSTCRNVEQARFASAYRKWLVTLSQ

SEQ ID NO: 54335 - protein, 11 aa, Homo sapiens
LELLKQASKAH

SEQ ID NO: 54336 - protein, 72 aa, Homo sapiens
IDKISKITSPVLIIHGTEDEVIDFSHGLALFERCQRPVEPLWVEGAGHNDVELYGQYLERLKQFVSQELVNL

SEQ ID NO: 54337 - protein, 49 aa, Homo sapiens
LSPEGTLTVEAPMPKLATQSNEITIPVTFESRAQLGGPEAAKSDETAAK

SEQ ID NO: 54338 - protein, 12 aa, Homo sapiens
MWKFVLWTSPLL

SEQ ID NO: 54339 - protein, 304 aa, Homo sapiens
IKQMRIIHGSGYSDEDKRGFTKLVYQNIFTAMQAMIRAMDTLKIPYKYEHNKAHAQLVREVDVEKVSAFENPYVDAIKSLWNDPGIQECYDRRREYQLSDSTKYYLNDLDRVADPAYLPTQQDVLRVRVPTTGIIEYPFDLQSVIFRMVDVGGQRSERRKWIHCFENVTSIMFLVALSEYDQVLVESDNENRMEESKALFRTIITYPWFQNSSVILFLNKKDLLEEKIMYSHLVDYFPEYDGPQRDAQAAREFILKMFVDLNPDSDKIIYSHFTCATDTENIRFVFAAVKDTILQLNLKEYNLV

SEQ ID NO: 54340 - protein, 111 aa, Homo sapiens
IYSECNTWDCIATCFFIDTAHNVIDYIDTIWKILKPGGIWINLGPLLYHFENLANELSIELSYEDIKNVVLQYGFKVEVEKESVLSTYTVNDLSMMKYYYECVLFVVRKPQ

SEQ ID NO: 54341 - protein, 154 aa, Homo sapiens
RHLPYFCRGQVVRGFGRGSKQLGIPTANFPEQVVDNLPADISTGIYYGWASVGSGDVHKMVVSIGWNPYYKNTKKSMETHIMHTFKEDFYGEILNVAIVGYLRPEKNFDSLESLISAIQGDIEEAKKRLELPEHLKIKEDNFFQVSKSKIMNGH

SEQ ID NO: 54342 - protein, 294 aa, Homo sapiens
IPFEEGVLSPSAADMRPEPPNSLDLNDTHPRRIKLTAPNINLSLDQSEGSILSDDNLDSPDEIDINVDELDTPDEADSFEYTGHDPTANKDSGQESESIPEYTAEEEREDNRLWRTVVIGEQEQRIDMKVIEPYRRVISHGGDSGYYGDGLNAIIVFAACFLPDSSRADYHYVMENLFLYVISTLELMVAEDYMIVYLNGATPRRRMPGLGWMKKCYQMIDRRLRKNLKSFIIVHPSWFIRTILAVTRPFISSKFSSKIKYVNSLSELSGLIPMDCIHIPESIINIDLKLKEKP

SEQ ID NO: 54343 - protein, 46 aa, Homo sapiens
IPPLGGSAGLLALSSALSGQSHLAIKDDKKHHDAEHHRGERPGKPD

SEQ ID NO: 54344 - protein, 13 aa, Homo sapiens
KQEMASASSSQRS

SEQ ID NO: 54345 - protein, 39 aa, Homo sapiens
KDRVFDSISHLINHHLESSLPIVSAGSELCLQQPVERKQ

SEQ ID NO: 54346 - protein, 465 aa, Homo sapiens
LFLMQLRKMQTVKKEQASLDASSNVDKMMVLNSALTEVSEDSTTGEELLLSEGSVGKNKSSACRRKREFIPDEKKDAMYWEKRRKNNEAAKRSREKRRLNDLVLENKLIALGEENATLKAELLSLKLKFGLISSTAYAQEIQKLSNSTAVYFQDYQTSKSNVSSFVDEHEPSMVSSSCISVIKHSPQSSLSDVSEVSSVEHTQESSVQGSCRSPENKFQIIKQEPMELESYTREPRDDRGSYTASIYQNYMGNSFSGYSHSPPLLQVNRSSSNSPRTSETDDGVVGKSSDGEDEQQVPKGPIHSPVELKHVHATVVKVPEVNSSALPHKLRIKAKAMQIKVEAFDNEFEATQKLSSPIDMTSKRHFELEKHSAPSMVHSSLTPFSVQVTNIQDWSLKSEHWHQKELSGKTQNSFKTGVVEMKDSGYKVSDPENLYLKQGIANLSAEVVSLKRLIATQPISASDSG

SEQ ID NO: 54347 - protein, 32 aa, Homo sapiens
TDLQARSKMHPPRRAVLQPRHGPAARTPPGRQ

SEQ ID NO: 54348 - protein, 63 aa, Homo sapiens
KTLMQEVGRTWTNFSTGSASAAPRASSPFPSSPGGRRCPRWWPRCWAAAARPAGGQCRAPGCA

SEQ ID NO: 54349 - protein, 10 aa, Homo sapiens
ILLLLLGPLF

SEQ ID NO: 54350 - protein, 31 aa, Homo sapiens
VKKISRSCSVNNKVSKKTTKPPTLRSFLSPI

SEQ ID NO: 54351 - protein, 107 aa, Homo sapiens
KRAGAQAAGSTWLQGFGPPSVYHAAIVIFLEFFAWGLLTTPMLTVLHETFSQHTFLMNGLIQGVKGLLSFLSAPLIGALSDVWGRKPFLLGTVFFTCFPIPLMRISP

SEQ ID NO: 54352 - protein, 14 aa, Homo sapiens
LEFFPQGALIVPMQ

SEQ ID NO: 54353 - protein, 380 aa, Homo sapiens
VACIIVLGFNYWIASSRSVDLQTRIMELEGRVRRAAAERGAVELKKNEFQGELEKQREQLDKIQSSHNFQLESVNKLYQDEKAVLVNNITTGERLIRVLQDQLKTLQRNYGRLQQDVLQFQKNQTNLERKFSYDLSQCINQMKEVKEQCEERIEEVTKKGNEAVASRDLSENNDQRQQLQALSEPQPRLQAAGLPHTEVPQGKGNVLGNSKSQTPAPSSEVVLDSKRQVEKEETNEIQVVNEEPQRDRLPQEPGREQVVEDRPVGGRGFGGAGELGQTPQVQAALSVSQENPEMEGPERDQLVIPDGQEEEQEAAGEGRNQQKLRGEDDYNMDENEAESETDKQAALAGNDRNIDVFNVEDQKRDTINLLDQREKRNHTL

SEQ ID NO: 54354 - protein, 75 aa, Homo sapiens
RGCNGLSYTLEYTKTKGDSDEEVIQDGVRVFIEKKAQLTLLGTEMDYVEDKLSSEFVFNNPNIKGTCGCGESFNI

SEQ ID NO: 54355 - protein, 14 aa, Homo sapiens
ILIKQTREFQPSRH

SEQ ID NO: 54356 - protein, 88 aa, Homo sapiens
RTATHTCDYAGCGKTYTKSSHLKAHLRTHTGEKPYHCDWDGCGWKFARSDELTRHYRKHTGHRPFQCQKCDRAFSRSDHLALHMKRHF

SEQ ID NO: 54357 - protein, 67 aa, Homo sapiens
MERSLPEIWTLTYQQNSATPVLGPNSTANSIMASYQQQKTSVPVLDAELFIPPKINRRTQWKLSLLD

SEQ ID NO: 54358 - protein, 399 aa, Homo sapiens
LFLHPDLGVGGAERLVLDAALALQARGCSVKIWTAHYDPGHCFAESRELPVRCAGDWLPRGLGWGGRGAAVCAYVRMVFLALYVLFLADEEFDVVVCDQVSACIPVFRLARRRKKILFYCHFPDLLLTKRDSFLKRLYRAPIDWIEEYTTGMADCILVNSQFTAAVFKETFKSLSHIDPDVLYPSLNVTSFDSVVPEKLDDLVPKGKKFLLLSINRYERKKNLTLALEALVQLRGRLTSQDWERVHLIVAGGYDERVLENVEHYQELKKMVQQSDLGQYVTFLRSFSDKQKISLLHSCTCVLYTPSNEHFGIVPLEAMYMQCPVIAVNSGGPLESIDHSVTGFLCEPDPVHFSEAIEKFIREPSLKATMGLAGRARVKEKFSPEAFTEQLYRYVTKLLV

SEQ ID NO: 54359 - protein, 4 aa, Homo sapiens
VENS

SEQ ID NO: 54360 - protein, 613 aa, Homo sapiens
MTTSVDVLVSICVIFAMSFVPASFVVFLIQERVSKAKHLQFISGVKPVIYWLSNFVWDMCNYVVPATLVIIIFICFQQKSYVSSTNLPVLALLLLLYGWSITPLMYPASFVFKIPSTAYVVLTSVNLFIGINGSVATFVLELFTDNKLNNINDILKSVFLIFPHFCLGRGLIDMVKNQAMADALERFGENRFVSPLSWDLVGRNLFAMAVEGVVFFLITVLIQYRFFIRPRPVNAKLSPLNDEDEDVRRERQRILDGGGQNDILEIKELTKIYRRKRKPAVDRICVGIPPGECFGLLGVNGAGKSSTFKMLTGDTTVTRGDAFLNKNSILSNIHEVHQNMGYCPQFDAITELLTGREHVEFFALLRGVPEKEVGKVGEWAIRKLGLVKYGEKYAGNYSGGNKRKLSTAMALIGGPPVVFLDEPTTGMDPKARRFLWNCALSVVKEGRSVVLTSHSMEECEALCTRMAIMVNGRFRCLGSVQHLKNRFGDGYTIVVRIAGSNPDLKPVQDFFGLAFPGSVLKEKHRNMLQYQLPSSLSSLARIFSILSQSKKRLHIEDYSVSQTTLDQVFVNFAKDQSDDDHLKDLSLHKNQTVVDVAVLTSFLQDEKVKESYV

SEQ ID NO: 54361 - protein, 44 aa, Homo sapiens
TKTRSMMALLVQLLSLCYKLLKKLQMENNGWVSVTNKDTMDSKT

SEQ ID NO: 54362 - protein, 694 aa, Homo sapiens
LDYFSSLWIWTLVVGYVLTVSFKWNASTERYLRAVSIPVWIILLFHLASLAGSWRIPVFLVIVFLMSVGTLYEKQNGKESSGAELPGQVISMAASTLANLAISITGYESSSEDQPSTQPAEAVDRGESAPTLSTSPSPSSPSPTSPSPTLGRRRPEIGTFLRKKKTSDIYFVSLVWAIVVMQIWLNLWIVQLLPVPIAVWILKKLVIHFGVVDFLEKRYHVWWGIIESFLKERQGALAPWPIVGLGKFLLKVDSKLWHWLNKKMIIWLEKMLDKIISIFIIFLLVIGTLLLALLLTAKVHQESVHMIEVTSNLINETLANHPEWANWLPEAQVVQRALNSAANNVYQYGREWITHKLHKILGDKVNNTAVIEKQVLELWDRLYHSWFVKNVTHSGRHKGQKLHVSRQNSWLGDILDWQDIVSFVHENIETFLSILESLWIVMSRNVSLLFTTVTTLLTILFYSGTALLNFVLSLIIFLTTLFYLLSSSDEYYKPVKWVISLTPLSQPGPSSNIIGQSVEEAIRGVFDASLKMAGFYGLYTWLTHTMFGINIVFIPSALAAILGAVPFLGTYWAAVPAVLDLWLTQGLGCKAILLLIFHLLPTYFVDTAIYSDISGGGHPYLTGLAVAGGAYYLGLEGAIIGPILLCILVVASNIYSAMLVSPTNSVPTPNQTPWPAQPQRTFRDISEDLKSSVG

SEQ ID NO: 54363 - protein, 6 aa, Homo sapiens
VGKLAS

SEQ ID NO: 54364 - protein, 9 aa, Homo sapiens
LASLTDLLP

SEQ ID NO: 54365 - protein, 402 aa, Homo sapiens
LQAVSAVQSGSLALSGGPSNEGTVLPGQSPVLRIIIENLFYPVTLEVLHQIFSKFGTVLKIITFTKNNQFQALLQYADPVNAHYAKMALDGQNIYNACCTLRIDFSKLTSLNVKYNNDKSRDFTRLDLPTGDGQPSLEPPMAAAFGAPGIISSPYAGAAGFAPAIGFPQATGLSVPAVPGALGPLTITSSAVTGRMAIPGASGIPGNSVLLVTNLNPDLITPHGLFILFGVYGDVHRVKIMFNKKENALVQMADANQAQLAMNHLSGQRLYGKVLRATLSKHQAVQLPREGQEDQGLTKDFSNSPLHRFKKPGSKNFQNIFPPSATLHLSNIPPSVTVDDLKNLFIEAGCSVKAFKFFQKDRKMALIQLGSVEEAIQALIELHNHDLGENHHLRVSFSKSTI

SEQ ID NO: 54366 - protein, 41 aa, Homo sapiens
IHQRSHTGEKPYECNECGKTFKQNASLTKHVKTHSEDKSHE

SEQ ID NO: 54367 - protein, 93 aa, Homo sapiens
LALSVDFSMLRRKPTRLELKLDDIEEFENIRKDLETRKKQKEDVEVVGGSDGEGAIGLSSDPKSREQMINDRIGYKPQPKPNNRSSQFGSLEF

SEQ ID NO: 54368 - protein, 2445 aa, Homo sapiens
VKTIMVDDSKTVTDMLMTICARIGITNHDEYSLVRELMEEKKEEITGTLRKDKTLLRDEKKMEKLKQKLHTDDELNWLDHGRTLREQGVEEHETLLLRRKFFYSDQNVDSRDPVQLNLLYVQARDDILNGSHPVSFDKACEFAGFQCQIQFGPHNEQKHKAGFLDLKDFLPKEYVKQKGERKIFQAHKNCGQMSEIEAKVRYVKLARSLKTYGVSFFLVKEKMKGKNKLVPRLLGITKECVMRVDEKTKEVIQEWNLTNIKRWAASPKSFTLDFGDYQDGYYSVQTTEGEQIAQLIAGYIDIILKKKKSKDHFGLEGDEESTMLEDSVSPKKSTVLQQQYNRVGKVEHGSVALPAIMRSGASGPENFQVGSMPPAQQQITSGQMHRGHMPPLTSAQQALTGTINSSMQAVQAAQATLDDFDTLPPLGQDAASKAWRKNKMDESKHEIHSQVDAITAGTASVVNLTAGDPAETDYTAVGCAVTTISSNLTEMSRGVKLLAALLEDEGGSGRPLLQAAKGLAGAVSELLRSAQPASAEPRQNLLQAAGNVGQASGELLQQIGESDTDPHFQDALMQLAKAVASAAAALVLKAKSVAQRTEDSGLQTQVIAAATQCALSTSQLVACTKVVAPTISSPVCQEQLVEAGRLVAKAVEGCVSASQAATEDGQLLRGVGAAATAVTQALNELLQHVKAHATGAGPAGRYDQATDTILTVTENIFSSMGDAGEMVRQARILAQATSDLVNAIKADAEGESDLENSRKLLSAAKILADATAKMVEAAKGAAAHPDSEEQQQRLREAAEGLRMATNAAAQNAIKKKLVQRLEHAAKQAAASATQTIAAAQHAASTPKASAGPQPLLVQSCKAVAEQIPLLVQGVRGSQAQPDSPSAQLALIAASQSFLQPGGKMVAAAKASVPTIQDQASAMQLSQCAKNLGTALAELRTAAQKAQEACGPLEMDSALSVVQNLEKDLQEVKAAARDGKLKPLPGETMEKCTQDLGNSTKAVSSAIAQLLGEVAQGNENYAGIAARDVAGGLRSLAQAARGVAALTSDPAVQAIVLDTASDVLDKASSLIEEAKKAAGHPGDPESQQRLAQVAKAVTQALNRCVSCLPGQRDVDNALRAVGDASKRLLSDSLPPSTGTFQEAQSRLNEAAAGLNQAATELVQASRGTPQDLARASGRFGQDFSTFLEAGVEMAGQAPSQEDRAQVVSNLKGISMSSSKLLLAAKALSTDPAAPNLKSQLAAAARAVTDSINQLITMCTQQAPGQKECDNALRELETVRELLENPVQPINDMSYFGCLDSVMENSKVLGEAMTGISQNAKNGNLPEFGDAISTASKALCGFTEAAAQAAYLVGVSDPNSQAGQQGLVEPTQFARANQAIQMACQSLGEPGCTQAQVLSAATIVAKHTSALCNSCRLASARTTNPTAKRQFVQSAKEVANSTANLVKTIKALDGAFTEENRAQCRAATAPLLEAVDNLSAFASNPEFSSIPAQISPEGRAAMEPIVISAKTMLESAGGLIQTARALAVNPRDPPSWSVLAGHSRTVSDSIKKLITSMRDKAPGQLECETAIAALNSCLRDLDQASLAAVSQQLAPREGISQEALHTQMLTAVQEISHLIEPLANAARAEASQLGHKVSQMAQYFEPLTLAAVGAASKTLSHPQQMALLDQTKTLAESALQLLYTAKEAGGNPKQAAHTQEALEEAVQMMTEAVEDLTTTLNEAASAAGVVGGMVDSITQAINQLDEGPMGEPEGSFVDYQTTMVRTAKAIAVTVQEMVTKSNTSPEELGPLANQLTSDYGRLASEAKPAAVAAENEEIGSHIKHRVQELGHGCAALVTKAGALQCSPSDAYTKKELIECARRVSEKVSHVLAALQAGNRGTQACITAASAVSGIIADLDTTIMFATAGTLNREGTETFADHREGILKTAKVLVEDTKVLVQNAAGSQEKLAQAAQSSVATITRLADVVKLGAASLGAEDPETQVVLINAVKDVAKALGDLISATKAAAGKVGDDPAVWQLKNSAKVMVTNVTSLLKTVKAVEDEATKGTRALEATTEHIRQELAVFCSPEPPAKTSTPEDFIRMTKGITMATAKAVAAGNSCRQEDVIATANLSRRAIADMLRACKEAAYHPEVAPDVRLRALHYGRECANGYLELLDHVLLTLQKPSPELKQQLTGHSKRVAGSVTELIQAAEAMKGTEWVDPEDPTVIAENELLGAAAAIEAAAKKLEQLKPRAKPKEADESLNFEEQILEAAKSIAAATSALVKAASAAQRELVAQGKVGAIPANALDDGQWSQGLISAARMVAAATNNLCEAANAAVQGHASQEKLISSAKQVAASTAQLLVACKVKADQDSEAMKRLQAAGNAVKRASDNLVKAAQKAAAFEEQENETVVVKEKMVGGIAQIIAAQEEMLRKERELEEARKKLAQIRQQQYKFLPSELRDEH

SEQ ID NO: 54369 - protein, 38 aa, Homo sapiens
TTLKSGSVQEQWLTDLHYCFNVYITGHPQGPSALATVY

SEQ ID NO: 54370 - protein, 28 aa, Homo sapiens
KTVRAKDNAVMSTRFKESEDCTLVLHKV

SEQ ID NO: 54371 - protein, 51 aa, Homo sapiens
MKLLQLSKRQEKVIFDQLVVTHKILRKARGNLELRPGGAHPGTCSPSRPGS

SEQ ID NO: 54372 - protein, 453 aa, Homo sapiens
LLNENHREKTTLCVSILERLLQAMEPVHVARNLRVDLQRGLIHPDDSVKILTLSQIGRIVENSDAVTEILNNAELLKQIVYCIGGENLSVAKAAIKSLSRISLTQAGLEALFESNLLDDLKSVMKTNDIVRYRVYELIIEISSVSPESLNYCTTSGLVTQLLRELTGEDVLVRATCIEMVTSLAYTHHGRQYLAQEGVIDQISNIIVGADSDPFSSFYLPGFVKFFGNLAVMDSPQQICERYPIFVEKVFEMIESQDPTMIGVAVDTVGILGSNVEGKQVLQKTGTRFERLLMRIGHQSKNAPVELKIRCLDAISSLLYLPPEQQTDDLLRMTESWFSSLSRDPLELFRGISSQPFPELHCAALKVFTAIANQPWAQKLMFNSPGFVEYVVDRSVEHDKASKDAKYELVKALANSKTIAEIFGNPNYLRLRTYLSEGPYYVKPVSTTAVEGAE

SEQ ID NO: 54373 - protein, 337 aa, Homo sapiens
LCPLAHAMQPQSVLHSGYFHPLLRAWQTATTTLNASNLIYPIFVTDVPDDIQPITSLPGVARYGVKRLEEMLRPLVEEGLRCVLIFGVPSRVPKDERGSAADSEESPAIEAIHLLRKTFPNLLVACDVCLCPYTSHGHCGLLSENGAFRAEESRQRLAEVALAYAKAGCQVVAPSDMMDGRVEAIKEALMAHGLGNRVSVMSYSAKFASCFYGPFRDAAKSSPAFGDRRCYQLPPGARGLALRAVDRDVREGADMLMVKPGMPYLDIVREVKDKHPDLPLAVYHVSGEFAMLWHGAQAGAFDLKAAVLEAMTAFRRAGADIIITYYTPQLLQWLKEE

SEQ ID NO: 54374 - protein, 159 aa, Homo sapiens
LDPKITEYHLLKLLQKFGKVKQFDFLFHKSGALEGQPRGYCFVNFETKQEAEQAIQCLNGKLALSKKLVVRWAHAQVKRYDHNKNDKILPISLEPSSSTEPTQSNLSVTAKIKAIEAKLKMMAENPDAEYPAAPVYSYFKPPDKKRTTPYSRTAWKSRR

SEQ ID NO: 54375 - protein, 249 aa, Homo sapiens
ISVNTGPKGVINDWRRFKQLETEQREEQCREMERLIKKLSMTCRSHLDEEEEQQKQKDLQEKISGKMTLKEFAIMNEDQDDEEFLQQYRKQRMEEMRQQLHKGPQFKQVFEISSGEGFLDMIDKEQKSIVIMVHIYEDGIPGTEAMNGCMICLAAEYPAVKFCKVKSSVIGASSQFTRNALPALLIYKGGELIGNFVRVTDQLGDDFFAVDLEAFLQEFGLLPEKEVLVLTSVRNSATCHSEDSDLEID

SEQ ID NO: 54376 - protein, 65 aa, Homo sapiens
LEEQKTILPVTSCFSQPLPVSISNASCLPITTSVSAGNLILKTHVMSEDKNDFLKPVANGKMVNS

SEQ ID NO: 54377 - protein, 161 aa, Homo sapiens
VAEVPGNQDQGLFCENTEGSYGTVSEIQNLEEGYSLRHQCPRCPRGFLHVENYLRHLKMHKLFLCLQCGKTFTQKKNLNRHIRGHMGIRPFQCTVCLKTFTAKSTLQDHLNIHSGDRPYKCHCCDMDFKHKSALKKHLTSVHGRSSGEKLSRPDLKRQSLL

SEQ ID NO: 54378 - protein, 226 aa, Homo sapiens
LPSHQQPPSATMATAPYNYSYIFKYIIIGDMGVGKSCLLHQFTEKKFMADCPHTIGVEFGTRIIEVSGQKIKLQIWDTAGQERFRAVTRSYYRGAAGALMVYDITRRSTYNHLSSWLTDARNLTNPNTVIILIGNKADLEAQRDVTYEEAKQFAEENGLLFLEASAKTGENVEDAFLEAAKKIYQNIQDGSLDLNAAESGVQHKPSAPQGGRLTSEPQPQREGCGC

SEQ ID NO: 54379 - skipped

SEQ ID NO: 54380 - protein, 160 aa, Homo sapiens
LKVDEVKISSAVLKAAAHHYGAQCDKPNKEFMLCRWEEKDPRRCLEEGKLVNKCALDFFRQIKRHCAEPFTEYWTCIDYTGQQLFRHCRKQQAKFDECVLDKLGWVRPDLGELSKVTKVKTDRPLPENPYHSRPRPDPSPEIEGDLQPATHGSRFYFWTK

SEQ ID NO: 54381 - protein, 27 aa, Homo sapiens
KMSWFGSKPAPKGSIRPSISNPRIPWS

SEQ ID NO: 54382 - protein, 296 aa, Homo sapiens
VEIARLCKYLPENDLKRLCDYVCDLLLEESNVQPVSTPVTVCGDIHGQFYDLCELFRTGGQVPDTNYIFMGDFVDRGYYSLETFTYLLALKAKWPDRITLLRGNHESRQITQVYGFYDECQTKYGNANAWRYCTKVFDMLTVAALIDEQILCVHGGLSPDIKTLDQIRTIERNQEIPHKGAFCDLVWSDPEDVDTWAISPRGAGWLFGAKVTNEFVHINNLKLICRAHQLVHEGYKFMFDEKLVTVWSAPNYCYRCGNIASIMVFKDVNTREPKLFRAVPDSERVIPPRTTTPYFL

SEQ ID NO: 54383 - protein, 655 aa, Homo sapiens
KMKLSLVAAMLLLLSAARAEEEDKKEDVGTVVGIDLGTTYSCVGVFKNGRVEIIANDQGNRITPSYVAFTPEGERLIGDAAKNQLTSNPENTVFDAKRLIGRTWNDPSVQQDIKFLPFKVVEKKTKPYIQVDIGGGQTKTFAPEEISAMVLTKMKETAEAYLGKKVTHAVVTVPAYFNDAQRQATKDAGTIAGLNVMRIINEPTAAAIAYGLDKREGEKNILVFDLGGGTFDVSLLTIDNGVFEVVATNGDTHLGGEDFDQRVMEHFIKLYKKKTGKDVRKDNRAVQKLRREVEKAKRALSSQHQARIEIESFYEGEDFSETLTRAKFEELNMDLFRSTMKPVQKVLEDSDLKKSDIDEIVLVGGSTRIPKIQQLVKEFFNGKEPSRGINPDEAVAYGAAVQAGVLSGDQDTGDLVLLDVCPLTLGIETVGGVMTKLIPRNTVVPTKKSQIFSTASDNQPTVTIKVYEGERPLTKDNHLLGTFDLTGIPPAPRGVPQIEVTFEIDVNGILRVTAEDKGTGNKNKITITNDQNRLTPEEIERMVNDAEKFAEEDKKLKERIDTRNELESYAYSLKNQIGDKEKLGGKLSSEDKETMEKAVEEKIEWLESHQDADIEDFKAKKKELEEIVQPIISKLYGSAGPPPTGEEDTAEKDEL

SEQ ID NO: 54384 - protein, 102 aa, Homo sapiens
KLNDNVSAYCLHIAEDDGEVDTDFPPLDSNEPIHKFGFSTLALVEKYSSPGLTSKESLFVRINAAHGFSLIQVDNTKVTMKEILLKAVKRRKGSQKVSGACD

SEQ ID NO: 54385 - protein, 132 aa, Homo sapiens
IHRLRFTTDVQLGISGDKVEIDPVTNQKASTKFWIKQKPISIDSDLLCACDLAEEKSPSHAIFKLTYLSNHDYKHLYFESDAATVNEIVLKVNYILESRASTARADYFAQKQRKLNRRTSFSFQKEKKSGQQ

SEQ ID NO: 54386 - protein, 6 aa, Homo sapiens
MDRLPR

SEQ ID NO: 54387 - protein, 506 aa, Homo sapiens
ILFTKNNHHFARTMRPLCVTCWWLGLLAAMGAVAGQEDGFEGTEEGSPREFIYLNRYKRAGESQDKCTYTFIVPQQRVTGAICVNSKEPEVLLENRVHKQELELLNNELLKQKRQIETLQQLVEVDGGIVSEVKLLRKESRNMNSRVTQLYMQLLHEIIRKRDNALELSQLENRILNQTADMLQLASKYKDLEHKYQHLATLAHNQSEIIAQLEEHCQRVPSARPVPQPPPAAPPRVYQPPTYNRIINQISTNEIQSDQNLKVLPPPLPTMPTLTSLPSSTDKPSGPWRDCLQALEDGHDTSSIYLVKPENTNRLMQVWCDQRHDPGGWTVIQRRLDGSVNFFRNWETYKQGFGNIDGEYWLGLENIYWLTNQGNYKLLVTMEDWSGRKVFAEYASFRLEPESEYYKLRLGRYHGNAGDSFTWHNGKQFTTLDRDHDVYTGNCAHYQKGGWWYNACAHSNLNGVWYRGGHYRSRYQDGVYWAEFRGGSYSLKKVVMMIRPNPNTFH

SEQ ID NO: 54388 - protein, 766 aa, Homo sapiens
LSSAGNSGGVGRIGPRHLLAMGDVLSTHLDDARRQHIAEKTGKILTEFLQFYEDQYGVALFNSMRHEIEGTGLPQAQLLWRKVPLDERIVFSGNLFQHQEDSKKWRNRFSLVPHNYGLVLYENKAAYERQVPPRAVINSAGYKILTSVDQYLELIGNSLPGTTAKSGSAPILKCPTQFPLILWHPYARHYYFCMMTEAEQDKWQAVLQDCIRHCNNGIPEDSKVEGPAFTDAIRMYRQSKELYGTWEMLCGNEVQILSNLVMEELGPELKAELGPRLKGKPQERQRQWIQISDAVYHMVYEQAKARFEEVLSKVQQVQPAMQAVIRTDMDQIITSKEHLASKIRAFILPKAEVCVRNHVQPYIPSILEALMVPTSQGFTEVRDVFFKEVTDMNLNVINEGGIDKLGEYMEKLSRLAYHPLKMQSCYEKMESLRLDGLQQRFDVSSTSVFKQRAQIHMREQMDNAVYTFETLLHQELGKGPTKEELCKSIQRVLERVLKKYDYDSSSVRKRFFREALLQISIPFLLKKLAPTCKSELPRFQELIFEDFARFILVENTYEEVVLQTVMKDILQAVKEAAVQRKHNLYRDSMVMHNSDPNLHLLAEGAPIDWGEEYSNSGGGGSPSPSTPESATLSEKRRRAKQVVSVVQDEEVGLPFEASPESPPPASPDGVTEIRGLLAQGLRPESPPPAGPLLNGAPAGESPQPKAAPEASSPPASPLQHLLPGKAVDLGPPKPSDQETGEQVSSPSSHPALHTTTEDSAGVQTEF

SEQ ID NO: 54389 - protein, 731 aa, Homo sapiens
ILRTATPAQPRVPVSTSPDPSAATPEGWSRDAVAPAACSPRVPVRAHAGPGARPQPCHWTQDKAQRTGPHVDSMDRGTLPLAVALLLASCSLSPTSLAETVHCDLQPVGPERGEVTYTTSQVSKGCVAQAPNAILEVHVLFLEFPTGPSQLELTLQASKQNGTWPREVLLVLSVNSSVFLHLQALGIPLHLAYNSSLVTFQEPPGVNTTELPSFPKTQILEWAAERGPITSAAELNDPQSILLRLGQAQGSLSFCMLEASQDMGRTLEWRPRTPALVRGCHLEGVAGHKEAHILRVLPGHSAGPRTVTVKVELSCAPGDLDAVLILQGPPYVSWLIDANHNMQIWTTGEYSFKIFPEKNIRGFKLPDTPQGLLGEARMLNASIVASFVELPLASIVSLHASSCGGRLQTSPAPIQTTPPKDTCSPELLMSLIQTKCADDAMTLVLKKELVAHLKCTITGLTFWDPSCEAEDRGDKFVLRSAYSSCGMQVSASMISNEAVVNILSSSSPQRKKVHCLNMDSLSFQLGLYLSPHFLQASNTIEPGQQSFVQVRVSPSVSEFLLQLDSCHLDLGPEGGTVELIQGRAAKGNCVSLLSPSPEGDPRFSFLLHFYTVPIPKTGTLSCTVALRPKTGSQDQEVHRTVFMRLNIISPDLSGCTSKGLVLPAVLGITFGAFLIGALLTAALWYIYSHTRSPSKREPVVAVAAPASSESSSTNHSIGSTQSTPCSTSSMA

SEQ ID NO: 54390 - protein, 66 aa, Homo sapiens
VRRSCRSMATPTSPPGTSCGPRSAQARPGARSCRKSWRRGSWFHWRQCWTCSGMPWWPKSILPKAS

SEQ ID NO: 54391 - protein, 65 aa, Homo sapiens
IFTYYTAWVILLPFIDSQHVIHKYFLPRAYAVAIPLAAGLLLLLFVGLFISYVMLKTKRVTKKAQ

SEQ ID NO: 54392 - protein, 246 aa, Homo sapiens
RRWCNTCQLYYMGDLIQHRRTQDHKIAKQSLRPFCTVCNRYFKTPRKFVEHVKSQGHKDKAKELKSLEKEIAGQDEDHFITVDAVGCFEGDEEEEEDDEDEEEIEVEEELCKQVRSRDISREEWKGSETYSPNTAYGVDFLVPVMGYICRICHKFYHSNSGAQLSHCKSLGHFENLQKYKAAKNPSPTTRPVSRRCAINARNALTALFTSSGRPPSQPNTQDKTPSKVTARPSQPPLPRRSTRLKT

SEQ ID NO: 54393 - protein, 55 aa, Homo sapiens
VSRRCAINARNALTALFTSSGRPPSQPNTQDKTPSKVTARPSQPPLPRRSTRLKT

SEQ ID NO: 54394 - protein, 40 aa, Homo sapiens
IMQLLREMQNPRERPGLGSNPCIPFFYRADENDEVKITVI

SEQ ID NO: 54395 - protein, 33 aa, Homo sapiens
LTRNLAHFFCGWPSGSWETLWAEEEEEGSSPAV

SEQ ID NO: 54396 - protein, 100 aa, Homo sapiens
IQSWDINSRRNINYRSFEPILRLLPQGISPVSQHWATWALYNLVSVYPDKYCPLLIKEGGMPLLRDIIKMATARQETKEMARKVIEHCSNFKEENMDTSR

SEQ ID NO: 54397 - protein, 385 aa, Homo sapiens
IMKHSLSVGEVIEVLEVLLIFVYLNMILLYLLPRCFTPGEALLVLGGISFVLNQLIKRSLTLVESQGDPVDFFLLVVVVGMVLMGIFFSTLFVFMDSGTWASSIFFHLMTCVLSLGVVLPWLHRLIRRNPLLWLLQFLFQTDTRIYLLAYWSLLATLACLVVLYQNAKRSSSESKKHQAPTIARKYFHLIVVATYIPGIIFDRPLLYVAATVCLAVFIFLEYVRYFRIKPLGHTLRSFLSLFLDERDSGPLILTHIYLLLGMSLPIWLIPRPCTQKGSLGGARALVPYAGVLAVGVGDTVASIFGSTMGEIRWPGTKKTFEGTMTSIFAQIISVALILIFDSGVDLNYSYAWILGSISTVSLLEAYTTQIDNLLLPLYLLILLMA

SEQ ID NO: 54398 - protein, 54 aa, Homo sapiens [sequence omitted]

SEQ ID NO: 54399 - protein, 149 aa, Homo sapiens
VLDLDTHVVTTVENGYLHQDCCASAHCPCCGQGAPGPGLASAAGCKRKYYPGQEEEEDDEEDAGGLGAEPPGGAPFAPCKRARFEDFCPDSSPDASNISNLISIFGSGFSGLVSRQPDSSEQPPPLNGQLCAKQALASLGAWTRAIVAF

SEQ ID NO: 54400 - protein, 155 aa, Homo sapiens
LKSFKLHFPLLRFLLESGAAYNCSLHGASCWSGFHIIFERLCSHPGCTEDESHADLLRKAETVLDLMVTNSQKLQLPENFDIHPVGSLAEKIQALHFSLRQLESYPPPLKHLCRVAIRLYLQPWPVDVKVKALPLPDRLKWYLLSEHSGSVEDDI

SEQ ID NO: 54401 - protein, 146 aa, Homo sapiens
VMSSPALPAFLLCSTLLVIKMYVVAIITGQVRLRKKAFANPEDALRHGGPQYCRSDPDVERCLRAHRNDMETIYPFLFLGFVYSFLGPNPFVAWMHFLVFLVGRVAHTVAYLGKLRAPIRSVTYTLAQLPCASMALQILWEAARHL

SEQ ID NO: 54402 - protein, 268 aa, Homo sapiens
LDDNLFGQHLAKKIILNAVFGFINNPKPKKPLTLSLHGWTGTGKNFVSKIIAENIYEGGLNSDYVHLFVATLHFPHASNITLYKDQLQLWIRGNVSACARSIFIFDEMDKMHAGLIDAIKPFLDYYDLVDGVSYQKAMFIFLSNAGAERITDVALDFWRSGKQREDIKLKDIEHALSVSVFNNKNSGFWHSSLIDRNLIDYFVPFLPLEYKHLKMCIRVEMQSRGYEIDEDIVSRVAEEMTFFPKEERVFSDKGCKTVFTKLDYYYDD

SEQ ID NO: 54403 - protein, 207 aa, Homo sapiens
KERGKDKISEEEDLHLGTSFSAETNRRDEDADMMKYIETELKKRKGIVEHEEQKVKPKNAEDCLYELPENIRVSSAKKTEEMLSNQMLSGIPEVDLGIDAKIKNIISTEDAKARLLAEQQNKKKDSETSFVPTNMAVNYVQHNRFYHEELNAPIRRNKEEPKARPLRVGDTEKPEPERSPPNRKRPANEKATDDYHYEKFKKMNRRY

SEQ ID NO: 54404 - protein, 38 aa, Homo sapiens
IEEDKGDGWTRIRRNEDEEGYVPTSYVEVCLDKNAKDS

SEQ ID NO: 54405 - protein, 259 aa, Homo sapiens
IAHFQDNLHSVNRDLNELERLSNLVGKPSENHPLHNSGLLSLDPVQDKTPLYSQLLQAYKWSNKLQYHAGLASGLLNQQSLKRSANQMGVSAKRRPKAQPTTLVLPPQYVDDVISRIDRMFPEMSIHLSRPNGTSAMLLVTLGKVLKVIVVMRSLFIDRTIVKGYNENVYTEDGKLDIWSKSNYQVFQKVTDHATTALLHYQLPQMPDVVVRSFMTWLRSYIKLFQAPCQRCGKFLQDGLPPTWRDFRTLEAFHDTCRQ

SEQ ID NO: 54406 - protein, 47 aa, Homo sapiens
KTELGKDLGVEAKIPLNLDGPHPSPPTPDSVGQLHIMDYNETHHEHS

SEQ ID NO: 54407 - protein, 51 aa, Homo sapiens
TAGVVEKMQQRQDRRRQNLRRKKAARAERRLLRARKKGRILPQDLERAGLV

SEQ ID NO: 54408 - protein, 67 aa, Homo sapiens
IYKLTGTGPKNITKKMIDKLYKYSSDRKQFNLIPAKTMSVSVDALTIHNHLWQPKRPAVPKKAQTRK

SEQ ID NO: 54409 - protein, 264 aa, Homo sapiens
VAWRPSRCGSSAAEASATKAEDDSFLQWVLLLIPVTAFGLGTWQVQRRKWKLNLIAELESRVLAEPVPLPADPMELKNLEYRPVKVRGCFDHSKELYMMPRTMVDPVREAREGGLISSSTQSGAYVVTPFHCTDLGVTILVNRGFVPRKKVNPETRQKGQIEGEVDLIGMVRLTETRQPFVPENNPERNHWHYRDLEAMARITGAEPIFIDANFQSTVPGGPIGGQTRVTLRNEHLQYIVTWYGLSAATSYLWFKKFLRGTPGV

SEQ ID NO: 54410 - protein, 481 aa, Homo sapiens
LALGLRGLQAGARRAPDPGFQERFFQQRLDHFNFERFGNKTFPQRFLVSDRFWVRGEGPIFFYTGNEGDVWAFANNSAFVAELAAERGALLVFAEHRYYGKSLPFGAQSTQRGHTELLTVEQALADFAELLRALRRDLGAQDAPAIAFGGSYGGMLSAYLRMKYPHLVAGALAASAPVLAVAGLGDSNQFFRDVTADFEGQSPKCTQGVREAFRQIKDLFLQGAYDTVRWEFGTCQPLSDEKDLTQLFMFARNAFTVLAMMDYPYPTDFLGPLPANPVKVGCDRLLSEAQRITGLRALAGLVYNASGSEHCYDIYRLYHSCADPTGCGTGPDARAWDYQACTEINLTFASNNVTDMFPDLPFTDELRQRYCLDTWGVWPRPDWLLTSFWGGDLRAASNIIFSNGNLDPWAGGGIRRNLSASVIAVTIQGGAHHLDLRASHPEDPASVVEARKLEATIIGEWVKAARREQQPALRGGPRLSL

SEQ ID NO: 54411 - protein, 196 aa, Homo sapiens
KTVQAAPPALPGPPGAPVNMYSRRAAGTRARYVDVLNPSGTQRSEPALAPADFVAPLAPLPIPSNLFVPTPDAEEPQLPDGTGREGPAAARGLANPEPAPEPKVLSSAASLPGSELPSSRPEGSQGGELSRCSSMSSLSREVSQHFNQAPGDLPAAGGPPSGAMPFYNPAQLAQACATSGSSRLGRIGQRKHLVLN

SEQ ID NO: 54412 - protein, 243 aa, Homo sapiens
LCFTVSAVASLVCLLRHGGRTVENMSIIGWFVRSFKYFYGLRFEVRDPRRLQEARPCVIVSNHQSILDMMGLMEVLPERCVQIAKRELLFLGPVGLIMYLGGVFFINRQRSSTAMTVMADLGERMVRENLKVWIYPEGTRNDNGDLLPFKKGAFYLAVQAQVPIVPVVYSSFSSFYNTKKKFFTSGTVTVQVLEAIPTSGLTAADVPALVDTCHRAMRTTFLHISKTPQENGATAGSGVQPAQ

SEQ ID NO: 54413 - protein, 56 aa, Homo sapiens
VCPLVERALPALRGFQPGSFGKPGRLLTGDDTCVGCWHSCYLTREGGDFACDGLPV

SEQ ID NO: 54414 - protein, 32 aa, Homo sapiens
IKAWRSPRTMRVLQAPRPRPRTFFSWLASQRR

SEQ ID NO: 54415 - protein, 4 aa, Homo sapiens
MTSI

SEQ ID NO: 54416 - protein, 101 aa, Homo sapiens
IESKTAFQEALDAAGDKLVVVDFSATWCGPCKMIKPFFHSLSEKYSNVIFLEVDVDDCQDVASECEVKCMPTFQFFKKGQKVGEFSGANKEKLEATINELV

SEQ ID NO: 54417 - protein, 16 aa, Homo sapiens
LRSLDCVCPQCQMKGR

SEQ ID NO: 54418 - protein, 59 aa, Homo sapiens
KPAKVGCTGHSLPTVTRLSRAQIHAPASVGTKAALLGNSGERARGNRRSSTLQVLLPRT

SEQ ID NO: 54419 - protein, 17 aa, Homo sapiens
KYIPSRGPLDKWRALHS

SEQ ID NO: 54420 - protein, 581 aa, Homo sapiens
IEIIRNQKQIANIDRITKYMSRVHGMHPKETTRQLSLAVKDGLIVETLTVGCKGSKAGIEQEGYWLPGDEIDWETENHDWYCFECHLPGEVLICDLCFRVYHSKCLSDEFRLRDSSSPWQCPVCRSIKKKNTNKQEMGTYLRFIVSRMKERAIDLNKKGKDNKHPMYRRLVHSAVDVPTIQEKVNEGKYRSYEEFKADAQLLLHNTVIFYGADSEQADIARMLYKDTCHELDELQLCKNCFYLSNARPDNWFCYPCIPNHELVWAKMKGFGFWPAKVMQKEDNQVDVRFFGHHHQRAWIPSENIQDITVNIHRLHVKRSMGWKKACDELELHQRFLREGRFWKSKNEDRGEEEAESSISSTSNEQLKVTQEPRAKKGRRNQSVEPKKEEPEPETEAVSSSQEIPTMPQPIEKVSVSTQTKKLSASSPRMLHRSTQTTNDGVCQSMCHDKYTKIFNDFKDRMKSDHKRETERVVREALEKLRSEMEEEKRQAVNKAVANMQGEMDRKCKQVKEKCKEEFVEEIKKLATQHKQLISQTKKKQWCYNCEEEAMYHCCWNTSYCSIKCQQEHWHAEHKRTCRRKR

SEQ ID NO: 54421 - protein, 294 aa, Homo sapiens
IATQMRTHSINALLIIGGFEAYLGLLELSAAREKHEEFCVPMVMVPATVSNNVPGSDFSIGADTALNTITDTCDRIKQSASGTKRRVFIIETMGGYCGYLANMGGLAAGADAAYIFEEPFDIRDLQSNVEHLTEKMKTTIQRGLVLRNESCSENYTTDFIYQLYSEEGKGVFDCRKNVLGHMQQGGAPSPFDRNFGTKISARAMEWITAKLKEARGRGKKFTTDDSICVLGISKRNVIFQPVAELKKQTDFEHRIPKEQWWLKLRPLMKILAKYKASYDVSDSGQLEHVQPWSV

SEQ ID NO: 54422 - protein, 27 aa, Homo sapiens
KTHQTQPGIRRARDKALSGGKRKETLV

SEQ ID NO: 54423 - protein, 87 aa, Homo sapiens
KSFQSANIIELLHYHQCDSRSSTKAEILKCLLNLQIQHIDARFAVLLTDKPTIPREVFENSGILVTDVNNFIENIEKIAAPFRSSYW

SEQ ID NO: 54424 - protein, 34 aa, Homo sapiens
LAFLTASPEQVRAMERTVENIVLPRHEALLFLVF

SEQ ID NO: 54425 - protein, 123 aa, Homo sapiens
VGDATEKDASKKSDSNPLTEILKCPTKVVLLRNMVGAGEVDEDLEVETKEECEKYGKVGKCVIFEIPGAPDDEAVRIFLEFERVESAIKAVVDLNGRYFGGRVVKACFYNLDKFRVLDLAEQV

SEQ ID NO: 54426 - protein, 326 aa, Homo sapiens
VTEMDSKYQCVKLNDGHFMPVLGFGTYAPAEVPKSKALEATKLAIEAGFRHIDSAHLYNNEEQVGLAIRSKIADGSVKREDIFYTSKLWCNSHRPELVRPALERSLKNLQLDYVDLYLIHFPVSVKPGEEVIPKDENGKILFDTVDLCATWEAVEKCKDAGLAKSIGVSNFNRRQLEMILNKPGLKYKPVCNQVECHPYFNQRKLLDFCKSKDIVLVAYSALGSHREEPWVDPNSPVLLEDPVLCALAKKHKRTPALIALRYQLQRGVVVLAKSYNEQRIRQNVQVFEFQLTSEEMKAIDGLNRNVRYLTLDIFAGPPNYPFSDEY

SEQ ID NO: 54427 - protein, 125 aa, Homo sapiens
LNSATQKQTESYLRPLFRKLRKRNLPADIKESITDIIKFMLQREYVKANDAYLQMAIGNAPWPIGVTMVGIHARTGREKIFSKHVAHVLNDETQRKYIQGLKRLMTICQKHFPTDPSKCVEYNAL

SEQ ID NO: 54428 - protein, 74 aa, Homo sapiens
VAVYKDGRAGVVANDAGDRVTPAVVAYSENEEIVGLAAKQSRIRNISNTVMKVKQILGRSQKCGPWTWLLSNYP

SEQ ID NO: 54429 - protein, 100 aa, Homo sapiens
KNTTDFVDEVRAIIPRVPSLSVPWLQDRIEDSGENLETEPLESQDRELLDTSFEDLSKPKRKLADGRQASVTLQPLKIKKLIPNPNKIRKPPKSKKATPK

SEQ ID NO: 54430 - protein, 523 aa, Homo sapiens
LVSDLDPLKNWKVLRETATELAGSLPSNGTANKMNGALDHSDQPDPDAIKMFVGQIPRSWSEKELKELFEPYGAVYQINVLRDRSQNPPQSKGCCFVTFYTRKAALEAQNALHNIKTLPGMHHPIQMKPADSEKSNAVEDRKLFIGMVSKKCNENDIRVMFSPFGQIEECRILRGPDGLSRGCAFVTFSTRAMAQNAIKAMHQSQTMEGCSSPIVVKFADTQKDKEQRRLQQQLAQQMQQLNTATWGNLTGLGGLTPQYLALLQQATSSSNLGAFSGIQQMAGMNALQLQNLATLAAAAAAAQTSATSTNANPLSTTSSALGALTSPVAASTPNSTAGAAMNSLTSLGTLQGLAGATVGLNNINALAVAQMLSGMAALNGGLGATGLTNGTAGTMDALTQAYSGIQQYAAAALPTLYSQSLLQQQSAAGSQKEGPEGANLFIYHLPQEFGDQDILQMFMPFGNVISAKVFIDKQTNLSKCFGFVSYDNPVSAQAAIQAMNGFQIGMKRLKVQLKRSKNDSKPY

SEQ ID NO: 54431 - protein, 503 aa, Homo sapiens
LLVPDRINGTANKMNGALDHSDQPDPDAIKMFVGQIPRSWSEKELKELFEPYGAVYQINVLRDRSQNPPQSKGCCFVTFYTRKAALEAQNALHNIKTLPGMHHPIQMKPADSEKSNAVEDRKLFIGMVSKKCNENDIRVMFSPFGQIEECRILRGPDGLSRGCAFVTFSTRAMAQNAIKAMHQSQTMEGCSSPIVVKFADTQKDKEQRRLQQQLAQQMQQLNTATWGNLTGLGGLTPQYLALLQQATSSSNLGAFSGIQQMAGMNALQLQNLATLAAAAAAAQTSATSTNANPLSTTSSALGALTSPVAASTPNSTAGAAMNSLTSLGTLQGLAGATVGLNNINALAVAQMLSGMAALNGGLGATGLTNGTAGTMDALTQAYSGIQQYAAAALPTLYSQSLLQQQSAAGSQKEGPEGANLFIYHLPQEFGDQDILQMFMPFGNVISAKVFIDKQTNLSKCFGFVSYDNPVSAQAAIQAMNGFQIGMKRLKVQLKRSKNDSKPY

SEQ ID NO: 54432 - protein, 7 aa, Homo sapiens
LMAALQS

SEQ ID NO: 54433 - protein, 521 aa, Homo sapiens
LAAAGVMLLCHFFTDQFQFADGKPGDQILDWQYGVTQAFPHTEEEVEVDSHAYSHRWKRNLDFLKAVDTNRASVGQDSPEPRSFTDLLLDDGQDNNTQIEEDTDHNYYISRIYGPSDSASRDLWVNIDQMEKDKVKIHGILSNTHRQAARVNLSFDFPFYGHFLREITVATGGFIYTGEVVHRMLTATQYIAPLMANFDPSVSRNSTVRYFDNGTALVVQWDHVHLQDNYNLGSFTFQATLLMDGRIIFGYKEIPVLVTQISSTNHPVKVGLSDAFVVVHRIQQIPNVRRRTIYEYHRVELQMSKITNISAVEMTPLPTCLQFNRCGPCVSSQIGFNCSWCSKLQRCSSGFDRHRQDWVDSGCPEESKEKMCENTEPVETSSRTTTTVGATTTQFRVLTTTRRAVTSQFPTSLPTEDDTKIALHLKDNGASTDDSAAEKKGGTLHAGLIIGILILVLIVATAILVTVYMYHHPTSAASIFFIERRPSRWPAMKFRRGSGHPAYAEVEPVGEKEGFIVSEQC

SEQ ID NO: 54434 - protein, 23 aa, Homo sapiens
RLKGFGYAEFEDLDSLLSALSLN

SEQ ID NO: 54435 - protein, 42 aa, Homo sapiens
RFEKQLACKLRLVGRPPLPVPAVGIGTVHLHQHEDILAKTFA

SEQ ID NO: 54436 - protein, 331 aa, Homo sapiens
VLHCQFSAWYPFFRGVTIKSVILPLPQNVKDYLLDDGTLVVSGRDDPPTHSQPDSDDEAEEIQWSDDENTATLTAPEFPEFATKVQEAINSLGGSVFPKLNWSAPRDAYWIAMNSSLKCKTLSDIFLLFKSSDFITRDFTQPFIHCTDDSPDPCIEYELVLRKWCELIPGAEFRCFVKENKLIGISQRDYTQYYDHISKQKEEIRRCIQDFFKKHIQYKFLDEDFVFDIYRDSRGKVWLIDFNPFGEVTDSLLFTWEELISENNLNGDFSEVDAQEQDSPAFRCTNSEVTVQPSPYLSYRLPKDFVDLSTGEDAHKLIDFLKLKRNQQEDD

SEQ ID NO: 54437 - protein, 67 aa, Homo sapiens
MRKLHLGSSLDSSNASVSSSLSLASQKDCLAPSTLCSFISSSSGVSGVGAERRPRPTTVTAVHSGSK

SEQ ID NO: 54438 - protein, 4 aa, Homo sapiens
KISQ

SEQ ID NO: 54439 - protein, 58 aa, Homo sapiens
IFANKQDMKGCMTAAEISKYLTLSSIKDHPWHIQSCCALTGEGLCQGLEWMTSRIGVR

SEQ ID NO: 54440 - protein, 182 aa, Homo sapiens
LADPRSFDSNAFTLLLRAAFQSLLDAQADEAVLDHPDLKHIDPVVLKHCHAAAATYILEAGKHRADKSTLSTYLEDCKFDRERIELFCTEYQNNKNSLEILLGSIGRSLPHITDVSWRLEYQIKTNQLHRMYRPAYLVTLSVQNTDSPSYPEISFSCSMEQLQDLVGKLKDASKSLERATQL

SEQ ID NO: 54441 - protein, 456 aa, Homo sapiens
LADPRSFDSNAFTLLLRAAFQSLLDAQADEAVLDHPDLKHIDPVVLKHCHAAAATYILEAGKHRADKSTLSTYLEDCKFDRERIELFCTEYQNNKNSLEILLGRTLIPHPIQRLVLVAAWNNYRIFYQAEMHRTTRIKITELNPHLMCVLCGGYFIDATTIIECLHSFCKTCIVRYLETSKYCPICDVQVHKTRPLLNIRSDKTLQDIVYKLVPGLFKNEMKRRRDFYAAHPSADAANGSNEDRGEVADEDKRIITDDEIISLSIEFFDQNRLDRKVNKDKEKSKEEVNDKRYLRCPAAMTVMHLRKFLRSKMDIPNTFQIDVMYEEEPLKDYYTLMDIAYIYTWRRNGPLPLKYRVRPTCKRMKISHQRDGLTNAGELESDSGSDKANSPAGGIPSTSSCLPSPSTPVQSPHPQFPHISSTMNGTSNSPSGNHQSSFANRPRKSSVNGSSATSSG

SEQ ID NO: 54442 - protein, 35 aa, Homo sapiens
IYFRSSRLETYRPSGFKTLSCSSCNLHTRGRKAPS

SEQ ID NO: 54443 - protein, 176 aa, Homo sapiens
LLRGLTLGTAPRRAVRGQAGGGGPGTGPGLGEAGSLATCELPLAKSEWQKKLTPEQFYVTREKGTEPPFSGIYLNNKEAGMYHCVCCDSPLFSSEKKYCSGTGWPSFSEAHGTSGSDESHTGILRRLDTSLGSARTEVVCKQCEAHLGHVFPDGPGPNGQRFCINSVALKFKPRKH

SEQ ID NO: 54444 - protein, 160 aa, Homo sapiens
IETELRDICNDVLSLLEKFLIPSASQAESKVFYLKMEGDYYRYLAEVAAGDDKKGIVDQSQQAYQEAFEISKKEMQPTHPIRLGLALNFSVFYYEILNSPEKACSLAKTAFDEAIAELDTLSEESYKDSTLIMQLLRDNLTLWTSDTQADEGEAGEGVEN

SEQ ID NO: 54445 - protein, 14 aa, Homo sapiens
ISLSKMYIEQNACS

SEQ ID NO: 54446 - protein, 57 aa, Homo sapiens
RSGATVPPKEKKGSSGAPQTSRMPVPMSAKNRPGTLDKPGKQSKLQDPRQYRQVVLP

SEQ ID NO: 54447 - protein, 90 aa, Homo sapiens
IPSVSNGSLKFQSLTHTGKGHHLSFSPQSQNGRAPPPLSFSSSPPSPASSVSLNQGAKGTRTIHTPSLTSYKAQNGSSSKATPSTAKETS

SEQ ID NO: 54448 - protein, 28 aa, Homo sapiens
IHTPSLTSYKAQNGSSSKATPSTAKETS

SEQ ID NO: 54449 - protein, 463 aa, Homo sapiens
LDNLFEKTHCDCNVDWCLYEIYPELQIERFFEDHENVVEVLSDWTRDTENKILFLEKEEKYAVFKNPQNFYLDNRGKKESKETNEKMNAKNKESLLEESFCGTSIIVPELEGALYLKEDGKKSWKRRYFLLRASGIYYVPKGKTKTSRDLACFIQFENVNIYYGTQHKMKYKAPTDYCFVLKHPQIQKESQYIKYLCCDDTRTLNQWVMGIRIAKYGKTLYDNYQRAVAKAGLASRWTNLGTVNAAAPAQPSTGPKTGTTQPNGQIPQATHSVSAVLQEAQRHAETSKDKKPALGNHHDPAVPRAPHAPKSSLPPPPPVRRSSDTSGSPATPLKAKGTGGGGLPAPPDDFLPPPPPPPPLDDPELPPPPPDFMEPPPDFVPPPPPSYAGIAGSELPPPPPPPPAPAPAPVPDSARPPPAVAKRPPVPPKRQENPGHPGGAGGGEQDFMSDLMKALQKKRGNVS

SEQ ID NO: 54450 - protein, 31 aa, Homo sapiens
IFGSNKCTTEQQQRFHEICSNLVKTRRRAVG

SEQ ID NO: 54451 - protein, 8 aa, Homo sapiens
KGAEGQLQ

SEQ ID NO: 54452 - protein, 74 aa, Homo sapiens
IYYSDKYDDKEFEYRHVMLPKDIAKLVPKTHLMSESEWRNLGVQQSQGWVHYMIHEPEPHILLFRRPLPKKPKK

SEQ ID NO: 54453 - protein, 1118 aa, Homo sapiens
KRRKQANPRRNNVTNYNTVVETNSDSDDEDKLHIVEEESVTDAADCEGVPEDDLPTDQTVLPGRSSEREGNAKNCWEDDTGKEGQEILGPEAQADEAGCTVKDDECESDAENEQNHDPNVEEFLQQQDTAVIFPEAPEEDQRQGTPEASGHDENGTPDAFSQLLTCPYCDRGYKRFTSLKEHIKYRHEKNEDNFSCSLCSYTFAYRTQLERHMTSHKSGRDQRHVTQSGCNRKFKCTECGKAFKYKHHLKEHLRIHSGEKPYECPNCKKRFSHSGSYSSHISSKKCISLIPVNGRPRTGLKTSQCSSPSLSASPGSPTRPQIRQKIENKPLQEQLSVNQIKTEPVDYEFKPIVVASGINCSTPLQNGVFTGGGPLQATSSPQGMVQAVVLPTVGLVSPISINLSDIQNVLKVAVDGNVIRQVLENNQANLASKEQETINASPIQQGGHSVISAISLPLVDQDGTTKIIINYSLEQPSQLQVVPQNLKKENPVATNSCKSEKLPEDLTVKSEKDKSFEGGVNDSTCLLCDDCPGDINALPELKHYDLKQPTQPPPLPAAEAEKPESSVSSATGDGNLSPSQPPLKNLLSLLKAYYALNAQPSAEELSKIADSVNLPLDVVKKWFEKMQAGQISVQSSEPSSPEPGKVNIPAKNNDQPQSANANEPQDSTVNLQSPLKMTNSPVLPVGSTTNGSRSSTPSPSPLNLSSSRNTQGYLYTAEGAQEEPQVEPLDLSLPKQQGELLERSTITSVYQNSVYSVQEEPLNLSCAKKEPQKDSCVTDSEPVVNVIPPSANPINIAIPTVTAQLPTIVAIADQNSVPCLRALAANKQTILIPQVAYTYSTTVSPAVQEPPLKVIQPNGNQDERQDTSSEGVSNVEDQNDSDSTPPKKKMRKTENGMYACDLCDKIFQKSSSLLRHKYEHTGKRPHECGICKKAFKHKHHLIEHMRLHSGEKPYQCDKCGKRFSHSGSYSQHMNHRYSYCKREAEERDSTEQEEAGPEILSNEHVGARASPSQGDSDERESLTREEDEDSEKEEEEEDKEMEELQEEKECEKPQGDEEEEEEEEEVEEEEVEEAENEGEEAKTEGLMKDDRAESQASSLGQKVGESSEQVSEEKTNEA

SEQ ID NO: 54454 - protein, 43 aa, Homo sapiens
INTCILKTSVDYKRKVFWYSHCGEMTCYSKEWSIGYCNFNFLF

SEQ ID NO: 54455 - protein, 8 aa, Homo sapiens
KLQIIILW

SEQ ID NO: 54456 - protein, 14 aa, Homo sapiens
MDFIYQIALFWISW

SEQ ID NO: 54457 - protein, 111 aa, Homo sapiens
RVEDGPSEFALYIVHESGERTKLKDCEYPLISRILHGPCEKIARIFLMEADLGVEVPHEVAQYIKFEMPVLDSFVEKLKEEEEREIIKLTMKFQALRLTMLQRLEQLVEAK

SEQ ID NO: 54458 - protein, 44 aa, Homo sapiens
IPGIPEPCCVPDKMNSLGVLFLDENRNVVLKVYPNMSVDTCACR

SEQ ID NO: 54459 - protein, 131 aa, Homo sapiens
IFPQTYSIDINGYILVYSVTSIKSFEVIKVIHGKLLDMVGKVQIPIMLVGNKKDLHMERVISYEEGKALAESWNAAFLESSAKENQTAVDVFRRMILEAEKMDGGSFTRQVFMLGDVILLQSPRTLGIYSS

SEQ ID NO: 54460 - protein, 1040 aa, Homo sapiens
MGRVDEEPTTLPSGEAKPRKTLKEKKERRTPSDDEEDNLFAPPKLTDEDFSPFGSGGGLFSGGKGLFDDEDEESDLFTEASQDRQAGASVKEESSSSKPGKKIPAGAVSVFLGDTDVFGAASVPSLKEPQKPEQPTPRKSPYGPPPTGLFDDDDGDDDDDFFSAPHSKPSKTGKVQSTADIFGDEEGDLFKEKAVASPEATVSQTDENKARAEKKVTLSYSKNLKPSSETKTQKGLFSDEEDSEDLFSSQSASNLKGASLLPGKLPTSVSLFDDEDEEDNLFGGTAAKKQTLSLQAQREEKAKASELSKKKASALLFSSDEEDQWNIPASQTHLASDSRSKGEPRDSGTLQSQEAKAVKKTSLFEEDKEDDLFAIAKDSQKKTQRVSLLFEDDVDSGGSLFGSPPTSVPPATKKKETVSEAPPLLFSDEEEKEAQLGVKSVDKKVESAKESLKFGRTDVAESEKEGLLTRSAQETVKHSDLFSSSSPWDKGTKPRTKTVLSLFDEEEDKMEDQNIIQAPQKEVGKGCDPDAHPKSTGVFQDEELLFSHKLQKDNDPDVDLFAGTKKTKLLEPSVGSLFGDDEDDDLFSSAKSQPLVQEKKRVVKKDHSVNSFKNQKHPESIQGSKEKGIWKPETPQDSSGLAPFKTKEPSTRIGKIQANLAINPAALLPTAASQISEVKPVLPELAFPSSEHRRSHGLESVPVLPGSGEAGVSFDLPAQADTLHSANKSRVKMRGKRRPQTRAARRLAAQESSEAEDMSVPRGPIAQWADGAISPNGHRPQLRAASGEDSTEEALAAAAAPWEGGPVPGVDTSPFAKSLGHSRGEADLFDSGDIFSTGTGSQSVERTKPKAKIAENPANPPVGGKAKSPMFPALGEASSDDDLFQSAKPKPAKKTNPFPLLEDEDDLFTDQKVKKNETKSSSQQDVILTTQDIFEDDIFATEAIKPSQKTREKEKTLESNLFDDNIDIFADLTVKPKEKSKKKVEAKSIFDDDMDDIFSTGIQAKTTKPKSRSAQAAPEPRFEHKVSNIFDDPLNAFGGQ

SEQ ID NO: 54461 - protein, 977 aa, Homo sapiens
KGLFDDEDEESDLFTEASQDRQAGASVKEESSSSKPGKKIPAGAVSVFLGDTDVFGAASVPSLKEPQKPEQPTPRKSPYGPPPTGLFDDDDGDDDDDFFSAPHSKPSKTRKVQSTADIFGDEEGDLFKEKAVASPEATVSQTDENKARAEKKVTLSYSKNLKPSSETKTQKGLFSDEEDSEDLFSSQSASNLKGASLLPGKLPTSVSLFDDEDEEDNLFGGTAAKKQTLSLQAQREEKAKASELSKKKASALLFSSDEEDQWNIPASQTHLASDSRSKGEPRDSGTLQSQEAKAVKKTSLFEEDKEDDLFAIAKDSQKKTQRVSLLFEDDVDSGGSLFGSPPTSVPPATKKKETVSEAPPLLFSDEEEKEAQLGVKSVDKKVESAKESLKFGRTDVAESEKEGLLTRSAQETVKHSDLFSSSSPWDKGTKPRTKTVLSLFDEEEDKMEDQNIIQAPQKEVGKGCDPDAHPKSTGVFQDEELLFSHKLQKDNDPDVDLFAGTKKTKLLEPSVGSLFGDDEDDDLFSSAKSQPLVQEKKRVVKKDHSVNSFKNQKHPESIQGSKEKGIWKPETPQDSSGLAPFKTKEPSTRIGKIQANLAINPAALLPTAASQISEVKPVLPELAFPSSEHRRSHGLESVPVLPGSGEAGVSFDLPAQADTLHSANKSRVKMRGKRRPQTRAARRLAAQESSEAEDMSVPRGPIAQWADGAISPNGHRPQLRAASGEDSTEEALAAAAAPWEGGPVPGVDTSPFAKSLGHSRGEADLFDSGDIFSTGTGSQSVERTKPKAKIAENPANPPVGGKAKSPMFPALGEASSDDDLFQSAKPKPAKKTNPFPLLEDEDDLFTDQKVKKNETKSSSQQDVILTTQDIFEDDIFATEAIKPSQKTREKEKTLESNLFDDNIDIFADLTVKPKEKSKKKVEAKSIFDDDMDDIFSTGIQAKTTKPKSRSAQAAPEPRFEHKVSNIFDDPLNAFGGQ

SEQ ID NO: 54462 - protein, 179 aa, Homo sapiens
LAGVPLTGMNPLSPYLNVDPRYLVQDTDEFILPTGANKTRGRFELAFFTIGGCCMTGAAFGAMNGLRLGLKETQNMAWSKPRNVQILNMVTRQGALWANTLGSLALLYSAFGVIIEKTRGAEDDLNTVAAGTMTGMLYKCTGGLRGIARGGLTGLTLTSLYALYNNWEHMKGSLLQQSL

SEQ ID NO: 54463 - protein, 106 aa, Homo sapiens
LTSSSSVRVEWIAAVTIAAGTAAIGYLAYKRFYVKDHRNKAMINLHIQKDNPKIVHAFDMEDLGDKAVYCRCWRSKKFPFCDGAHTKHNEETGDNVGPLIIKKKET

SEQ ID NO: 54464 - protein, 226 aa, Homo sapiens
LCTGCGSRLRSPFSFVYLPRWFSSVLASCPKKPVSSYLRFSKEQLPIFKAQNPDAKTTELIRRIAQRWRELPDSKKKIYQDAYRAEWQVYKEEISRFKEQLTPSQIMSLEKEIMDKHLKRKAMTKKKELTLLGKPKRPRSAYNVYVAERFQEAKGDSPQEKLKTVKENWKNLSDSEKELYIQHAKEDETRYHNEMKSWEEQMIEVGRKDLLRRTIKKQRKYGAEEC

SEQ ID NO: 54465 - protein, 245 aa, Homo sapiens
VLVFGMLYPAYYSYKAVKTKNVKEYVRWMMYWIVFALYTVIETVADQTVAWFPLYYELKIAFVIWLLSPYTKGASLIYRKFLHPLLSSKEREIDDYIVQAKERGYETMVNFGRQGLNLAATAAVTAAVKSQGAITERLRSFSMHDLTTIQGDEPVGQRPYQPLPEAKKKSKPAPSESAGYGIPLKDGDEKTDEEAEGPYSDNEMLTHKGLRRSQSMKSVKTTKGRKEVRYGSLKYKVKKRPQVYF

SEQ ID NO: 54466 - protein, 174 aa, Homo sapiens
LAGFFGAGEAGYSHADLAGVPLTGMNPLCPYLNVDPRYLVQDTDEFILPTGANKTWGRFELAFFTIGGCCMTGAAFGAMNGLRLGLKETQNMAWSKPGNVQILNMVTRQGALWANTLGSLALLYSAFGVIIEKTRGAEDDLNTVAAGTMTGMLYKCTVSEMALDSPFCVLLSGS

SEQ ID NO: 54467 - protein, 816 aa, Homo sapiens
KPSSETKTQKGLFSDEEDSEDLFSSQSASKLKGASLLPGKLPTLVSLFDDEDEEDNLFGGTAAKKQTLCLQAQREEKAKASELSKKKASALLFSSDEEDQWNIPASQTHLASDSRSKGEPRDSGTLQSQEAKAVKKTSLFEEDEEDDLFAIAKDSQKKTQRVSLLFEDDVDSGGSLFGSPPTSVPPATKKKETVSEAPPLLFSDEEEKEAQLGVKSVDKKVESAKESLKFGRTDVAESEKEGLLTRSAQETVKHSDLFSSSSPWDKGTKPRTKTVLSLFDEEEDKMEDQNIIQAPQKEVGKGRDPDAHPKSTGVFQDEELLFSHKLQKDNDPDVDLFAGTKKTKLLEPSVGSLFGDDEDDDLFSSAKSQPLVQEKKRVVKKDHSVDSFKNQKHPESIQGSKEKGIWKPETPQDSSGLAPFKTKEPSTRIGKIQANLAINPAALLPTAASQISEVKPVLPELAFPSSEHRRSHGLESVPVLPGSGEAGVSFDLPAQADTLHSANKSRVKMRGKRRPQTRAARRLAAQESSETEDMSVPRGPIAQWADGAISPNGHRPQLRAASGEDSTEEALAAAAAPWEGGPVPGVDRSPFAKSLGHSRGEADLFDSGDIFSTGTGSQSVERTKPKAKIAENPANPPVGGKAKSPMFPALGEASSDDDLFQSAKPKPAKKTNPFPLLEDEDDLFTDQKVKKNETKSNSQQDVILTTQDIFEDDIFATEAIKPSQKTREKEKTLESNLFDDNIDIFADLTVKPKEKSKKKVEAKSIFDDDMDDIFSSGIQAKTTKPKSRSAQAAPEPRFEHKVSNIFDDPLNAFGGQ

SEQ ID NO: 54468 - protein, 164 aa, Homo sapiens
LAQIREEKKRKEEERKKKETDQKKEAVAPVQEESDLEKRRREAEALLQSMGLTPESPIVPPPMSPSSKSVSTPSEAGSQDSGDGAVGSRRGPIKLGMAKITQVDFPPREIVTYTKETQTPVMAQPKKDEEEDDDVVAPKLPIEPEEEKTLKKDEENDSKAPPMS

SEQ ID NO: 54469 - protein, 56 aa, Homo sapiens
KQQILHSEEFLSFFDHSTRIVERALSEQINIFFHYSGRDLEDKEGEIQAGAKLSLN

SEQ ID NO: 54470 - protein, 16 aa, Homo sapiens
LFGLVISVSGVTRGFL

SEQ ID NO: 54471 - protein, 653 aa, Homo sapiens
IKELEKRLSEKEEEIQELKRKLHKCQSVLPVPSTHIGPRTTRAQGISAEPQTYRSFHDLRQAFRKFTKSERSKDLIKEAILDNDFMKNLELSQIQEIVDCMYPVEYGKDSCIIKEGDVGSLVYVMEDGKVEVTKEGVKLCTMGPGKVFGELAILYNCTRTATVKTLVNVKLWAIDRQCFQTIMMRTGLIKHTEYMEFLKSVPTFQSLPEEILSKLADVLEETHYENGEYIIRQGARGDTFFIISKGTVNVTREDSPSEDPVFLRTLGKGDWFGEKALQGEDVRTANVIAAEAVTCLVIDRDSFKHLIGGLDDVSNKAYEDAEAKAKYEAEAAFFANLKLSDFNIIDTLGVGGFGRVELVQLKSEESKTFAMKILKKRHIVDTRQQEHIRSEKQIMQGAHSDFIVRLYRTFKDSKYLYMLMEACLGGELWTILRDRGSFEDSTTRFYTACVVEAFAYLHSKGIIYRDLKPENLILDHRGYAKLVDFGFAKKIGFGKKTWTFCGTPEYVAPEIILNKGHDISADYWSLGILMYELLTGSPPFSGPDPMKTYNIILRGIDMIEFPKKIAKNAANLIKKLCRDNPSERLGNLKNGVKDIQKHKWFEGFNWEGLRKGTLTPPIIPSVASPTDTSNFDSFPEDNDEPPPDDNSGWDIDF

SEQ ID NO: 54472 - protein, 33 aa, Homo sapiens
RGLPDPDSAAEPARFRGDPGLQSDGHFLFLSPS

SEQ ID NO: 54473 - protein, 53 aa, Homo sapiens
IEEFYNGLEDEPDVPERAGGAGFGTDGDDQEAINEAISVKQEVTDMNYPSNKS

SEQ ID NO: 54474 - protein, 14 aa, Homo sapiens
KQSAEPRSSHSEGS

SEQ ID NO: 54475 - protein, 956 aa, Homo sapiens
RHQSGRCLSTGMAPNLKGRPRKKKPCPQRRDSFSGVKDSNNNSDGKAVAKVKCEARSALTKPKNNHNCKKVSNEEKPKVAIGEECRADEQAFLVALYKYMKERKTPIERIPYLGFKQINLWTMFQAAQKLGGYETITARRQWKHIYDELGGNPGSTSAATCTRRHYERLILPYERFIKGEEDKPLPPIKPRKQENSSQENENKTKVSGTKRIKHEIPKSKKEKENAPKPQDAAEVSSEQEKEQETLISQKSIPEPLPAADMKKKIEGYQEFSAKPLASRVDPEKDNETDQGSNSEKVAEEAGEKGPTPPLPSAPLAPEKDSALVPGASKQPLTSPSALVDSKQESKLCCFTESPESEPQEASFPSFPTTQPPLANQNETEDDKLPAMADYIANCTVKVDQLGSDDIHNALKQTPKVLVVQSFDMFKDKDLTGPMNENHGLNYTPLLYSRGNPGIMSPLAKKKLLSQVSGASLSSSYPYGSPPPLISKKKLIARDDLCSSLSQTHHGQSTDHMAVSRPSVIQHVQSFRSKPSEERKTINDIFKHEKLSRSDPHRCSFSKHHLNPLADSYVLKQEIQEGKDKLLEKRALPHSHMPSFLADFYSSPHLHSLYRHTEHHLHNEQTSKYPSRDMYRESENSSFPSHRHQEKLHVNYLTSLHLQDKKSAAAEAPTDDQPTDLSLPKNPHKPTGKVLGLAHSTTGPQESKGISQFQVLGSQSRDCHPKACRVSPMTMSGPKKYPESLSRSGKPHHVRLENFRKMEGMVHPILHRKMSPQNIGAARPIKRSLEDLDLVIAGKKARAVSPLDPSKEVSGKEKASEQESEGSKAAHGGHSGGGSEGHKLPLSSPIFPGLYSGSLCNSGLNSRLPAGYSHSLQYLKNQTVLSPLMQPLAFHSLVMQRGIFTSPTNSQQLYRHLAAATPVGSSYGDLLHNSIYPLAAINPQAAFPSSQLSSVHPSTKL

SEQ ID NO: 54476 - protein, 876 aa, Homo sapiens
IGEECRADEQAFLVALYKYMKERKTPIERIPYLGFKQINLWTMFQAAQKLGGYETITARRQWKHIYDELGGNPGSTSAATCTRRHYERLILPYERFIKGEEDKPLPPIKPRKQENSSQENENKTKVSGTKRIKHEIPKSKKEKENAPKPQDAAEVSSEQEKEQETLISQKSIPEPLPAADMKKKIEGYQEFSAKPLASRVDPEKDNETDQGSNSEKVAEEAGEKGPTPPLPSAPLAPEKDSALVPGASKQPLTSPSALVDSKQESKLCCFTESPESEPQEASFPSFPTTQPPLANQNETEDDKLPAMADYIANCTVKVDQLGSDDIHNALKQTPKVLVVQSFDMFKDKDLTGPMNENHGLNYTPLLYSRGNPGIMSPLAKKKLLSQVSGASLSSSYPYGSPPPLISKKKLIARDDLCSSLSQTHHGQSTDHMAVSRPSVIQHVQSFRSKPSEERKTINDIFKHEKLSRSDPHRCSFSKHHLNPLADSYVLKQEIQEGKDKLLEKRALPHSHMPSFLADFYSSPHLHSLYRHTEHHLHNEQTSKYPSRDMYRESENSSFPSHRHQEKLHVNYLTSLHLQDKKSAAAEAPTDDQPTDLSLPKNPHKPTGKVLGLAHSTTGPQESKGISQFQVLGSQSRDCHPKACRVSPMTMSGPKKYPESLSRSGKPHHVRLENFRKMEGMVHPILHRKMSPQNIGAARPIKRSLEDLDLVIAGKKARAVSPLDPSKEVSGKEKASEQESEGSKAAHGGHSGGGSEGHKLPLSSPIFPGLYSGSLCNSGLNSRLPAGYSHSLQYLKNQTVLSPLMQPLAFHSLVMQRGIFTSPTNSQQLYRHLAAATPVGSSYGDLLHNSIYPLAAINPQAAFPSSQLSSVHPSTKL

SEQ ID NO: 54477 - protein, 63 aa, Homo sapiens
LAPPYDPDDGRDCHYYRVLEPVRPKEASSSACDLPREVWLLETPQADDFWCEGEPYPGPKVFP

SEQ ID NO: 54478 - protein, 196 aa, Homo sapiens
KDAAAHLQTSHKPSAEDAEGQSPLSQKYSPSTEKCLPEIQGIFDRDPDTLLYLLQQKSEPAEPCIGSKAPKDDKTIIEEQATKIADLKRHVEFLVAENERLRKENKQLKAEKARLLKGPIEKELDVDADFVETSELWSLPPHAETATASSTWQKFAANTGKAKDIPIPNLPPLDFPSPELPLMELSEDILKGFMNN

SEQ ID NO: 54479 - protein, 32 aa, Homo sapiens
MVAELSSVFLDSLYSTDTVTQGSQMNGSPKPH

SEQ ID NO: 54480 - protein, 63 aa, Homo sapiens
TQKNSSEQFEKWRFSMPFKLAQVVQAACGPAMRLFGYKLARDAAALTNRSVSLLEERGTFWVT

SEQ ID NO: 54481 - protein, 431 aa, Homo sapiens
IIHESYKTDSEDNPQTLLFSATCPQWVYKVAKKYMKSRYEQVDLVGKMTQKAATTVEHLAIQCHWSQRPAVIGDVLQVYSGSEGRAIIFCETKKNVTEMAMNPHIKQNAQCLHGDIAQSQREITLKGFREGSFKVLVATNVAARGLDIPEVDLVIQSSPPQDVESYIHRSGRTGRAGRTGICICFYQPRERGQLRYVEQKAGITFKRVGVPSTMDLVKSKSMDAIRSLASVSYAAVDFFRPSAQRLIEEKGAVDALAAALAHISGASSFEPRSLITSDKGFVTMTLESLEEIQDVSCAWKELNRKLSSNAVSQITRMCLLKGNMGVCFDVPTTESERLQAEWHDSDWILSVPAKLPEIEEYYDGNTSSNSRQRSGWSSGRSGRSGRSGGRSGGRSGRQSRQGSRSGSRQDGRRRSGNRNRSRSGGHKRSFD

SEQ ID NO: 54482 - protein, 519 aa, Homo sapiens
VNHIDTEELSAGEEHLVKCLRLLRRYRLSHDCISLCIQAQNNLGILWSEREEIETAQAYLESSEALYNQYMKEVGSPPLDPTERFLPEEEKLTEQERSKRFEKVYTHNLYYLAQVYQHLEMFEKAAHYCHSTLKRQLEHNAYHPIEWAINAATLSQFYINKLCFMEARHCLSAANVIFGQTGKISATEDTPEAEGEVPELYHQRKGEIARCWIKYCLTLMQNAQLSMQDNIGELDLDKQSELRALRKKELDEEESIRKKAVQFGTGELCDAISAVEEKVSYLRPLDFEEARELFLLGQHYVFEAKEFFQIDGYVTDHIEVVQDHSALFKVLAFFETDMERRCKMHKRRIAMLEPLTVDLNPQYYLLVNRQIQFEIAHAYYDMMDLKVAIADRLRDPDSHIVKKINNLNKSALKYYQLFLDSLRDPNKVFPEHIGEDVLRPAMLAKFRVARLYGKIITADPKKELENLATSLEHYKFIVDYCEKHPEAAQEIEVELELSKEMVSLLPTKMERFRTKMALT

SEQ ID NO: 54483 - protein, 118 aa, Homo sapiens
LVLWGGLAYMATQFGILARLTWWEYSWDIMEPVTYFITYGSAMAMYAYFVMTRQEYVYPEARDRQYLLFFHKGAKKSRFDLEKYNQLKDAIAQAEMDLKRLRDPLQVHLPLRQIGEKD

SEQ ID NO: 54484 - protein, 323 aa, Homo sapiens [sequence omitted]

SEQ ID NO: 54485 - protein, 266 aa, Homo sapiens
LNCCTQLADLYRNCETDTLINYMAKFAYRGVLNSPVKAVRDTLITQCAQILACYRKNCASPSSAGQLILPECMKLLPVYLNCVLKSDVLQPGAEVTTDDRAYVRQLVTSMDVTETNVFFYPRLLPLTKSPVESTTEPPAVRASEERLSNGDIYLLENGLNLFLWVGASVQQGVVQSLFSVSSFSQITSGLSVLPVLDNPLSKKVRGLIDSLRAQRSRYMKLTVVKQEDKMEMLFKHFLVEDKSLSGGASYVDFLCHMHKEIRQLLS

SEQ ID NO: 54486 - protein, 64 aa, Homo sapiens
VPTPGFGNVEEIPENDSWKEMWLQDYWQGLDQGEALTAMIHNNETEQTKFWDYLHEIFMKRQHL

SEQ ID NO: 54487 - protein, 109 aa, Homo sapiens
LFWFTVITLSFGYYTWVVFWPQSIPYQNLGPLGPFTQYLVDHHHTLLCNGYWLAWLIHVGESLYAIVLCKHKGITSGRAQLLWFLQTFFFGIASLTILIAYKRKRQKQT

SEQ ID NO: 54488 - protein, 94 aa, Homo sapiens
LLCALTGLALLRAAGSLAAAEPFSPPRGDSAQSTACDRHMAVQRRLDVMEEMVEKTVDHLGTEVKGLLGLLEELAWNLPPGPFSPAPDLLGDGF

SEQ ID NO: 54489 - protein, 5 aa, Homo sapiens
MLQGV

SEQ ID NO: 54490 - protein, 11 aa, Homo sapiens
LPYPESRMELE

SEQ ID NO: 54491 - protein, 176 aa, Homo sapiens
KGSGDPSSSSSSGNPLVYLDVDANGKPLGRVVLELKADVVPKTAENFRALCTGEKGFGYKGSTFHRVIPSFMCQAGDFTNHNGTGGKSIYGSRFPDENFTLKHVGPGVLSMANAGPNTNGSQFFICTIKTDWLDGKHVVFGHVKEGMDVVKKIESFGSKSGRTSKKIVITDCGQLS

SEQ ID NO: 54492 - protein, 334 aa, Homo sapiens [sequence omitted]

SEQ ID NO: 54493 - protein, 407 aa, Homo sapiens
IRRWTTKHVAVWLKDEGFFEYVDILCNKHRLDGITLLTLTEYDLRSPPLEIKVLGDIKRLMLSVRKLQKIHIDVLEEMGYNSDSPMGSMTPFISALQSTDWLCNGELSHDCDGPITDLNSDQYQYMNGKNKHSVRRLDPEYWKTILSCIYVFIVFGFTSFIMVIVHERVPDMQTYPPLPDIFLDSVPRIPWAFAMTEVCGMILCYIWLLVLLLHKHRSILLRRLCSLMGTVFLLRCFTMFVTSLSVPGQHLQCTGKIYGSVWEKLHRAFAIWSGFGMTLTGVHTCGDYMFSGHTVVLTMLNFFVTEYTPRSWNFLHTLSWVLNLFGIFFILAAHEHYSIDVFIAFYITTRLFLYYHTLANTRAYQQSRRARIWFPMFSFFECNVNGTVPNEYCWPFSKPAIMKRLIG

SEQ ID NO: 54494 - protein, 33 aa, Homo sapiens
MSECWAHNPASRLTALRIKKTLAKMVESQDVKI

SEQ ID NO: 54495 - protein, 16 aa, Homo sapiens
IKSQNLLVLQILVVIS

SEQ ID NO: 54496 - protein, 36 aa, Homo sapiens
IQDFIFFCDAVASWINPKDDLRDTFGVRSFMDLKIK

SEQ ID NO: 54497 - protein, 105 aa, Homo sapiens
RTPTCKKSPIITTCNSAKLQPTSSQTNLANNQNLKASKLRPPSGSFKQKQTNSPQLEPQSFQAKTSIPRPLTQRKEIMQNPNGNLHSGDCLASNRYSRLPKPKIH

SEQ ID NO: 54498 - protein, 159 aa, Homo sapiens
KKKVVDPFSKKDWYDVNAPAMFNIRNIGKTLVTRTQGTKIASDGRVFEVSLADLQNDEVAFRKFKLITEDVQGKNCLTNFHGVDLTSDKMCSMVKKWQTMIEAHVDVKTTDGYLLRLFCVGFTKKRNNQIRKTSYAQHQQVLRNPEDLLCSVPAKSGRR

SEQ ID NO: 54499 - protein, 101 aa, Homo sapiens
IRKKMMEIMTREVQTNDLKEVVNKLIPDSIGKDVEKACQSIYPLHDVFVRKVKMLKKPKFELGKLMELHGEGCSSGKATGDETGVKVERADGYELPVQESV

SEQ ID NO: 54500 - protein, 438 aa, Homo sapiens
KTRYEDVNPVLLSGPEAPWRDPELLEGTCTPVQLVALIRHGTRYPTVKQIRKLRQLHGLLQARGSRDGGASSTGSRDLGAALADWPLWYADWMDGQLVEKGRQDMRQLALRLASLFPALFSRENYGRLRLITSSKHRCMDSSAAFLQGLWQHYHPGLPPPDVADMEFGPPTVNDKLMRFFDHCEKFLTEVEKNATALYHVEAFKTGPEMQNILKKVAATLQVPVNDLNADLIQVAFFTCSFDLAIKGVKSPWCDVFDIDDAKVLEYLNDLKQYWKRGYGYTINSRSSCTLFQDIFQHLDKAVEQKQRSQPISSPVILQFGHAETLLPLLSLMGYFKDKEPLTAYNYKKQMHRKFRSGLIVPYASNLIFVLYHCENAKTPKEQFRVQMLLNEKVLPLAYSQETVSFYEDLKNHYKDILQSCQTSEECELARANSTSDEL

SEQ ID NO: 54501 - protein, 5 aa, Homo sapiens
MTMCL

SEQ ID NO: 54502 - protein, 479 aa, Homo sapiens
IRKDTLKAILLELECHFTWNLLKEDIDLFEVEDTIGQQLEFLTTKSRLALYNLLAYVKHLKGQNKDALECLEQAEEIIQQEHSDKEEVRSLVTWGNYAWVYYHMDQLEEAQKYTGKIGNVCKKLSSPSNYKLECPETDCEKGWALLKFGGKYYQKAKAAFEKALEVEPDNPEFNIGYAITVYRLDDSDREGSVKSFSLGPLRKAVTLNPDNSYIKVFLALKLQDVHAEAEGEKYIEEILDQISSQPYVLRYAAKFYRRKNSWNKALELLKKALEVTPTSSFLHHQMGLCYRAQMIQIKKATHNRPKGKDKLKVDELISSAIFHFKAAMERDSMFAFAYTDLANMYAEGGQYSNAEDIFRKALRLENITDDHKHQIHYHYGRFQEFHRKSENTAIHHYLEALKVKDRSPLRTKLTSALKKLSTKRLCHNALDVQSLSALGFVYKLEGEKRQAAEYYEKAQKIDPENAEFLTALCELRLSI

SEQ ID NO: 54503 - protein, 248 aa, Homo sapiens
VKDFNPYITCYICKGYLIKPTTVTECLHTFCKTCIVQHFEDSNDCPRCGNQVHETNPLEMLRLDNTLEEIIFKLVPGLREQELERESEFWKKNKPQENGQDDTSKADKPKVDEEGDENEDDKDYHRSDPQIAICLDCLRNNGQSGDNVVKGLMKKFIRCSTRVTVGTIKKFLSLKLKLPSSYELDVLCNGEIMGKDHTMEFIYMTRWRLRGENFRCLNCSASQVCSQDGPLYQSYPMVLQYRPRIDFG

SEQ ID NO: 54504 - protein, 33 aa, Homo sapiens
KRPTCVIMVKPHEEYQEAYDECLEEVQSLPLPL

SEQ ID NO: 54505 - protein, 25 aa, Homo sapiens
RSKVEETTEHLVTKSRLPLRAQINL

SEQ ID NO: 54506 - protein, 36 aa, Homo sapiens
KVPQKKVKLAADEDDDDDDDDFDEETKEKPPVKKST

SEQ ID NO: 54507 - protein, 197 aa, Homo sapiens
LVLDGRGHLLGRLAAIVAKQVLLGRKVVVVRCEGINISGNFYRNKLKYLAFLRKRMNTNPSRVPYHFRAPSRIFWRTVRGMLPHKTKRGQAALDRLKVFDGIPPPYDKKKRMVVPAALKVVRLKPTRKFAYLGRLAHEVGWKYQAVTATLEEKRKEKAKIHYRKKKQLMRLRKQAEKNVEKKIDKYTEVLKTHGLLV

SEQ ID NO: 54508 - protein, 862 aa, Homo sapiens
LLNCHNKSAIDLAPTPQLKERLAYEFKGHSLLQAAREADVTRIKKHLSLEMVNFKHPQTHETALHCAAASPYPKRKQICELLLRKGANINEKTKEFLTPLHVASEKAHNDVVEVVVKHEAKVNALDNLGQTSLHRAAYCGHLQTCRLLLSYGCDPNIISLQGFTALQMGNENVQQLLQEGISLGNSEADRQLLEAAKAGDVETVKKLCTVQSVNCRDIEGRQSTPLHFAAGYNRVSVVEYLLQHGADVHAKDKGGLVPLHNACSYGHYEVAELLVKHGAVVNVADLWKFTPLHEAAAKGKYEICKLLLQHGADPTKKNRDGNTPLDLVKDGDTDIQDLLRGDAALLDAAKKGCLARVKKLSSPDNVNCRDTQGRHSTPLHLAAGYNNLEVAEYLLQHGADVNAQDKGGLIPLHNAASYGHVDVAALLIKYNACVNATDKWAFTPLHEAAQKGRTQLCALLLAHGADPTLKNQEGQTPLDLVSADDVSALLTAAMPPSALPSCYKPQVLNGVRSPGATADALSSGPSSPSSLSAASSLDNLSGSFSELSSVVSSSGTEGASSLEKKEVPGVDFSITQFVRNLGLEHLMDIFEREQITLDVLVEMGHKELKEIGINAYGHRHKLIKGVERLISGQQGLNPYLTLNTSGSGTILIDLSPDDKEFQSVEEEMQSTVREHRDGGHAGGIFNRYNILKIQKVCNKKLWERYTHRRKEVSEENHNHANERMLFHGSPFVNAIIHKGFDERHAYIGGMFGAGIYFAENSSKSNQYVYGIGGGTGCPVHKDRSCYICHRQLLFCRVTLGKSFLQFSAMKMAHSPPGHHSVTGRPSVNGLALAEYVIYRGEQAYPEYLITYQIMRPEGMVDG

SEQ ID NO: 54509 - protein, 79 aa, Homo sapiens
KMNIANTVISQENSSLQSMGTDQLLDLFTLDKDGKAEKADTSTSGKASMKSILENLSDLWDQEQYDSEYSLENFMHSLK

SEQ ID NO: 54510 - protein, 278 aa, Homo sapiens
RNAWSMKRQGASSERKRARIPSGKAGAANGFLMEVCVDSVESAVNAERGGADRIELCSGLSEGGTTPSMGVLQVVKQSVQIPVFVMIRPRGGDFLYSDREIEVMKADIRLAKLYGADGLVFGALTEDGHIDKELCMSLMAICRPLPVTFHRAFDMVHDPMAALETLLTLGFERVLTSGCDSSALEGLPLIKRLIEQAKGRIVVMPGGGITDRNLQRILEGSGATEFHCSARSTRDSGMKFRNSSVAMGASLSCSEYSLKVTDVTKVRTLNAIAKNILV

SEQ ID NO: 54511 - protein, 47 aa, Homo sapiens
MDSDKVMVLDNGKIIECGSPEELLQIPGPFYFMAKEAGIENVNSTKF

SEQ ID NO: 54512 - protein, 4 aa, Homo sapiens
MGTG

SEQ ID NO: 54513 - protein, 181 aa, Homo sapiens
LRSKRDEFWDTAPAFEGRKEIWDALKAAAYAAEANDHELAQAILDGASITLPHGTLCECYDELGNRYQLPIYCLSPPVNLLLEHTEEESLEPPEPPPSVRREFPLKVRLSTGKDVRLSASLPDTVGQLKRQLHAQEGIEPSWQRWFFSGKLLTDRTRLQETKIQKDFVIQVIINQPPPPQD

SEQ ID NO: 54514 - protein, 361 aa, Homo sapiens
LAIERCIFPERIYQGSSGSYFVKDPQGRIIAVFKPKNEEPYGHLNPKWTKWLQKLCCPCCFGRDCLVLNQGYLSEAGASLVDQKLELNIVPRTKVVYLASETFNYSAIDRVKSRGKRLALEKVPKVGQRFNRIGLPPKVGSFQLFVEGYKDADYWLRRFEAEPLPENTNRQLLLQFERLVVLDYIIRNTDRGNDNWLIKYDCPMDSSSSRDTDWVVVKEPVIKVAAIDNGLAFPLKHPDSWRAYPFYWAWLPQAKVPFSQEIKDLILPKISDPNFVKDLEEDLYELFKKDPGFDRGQFHKQIAVMRGQILNLTQALKDNKSPLHLVQMPPVIVETARSHQRSSSESYTQSFQSRKPFFSWW

SEQ ID NO: 54515 - protein, 147 aa, Homo sapiens
LRSPLGVLRLLQLLAGAAFWITIATSKYQGPVHFALFVSVLFWLLTLGLYFLTLLGKHELVPVLGSRWLMVNVAHDVLAAALYGAATGIMSDQMQRHSYCNLKDYPLPCAYHAFLAAAVCGGVCHGLYLLSALYGCGRRCQGKQEVA

SEQ ID NO: 54516 - protein, 123 aa, Homo sapiens
LDAGLALGPSSPLLRSEIFKLLLAEFAQHRRLDAHLPLLCRLCPPELAPAELLLLLRTYLPDEVGPPTPFPEPGAEPPLTVGLLKALLEQTGAQGWLSGPVLSPYEDILWDPSTPPPTPPRDL

SEQ ID NO: 54517 - protein, 140 aa, Homo sapiens
LGELDPGAFLDKDAECREELLKDDSSEHGAPDSKEKTPGRHRRFTGDSGIEVCVCNRGHHDDDLKEFNTLIDDALDGPLDFCDSCHVRPPGDEEEGLCQSSEEQAREPGHPHLPRPPACLLLNTINEQDSPNSQSSSSPS

SEQ ID NO: 54518 - protein, 54 aa, Homo sapiens
ILSDPEVLAAMQDPEVMVAFQDVAQNPANMSKYQSNTKVMNLISKLSAKFGGQD

SEQ ID NO: 54519 - protein, 51 aa, Homo sapiens
TYIWRQDQGCHTTMEHLFWSFILYMTYFILFAHFFCQTYIRPKVKAKTKSQ

SEQ ID NO: 54520 - protein, 167 aa, Homo sapiens
INSKPVLPPINPQRQNGLAHDRAPSRKDSLESDSSTAIIPHELIRTRQLESVHLKFNQESGALIPLCLRGRLLHGRHFTYKSITGDMAITFVSTGVEGAFATEEHPYAAHGPWLQILLTEEFVEKMLEDLEDLTSPEEFKLPKEYSWPEKKLKVSILPDVVFDSPLH

SEQ ID NO: 54521 - protein, 14 aa, Homo sapiens
RVYGQPSTKHYVTS

SEQ ID NO: 54522 - protein, 648 aa, Homo sapiens
VAQKVDEDSAEDTQSNDGKEVVEVGQKLINKPMVGPEAGGTKEVPIKEIVEMNEIEEGKNKEQAINSSENIMDINEEPGTTEGEEITESSSTEEMEVRSVVADTDQKALGSEVQDASKVTTQIDKEKKEIPVSIKKEPEVTVVSQPTEPQPVLIPSININSDSGENKEEIGSLSKTETILPPESENPKENDNDSGTGSTADTSSIDLNLSISSFLSKTKDSGSISLQETRRQKKTLKKTRKFIVDGVEVSVTTSKIVTDSDSKTEELRFLRRQELRELRFLQKEEQRAQQQLNSKLQQQREQIFRRFEQEMMSKKRQYDQEIENLEKQQKQTIERLEQEHTNRLRDEAKRIKGEQEKELSKFQNMLKNRKKEEQEFVQKQQQELDGSLKKIIQQQKAELANIERECLNNKQQLMRAREAAIWELEERHLQEKHQLLKQQLKDQYFMQRHQLLKRHEKETEQMQRYNQRLIEELKNRQTQERARLPKIQRSEAKTRMAMFKKSLRINSTATPDQDRDKIKQFAAQEEKRQKNERMAQHQKHENQMRDLQLQCEANVRELHQLQNEKCHLLVEHETQKLKELDEEHSQELKEWREKLRPRKKTLEEEFARKLQEQEVFFKMTGESECLNPSTQSRISKFYPIPSLHSTGS

SEQ ID NO: 54523 - protein, 242 aa, Homo sapiens
TMSGESARSLGKGSAPPGPVPEGSIRIYSMRFCPFAERTRLVLKAKGIRHEVININLKNKPEWFFKKNPFGLVPVLENSQGQLIYESAITCEYLDEAYPGKKLLPDDPYEKACQKMILELFSKVPSLVGSFIRSQNKEDYAGLKEEFRKEFTKLEEVLTNKKTTFFGGNSISMIDYLIWPWFERLEAMKLNECVDHTPKLKLWMAAMKEDPTVSALLTSEKDWQGFLELYLQNSPEACDYGL

SEQ ID NO: 54524 - protein, 261 aa, Homo sapiens
KVSCWYKYLLFSYNIIFWLAGVVFLGVGLWAWSEKGVLSDLTKVTRMHGIDPVVLVLMVGVVMFTLGFAGCVGALRENICLLNFFCGTIVLIFFLELAVAVLAFLFQDWVRDRFREFFESNIKSYRDDIDLQNLIDSLQKANQCCGAYGPEDWDLNVYFNCSGASYSREKCGVPFSCCVPDPAQKVVNTQCGYDVRIQLKSKWDESIFTKGCIQALESWLPRNIYIVAGVFIAISLLQIFGIFLARTLISDIEAVKAGHHF

SEQ ID NO: 54525 - protein, 340 aa, Homo sapiens
IEHQIAVQYLQMKWPLLDVQAGSLQSRQALKDARSPSPAHIVSNKVPVVQHPHHVHPLTPLITYSNEHFTPGNPPPHLPADVDPKTGIPRPPHPPDISPYYPLSPGTVGQIPHPLGWLVPQQGQPVYPITTGGFRHPYPTALTVNASMSRFPPHMVPPHHTLHTTGIPHPAIVTPTVKQESSQSDVGSLHSSKHQDSKKEEEKKKPHIKKPLNAFMLYMKEMRAKVVAECTLKESAAINQILGRRWHALSREEQAKYYELARKERQLHMQLYPGWSARDNYGKKKKRKRDKQPGETNEHSECFLNPCLSLPPITGEKKSAFATYKVKAAASAHPLQMEAY

SEQ ID NO: 54526 - protein, 41 aa, Homo sapiens
LSLTKCQWCSTLTMSTPSRLLSRTAMNTSRRETHLHTYQPT

SEQ ID NO: 54527 - protein, 68 aa, Homo sapiens
RNPTASAPSRYIPVLPTIAWHRRTNPPSARMVSTTARSTSVPNHDRRIQTPLPHSSDRQCFHVQLSVF

SEQ ID NO: 54528 - protein, 45 aa, Homo sapiens
LPPAALQPAAPSSSIAQPSTSSLHSHSSLAGTQPQPLSLVTKSLE

SEQ ID NO: 54529 - protein, 31 aa, Homo sapiens
IEEQGVEDSANEDSVDAKPDRSSFVPSLFSP

SEQ ID NO: 54530 - protein, 121 aa, Homo sapiens
IQACRGTELDDGIQADSGPINDTDANPRYKIPVEADFLFAYSTVPGYYSWRSPGRGSWFVQALCSILEEHGKDLEIMQILTRVNDRVARHFESQSDDPHFHEKKQIPCVVSMLTKELYFSQ

SEQ ID NO: 54531 - protein, 79 aa, Homo sapiens
TVPGYYSWRSPGRGSWFVQALCSILEEHGKDLEIMQILTRVNDRVARHFESQSDDPHFHEKKQIPCVVSMLTKELYFSQ

SEQ ID NO: 54532 - protein, 48 aa, Homo sapiens
IVSVSVFLYYCSADSSACMMKAILFSQPLQITDTQQGCIAPVELRYVF

SEQ ID NO: 54533 - protein, 251 aa, Homo sapiens
KFLYYDEKKMANFQNFKPRSNREEMKFHEFVEKLQDIQQRGGEERLYLQQTLNDTVGRKIVMDFLGFNWNWINKQQGKRGWGQLTSNLLLIGMEGNVTPAHYDEQQNFFAQIKGYKRCILFPPDQFECLYPYPVHHPCDRQSQVDFDNPDYERFPNFQNVVGYETVVGPGDVLYIPMYWWHHIESLLNGGITITVNFWYKGAPTPKRIEYPLKAHQKVAIMRNIEKMLGEALGNPQEVGPLLNTMIKGRYN

SEQ ID NO: 54534 - protein, 6 aa, Homo sapiens
ITATEI

SEQ ID NO: 54535 - protein, 38 aa, Homo sapiens
IVSSSHDDTILIWDFLNDPAAQAEPPRSPSRTYTYISR

SEQ ID NO: 54536 - protein, 76 aa, Homo sapiens
LAAHPLPSSHSPHPLFASQQRDPSTFYPWLIHRYRYLGHRFQGKSMVSEPKNKVQKAEAGGRRLRFATKEKRDAPY

SEQ ID NO: 54537 - protein, 797 aa, Homo sapiens
LERPRQPQQGRRRRIEELSRSSRERLLQSRDRMFSKFTSILQHAVEALAPSLPLQEDFVYHWKAITHYYIETSDDKAPVTDTNIPSHLEQMLDILVQEENERESGETGPCMEYLLHHKILETLYTLGKADCPPGMKQQVLVFYTKLLGRIRQPLLPHINVHRPVQKLIRLCGEVLATPTENEEIQFLCIVCAKLKQDPYLVNFFLENKMKSLASKGVPNVISEDTLKGQDSLSTDTGQSRQPEELSGATGMEQTELEDEPPHQMDHLSTSLDNLSVTSLPEASVVCPNQDYNLVNSLLNLTRSPDGRIAVKACEGLMLLVSLPEPAAAKCLTQSTCLCELLTDRLASLYKALPQSVDPLDIETVEAINWGLDSYSHKEDASAFPGKRALISFLSWFDYCDQLIKEAQKTAAVALAKAVHERFFIGVMEPQLMQTSEMGILTSTALLHRIVRQVTSDVLLQEMVFFILGEQREPETLAEISRHPLRHRLIEHCDHISDEISIMTLRMFEHLLQKPNEHILYNLVLRNLEERNYTEYKPLCPEDKDVVENGLIAGAVDLEEDPLFTDISPENTLPNQEWLSSSPPATPDHPKNDGKTEVHKIVNSFLCLVPDDAKSSYHVEGTGYDTYLRDAHRQFRDYCAICLRWEWPGSPKALEKCNLEAAFFEGHFLKVLFDRMGRILDQPYDVNLQVTSVLSRLSLFPHPHIHEYLLDPYVNLAPGCRSLFSVIVRVVGDLMLRIQRIQDFTPKLLLVRKRLLGLEPEGPIIDHITLLEGVIVLEEFCKELAAIAFVKYHASSTP

SEQ ID NO: 54538 - protein, 972 aa, Homo sapiens
TEFSFNVPFIPVTQASASPASLLLPGEDSTDVGEEDSFLGQTSIHTSAPQTFSYFSQVSSSSDPFGNIGQSPLTTAATSVGQSGFPKPLTALPFTTGSQDVSNAFSPSISKAQPGAPPSSLMGINSYLPSQPSSLPPSYFGNQPQGIPQPGYNPYRHTPGSSRANPYIAPPQLQQCQTPGPPAHPPPSGPPVQMYQMPPGSLPPVPSSVQSPAQQQVPARPGAPSVQVPSPFLLQNQYEPVQPHWFYCKEVEYKQLWMPFSVFDSLNLEEIYNSVQPDPESVVLGTDGGRYDVYLYDRIRKAAYWEEEPAEVRRCTWFYKGDTDSRFIPYTEEFSEKLEAEYKKAVTTNQWHRRLEFPSGETIVMHNPKVIVQFQPSSVPDEWGTTQDGQTRPRVVKRGIDDNLDEIPDGEMPQVDHLVFVVHGIGPVCDLRFRSIIECVDDFRVVSLKLLRTHFKKSLDDGKVSRVEFLPVHWHSSLGGDATGVDRNIKKITLPSIGRFRHFTNETLLDILFYNSPTYCQTIVEKVGMEINHLHALFMSRNPDFKGGVSVAGHSLGSLILFDILSNQKDLNLSKCPGPLAVANGVVKQLHFQEKQMPEEPKLTLDESYDLVVENKEVLTLQETLEALSLSEYFSTFEKEKIDMESLLMCTVDDLKEMGIPLGPRKKIANFVEHKAAKLKKAASEKKAVAATSTKGQEQSAQKTKDMASLPSESNEPKRKLPVGACVSSVCVNYESFEVGAGQVSVAYNSLDFEPEIFFALGSPIAMFLTIRGVDRIDENYSLPTCKGFFNIYHPLDPVAYRLEPMIVPDLDLKAVLIPHHKGRKRLHLELKESLSRMGSDLKQGFISSLKSAWQTLNEFARAHTSSTQLQEELEKVANQIKEEEEKQVVEAEKVVESPDFSKDEDYLGKVGMLNGGRRIDYVLQEKPIESFNEYLFALQSHLCYWESEDTALLLLKEIYRTMNISPEQPQH

SEQ ID NO: 54539 - protein, 90 aa, Homo sapiens
IADAGESFSYQNMNNAFQVLMELEKPVLISLGKGRYYKETSGLMLDVGPYMKALEYACGIKAEVVGKPSPEFFKSALQAIGVEAHQLLSV

SEQ ID NO: 54540 - protein, 82 aa, Homo sapiens
KPSPEFFKSALQAIGVEAHQAVMIGDDIVGDVGGAQRCGMRALQVRTGKFRPSDEHHPEVKADGYVDNLAEAVDLLLQHADK

SEQ ID NO: 54541 - protein, 89 aa, Homo sapiens
RSVFMPRPQAVGSSNYASTSAGLKYPGSGADLPPPQRAAGDSGEDSDDSDYENLIDPTEPSNSEYSHSKDSRPMAHPDEDPRNTQTSQI

SEQ ID NO: 54542 - protein, 81 aa, Homo sapiens
KGSFEELCQNQVVREAILEDLQKIGKESGLKTFEQVKAIFLHPEPFSIENGLLTPTLKAKRGELSKYFRTQIDSLYEHIQD

SEQ ID NO: 54543 - protein, 73 aa, Homo sapiens
IGQEMLENLSHDREKIQRARERLRETDANLGKSSRILTGMLRRIIQNRILLVILGIIVVITILMAITFSVRRH

SEQ ID NO: 54544 - protein, 58 aa, Homo sapiens
LDCCVTEGGVLVAMQKSSRRRNHPLVTQMVEKWLDRYRQIRPCTSLSDGEEDEDDEDE

SEQ ID NO: 54545 - protein, 240 aa, Homo sapiens
IDEEVNIEFEAYSLSDNDYDGIKKLLQQLFLKAPVNTAELTDLLIQQNHIGSVIKQTDVSEDSNDDMDEDEVFGFISLLNLTERKGTQCVEQIQELVLRFCEKNCEKSMVEQLDKFLNDTTKPVGLLLSERFINVPPQIALPMYQQLQKELAGAHRTNKPCGKCYFYLLISKTFVEAGKNNSKKKPSNKKKAALMFANAEEEFFYEEQGKPEVLGGPDTRRGLEPVPIQHNGWSVPPVLE

SEQ ID NO: 54546 - protein, 48 aa, Homo sapiens
ISKRLMVIVEFTKSNTYYSALREAAAANAAAAAAAAAAAAAAVGLRLQ

SEQ ID NO: 54547 - protein, 17 aa, Homo sapiens
MLLLLLPPPPLLLLLLV

SEQ ID NO: 54548 - protein, 26 aa, Homo sapiens
IYTIFNHDFRRAFKKILCRGDRKRIV

SEQ ID NO: 54549 - protein, 323 aa, Homo sapiens
VEEVGSAGQFEELLRLKAKSLLVVHFWAPWAPQCAQMNEVMAELAKELPQVSFVKLEAEGVPEVSEKYEISSVPTFLFFKNSQKIDRLDGAHAPELTKKVQRHASSGSFLPSANEHLKEDLNLRLKKLTHAAPCMLFMKGTPQEPRCGFSKQMVEILHKHNIQFSSFDIFSDEEVRQGLKAYSSWPTYPQLYVSGELIGGLDIIKELEASEELDTICPKAPKLEERLKVLTNKASVMLFMKGNKQEAKCGFSKQILEILNSTGVEYETFDILEDEEVRQGLKAYSNWPTYPQLYVKGELVGGLDIVKELKENGELLPILRGEN

SEQ ID NO: 54550 - protein, 51 aa, Homo sapiens
IHTKTRLMKYGGHGYSHILTNVVPKMLLRGITENVLDKILIENPKQWLTFK

SEQ ID NO: 54551 - protein, 9 aa, Homo sapiens
MLLARSLRI

SEQ ID NO: 54552 - protein, 6 aa, Homo sapiens
LWFSRH

SEQ ID NO: 54553 - protein, 425 aa, Homo sapiens
LLRGSRLLRRNFLTCLSSWKIPPHVSKSSQSEALLNITNNGIHFAPLQTFTDEEMMIKSSVKKFAQEQIAPLVSTMDENSKMEKSVIQGLFQQGLMGIEVDPEYGGTGASFLSTVLVIEELAKVDASVAVFCEIQNTLINTLIRKHGTEEQKATYLPQLTTEKVGSFCLSEAGAGSDSFALKTRADKEGDYYVLNGSKMWISSAEHAGLFLVMANVDPTIGYKGITSFLVDRDTPGLHIGKPENKLGLRASSTCPLTFENVKVPEANILGQIGHGYKYAIGSLNEGRIGIAAQMLGLAQGCFDYTIPYIKERIQFGKRLFDFQGLQHQVAHVATQLEAARLLTYNAARLLEAGKPFIKEASMAKYYASEIAGQTTSKCIEWMGGVGYTKDYPVEKYFRDAKIGTIYEGASNIQLNTIAKHIDAEY

SEQ ID NO: 54554 - protein, 239 aa, Homo sapiens
ISVLEQIRHFVMMPEINTNHLDKQQVQLLAEMCILIDENDNKIGAETKKNCHLNENIEKGLLHRAFSVFLFNTENKLLLQQRSDAKITFPGCFTNTCCSHPLSNPAELEESDALGVRRAAQRRLKAELGIPLEEVPPEEINYLTRIHYKAQSDGIWGEHEIDYILLVRKNVTLNPDPNEIKSYCYVSKEELKELLKKAASGEIKITPWFKIIAATFLFKWWDNLNHLNQFVDHEKIYRM

SEQ ID NO: 54555 - protein, 4 aa, Homo sapiens
MDSP

SEQ ID NO: 54556 - protein, 121 aa, Homo sapiens
IFTLYSYRDPNTIETLQSFGKAVDWAKSGKFTQQDIDEAKLSVFSTVDAPVAPSDKGMDHFLYGLSDEMKQAHREQLFAVSHDKLLAVSDRYLGTGKSTHGLAILGPENPKIAKDPSWIIQ

SEQ ID NO: 54557 - protein, 25 aa, Homo sapiens
MKGNLCKNYGLSSINKNYSSPENKQ

SEQ ID NO: 54558 - protein, 11 aa, Homo sapiens
MGSTWPGAFEN

SEQ ID NO: 54559 - protein, 174 aa, Homo sapiens
IRDPALVHQRPAPPSTVTTAGVTPQPESLSPSGKEPAASSPSSNNTAATTAAIVPGSQLMPSKSPSTGTTEISSHESSHGTPSQTTAKNWELTASASHQPPGVYPQGHSDTTVAISTSTVLLCGLSAVSLLACYLKSRQTPPLASVEMEAMEALPVTWGTSSRDEDLENCSHHL

SEQ ID NO: 54560 - protein, 125 aa, Homo sapiens
KPAASSPSSNNTAATTAAIVPGSQLMPSKSPSTGTTEISSHESSHGTPSQTTAKNWELTASASHQPPGVYPQGHSDTTVAISTSTVLLCGLSAVSLLACYLKSRASVCSCHPRSAGHTCSVGSVC

SEQ ID NO: 54561 - protein, 34 aa, Homo sapiens
KGNRTARIIDKPRIIEVAPQVATQNVNPTPGATS

SEQ ID NO: 54562 - protein, 291 aa, Homo sapiens
LDNNVLTLEQRKFYEENGFLVIKNLVPDADIQRFRNEFEKICRKEVKPLGLTVMRDVTISKSEYAPSEKMITKVQDFQEDKELFRYCTLPEILKYVECFTGPNIMAMHTMLINKPPDSGKKTSRHPLHQDLHYFPFRPSDLIVCAWTAMEHISRNNGCLVVLPGTHKGSLKPHDYPKWEGGVNKMFHGIQDYEENKARVHLVMEKGDTVFFHPLLIHGSGQNKTQGFRKAISCHFASADCHYIDVKGTSQENIEKEVVGIAHKFFGAENSVNLKDIWMFRARLVKGERTNL

SEQ ID NO: 54563 - protein, 18 aa, Homo sapiens
RINSNERCDHFEIRICSK

SEQ ID NO: 54564 - protein, 25 aa, Homo sapiens
IKRCLQTKWPYIELLWTTDRSPSLN

SEQ ID NO: 54565 - protein, 140 aa, Homo sapiens
IFMVWLITHSIKPIQNEESVVLFLVAWTVTEITRYSFYTFSLLDHLPYFIKWARYNFFIILYPVGVAGELLTIYAALPHVKKTGMFSIRLPNKYNVSFDYYYFLLITMASYIPLFPQLYFHMLRQRRKVLHGEVIVEKDD

SEQ ID NO: 54566 - protein, 535 aa, Homo sapiens
VPFPPPPPRTPLLWLLLLLLAAVAPARGWESGDLELFDLVEEVQLNFYQFLGVQQDASSADIRKAYRKLSLTLHPDKNKDENAETQFRQLVAIYEVLKDDERRQRYDDILINGLPDWRQPVFYYRRVRKMSNAELALLLFIILTVGHYAVVWSIYLEKQLDELLSRKKREKKKKTGSKSVDVSKLGASEKNERLLMKPQWHDLLPCKLGIWFCLTLKALPHLIQDAGQFYAKYKETRLKEKEDALTRTELETLQKQKKVKKPKPEFPVYTPLETTYIQSYDHGTSIEEIEEQMDDWLENRNRTQKKQAPEWTEEDLSQLTRSMVKFPGGTPGRWEKIAHELGRSVTDVTTKAKQLKDSVTCSPGMVRLSELKSTVQNSRPIKTATTLPDDMITQREDAEGVAAEEEQEGDSGEQETGATDARPRRRKPARLLEATAKPEPEEKSRAKRQKDFDIAEQNESSDEESLRKERARSAEEPWTQNQQKLLELALQQYPRGSSDRWDKIARCVPSKSKEDCIARYKLLVELVQKKKQAKS

SEQ ID NO: 54567 - protein, 386 aa, Homo sapiens
KHFVAQKVKLFRASDPLLSVLMWGVNHSINELSHVQIPVMLMPDDFKAYSKIKVDNHLFNKENMPSHFKFKEYCPMVFRNLRERFGIDDQDFQNSLTRSAPLPNDSQARSGARFHTSYDKRYIIKTITSEDVAEMHNILKKYHQYIVECHGITLLPQFLGMYRLNVDGVEIYVIVTRNVFSHRLSVYRKYDLKGSTVAREASDKEKAKELPTLKDNDFINEGQKIYIDDNNKKVFLEKLKKDVEFLAQLKLMDYSLLVGIHDVERAEQEEVECEENDGEEEGESDGTHPVGTPPDSPGNTLNSSPPLAPGEFDPNIDVYGIKCHENSPRKEVYFMAIIDILTHYDAKKKAAHAAKTVKHGAGAEISTVNPEQYSKRFLDFIGHILT

SEQ ID NO: 54568 - protein, 62 aa, Homo sapiens
LTALQAKSSTSTLQTAPQPTSQRPSWWPFEMSPGVLTFAIIWPFIAQWLVYLYYQRRRRKLN

SEQ ID NO: 54569 - protein, 78 aa, Homo sapiens
RTMKALLSNIEKYKPNMIKVASLLVKRTSRSDGFRPDYAGFEIPNLFVVGYALDYNEYFRDLNHICVINEHGKEKYRV

SEQ ID NO: 54570 - protein, 35 aa, Homo sapiens
LGKFSLEDTRGRKTSKRRLFLLIFWRSFWRGTFGM

SEQ ID NO: 54571 - protein, 134 aa, Homo sapiens
KSAMETVLQYCKGKNLKKPAPKSYLIHAGLEPLTFTNMFPSWEHREDIAEITEMDTEVSNQITLVEDVLAKLCKTIYPLADLLARPLPEGVDPLKLEIYLTDEDFEFALDMTRDEYNALPAWKQVNLKKAKGLF

SEQ ID NO: 54572 - protein, 87 aa, Homo sapiens
IAEITEMDTEVSNQITLVEDVLAKLCKTIYPLADLLARPLPEGVDPLKLEIYLTDEDFEFALDMTRDEYNALPAWKQVNLKKAKGLF

SEQ ID NO: 54573 - protein, 75 aa, Homo sapiens
ILQQEDTDRPSISSNRPWGLVSLLLPSAPNRKSFTKKKSNKFAIETVKNLLESLKGNRTENFTKTSGKRTISTQT

SEQ ID NO: 54574 - protein, 33 aa, Homo sapiens
MKGGSFGGRSSGSPYGGGYGSGGGSGGYGSRRF

SEQ ID NO: 54575 - protein, 64 aa, Homo sapiens
LSYRCPCRFFESHVARANVKHLKILNTPNCALQIVARLKNNNRQVCIDPKLKWIQEYLEKALNK

SEQ ID NO: 54576 - protein, 19 aa, Homo sapiens
KIGKKKRQKKRKAAQKRKN

SEQ ID NO: 54577 - protein, 230 aa, Homo sapiens
LPPPDLLSSRLPPPLARVMRSRLLLSVAHLPTIRETTEEMLLGGPGQEPPPSPSLDDYVRSISRLAQPTSVLDKATAQGQPRPPHRPAQACRKGRPAVSLRDITARFSGQQPTLPMADTVDPLDWLFGESQEKQPSQRDLPRRTGPSAGLWGPHRQMDSSKPMGAPRGRLCEARMPGHSLARPPQDGQQSSDLRSWTFGQSAQAMASRHRPRPSSVLRTLYSHLPVIHEL

SEQ ID NO: 54578 - protein, 121 aa, Homo sapiens
ITGALKMFFRELPEPLFTFNHFNDFVNAIKQEPRQRVAAVKDLIRQLPKPNQDTMQILFRHLRRVIENGEKNRMTYQSIAIVFGPTLLKPEKETGNIAVHTVYQNQIVELILLELSSIFGR

SEQ ID NO: 54579 - protein, 5 aa, Homo sapiens
MMDRK

SEQ ID NO: 54580 - protein, 10 aa, Homo sapiens
LEFPRSPLRG

SEQ ID NO: 54581 - protein, 70 aa, Homo sapiens
LSFGGISGLLAASRACLVATETSPARLRGHFITIQKCLPLKASVVVFKPQKSHTQDHLTPTLTSVHDAGP

SEQ ID NO: 54582 - protein, 46 aa, Homo sapiens
LKRVSDDMKTHKNPTLKAQSGPVRSGPKPFSAPKPQTSHKEGASCT

SEQ ID NO: 54583 - protein, 47 aa, Homo sapiens
KLLLRYYNEECRNCSTPGPDIKLYPFIYHAVESCAETADHSGQRTGT

SEQ ID NO: 54584 - protein, 42 aa, Homo sapiens
RPFQYFEKNVQGIVPRSYHWPFPWPVVHLSRQVKYSRLVNDT

SEQ ID NO: 54585 - protein, 223 aa, Homo sapiens
RLRLLEEQRGALYRLSVLTLQPSDQGHYVCRVQEISRHRNKWTAWSNGSSATEMRVISLKASEESSFEKTKETWAFFEDLYVYAVLVCCVGILSILLFMLVIVWQSVFNKRKSRVRHYLVKCPQNSSGETVTSVTSLAPLQPKKGKRQKEKPDIPPAVPAKAPIAPTFHKPKLLKPQRKVTLPKIAEENLTYAELELIKPHRAAKGAPTSTVYAQILFEENKL

SEQ ID NO: 54586 - protein, 116 aa, Homo sapiens
IFPQTYSIDINGYILVYSVTSIKSFEVIKVIHGKLLDMVGKVQIPIMLVGNKKDLHMERVISYEEGKALAESWNAAFLESSAKENQTAVDVFRRMILEAEKMDGAASQGKSSCSVM

SEQ ID NO: 54587 - protein, 59 aa, Homo sapiens
LASLMTYKCAVVDVPFGGAKAGVKIYPKNYTDNKLEKITRRFTMELAKKGFIVFVSRQF

SEQ ID NO: 54588 - protein, 465 aa, Homo sapiens
TDGAGGNSSSSAAMQSSCSSTSGGGGGGGGGGGGGKSGGIVISPFRLEELTNRLASLQQENKVLKIELETYKLKCKALQEENRDLRKASVTIQARAEQEEEFISNTLFKKIQALQKEKETLAVNYEKEEEFLTNELSRKLMQLQHEKAELEQHLEQEQEFQVNKLMKKIKKLENDTISKQLTLEQLRREKIDLENTLEQEQEALVNRLWKRMDKLEAEKRILQEKLDQPVSAPPSPRDISMEIDSPENMMRHIRFLKNEVERLKKQLRAAQLQHSEKMAQYLEEERHMREENLRLQRKLQREMERREALCRQLSESESSLEMDDERYFNEMSAQGLRPRTVSSPIPYTPSPSSSRPISPGLSYASHTVGFTPPTSLTRAGMSYYNSPGLHVQHMGTSHGITRPSPRRSNSPDKFKRPTPPPSPNTQTPVQPPPPPPPPPMQPTVPSAATSQPTPSQHSAHPSSQP

SEQ ID NO: 54589 - protein, 171 aa, Homo sapiens
VKGEHSYTGIIHAFKTIYAKEGGFFGFYRGLMPTILGMAPYAGVSFFTFGTLKSVGLSHAPTLLGRPSSDNPNVLVLKTHVNLLCGGVAGAIAQTISYPFDVTRRRMQLGTVLPEFEKCLTMRDTMKYVYGHHGIRKGLYRGLSLNYIRCIPSQAVAFTTYELMKQFFHLN

SEQ ID NO: 54590 - protein, 17 aa, Homo sapiens
TPLQVSSEMLGLRAICL

SEQ ID NO: 54591 - protein, 76 aa, Homo sapiens
LQRQRAILYKGLKVPPAINQFTQALDRQTATQLLKLAHKYRPETKQEKKAVGPGREESCWQRGRPHQETTCPSSRS

SEQ ID NO: 54592 - protein, 26 aa, Homo sapiens
LMWRHRVPPTFRGFRREFFIETGRPK

SEQ ID NO: 54593 - protein, 1053 aa, Homo sapiens
IITSMLCWGNASFGQLGLGGIDEEIVLEPRKSDFFINKRVRDVGCGLRHTVFVLDDGTVYTCGCNDLGQLGHEKSRKKPEQVVALDAQNIVAVSCGEAHTLALNDKGQVYAWGLDSDGQLGLVGSEECIRVPRNIKSLSDIQIVQVACGYYHSLALSKASEVFCWGQNKYGQLGLGTDCKKQTSPQLLKSLLGIPFMQVAAGGAHSFVLTLSGAIFGWGRNKFGQLGLNDENDRYVPNLLKSLRSQKIVYICCGEDHTAALTKEGGVFTFGAGGYGQLGHNSTSHEINPRKVFELMGSIVTEIACGRQHTSAFVPSSGRIYSFGLGGNGQLGTGSTSNRKSPFTVKGNWYPYNGQCLPDIDSEEYFCVKRIFSGGDQSFSHYSSPQNCGPPDDFRCPNPTKQIWTVNEALIQKWLSYPSGRFPVEIANEIDGTFSSSGCLNGSFLAVSNDDHYRTGTRFSGVDMNAARLLFHKLIQPDHPQISQQVAASLEKNLIPKLTSSLPDVEALRFYLTLPECPLMSDSNNFTTIAIPFGTALVNLEKAPLKVLENWWSVLEPPLFLKIVELFKEVVVHLLKLYKIGIPPSERRIFNSFLHTALKVLEILHRVNEKMGQIIQYDKFYIHEVQELIDIRNDYINWVQQQAYGMLADIPVTICTYPFVFDAQAKTTLLQTDAVLQMQMAIDQAHRQNVSSLFLPVIESVNPCLILVVRRENIVGDAMEVLRKTKNIDYKKPLKVIFVGEDAVDAGGVRKEFFLLIMRELLDPKYGMFRYYEDSRLIWFSDKTFEDSDLFHLIGVICGLAIYNCTIVDLHFPLALYKKLLKKKPSLDDLKELMPDVGRSMQQLLDYPEDDIEETFCLNFTITVENFGATEVKELVLNGADTAVNKQNRQEFVDAYVDYIFNKSVASLFDAFHAGFHKVCGGKVLLLFQPNELQAMVIGNTNYDWKELEKNTEYKGEYWAEHPTIKIFWEVFHELPLEKKKQFLLFLTGSDRIPILGMKSLKLVIQSTGGGEEYLPVSHTCFNLLDLPKYTEKETLRSKLIQAIDHNEGFSLI

SEQ ID NO: 54594 - protein, 162 aa, Homo sapiens
LEELPLNEYREYIKVQTDKGTEVATNLVILCTGIKINSSAYRKAFESRLASSGALRVNEHLQVEGHSNVYAIGDCADVRTPKMAYLAGLHANIAVANIVNSVKQRPLQAYKPGALTFLLSMGRNDGVGQISGFYVGRLMVRLTKSRDLFVSTSWKTMRQSPP

SEQ ID NO: 54595 - protein, 275 aa, Homo sapiens
LEYRVFLKNEKGQYISPFHDIPIYADKDVFHMVVEVPRWSNAKMEIATKDPLNPIKQDVKKGKLRYVANLFPYKGYIWNYGAIPQTWEDPGHNDKHTGCCGDNDPIDVCEIGSKVCARGEIIGVKVLGILAMIDEGETDWKVIAINVDDPDAANYNDINDVKRLKPGYLEATVDWFRRYKVPDGKPENEFAFNAEFKDKDFAIDIIKSTHDHWKALVTKKTNGKGISCMNTTLSESPFKCDPDAARAIVDALPPPCESACTVPTDVDKWFHHQKN

SEQ ID NO: 54596 - protein, 8 aa, Homo sapiens
RTIYISIS

SEQ ID NO: 54597 - protein, 477 aa, Homo sapiens
IPRVDVLKNHLVKEGRVDEEIALRIINEGAAILRREKTMIEVEAPITVCGDIHGQFFDLMKLFEVGGSPANTRYLFLGDYVDRGYFSIECVLYLWVLKILYPSTLFLLRGNHECRHLTEYFTFKQECKIKYSERVYEACMEAFDSLPLAALLNQQFLCVHGGLSPEIHTLDDIRRLDRFKEPPAFGPMCDLLWSDPSEDFGNEKSQEHFSHNTVRGCSYFYNYPAVCEFLQNNNLLSIIRAHEAQDAGYRMYRKSQTTGFPSLITIFSAPNYLDVYNNKAAVLKYENNVMNIRQFNCSPHPYWLPNFMDVFTWSLPFVGEKVTEMLVNVLSICSDDELMTEGEDQFDVGSAAARKEIIRNKIRAIGKMARVFSVLREESESVLTLKGLTPTGMLPSGVLAGGRQTLQSATVEAIEAEKAIRGFSPPHRICSFEEAKGLDRINERMPPRKDAVQQDGFNSLNTAHATENHGTGNHTAQ

SEQ ID NO: 54598 - protein, 68 aa, Homo sapiens
VLTLKGLTPTGMLPSGVLAGGRQTLQSGNDVMQLAVPQMDWGTPHSFANNSHNACREFLLFFSSCLSS

SEQ ID NO: 54599 - protein, 34 aa, Homo sapiens
KTKKHHIPVVDRTPLEPPPIVVVVMGPPKLERAL

SEQ ID NO: 54600 - protein, 531 aa, Homo sapiens
LAQTCSQIGKPDPSPSSKLSSVASNGGGAGGAGGGAAGDKDTKSGPLKLSDIGVEDKSSFKPYSKPGSDKKEPGGGGGGGGGGGGGGGGVSSEKSGFRVPSATCQPFTPRTGSPSSSASACSPGGMLSSAGGAPEGKDDKKDTDVGGGGKGTGGASAEGGPTGLAHGRISCGGGINVDVNQHPDGGPGGKALGSDCGGSSGSSSGSGPSAPTSSSVLGSGLVAPVSPYKPGQTVFPLPPAGMTYPGSLAGAYAGYPPQFLPHGVALDPTKPGSLVGAQLAAAAAGSLGCSKPAGSSPLAGASPPSVMTASLCRDPYCLSYHCASHLAGAAAASASCAHDPAAAAAALKSGYPLVYPTHPLHGVHSSLTAAAAAGATPPSLAGHPLYPYGFMLPNDPLPHICNWVSANGPCDKRFATSEELLSHLRTHTAFPGTDKLLSGYPSSSSLASAAAAAMACHMHIPTSGAPGSPGTLALRSPHHALGLSSRYHPYSKSPLPTPGAPVPVPAATGPYYSPYALYGQRLTTASALGYQ

SEQ ID NO: 54601 - protein, 359 aa, Homo sapiens
KAIQSNQPDRALRFLEKAQRLYPTPRVRALIESLNQKPQTAGDQPPPTDTTHATHRKAGGTDAPSANGEAGGESTKGYTAEQVAAVKRVKQCKDYYEILGVSRGASDEDLKKAYRRLALKFHPDKNHAPGATEAFKAIGTAYAVLSNPEKRKQYDQFGDDKSQAARHGHGHGDFHRGFEADISPEDLFNMFFGGGFPSSNVHVYSNGRMRYTYQQRQDRRDNQGDGGLGVFVQLMPILILILVSALSQLMVSSPPYSLSPRPSVGHIHRRVTDHLGVVYYVGDTFSEEYTGSSLKTVERNVEDDYIANLRNNCWKEKQQKEGLLYRARYFGDTDMYHRAQKMGTPSCSRLSEVQASLHG

SEQ ID NO: 54602 - protein, 252 aa, Homo sapiens
LKKAYRRLALKFHPDKNHAPGATEAFKAIGTAYAVLSNPEKRKQYDQFGDDKSQAARHGHGHGDFHRGFEADISPEDLFNMFFGGGFPSSNVHVYSNGRMRYTYQQRQDRRDNQGDGGLGVFVQLMPILILILVSALSQLMVSSPPYSLSPRPSVGHIHRRVTDHLGVVYYVGDTFSEEYTGSSLKTVERNVEDDYIANLRNNCWKEKQQKEGLLYRARYFGDTDMYHRAQKMGTPSCSRLSETMKSLENFW

SEQ ID NO: 54603 - protein, 467 aa, Homo sapiens
LAELAVGSRWYHGGSQPIQIRRRLMMVAFLGASAVTASTGLLWKRAHAESPPCVDNLKSDIGDKGKNKDEGDVCNHEKKTADLAPHPEEKKKKRSGFRDRKVMEYENRIRAYSTPDKIFRYFATLKVISEPGEAEVFMTPEDFVRSITPNEKQPEHLGLDQYIIKRFDGKKISQEREKFADEGSIFYTLGECGLISFSDYIFLTTVLSTPQRNFEIAFKMFDLNGDGEVDMEEFEQVQSIIRSQTSMGMRHRDRPTTGNTLKSGLCSALTTYFFGADLKGKLTIKNFLEFQRKLQHDVLKLEFERHDPVDGRITERQFGGMLLAYSGVQSKKLTAMQRQLKKHFKEGKGLTFQEVENFFTFLKNINDVDTALSFYHMAGASLDKVTMQQVARTVAKVELSDHVCDVVFALFDCDGNGELSNKEFVSIMKQRLMRGLEKPKDMGFTRLMQAMWKCAQETAWDFALPKQ

SEQ ID NO: 54604 - protein, 175 aa, Homo sapiens
LHSSYLNSFFQLQRGEALSNSVYKGASPYGSLNNIADGLSSLTEHFSDLTLTSEARKPSKRPPPNYLCHLCFNKGHYIKDCPQARPKGEGLTPYQGKKRCFGEYKCPKCKRKWMSGNSWANMGQECIKCHINVYPHKQRPLEKPDGLDVSDQSKEHPQHLCEKCKVLGYYCRRVQ

SEQ ID NO: 54605 - protein, 87 aa, Homo sapiens
VDLVSAYTLNSMFWVYLATQGVNPKEHPVKQELERIRVYMNRVKEITDKKKAGKLDRGAASRFVRNALWEPKPKNTSKVAHKGKSKS

SEQ ID NO: 54606 - protein, 13 aa, Homo sapiens
VDLVSAYTLNSMF

SEQ ID NO: 54607 - protein, 6 aa, Homo sapiens
MFQPPR

SEQ ID NO: 54608 - protein, 37 aa, Homo sapiens
LHHKPFLACGGDGFTQSNFDGCITSALCVLEALKNYI

SEQ ID NO: 54609 - protein, 25 aa, Homo sapiens
IKRYSSEVATESPLDFTKYLKTSLH

SEQ ID NO: 54610 - protein, 126 aa, Homo sapiens
IPGTSRQGIFPITYVDVIKRPLVKNPVDYMDLPFSSSPSRSATASPQQPQAQQRRVTPDRSQTSQDLFSYQALYSYIPQNDDELELRDGDIVDVMEKCDDGWFVGTSRRTKQFGTFPGNYVKPLYL

SEQ ID NO: 54611 - protein, 67 aa, Homo sapiens
RSQTSQDLFSYQALYSYIPQNDDELELRDGDIVDVMEKCDDGWFVGTSRRTKQFGTFPGNYVKPLYL

SEQ ID NO: 54612 - protein, 599 aa, Homo sapiens
LQVFFLVFPDGVRPQPSSSPSGAVPTSLELQRGTDGGTLQSPSEATATRPAVPGLPTVVPTLVTPSAPGNRTVDLFPVLPICVCDLTPGACDINCCCDRDCYLLHPRTVFSFCLPGSVRSSSWVCVDNSVIFRSNSPFPSRVFMDSNGIRQFCVHVNNSNLNYFQKLQKVNATNFQALAAEFGGESFTSTFQTQSPPSFYRAGDPILTYFPKWSVISLLRQPAGVGAGGLCAESNPAGFLESKSTTCTRFFKNLASSCTLDSALNAASYYNFTVLKVPRSMTDPQNMEFQVPVILTSQANAPLLAGNTCQNVVSQVTYEIETNGTFGIQKVSVSLGQTNLTVEPGASLQQHFILRFRAFQQSTAASLTSPRSGNPGYIVGKPLLALTDDISYSMTLLQSQGNGSCSVKRHEVQFGVNAISGCKLRLKKADCSHLQQEIYQTLHGRPRPEYVAIFGNADPAQKGGWTRILNRHCSISAINCTSCCLIPVSLEIQVLWAYVGLLSNPQAHVSGVRFLYQCQSIQDSQQVTEVSLTTLVNFVDITQKPQPPRGQPKMDWKWPFDFFPFKVAFSRGVFSQKCSVSPILILCLLLLGVLNLETM

SEQ ID NO: 54613 - protein, 46 aa, Homo sapiens
TGPTGGSSAETETDSFSLPEEYFTPAPSPGDQSSGEDRRKAGGNNS

SEQ ID NO: 54614 - protein, 353 aa, Homo sapiens
IANDNSLNHEYLPILGLAEFRSCASRLALGDDSPALKEKRVGGVQSLGGTGALRIGADFLARWYNGTNNKNTPVYVSSPTWENHNAVFSAAGFKDIRSYRYWDAEKRGLDLQGFLNDLENAPEFSIVVLHACAHNPTGIDPTPEQWKQIASVMKHRFLFPFFDSAYQGFASGNLERDAWAIRYFVSEGFEFFCAQSFSKNFGLYNERVGNLTVVGKEPESILQVLSQMEKIVRITWSNPPAQGARIVASTLSNPELFEEWTGNVKTMADRILTMRSELRARLEALKTPGTWNHITDQIGMFSFTGLNPKQVEYLVNEKHIYLLPSGRINVSGLTTKNLDYVATSIHEAVTKIQ

SEQ ID NO: 54615 - protein, 276 aa, Homo sapiens
VMYPIDCVKTRMQSLQPDPAARYRNVLEALWRIIRTEGLWRPMRGLNVTATGAGPAHALYFACYEKLKKTLSDVIHPGGNSHIANGAAGCVATLLHDAAMNPAEVVKQRMQMYNSPYHRVTDCVRAVWQNEGAGAFYRSYTTQLTMNVPFQAIHFMTYEFLQEHFNPQRRYNPSSHVLSGACAGAVAAAATTPLDVCKTLLNTQESLALNSHITGHITGMASAFRTVYQVGGVTAYFRGVQARVIYQIPSTAIAWSVYEFFKYLITKRQEEWRAGK

SEQ ID NO: 54616 - protein, 365 aa, Homo sapiens
ISEVALQSGRGTVSLPSKAAERVVGRWLLVCSGTVAGAVILGGVTRLTESGLSMVDWHLIKEMKPPTSQEEWEAEFQRYQQFPEFKILNHDMTLTEFKFIWYMEYSHRMWGRLVGLVYILPAAYFWRKGWLSRGMKGRVLALCGLVCFQGLLGWYMVKSGLEEKSDSHDIPRVSQYRLAAHLGSALVLYCASLWTSLSLLLPPHKLPETHQLLQLRRFAHGTAGLVFLTALSGAFVAGLDAGLVYNSFPKMGESWIPEDLFTFSPILRNVFENPTMVQFDHRILGITSVTAITVLYFLSRRIPLPRRTKMAAVTLLALAYTQVGLGISTLLMYVPTPLAATHQSGSLALLTGALWLMNELRRVPK

SEQ ID NO: 54617 - protein, 179 aa, Homo sapiens
LEEGSPGSGTYTRHGYIFSSLAGCLMKSSENGALPVVSVVRETESQLLPDVGAIVTCKVSSINSRFAKVHILYVGSMPLKNSFRGTIRKEDVRATEKDKVEIYKSFRPGDIVLAKVISLGDAQSNYLLTTAENELGVVVAHSESGIQMVPISWCEMQCPKTHTKEFRKVARVQPEFLQT

SEQ ID NO: 54618 - protein, 34 aa, Homo sapiens
IRALAKPLDDKKRLVRKEAVSARGEWFLLGSPGS

SEQ ID NO: 54619 - protein, 50 aa, Homo sapiens
LEPHSALANPQSATETASSEQYLHSRKKSARIRRNWRKSGPTSYLHQIRH

SEQ ID NO: 54620 - protein, 56 aa, Homo sapiens
KNFPLQFGREVLASEAILNVPDKSDWRQCQISKEDEETLARRFRKDFEPYDFTLDD

SEQ ID NO: 54621 - protein, 67 aa, Homo sapiens
KYLEMKDIAINISRNLKDLNQKYAGLQPYLDQINVIEEQVAALEQAAYKLDAYSKKLEAKYKKLEKR

SEQ ID NO: 54622 - protein, 1007 aa, Homo sapiens
LPSTFRSVLGARLPPPERLCGFQKKTYSKMNNPAIKRIGNHITKSPEDKREYRGLELANGIKVLLISDPTTDKSSAALDVHIGSLSDPPNIAGLSHFCEHMLFLGTKKYPKENEYSQFLSEHAGSSNAFTSGEHTNYYFDVSHEHLEGALDRFAQFFLCPLFDESCKDREVNAVDSEHEKNVMNDAWRLFQLEKATGNPKHPFSKFGTGNKYTLETRPNQEGIDVRQELLKFHSAYYSSNLMAVCVLGRESLDDLTNLVVKLFSEVENKNVPLPEFPEHPFQEEHLKQLYKIVPIKDIRNLYVTFPIPDLQKYYKSNPGHYLGHLIGHEGPGSLLSELKSKGWVNTLVGGQKEGARGFMFFIINVDLTEEGLLHVEDIILHMFQYIQKLRAEGPQEWVFQECKDLNAVAFRFKDKERPRGYTSKIAGILHYYPLEEVLTAEYLLEEFRPDLIEMVLDKLRPENVRVAIVSKSFEGKTDRTEEWYGTQYKQEAIPDEVIKKWQNADLNGKFKLPTKNEFIPTNFEILPLEKEATPYPALIKDTAMSKLWFKQDDKFFLPKACLNFEFFSPFAYVDPLHCNMAYLYLELLKDSLNEYAYAAELAGLSYDLQNTIYGMYLSVKGYNDKQPILLKKIIEKMATFEIDEKRFEIIKEAYMRSLNNFRAEQPHQHAMYYLRLLMTEVAWTKDELKEALDDVTLPRLKAFIPQLLSRLHIEALLHGNITKQAALGIMQMVEDTLIEHAHTKPLLPSQLVRYREVQLPDRGWFVYQQRNEVHNNCGIEIYYQTDMQSTSENMFLELFCQIISEPCFNTLRTKEQLGYIVFSGPRRANGIQGLRFIIQSEKPPHYLESRVEAFLITMEKSIEDMTEEAFQKHIQALAIRRLDKPKKLSAECAKYWGEIISQQYNFDRDNTEVAYLKTLTKEDIIKFYKEMLAVDAPRRHKVSVHVLAREMDSCPVVGEFPCQNDINLSQAPALPQPEVIQNMTEFKRGLPLFPLVKPHINFMAAKL

SEQ ID NO: 54623 - protein, 84 aa, Homo sapiens
LAELGTSGSIDGNNQLVIKGRFQQKQIENVLRRYIKEYVTCHTCRLLDTILQKDMRIYFLQCETCHSRCSVASIKTSYQAVMGK

SEQ ID NO: 54624 - protein, 65 aa, Homo sapiens
MLKNAESNAELKGLDVDSLVIEHIQVNKAPKMRRRTYRAHGRINPYMSSPCRIEMILTGKGTDCS

SEQ ID NO: 54625 - protein, 2071 aa, Homo sapiens
LKLAFYQLRTMLRVIVESASNIPKTKFGKPDPIVSVIFKDEKKKTKKVDNELNPVWNEILEFDLRGIPLDFSSSLGIIVKDFETIGQNKLIGTATVALKDLTGDQSRSLPYKLISLLNEKGQDTGATIDLVIGYDPPSAPHPNDLSGPSVPGMGGDGEEDEGDEDRLDNAVRGPGPKGPVGTVSEAQLARRLTKVKNSRRMLSNKPQDFQIRVRVIEGRQLSGNNIRPVVKVHVCGQTHRTRIKRGNNPFFDELFFYNVNMTPSELMDEIISIRVYNSHSLRADCLMGEFKIDVGFVYDEPGHAVMRKWLLLNDPEDTSSGSKGYMKVSMFVLGTGDEPPPERRDRDNDSDDVESNLLLPAGIALRWVTFLLKIYRAEDIPQMDDAFSQTVKEIFGGNADKKNLVDPFVEVSFAGKKVCTNIIEKNANPEWNQVVNLQIKFPSVCEKIKLTIYDWDRLTKNDVVGTTYLHLSKIAASGGEVEDFSSSGTGAASYTVNTGETEVGFVPTFGPCYLNLYGSPREYTGFPDPYDELNTGKGEGVAYRGRILVELATFLEKTPPDKKLEPISNDDLLVVEKYQRRRKYSLSAVFHSATMLQDVGEAIQFEVSIGNYGNKFDTTCKPLASTTQYSRAVFDGNYYYYLPWAHTKPVVTLTSYWEDISHRLDAVNTLLAMAERLQTNIEALKSGIQGKIPANQLAELWLKLIDEVIEDTRYTLPLTEGKANVTVLDTQIRKLRSRSLSQIHEAAVRMRSEATDVKSTLAEIEDWLDKLMQLTEEPQNSMPDIIIWMIRGEKRLAYARIPAHQVLYSTSGENASGKYCGKTQTIFLKYPQEKNNGPKVPVELRVNIWLGLSAVEKKFNSFAEGTFTVFAEMYENQALMFGKWGTSGLVGRHKFSDVTGKIKLKREFFLPPKGWEWEGEWIVDPERSLLTEADAGHTEFTDEVYQNESRYPGGDWKPAEDTYTDANGDKAASPSELTCPPGWEWEDDAWSYDINRAVDEKGWEYGITIPPDHKPKSWVAAEKMYHTHRRRRLVRKRKKDLTQTASSTARAMEELQDQEGWEYASLIGWKFHWKQRSSDTFRRRRWRRKMAPSETHGAAAIFKLEGALGADTTEDGDEKSLEKQKHSATTVFGANTPIVSCNFDRVYIYHLRCYVYQARNLLALDKDSFSDPYAHICFLHRSKTTEIIHSTLNPTWDQTIIFDEVEIYGEPQTVLQNPPKVIMELFDNDQVGKDEFLGRSIFSPVVKLNSEMDITPKLLWHPVMNGDKACGDVLVTAELILRGKDGSNLPILPPQRAPNLYMVPQGIRPVVQLTAIEILAWGLRNMKNFQMASITSPSLVVECGGERVESVVIKNLKKTPNFPSSVLFMKVFLPKEELYMPPLVIKVIDHRQFGRKPVVGQCTIERLDRFRCDPYAGKEDIVPQLKASLLSAPPCRDIVIEMEDTKPLLASKLTEKEEEIVDWWSKFYASSGEHEKCGQYIQKGYSKLKIYNCELENVAEFEGLTDFSDTFKLYRGKSDENEDPSVVGEFKGSFRIYPLPDDPSVPAPPRQFRELPDSVPQECTVRIYIVRGLELQPQDNNGLCDPYIKITLGKKVIEDRDHYIPNTLNPVFGRMYELSCYLPQEKDLKISVYDYDTFTRDEKVGETIIDLENRFLSRFGSHCGIPEEYCVSGVNTWRDQLRPTQLLQNVARFKGFPQPILSEDGSRIRYGGRDYSLDEFEANKILHQHLGAPEERLALHILRTQGLVPEHVETRTLHSTFQPNISQGKLQMWVDVFPKSLGPPGPPFNITPRKAKKYYLRVIIWNTKDVILDEKSITGEEMSDIYVKGWIPGNEENKQKTDVHYRSLDGEGNFNWRFVFPFDYLPAEQLCIVAKKEHFWSIDQTEFRIPPRLIIQIWDNDKFSLDDYLGFLELDLRHTIIPAKSPEKCRLDMIPDLKAMNPLKAKTASLFEQKSMKGWWPCYAEKDGARVMAGKVEMTLEILNEKEADERPAGKGRDEPNMNPKLDLPNRPETSFLWFTNPCKTMKFIVWRRFKWVIIGLLFLLILLLFVAVLLYSLPNYLSMKIVKPNV

SEQ ID NO: 54626 - protein, 569 aa, Homo sapiens
LLLPRTRADEHEHTYQDKEEVVLWMNTVGPYHNRQETYKYFSLPFCVGSKKSISHYHETLGEALQGVELEFSGLDIKFKDDVMPATYCEIDLDKEKRDAFVYAIKNHYWYQMYIDDLPIWGIVGEADENGEDYYLWTYKKLEIGFNGNRIVDVNLTSEGKVKLVPNTKIQMSYSVKWKKSDVKFEDRFDKYLDPSFFQHRIHWFSIFNSFMMVIFLVGLVSMILMRTLRKDYARYSKEEEMDDMDRDLGDEYGWKQVHGDVFRPSSHPLIFSSLIGSGCQIFAVSLIVIIVAMIEDLYTERGSMLSTAIFVYAATSPVNGYFGGSLYARQGGRRWIKQMFIGAFLIPAMVCGTAFFINFIAIYYHASRAIPFGTMVAVCCICFFVILPLNLVGTILGRNLSGQPNFPCRVNAVPRPIPEKKWFMEPAVIVCLGGILPFGSIFIEMYFIFTSFWAYKIYYVYGFMMLVLVILCIVTVCVTIVCTYFLLNAEDYRWQWTSFLSAASTAIYVYMYSFYYYFFKTKMYGLFQTSFYFGYMAVFSTALGIMCGAIGYMGTSAFVRKIYTNVKID

SEQ ID NO: 54627 - protein, 6 aa, Homo sapiens
VAVQLG

SEQ ID NO: 54628 - protein, 536 aa, Homo sapiens
LQRARFKVGESSEDVALEEETIYENEGFRPYAEDTLSARGSSGDSDSPGSSSLSLTRKNSPKSGSPKSSSLLKLKAEKNAQAEMGKNHSSASFSSSITINTTCCSSSSSSSSSLSKTSGDLKPRSASDAGIRGTPKVRAKKDADANAGLTSCPRAKPSVRPKPFLNRAESQSQEKMDISTLRRQLRPTGQLRGGLKGSKSEDSELPPQTASEAPSEGSRRSSSDLITLPATTPPCPTKKEWEGPATSYMTCSAYQKVQDSEISFPAGVEVQVLEKQESGWWYVRFGELEGWAPSHYLVLDENEQPDPSGKELDTVPAKGRQNEGKSDSLEKIERRVQALNTVNQSKKATPPIPSKPPGGFGKTSGTPAVKMRNGVRQVAVRPQSVFVSPPPKDNNLSCALRRNESLTATDGLRGVRRNSSFSTARSAAAEAKGRLAERAASQGSDSPLLPAQRNSIPVSPVRPKPIEKSQFIHNNLKDVYVSIADYEGDEETAGFQEGVSMEVLERNPNGWWYCQILDGVKPFKGWVPSNYLEKKN

SEQ ID NO: 54629 - protein, 35 aa, Homo sapiens
TSTPLSSPVYCLRLTTKHLYAALSYNLHVLDFQNP

SEQ ID NO: 54630 - protein, 888 aa, Homo sapiens
LEPPAAPAPGEDNPAGAGGAAVAGAAGGARRFLCGVVEGFYGRPWVMEQRKELFRRLQKWELNTYLYAPKDDYKHRMFWREMYSVEEAEQLMTLISAAREYEIEFIYAISPGLDITFSNPKEVSTLKRKLDQVSQFGCRSFALLFDDIDHNMCAADKEVFSSFAHAQVSITNEIYQYLGEPETFLFCPTEYCGTFCYPNVSQSPYLRTVGEKLLPGIEVLWTGPKVVSKEIPVESIEEVSKIIKRAPVIWDNIHANDYDQKRLFLGPYKGRSTELIPRLKGVLTNPNCEFEANYVAIHTLATWYKSNMNGVRKDVVMTDSEDSTVSIQIKLENEGSDEDIETDVLYSPQMALKLALTEWLQEFGVPHQYSSRQVAHSGAKASVVDGTPLVAAPSLNATTVVTTVYQEPIMSQGAALSGEPTTLTKEEEKKQPDEEPMDMVVEKQEETDHKNDNQILSEIVEAKMAEELKPMDTDKESIAESKSPEMSMQEDCISDIAPMQTDEQTNKEQFVPGPNEKPLYTAEPVTLEDLQLLADLFYLPYEHGPKGAQMLREFQWLRANSSVVSVNCKGKDSEKIEEWRSRAAKFEEMCGLVMGMFTRLSNCANRTILYDMYSYVWDIKSIMSMVKSFVQWLGCRSHSSAQFLIGDQEPWAFRGGLAGEFQRLLPIDGANDLFFQPPPLTPTSKVYTIRPYFPKDEASVYKICREMYDDGVGLPFQSQPDLIGDKLVGGLLSLSLDYCFVLEDEDGICGYALGTVDVTPFIKKCKISWIPFMQEKYTKPNGDKELSEAEKIMLSFHEEQEVLPETFLANFPSLIKMDIHKKVTDPSVAKSMMACLLSSLKANGSRGAFCEVRPDDKRILEFYSKLGCFEIAKMEGFPKDVVILGRSL

SEQ ID NO: 54631 - protein, 306 aa, Homo sapiens
LTITFCLEDGPKRYTIGRTLIPRYFRSIFEGGATELYYVLKHPKEAFHSNFVSLDCDQGSMVTQHGKPMFTQVCVEGRLYLEFMFDDMMRIKTWHFSIRQHRELIPRSILAMHAQDPQMLDQLSKNITRCGLSNSTLNYLRLCVILEPMQELMSRHKTYSLSPRDCLKTCLFQKWQRMVAPPAEPTRQQPSKRRKRKMSGGSTMSSGGGNTNNSNSKKKSPASTFALSSQDVMVVGEPTLMGGEFGDEDERLITRLENTQFDAANGIDDEDSFNNSPALGANSPWNSKPPSSQESKSENPTSQASQ

SEQ ID NO: 54632 - protein, 265 aa, Homo sapiens
KEAFHSNFVSLDCDQGSMVTQHGKPMFTQVCVEGRLYLEFMFDDMMRIKTWHFSIRQHRELIPRSILAMHAQDPQMLDQLSKNITRCGLSNSTLNYLRLCVILEPMQELMSRHKTYSLSPRDCLKTCLFQKWQRMVAPPAEPTRQQPSKRRKRKMSGGSTMSSGGGNTNNSNSKKKSPASTFALSSQVPDVMVVGEPTLMGGEFGDEDERLITRLENTQFDAANGIDDEDSFNNSPALGANSPWNSKPPSSQESKSENPTSQASQ

SEQ ID NO: 54633 - protein, 131 aa, Homo sapiens
MVAPPAEPTRQQPSKRRKRKMSGGSTMSSGGGNTNNSNSKKKSPASTFALSSQVPDVMVVGEPTLMGGEFGDEDERLITRLENTQFDAANGIDDEDSFNNSPALGANSPWNSKPPSSQESKSENPTSQASQ

SEQ ID NO: 54634 - protein, 66 aa, Homo sapiens
IGHVEKFLRRKMGLDPACQVDIICGDHLLEQYQTLREIRRAIGDAAMQDGLLVLHYGLVVSPLKIT

SEQ ID NO: 54635 - protein, 559 aa, Homo sapiens
ITEEHAAMWTDGRYFLQAAKQMDSNWTLMKMGLKDTPTQEDWLVSVLPEGSRVGVDPLIIPTDYWKKMAKVLRSAGHHLIPVKENLVDKIWTDRPERPCKPLLTLGLDYTGISWKDKVADLRLKMAERNVMWFVVTALDEIAWLFNLRGSDVEHNPVFFSYAIIGLETIMLFIDGDRIDAPSVKEHLLLDLGLEAEYRIQVHPYKSILSELKALCADLSPREKVWVSDKASYAVSETIPKDHRCCMPYTPICIAKAVKNSAESEGMRRAHIKDAVALCELFNWLEKEVPKGGVTEISAADKAEEFRRQQADFVDLSFPTISSTGPNGAIIHYAPVPETNRTLSLDEVYLIDSGAQYKDGTTDVTRTMHFGTPTAYEKECFTYVLKGHIAVSAAVFPTGTKGHLLDSFARSALWDSGLDYLHGTGHGVGSFLNVHEGPCGISYKTFSDEPLEAGMIVTDEPGYYEDGAFGIRIENVVLVVPVKTKYNFNNRGSLTFEPLTLVPIQTKMIDVDSLTDKECDWLNNYHLTCRDVIGKELQKQGRQEALEWLIRETQPISKQH

SEQ ID NO: 54636 - protein, 47 aa, Homo sapiens
INRKLQAVLEDTLLKNITLKENLQTLGTEIERLIKHQHELEQRTKKT

SEQ ID NO: 54637 - protein, 458 aa, Homo sapiens
LATLYFALPLLDLLLSAEVSGGDRLDCVKASDQCLKEQSCSTKYRTLRQCVAGKETNFSLASGLEAKDECRSAMEALKQKSLYNCRCKRGMKKEKNCLRIYWSMYQSLQGNDLLEDSPYEPVNSRLSDIFRVVPFISVEHIPKGNNCLDAAKACNLDDICKKYRSAYITPCTTSVSNDVCNRRKCHKALRQFFDKVPAKHSYGMLFCSCRDIACTERRRQTIVPVCSYEEREKPNCLNLQDSCKTNYICRSRLADFFTNCQPESRSVSSCLKENYADCLLAYSGLIGTVMTPNYIDSSSLSVAPWCDCSNSGNDLEECLKFLNFFKDNTCLKNAIQAFGNGSDVTVWQPAFPVQTTTATTTTALRVKNKPLGPAGSENEIPTHVLPPCANLQAQKLKSNVSGNTHLCISNGNYEKEGLGASSHITTKSMAAPPSCGLSPLLVLVVTALSTLLSLTETS

SEQ ID NO: 54638 - protein, 31 aa, Homo sapiens
VFREIFGMSIQEFDRLPLWRRNDMKKKAKLF

SEQ ID NO: 54639 - protein, 17 aa, Homo sapiens
KKTDKYTEVLKTHGLLV

SEQ ID NO: 54640 - protein, 37 aa, Homo sapiens
MCAQKKEIYNSFKVGRHSSLPKWVHSVRLSSLKIYKN

SEQ ID NO: 54641 - protein, 54 aa, Homo sapiens
IETLESLSLDQHSKKISKYTDDTEEDLDNEISQLIDSQPFSSISDDLFGPSESV

SEQ ID NO: 54642 - protein, 40 aa, Homo sapiens
LGSPQEHREGSSQAGCMPQLKIPAPVNATSLLDCLLPDSV

SEQ ID NO: 54643 - protein, 26 aa, Homo sapiens
RVMEETPSILRVPYEPSRKAGKFSNS

SEQ ID NO: 54644 - protein, 65 aa, Homo sapiens; identical to SEQ ID NO: 42005

SEQ ID NO: 54645 - protein, 53 aa, Homo sapiens
TEPDRLQVFHKRAIMPYGVYKKQQKDPSEEAAVLQYASLVGQKCSERMLLFRN

SEQ ID NO: 54646 - protein, 87 aa, Homo sapiens
LDAHFLVLASDLGKEKAKQLRSDLSSFDMLRYVETLLTHMGVNPLEAEELIRDEDSPDFEFIVYDSWKITGRTAENTFNKTHTFHFL

SEQ ID NO: 54647 - protein, 97 aa, Homo sapiens
IPESLRNCVNKEFFVTSAPWSVIDQQAIHPELNGATYRYPPGIVGVAPGGLPAAMEGIIPGGIPVTHNLPTVAHPSQAPSPNQPTKHGDNREHPNEQ

SEQ ID NO: 54648 - protein, 72 aa, Homo sapiens
ISENNYIRITSEISPELFMQLVPQYYFSNLPPSESKDILQQVVDHLSPVSTMNKEQQMCETCPETEQRCTLQ

SEQ ID NO: 54649 - protein, 70 aa, Homo sapiens
LLDLLARLSIYSTSDCEHGMASVISRLDFNGFYTERLERLSAERSQKATPQVPVLRGPPAPAPRVAVTAQ

SEQ ID NO: 54650 - protein, 287 aa, Homo sapiens
LRVLLSCVRGPLRPPVRCPAWRPFASGANFEYIIAEKRGKNNTVGLIQLNRPKALNALCDGLIDELNQALKTFEEDPAVGAIVLTGGDKAFAAGADIKEMQNLSFQDCYSSKFLKHWDHLTQVKKPVIAAVNGYAFGGGCELAMMCDIIYAGEKAQFAQPEILIGTIPGAGGTQRLTRAVGKSLAMEMVLTGDRISAQDAKQAGLVSKICPVETLVEEAIQCAEKIASNSKIVVAMAKESVNAAFEMTLTEGSKLEKKLFYSTFATDDRKEGMTAFVEKRKANFKDQ

SEQ ID NO: 54651 - protein, 69 aa, Homo sapiens
KQFHFKDFNRAFGFMTRVALQAEKLDHHPEWFNVYNKVHITLSTHECAGLSERDINLASFIEQVAVSMT

SEQ ID NO: 54652 - protein, 295 aa, Homo sapiens
LLFALFLAASLGPVAAFKVATPYSLYVCPEGQNVTLTCRLLGPVDKGHDVTFYKTWYRSSRGEVQTCSERRPIRNLTFQDLHLHHGGHQAANTSHDLAQRHGLESASDHHGNFSITMRNLTLLDSGLYCCLVVEIRHHHSEHRVHGAMELQVQTGKDAPSNCVVYPSSSQDSENITAAALATGACIVGILCLPLILLLVYKQRQAASNRRAQELVRMDSNIQGIENPGFEASPPAQGIPEAKVRHPLSYVAQRQPSESGRHLLSEPSTPLSPPGPGDVFFPSLDPVPDSPNFEVI

SEQ ID NO: 54653 - protein, 4 aa, Homo sapiens
MGYM

SEQ ID NO: 54654 - protein, 158 aa, Homo sapiens
IALGQYMGALQSIVPLFIYMNKFYIETKLNRDLKDDLIKLFTEHVAEKHIYSLMPLLLEAQSTPFQVTPSTMANIVKGLYTLRPEWVQMAPTLFSKFIPNILPPAVESELSEYAAQDQKFQRELIQNGFTRGDQSRKRAGDELAYNSSSACASSRGYR

SEQ ID NO: 54655 - protein, 6 aa, Homo sapiens
KFLETC

SEQ ID NO: 54656 - protein, 257 aa, Homo sapiens
KMAAAVGRLLRASVARHVSAIPWGISATAALRPAACGRTSLTNLLCSGSSQAKLFSTSSSCHAPAVTQHAPYFKGTAVVNGEFKDLSLDDFKGKYLVLFFYPLDFTFVCPTEIVAFSDKANEFHDVNCEVVAVSVDSHFSHLAWINTPRKNGGLGHMNIALLSDLTKQISRDYGVLLEGSGLALRGLFIIDPNGVIKHLSVNDLPVGRSVEETLRLVKAFQYVETHGEVCPANWTPDSPTIKPSPAASKEYFQKVNQ

SEQ ID NO: 54657 - protein, 48 aa, Homo sapiens
IFNLMKYDSYSRFLKSDLFLKHKRTEEEEEDLPDAQTAAKRASRIYNT

SEQ ID NO: 54658 - protein, 30 aa, Homo sapiens
VKAYVDKYRHMRRHKKPEAGEEPPTQGAEG

SEQ ID NO: 54659 - protein, 122 aa, Homo sapiens
LFYLSGTYYALYFLATLLMITYKSQVFSYPHRYLVLDLALLFLMGILEAVRLYLGTRGNLTEAERPLAASLALTAGTALLSAHFLLWQALVLWADWALSATLLALHGLEAVLQVVAIAAFTR

SEQ ID NO: 54660 - protein, 38 aa, Homo sapiens
IRSLRPLQFYQLLPFARSAKQILALCFFPIPRFTISSP

SEQ ID NO: 54661 - protein, 50 aa, Homo sapiens
LLRTLGPTVGGLLYRSFGVPVFGHVQVAINTLVLLVLWRKPMPQRKDKVR

SEQ ID NO: 54662 - protein, 224 aa, Homo sapiens
TFDDAQQEDRKRLAELLVSVLEQGLPPSHRVIWLQSVRILSRDRNCLDPFTSRQSLQALACYADISVSEGSVPESADMDVVLESLKCLCNLVLSSPVAQMLAAEARLVVKLTERVGLYRERSFPHDVQFFDLRLLFLLTALRTDVRQQLFQELKGVRLLTDTLELTLGVTPEGNPPPTLLPSQETERAMEILKVLFNITLDSIKGEVDETLPFTDTWGPFSGTV

SEQ ID NO: 54663 - protein, 259 aa, Homo sapiens
LGNLPLKCLDVLLTLEPHGDSTEFMGVNMDVIRALLIFLEKRLHKTHRLKESVAPVLSVLTECARMHRPARKFLKAQGWPPPQVLPPLRDVRTRPEVGEMLRNKLVRLMTHLDTDVKRVAAEFLFVLCSESVPRFIKYTGYGNAAGLLAARGLMAGGRPEGQYSEDEDTDTDEYKEAKASINPVTGRVEEKPPNPMEGMTEEQKEHEAMKLVTMFDKLSRNRVIQPMGMSPRGHLTSLQDAMCETMEQQLSSDPDSDPD

SEQ ID NO: 54664 - protein, 108 aa, Homo sapiens
ILPRSTVINIHSETSVPDHVVWSLFNTLFLNWCCLGFIAFAYSVKSRDRKMVGDVTGAQAYASTAKCLNIWALILGILMTIGFILLLVFGSVTVYHIMLQIIQEKRGY

SEQ ID NO: 54665 - protein, 36 aa, Homo sapiens
LEYTVVLTNMAFHMTAWWDFGNKELLITSQPEEKRF

SEQ ID NO: 54666 - protein, 6 aa, Homo sapiens
KKPLKK

SEQ ID NO: 54667 - protein, 332 aa, Homo sapiens
VKRQRMESALDQLKQFTTVVADTGDFHAIDEYKPQDATTNPSLILAAAQMPAYQELVEEAIAYGRKLGGSQEDQIKNAIDKLFVLFGAEILKKIPGRVSTEVDARLSFDKDAMVARARRLIELYKEAGISKDRILIKLSSTWEGIQAGKELEEQHGIHCNMTLLFSFAQAVACAEAGVTLISPFVGRILDWHVANTDKKSYEPLEDPGVKSVTKIYNYYKKFSYKTIVMGASFRNTGEIKALAGCDFLTISPKLLGELLQDNAKLVPVLSAKAAQASDLEKIHLDEKSFRWLHNEDQMAVEKLSDGIRKFAADAVKLERMLTERMFNAENGK

SEQ ID NO: 54668 - protein, 108 aa, Homo sapiens
LLAALGGNSSPSAKDIKKILDSVGIEADDDRLNKVISELNGKNIEDVIAQGIGKLASVPAGGAVAVSAAPGSAAPAAGSAPAAAEEKKDEKKEESEESDDDMGFGLFD

SEQ ID NO: 54669 - protein, 237 aa, Homo sapiens
KYLLFTYNCCFWLAGLAVMAVGIWTLALKSDYISLLASGTYLATAYILVVAGTVVMVTGVLGCCATFKERRNLLRLYFILLLIIFLLEIIAGILAYAYYQQLNTELKENLKDTMTKRYHQPGHEAVTSAVDQLQQEFHCCGSNNSQDWRDSEWIRSQEAGGRVVPDSCCKTVVALCGQRDHASNIYKVEGGCITKLETFIQEHLRVIGAVGIGIACVQVFGMIFTCCLYRSLKLEHY

SEQ ID NO: 54670 - protein, 61 aa, Homo sapiens
VPPCRVGVFLDYEAGIVSFFNVTSHGSLIYKFSKCCFSQPVYPYFNPWNCPAPMTLCPPSS

SEQ ID NO: 54671 - protein, 193 aa, Homo sapiens
LQRSARLALEVLERAKRRAVDWHALERPKGCMGVLAREAPHLEKQPAAGPQRVLPGEREERPPTLSASFRTMAEFMDYTSSQCGKYYSSVPEEGGATHVYRYHRGESKLHMCLDIGNGQRKDRKKTSLGPGGSYQISEHAPEASQPAENISKDLYIEVYPGTYSVTVGSNDLTKKTHVVAVDSGQSVDLVFPV

SEQ ID NO: 54672 - protein, 583 aa, Homo sapiens
LSDSRVLWAPAEAHPLSPQGHPARLHRIVPRLRDVFGWGNLTCPICKGLFTAINLGLKKEPNVARVGSVAIKLCNLLKIAPPAVCQSIVHLFEDDMVEVWRRSVLSPSEACGLLLGSTCGHWDIFSSWNISLPTVPKPPPKPPSPPAPGAPVSRILFLTDLHWDHDYLEGTDPDCADPLCCRRGSGLPPASRPGAGYWGEYSKCDLPLRTLESLLSGLGPAGPFDMVYWTGDIPAHDVWHQTRQDQLRALTTVTALVRKFLGPVPVYPAVGNHESTPVNSFPPPFIEGNHSSRWLYEAMAKAWEPWLPAEALRTLRIGGFYALSPYPGLRLISLNMNFCSRENFWLLINSTDPAGQLQWLVGELQAAEDRGDKVHIIGHIPPGHCLKSWSWNYYRIVARYENTLAAQFFGHTHVDEFEVFYDEETLSRPLAVAFLAPSATTYIGLNPGYRVYQIDGNYSGSSHVVLDHETYILNLTQANIPGAIPHWQLLYRARETYGLPNTLPTAWHNLVYRMRGDMQLFQTFWFLYHKGHPPSEPCGTPCRLATLCAQLSARADSPALCRHLMPDGSLPEAQSLWPRPLFC

SEQ ID NO: 54673 - protein, 93 aa, Homo sapiens
LRNLRDFLLVYNRMTELCFQRCVPSLHHRALDAEEEACLHSCAGKLIHSNHRLMAAYVQLMPALVQRRIADYEAASAVPGVAAEQPGVSPSGS

SEQ ID NO: 54674 - protein, 54 aa, Homo sapiens
LLWTTFSLSAGRATQSPFACGWTTRRTTSTRGTIMASPPCTGPAERAALLWLRC

SEQ ID NO: 54675 - protein, 449 aa, Homo sapiens
IFTQCREGNAVAVRLWLDNTENDLNQGDDHGFSPLHWACREGRSAVVEMLIMRGARINVMNRGDDTPLHLAASHGHRDIVQKLLQYKADINAVNEHGNVPLHYACFWGQDQVAEDLVANGALVSICNKYGEMPVDKAKAPLRELLRERAEKMGQNLNRIPYKDTFWKGTTRTRPRNGTLNKHSGIDFKQLNFLTKLNENHSGELWKGRWQGNDIVVKVLKVRDWSTRKSRDFNEECPRLRIFSHPNVLPVLGACQSPPAPHPTLITHWMPYGSLYNVLHEGTNFVVDQSQAVKFALDMARGMAFLHTLEPLIPRHALNSRSVMIDEDMTARISMADVKFSFQCPGRMYAPAWVAPEALQKKPEDTNRRSADMWSFAVLLWELVTREVPFADLSNMEIGMKVALEGLRPTIPPGISPHVCKLMKICMNEDPAKRPKFDMIVPILEKMQDK

SEQ ID NO: 54676 - protein, 18 aa, Homo sapiens
LPQVSLQGLRDQLANSWT

SEQ ID NO: 54677 - protein, 358 aa, Homo sapiens
KMATPAVPVSAPPATPTPVPAAAPASVPAPTPAPAAAPVPAAAPASSSDPAAAAAATAAPGQTPASAQAPAQTPAPALPGPALPGPFPGGRVVRLHPVILASIVDSYERRNEGAARVIGTLLGTVDKHSVEVTNCFSVPHNESEDEVAVDMEFAKNMYELHKKVSPNELILGWYATGHDITEHSVLIHEYYSREAPNPIHLTVDTSLQNGRMSIKAYVSTLMGVPGRTMGVMFTPLTVKYAYYDTERIGVDLIMKTCFSPNRVIGLSSDLQQVGGASARIQDALSTVLQYAEDVLSGKVSADNTVGRFLMSLVNQVPKIVPDDFETMLNSNINDLLMVTYLANLTQSQIALNEKLVNL

SEQ ID NO: 54678 - protein, 997 aa, Homo sapiens
KDYRGALAYYKKALRTNPGCPAEVRLGMGHCFVKLNKLEKARLAFSRALELNSKCVGALVGLAVLELNNKEADSIKNGVQLLSRAYTIDPSNPMVLNHLANHFFFKKDYSKVQHLALHAFHNTEVEAMQAESCYQLARSFHVQEDYDQAFQYYYQATQFASSSFVLPFFGLGQMYIYRGDKENASQCFEKVLKAYPNNYETMKILGSLYAASEDQEKRDIAKGHLKKVTEQYPDDVEAWIELAQILEQTDIQGALSAYGTATRILQEKVQADVPPEILNNVGALHFRLGNLGEAKKYFLASLDRAKAEAEHDEHYYNAISVTTSYNLARLYEAMCEFHEAEKLYKNILREHPNYVDCYLRLGAMARDKGNFYEASDWFKEALQINQDHPDAWSLIGNLHLAKQEWGPGQKKFERILKQPSTQSDTYSMLALGNVWLQTLHQPTRDREKEKRHQDRALAIYKQVLRNDAKNLYAANGIGAVLAHKGYFREARDVFAQVREATADISDVWLNLAHIYVEQKQYISAVQMYENCLRKFYKHQNTEVVLYLARALFKCGKLQECKQTLLKARHVAPSDTVLMFNVALVLQRLATSVLKDEKSNLKEVLNAVKELELAHRYFSYLSKVGDKMRFDLALAATEARQCSDLLSQAQYHVARARKQDEEERELRAKQEQEKELLRQKLLKEQEEKRLREKEEQKKLLEQRAQYVEKTKNILMFTGETEATKEKKRGGGGGRRSKKGGEFDEFVNDDTDDDLPISKKKKRRKGSGSEQEGEDEEGGERKKKKRRRHPKGEEGSDDDETENGPKPKKRRPPKAEKKKAPKPERLPPSMKGKIKSKAIISSSDDSSDEDKLKIADEGHPRNSNSNSDSDEDEQRKKCASSESDSDENQNKSGSEAGSPRRPRRQRSDQDSDSDQPSRKRRPSGSEQSDNESVQSGRSHSGVSENDSRPASPSAESDHESERGSDNEGSGQGSGNESEPEGSNNEASDRGSEHGSDDSD

SEQ ID NO: 54679 - protein, 27 aa, Homo sapiens
IPGYCQIRIEHTTKKFSFCVLPSHSPH

SEQ ID NO: 54680 - protein, 114 aa, Homo sapiens
VQFRIPMEMTRVDLRNYLEGIYNVPVAAVRTRVQHGSNKRRDHRNVRIKKPDYKVAYVQLAHGQTFTFPDLFPEKDESPEGSAADDLYSMLEEERQQRQSSDPRRGGVPSWFGL

SEQ ID NO: 54681 - protein, 226 aa, Homo sapiens
KYLLFVFNFVFWLAGGVILGVALWLRHDPQTTNLLYLELGDKPAPNTFYVGIYILIAVGAVMMFVGFLGCYGAIQESQCLLGTFFTCLVILFACEVAAGIWGFVNKDQIAKDVKQFYDQALQQAVVDDDANNAKAVVKTFHETLDCCGSSTLTALTTSVLKNNLCPSGSNIISNLFKEDCHQKIDDLFSGKLYLIGIAAIVVAVIMIFEMILSMVLCCGIRNSSVY

SEQ ID NO: 54682 - protein, 4 aa, Homo sapiens
LTQD

SEQ ID NO: 54683 - protein, 18 aa, Homo sapiens
RWKSEQSQVHGESAAGQV

SEQ ID NO: 54684 - protein, 366 aa, Homo sapiens
KSPSVPKSPTPKSPPSRKKDDSFLGKLGGTLARRKKAKEVSELQEEGMNAINLPLSPIPFELDPEDTMLEENEVRTMVDPNSRSDPKLQELMKVLIDWINDVLVGERIIVKDLAEDLYDGQVLQKLFEKLESEKLNVAEVTQSEIAQKQKLQTVLEKINETLKLPPRSIKWNVDSVHAKSLVAILHLLVALSQYFRAPIRLPDHVSIQVVVVQKREGILQSRQIQEEITGNTEALSGRHERDAFDTLFDHAPDKLNVVKKTLITFVNKHLNKLNLEVTELETQFADGVYLVLLMGLLEGYFVPLHSFFLTPDSFEQKVLNVSFAFELMQDGGLEKPKPRPEDIVNCDLKSTLRVLYNLFTKYRNVE

SEQ ID NO: 54685 - protein, 36 aa, Homo sapiens
VAKVNTLIRPDGEKKAYVRLAPDYDALDVVNKIGII

SEQ ID NO: 54686 - protein, 581 aa, Homo sapiens
KEELLKAIWHAFTALDQDHSGKVSKSQLKVLSHNLCTVLKVPHDPVALEEHFRDDDEGPVSNQGYMPYLNRFILEKVQDNFDKIEFNRMCWTLCVKKNLTKNPLLITEEDAFKIWVIFNFLSEDKYPLIIVSEEIEYLLKKLTEAMGGGWQQEQFEHYKINFDDSKNGLSAWELIELIGNGQFSKGMDRQTVSMAINEVFNELILDVLKQGYMMKKGHRRKNWTERWFVLKPNIISYYVSEDLKDKKGDILLDENCCVESLPDKDGKKCLFLVKCFDKTFEISASDKKKKQEWIQAIHSTIHLLKLGSPPPHKEARQRRKELRKKQLAEQEELERQMKELQAANESKQQELEAVRKKLEEAASRAAEEEKKRLQTQVELQARFSTELEREKLIRQQMEEQVAQKSSELEQYLQRVRELEDMYLKLQEALEDERQARQDEETVRKLQARLLEEESSKRAELEKWHLEQQQAIQTTEAEKQELENQRVLKEQALQEAMEQLEQLELERKQALEQYEEVKKKLEMATNKTKSWKDKVAHHEGLIRLIEPGSKNPHLITNWGPAAFTEAELEEREKNWKEKKTTE

SEQ ID NO: 54687 - protein, 191 aa, Homo sapiens
LRFAAGMKLVSVALMYLGSLAFLGADTARLDVASEFRKKWNKWALSRGKRELRMSSSYPTGLADVKAGPAQTLIRPQDMKGASRSPEDSSPDAARIRVKRYRQSMNNFQGLRSFGCRFGTCTVQKLAHQIYQFTDKDKDNVAPRSKISPQGYGRRRRRSLPEAGPGRTLVSSKPQAHGAPAPPSGSAPHFL

SEQ ID NO: 54688 - protein, 129 aa, Homo sapiens
KSAELAKAGGCKHFNLLSSKGADKSSNFLYLQVKGEVEAKVEELKFDRYSVFRPGVLLCDRQESRPGEWLVRKFFGSLPDSWASGHSVPVVTVVRAMLNNVVRPRDKQMELLENKAIHDLGKAHGSLKP

SEQ ID NO: 54689 - protein, 433 aa, Homo sapiens
LENPTAKIEPSSWSGSESPAENMERMSDSADKPIDNDAEGVWSPDIEQSFQEALAIYPPCGRRKIILSDEGKMYGRNELIARYIKLRTGKTRTRKQVSSHIQVLARRKSRDFHSKLKDQTAKDKALQHMAAMSSAQIVSATAIHNKLGLPGIPRPTFPGAPGFWPGMIQTGQPGSSQDVKPFVQQAYPIQPAVTAPIPGFEPASAPAPSVPAWQGRSIGTTKLRLVEFSAFLEQQRDPDSYNKHLFVHIGHANHSYSDPLLESVDIRQIYDKFPEKKGGLKELFGKGPQNAFFLVKFWADLNCNIQDDAGAFYGVTSQYESSENMTVTCSTKVCSFGKQVVEKVETEYARFENGRFVYRINRSPMCEYMINFIHKLKHLPEKYMMNSVLENFTILLVVTNRDTQETLLCMACVFEVSNSEHGAQHHIYRLVKD

SEQ ID NO: 54690 - protein, 10 aa, Homo sapiens
LRRLTIGLGS

SEQ ID NO: 54691 - protein, 91 aa, Homo sapiens
KSRYTTEFHELEKIGSGEFGSVFKCVKRLDGCIYAIKRSKKPLAGSVDEQNALREVYAHAVLGQHSHVVRYFSAWAEDDHMLIQNEYCNGE

SEQ ID NO: 54692 - protein, 30 aa, Homo sapiens
VQSHMKPAGDWGPGSSKPAGTEADAVSGRR

SEQ ID NO: 54693 - protein, 210 aa, Homo sapiens
VFLKFFCMSFFCHLCQGYFDGPLYPEMSNGTLHHYFVPDGDYEENDDPEKCQLLFRVSDHRRCSQGEGSQVGSLLSLTLREEFTVLGRQVEDAGRVLEGISKSISYDLDGEESYGKYLRRESHQIGDAYSNSDKSLTELESKFKQGQEQDSRQESRLNEDFLGMLVHTRSLLKETLDISVGLRDKYELLALTIRSHGTRLGRLKNDYLKV

SEQ ID NO: 54694 - protein, 97 aa, Homo sapiens
KAKKKKWSKGKVRDKLNNLVLFDKATYDKLCKEVPNYKLITPAVVSERLKIRGSLARAALQELLSKGLIKLVSKHRAKVIYTRNTKGGDAAAAGEDA

SEQ ID NO: 54695 - protein, 265 aa, Homo sapiens
LLESRMMDPCSVGVQLRTTNECHKTYYTRHTGFKTLQELSSNDMLLLQLRTGMTLSGNNTICFHHVKIYIDRFEDLQKSCCDPFNIHKKLAKKNLHVIDLDDATFLSAKFGRQLVPGWKLCPKCTQIINGSVDVDTEDRQKRKPESDGRTAKALRSLQFTNPGRQTEFAPETGKREKRRLTKNATAGSDRQVIPAKSKVYDSQGLLIFSGMDLCDCLDEDCLGCFYACPACGSTKCGAECRCDRKWLYEQIEIEGGEIIHNKHAG

SEQ ID NO: 54696 - protein, 800 aa, Homo sapiens
LKLSRTPALLALALPLAAALAFSDETLDKVPKSEGYCSRILRAQGTRREGYTEFSLRVEGDPDFYKPGTSYRVTLSAAPPSYFRGFTLIALRENREGDKEEDHAGTFQIIDEEETQFMSNCPVAVTESTPRRRTRIQVFWIAPPAGTGCVILKASIVQKRIIYFQDEGSLTKKLCEQDSTFDGVTDKPILDCCACGTAKYRLTFYGNWSEKTHPKDYPRRANHWSAIIGGSHSKNYVLWEYGGYASEGVKQVAELGSPVKMEEEIRQQSDEVLTVIKAKAQWPAWQPLNVRAAPSAEFSVDRTRHLMSFLTMMGPSPDWNVGLSAEDLCTKECGWVQKVVQDLIPWDAGTDSGVTYESPNKPTIPQEKIRPLTSLDHPQSPFYDPEGGSITQVARVVIERIARKGEQCNIVPDNVDDIVADLAPEEKDEDDTPETCIYSNWSPWSACSSSTCDKGKRMRQRMLKAQLDLSVPCPDTQDFQPCMGPGCSDEDGSTCTMSEWITWSPCSISCGMGMRSRERYVKQFPEDGSVCTLPTEETEKCTVNEECSPSSCLMTEWGEWDECSATCGMGMKKRHRMIKMNPADGSMCKAETSQAEKCMMPECHTIPCLLSPWSEWSDCSVTCGKGMRTRQRMLKSLAELGDCNEDLEQVEKCMLPECPIDCELTEWSQWSECNKSCGKGHVIRTRMIQMEPQFGGAPCPETVQRKKCRIRKCLRNPSIQKLRWREARESRRSEQLKEESEGEQFPGCRMRPWTAWSECTKLCGGGIQERYMTVKKRFKSSQFTSCKDKKEIRACNVHPC

SEQ ID NO: 54697 - protein, 332 aa, Homo sapiens
TMARGGRGRRLGLALGLLLALVLAPRVLRAKPTVRKERVVRPDSELGERPPEDNQSFQYDHEAFLGKEDSKTFDQLTPDESKERLGKIVDRIDNDGDGFVTTEELKTWIKRVQKRYIFDNVAKVWKDYDRDKDDKISWEEYKQATYGYYLGNPAEFHDSSDHHTFKKMLPRDERRFKAADLNGDLTATREEFTAFLHPEEFEHMKEIVVLETLEDIDKNGDGFVDQDEYIADMFSHEENGPEPDWVLSEREQFNEFRDLNKDGKLDKDEIRHWILPQDYDHAQAEARHLVYESDKNKDEKLTKEEILENWNMFVGSQATNYGEDLTKNHDEL

SEQ ID NO: 54698 - protein, 6 aa, Homo sapiens
IEHFGD

SEQ ID NO: 54699 - protein, 48 aa, Homo sapiens
LPTVPGGLSPVQRELEEVAIKFARLVNYNKMVFCPYYDAILSKILVRS

SEQ ID NO: 54700 - protein, 1089 aa, Homo sapiens
LKRKSEELDNHSSAMQIVDELSILPAMLQTNMGNPVTVVTATTGSKQNCTTGEGDYQLVQHEVLCSMKNTYEVLDFLGRGTFGQVVKCWKRGTNEIVAIKILKNHPSYARQGQIEVSILARLSTENADEYNFVRAYECFQHRNHTCLVFEMLEQNLYDFLKQNKFSPLPLKVIRPILQQVATALKKLKSLGLIHADLKPENIMLVDPVRQPYRVKVIDFGSASHVSKTVCSTYLQSRYYRAPEIILGLPFCEAIDMWSLGCVIAELFLGWPLYPGALEYDQIRYISQTQGLPGEQLLNVGTKSTRFFCKETDMSHSGWRLKTLEEHEAETGMKSKEARKYIFNSLDDVAHVNTVMDLEGSDLLAEKADRREFVSLLKKMLLIDADLRITPAETLNHPFVNMKHLLDFPHSNHVKSCFHIMDICKSHLNSCDTNNHNKTSLLRPVASSSTATLTANFTKIGTLRSQALTTSAHSVVHHGIPLQAGTAQFGCGDAFQQTLIICPPAIQGIPATHGKPTSYSIRVDNTVPLVTQAPAVQPLQIRPGVLSQTWSGRTQQMLVPAWQQVTPLAPATTTLTSESVAGSHRLGDWGKMISCSNHYNSVMPQPLLTNQITLSAPQPVSVGIAHVVWPQPATTKKNKQCQNRGILVKLMEWEPGREEINAFSWSNSLQNTNIPHSAFISPKIINGKDVEEVSCIETQDNQNSEGEARNCCETSIRQDSDSSVSDKQRQTIIIADSPSPAVSVITISSDTDEEETSQRHSLRECKGSLDCEACQSTLNIDRMCSLSSPDSTLSTSSSGQSSPSPCKRPNSMSDEEQESSCDTVDGSPTSDSSGHDSPFAESTFVEDTHENTELVSSADTETKPAVCSVVVPPVELENGLNADEHMANTDSICQPLIKGRSAPGRLNQPSAVGTRQQKLTSAFQQQHLNFSQVQHFGSGHQEWNGNFGHRRQQAYIPTSVTSNPFTLSHGSPNHTAVHAHLAGNTHLGGQPTLLPYPSSATLSSAAPVAHLLASPCTSRPMLQHPTYNISHPSGIVHQVPVGLNPRLLPSPTIHQTQYKPIFPPHSYIAASPAYTGFPLSPTKLSQYPYM

SEQ ID NO: 54701 - protein, 81 aa, Homo sapiens
MPGNFPGGMPGMGGDMPGMAGMPGLNEILSDPEALAAMQDPEVMVAFQDVAQNPANMSKYQSNPKVMNLISKLSAKFGGQA

SEQ ID NO: 54702 - protein, 36 aa, Homo sapiens
VPSDSSQPAMEARPPSNRGGGYCCGHWVSASSQQRL

SEQ ID NO: 54703 - protein, 96 aa, Homo sapiens
VPNDIQSELKHLYVAVGELLRHFWSCFPVNTPFLEEKVVKMKSNLERFQVTKLCPFQEKIRRQYLSTNLVSHIEEMLQTAYNKLHTWQSRRLMKKT

SEQ ID NO: 54704 - protein, 5 aa, Homo sapiens
IGNNG

SEQ ID NO: 54705 - protein, 713 aa, Homo sapiens
KYNIRGPALIPRMKTKHRIYYITLFSIVLLGLIATGMFQFWPHSIESSNDWNVEKRSIRDVPVVRLPADSPIPERGDLSCRMHTCFDVYRCGFNPKNKIKVYIYALKKYVDDFGVSVSNTISREYNELLMAISDSDYYTDDINRACLFVPSIDVLNQNTLRIKETAQAMAQLSRWDRGTNHLLFNMLPGGPPDYNTALDVPRDRALLAGGGFSTWTYRQGYDVSIPVYSPLSAEVDLPEKGPGPRQYFLLSSQVGLHPEYREDLEALQVKHGESVLVLDKCTNLSEGVLSVRKRCHKHQVFDYPQVLQEATFCVVLRGARLGQAVLSDVLQAGCVPVVIADSYILPFSEVLDWKRASVVVPEEKMSDVYSILQSIPQRQIEEMQRQARWFWEAYFQSIKAIALATLQIINDRIYPYAAISYEEWNDPPAVKWGSVSNPLFLPLIPPQSQGFTAIVLTYDRVESLFRVITEVSKVPSLSKLLVVWNNQNKNPPEDSLWPKIRVPLKVVRTAENKLSNRFFPYDEIETEAVLAIDDDIIMLTSDELQFGYEVWREFPDRLVGYPGRLHLWDHEMNKWKYESEWTNEVSMVLTGAAFYHKYFNYLYTYKMPGDIKNWVDAHMNCEDIAMNFLVANVTGKAVIKVTPRKKFKCPECTAIDGLSLDQTHMVERSECINKFASVFGTMPLKVVEHRADPVLYKDDFPEKLKSFPNIGSL

SEQ ID NO: 54706 - protein, 26 aa, Homo sapiens
LPEPPPASPASAPTRTTRSRKRKHNF

SEQ ID NO: 54707 - protein, 24 aa, Homo sapiens
LASPPYPIPLPCPVSCLRAPSGWE

SEQ ID NO: 54708 - protein, 135 aa, Homo sapiens
LTFYNNVNACILFLPLLLLLGELQALRDFAQLGSAHFWGMMTLGGLFGFAIGYVTGLQIKFTSPLTHNVSGTAKACAQTVLAVLYYEETKSFLWWTSNMMVLGGSSAYTWVRGWEMKKTPEEPSPKDSEKSAMGV

SEQ ID NO: 54709 - protein, 76 aa, Homo sapiens
KFTSPLTHNVSGTAKACAQTVLAVLYYEETKSFLWWTSNMMVLGGSSAYTWVRGWEMKKTPEEPSPKDSEKSAMGV

SEQ ID NO: 54710 - protein, 528 aa, Homo sapiens
LSLTMPTVEELYRNYGILADATEQVGQHKDAYQVILDGVKGGTKEKRLAAQFIPKFFKHFPELADSAINAQLDLCEDEDVSIRRQAIKELPQFATGENLPRVADILTQLLQTDDSAEFNLVNNALLSIFKMDAKGTLGGLFSQILQGEDIVRERAIKFLSTKLKTLPDEVLTKEVEELILTESKKVLEDVTGEEFVLFMKILSGLKSLQTVSGRQQLVELVAEQADLEQTFNPSDPDCVDRLLQCTRQAVPLFSKNVHSTRFVTYFCEQVLPNLGTLTTPVEGLDIQLEVLKLLAEMSSFCGDMEKLETNLRKLFDKLLEYMPLPPEEAENGENAGNEEPKLQFSYVECLLYSFHQLGRKLPDFLTAKLNAEKLKDFKIRLQYFARGLQVYIRQLRLALQGKTGEALKTEENKIKVVALKITNNINVLIKDLFHIPPSYKSTVTLSWKPVQKVEIGQKRASEDTTSGSPPKKSSAGPKRDARQIYNPPSGKYSSNLGNFNYEQRGAFRGSRGGRGWGTRGNRSRGRLY

SEQ ID NO: 54711 - protein, 89 aa, Homo sapiens
KKGPQDGVARSSCYGDCRSEDDEATEWITFQVKRVKKPKGDHKKTPGKKVETGQIENGHRYQANLEITGPKVASPGPQGLLDWKTRKVP

SEQ ID NO: 54712 - protein, 37 aa, Homo sapiens
LVWYESTLKLQPEFVPAKNRIQTIQCHLMLKKGRRSP

SEQ ID NO: 54713 - protein, 294 aa, Homo sapiens [sequence omitted]

SEQ ID NO: 54714 - protein, 486 aa, Homo sapiens
ITVGPRGPLLVQDVVFTDEMAHFDRERIPERVVHAKGAGAFGYFEVTHDITKYSKAKVFEHIGKKTPIAVRFSTVAGESGSADTVRDPRGFAVKFYTEDGNWDLVGNNTPIFFIRDPILFPSFIHSQKRNPQTHLKDPDMVWDFWSLRPESLHQVSFLFSDRGIPDGHRHMNGYGSHTFKLVNANGEAVYCKFHYKTDQGIKNLSVEDAARLSQEDPDYGIRDLFNAIATGKYPSWTFYIQVMTFNQAETFPFNPFDLTKVWPHKDYPLIPVGKLVLNRNPVNYFAEVEQIAFDPSNMPPGIEASPDKMLQGRLFAYPDTHRHRLGPNYLHIPVNCPYRARVANYQRDGPMCMQDNQGGAPNYYPNSFGAPEQQPSALEHSIQYSGEVRRFNTANDDNVTQVRAFYVNVLNEEQRKRLCENIAGHLKDAQIFIQKKAVKNFTEVHPDYGSHIQALLDKYNAEKPKNAIHTFVQSGSHLAAREKANL

SEQ ID NO: 54715 - protein, 28 aa, Homo sapiens
KESSETPDQFMTADETRNLQNVDMKIGV

SEQ ID NO: 54716 - protein, 515 aa, Homo sapiens
LEPFPADRLFPGSSFLDLGDLNESDFLNNAHFPEHLDHFTENMEDFSNDLFSSFFDDPVLDEKSPLLDMELDSPTPGIQAEHSYSLSGDSAPQSPLVPIKMEDTTQDAEHGAWALGHKLCSIMVKQEQSPELPVDPLAAPSAMAAAAAMATTPLLGLSPLSRLPIPHQAPGEMTQLPVIKAEPLEVNQFLKVTPEDLVQMPPTPPSSHGSDSDGSQSPRSLPPSSPVRPMARSSTAISTSPLLTAPHKLQGTSGPLLLTEEEKRTLIAEGYPIPTKLPLTKAEEKALKRVRRKIKNKISAQESRRKKKEYVECLEKKVETFTSENNELWKKVETLENANRTLLQQLQKLQTLVTNKISRPYKMAATQTGTCLMVAALCFVLVLGSLVPCLPEFSSGSQTVKEDPLAADGVYTASQMPSRSLLFYDDGAGLWEDGRSTLLPMEPPDGWEINPGGPAEQRPRDHLQHDHLDSTHETTKYLSEAWPKDGGNGTSPDFSHSKEWFHDRDLGPNTTIKLS

SEQ ID NO: 54717 - protein, 37 aa, Homo sapiens
LKKARYNAQCQETIRVTKPCTPKTKAKAKAKKGKGKD

SEQ ID NO: 54718 - protein, 71 aa, Homo sapiens
IDFKPAFSKDDILPMDLGTFYREFQNPPQLSSLSIDIGAQSMAEDLDSLPEKLAVHEKNVREFDAFVETLQ

SEQ ID NO: 54719 - protein, 42 aa, Homo sapiens
LTFYGFLMALSKHRGINQALGALPDKGDLMHDPAMDEELERL

SEQ ID NO: 54720 - protein, 51 aa, Homo sapiens
LVNSVTASPEASCLPSRTPPRVGSPWRPLHHSRKVDGESDGSTEETDESET

SEQ ID NO: 54721 - protein, 357 aa, Homo sapiens
RTLHQHKLGRASWPSVQQGLQQSFLHTLDSYRILQKAAPFDRRATSLAWHPTHPSTVAVGSKGGDIMLWNFGIKDKPTFIKGIGAGGSITGLKFNPLNTNQFYASSMEGTTRLQDFKGNILRVFASSDTINIWFCSLDVSASSRMVVTGDNVGNVILLNMDGKELWNLRMHKKKVTHVALNPCCDWFLATASVDQTVKIWDLRQVRGKASFLYSLPHRHPVNAACFSPDGARLLTTDQKSEIRVYSASQWDCPLGLIPHPHRHFQHLTPIKAAWHPRYNLIVVGRYPDPNFKSCTPYELRTIDVFDGNSGKMMCQLYDPESSGISSLNEFNPMGDTLASAMGYHILIWSQEEARTRK

SEQ ID NO: 54722 - protein, 18 aa, Homo sapiens
MFCEYFFNCPIIEVYGRT

SEQ ID NO: 54723 - protein, 6 aa, Homo sapiens
IPDFDD

SEQ ID NO: 54724 - protein, 357 aa, Homo sapiens
RLLFLTALALELLERAGGSQPALRSRGTATACRLDNKESESWGALLSGERLDTWICSLLGSLMVGLSGVFPLLVIPLEMGTMLRSEAGAWRLKQLLSFALGGLLGNVFLHLLPEAWAYTCSASPGGEGQSLQQQQQLGLWVIAGILTFLALEKMFLDSKEEGTSQAPNKDPTAAAAALNGGHCLAQPAAEPGLGAVVRSIKVSGYLNLLANTIDNFTHGLAVAASFLVSKKIGLLTTMAILLHEIPHEVGDFAILLRAGFDRWSAAKLQLSTALGGLLGAGFAICTQSPKGVVGCSPAAEETAAWVLPFTSGGFLYIALVNVLPDLLEEEDPWRSLQQLLLLCAGIVVMVLFSLFVD

SEQ ID NO: 54725 - protein, 52 aa, Homo sapiens [sequence omitted]

SEQ ID NO: 54726 - protein, 25 aa, Homo sapiens
IATRPRRPPDVHSRFLLVPSPIWQL

SEQ ID NO: 54727 - protein, 335 aa, Homo sapiens
KSNMATLKDQLIYNLLKEEQTPQNKITVVGVGAVGMACAISILMKDLADELALVDVIEDKLKGEMMDLQHGSLFLRTPKIVSGKDYNVTANSKLVIITAGARQQEGESRLNLVQRNVNIFKFIIPNVVKYSPNCKLLIVSNPVDILTYVAWKISGFPKNRVIGSGCNLDSARFRYLMGERLGVHPLSCHGWVLGEHGDSSVPVWSGMNVAGVSLKTLHPDLGTDKDKEQWKEVHKQVVESAYEVIKLKGYTSWAIGLSVADLAESIMKNLRRVHPVSTMIKGLYGIKDDVFLSVPCILGQNGISDLVKVTLTSEEEARLKKSADTLWGIQKELQF

SEQ ID NO: 54728 - protein, 70 aa, Homo sapiens
KWFSQKPCYWKRLQSGFSPIPLPNGGKAGSSPIKLSWVGPWGTWRFQCACMEWNECCWCLSEDSAPRFRD

SEQ ID NO: 54729 - protein, 106 aa, Homo sapiens
LYKGVLLPYPTANLVLDVVMLLLYLGIEVIRLFFGTKGNLCQRKMPLSISVALTFPSAMMASYYLLLQTYVLRLEAIMNGILLFFCGSELLLEVLTLAAFSSMDRI

SEQ ID NO: 54730 - protein, 160 aa, Homo sapiens
KEEGNQRYREGKYRDAVSRYHRALLQLRGLDPSLPSPLPNLGPQGPALTPEQENILHTTQTDCYNNLAACLLQMEPVNYERVREYSQKVLERQPDNAKALYRAGVAFFHLQDYDQARHYLLAAVNRQPKDANVRRYLQLTQSELSSYHRKEKQLYLGMFG

SEQ ID NO: 54731 - protein, 5 aa, Homo sapiens
LESTL

SEQ ID NO: 54732 - protein, 182 aa, Homo sapiens
LELTPRAPGSPRGQHEPSKPPPAGETVTGGFGAKKRKGSSSQAPASKKLNKEELPVIPKGKPKSGRVWKDRSKKRFSQMLQDKPLRTSWQRKMKERQERKLAKDFARHLEEEKERRRQEKKQRRAENLKRRLENERKAEVVQVIRNPAKLKRAKKKQLRSIEKRDTLALLQKQPPQQPAAKI

SEQ ID NO: 54733 - protein, 66 aa, Homo sapiens
KSPGADLLQVLTKAVKSAEAAAEATKNMEAGAGRASYISSARLEQPDPGAVAAAAILRAILEVLQS

SEQ ID NO: 54734 - protein, 552 aa, Homo sapiens
RVQVGVEPPSDRKLRRVAGSAGTMSQDTEVDMKEVELNELEPEKQPMNAASGAAMSLAGAEKNGLVKIKVAEDEAEAAAAAKFTGLSKEELLKVAGSPGWVRTRWALLLLFWLGWLGMLAGAVVIIVRAPRCRELPAQKWWHTGALYRIGDLQAFQGHGAGNLAGLKGRLDYLSSLKVKGLVLGPIHKNQKDDVAQTDLLQIDPNFGSKEDFDSLLQSAKKKSIRVILDLTPNYRGENSWFSTQVDTVATKVKDALEFWLQAGVDGFQVRDIENLKDASSFLAEWQNITKGFSEDRLLIAGTNSSDLQQILSLLESNKDLLLTSSYLSDSGSTGEHTKSLVTQYLNATGNRWCSWSLSQARLLTSFLPAQLLRLYQLMLFTLPGTPVFSYGDEIGLDAAALPGQPMEAPVMLWDESSFPDIPGAVSANMTVKGQSEDPGSLLSLFRRLSDQRSKERSLLHGDFHAFSAGPGLFSYIRHWDQNERFLVVLNFGDVGLSAGLQASDLPASASLPAKADLLLSTQPGREEGSPLELERLKLEPHEGLLLRFPYAA

SEQ ID NO: 54735 - protein, 129 aa, Homo sapiens
LAPPSEYPGAGSSSVFSVLSNSAEVKRERLEDVVGGCCYRVNNSLDHEYQPRPVEVIISSAKEMVGQKMKYSIVSRNCEHFVTQLRYGKSRCKQVEKAKVEVGVATALGILVVAGCSFAIRRYQKKATA

SEQ ID NO: 54736 - protein, 198 aa, Homo sapiens
TKSCSSSCAVHDLIFWRDVKKTGFVFGTTLIMLLSLAAFSVISVVSYLILALLSVTISFRIYKSVIQAVQKSEEGHPFKAYLDVDITLSSEAFHNYMNAAMVHINRALKLIIRLFLVEDLVDSLKLAVFMWLMTYVGAVFNGITLLILAELLIFSVPIVYEKYKTQIDHYVGIARDQTKSIVEKIQAKLPGIAKKKAE

SEQ ID NO: 54737 - protein, 189 aa, Homo sapiens
VHDLIFWRDVKKTGFVFGTTLIMLLSLAAFSVISVVSYLILALLSVTISFRIYKSVIQAVQKSEEGHPFKAYLDVDITLSSEAFHNYMNAAMVHINRALKLIIRLFLVEDLVDSLKLAVFMWLMTYVGAVFNGITLLILAELLIFSVPIVYEKYKTQIDHYVGIARDQTKSIVEKIQAKLPGIAKKKAE

SEQ ID NO: 54738 - protein, 57 aa, Homo sapiens
ILAELLIFSVPIVYEKYKDPSKTPWNRQKKGRISTWKPEMQQLLKHHLIVITSLLVL

SEQ ID NO: 54739 - protein, 62 aa, Homo sapiens
LHEKYMLLCMHGTPGHEDFVQWEMEVCKLPRLSLNGVRFKRISGTSMAFKNIASKIANELKL

SEQ ID NO: 54740 - protein, 262 aa, Homo sapiens
KQEPLGSDSEGVNCLAYDEAIMAQQDRIQQEIAVQNPLVSERLELSVLYKEYAEDDNIYQQKIKDLHKKYSYIRKTRPDGNCFYRAFGFSHLEALLDDSKELQRFKAVSAKSKEDLVSQGFTEFTIEDFHNTFMDLIEQVEKQTSVADLLASFNDQSTSDYLVVYLRLLTSGYLQRESKFFEHFIEGGRTVKEFCQQEVEPMCKESDHIHIIALAQALSVSIQVEYMDRGEGGTTNPHIFPEGSEPKVYLLYRPGHYDILYK

SEQ ID NO: 54741 - protein, 22 aa, Homo sapiens
LTPGPAAAAADAAASSVAKGGA

SEQ ID NO: 54742 - protein, 140 aa, Homo sapiens
LSWFRVLTVLSICLSAVATATGAEGKRKLQIGVKKRVDHCPIKSRKGDVLHMHYTGKLEDGTEFDSSLPQNQPFVFSLGTGQVIKGWDQGLLGMCEGEKRKLVIPSELGYGERGAPPKIPGGATLVFEVELLKIERRTEL

SEQ ID NO: 54743 - protein, 35 aa, Homo sapiens
LFVICALSLAACLCLVARRAPSTSIYLEAKVGLQH

SEQ ID NO: 54744 - protein, 129 aa, Homo sapiens
KGVLFGVPGAFTPGCSKTHLPGFVEQAEALKAKGVQVVACLSVNDAFVTGEWGRAHKAEGKVRLLADPTGAFGKETDLLLDDSLVSIFGNRRLKRFSMVVQDGIVKALNVEPDGTGLTCSLAPNIISQL

SEQ ID NO: 54745 - protein, 689 aa, Homo sapiens
LGLGRHENAIKYLGQDYEQLRVRCLQSGTLFRDEAFPPVPQSLGYKDLGPNSSKTYGIKWKRPTELLSNPQFIVDGATRTDICQGALGDCWLLAAIASLTLNDTLLHRVVPHGQSFQNGYAGIFHFQLWQFGEWVDVVVDDLLPIKDGKLVFVHSAEGNEFWSALLEKAYAKVNGSYEALSGGSTSEGFEDFTGGVTEWYELRKAPSDLYQIILKALERGSLLGCSIDISSVLDMEAITFKKLVKGHAYSVTGAKQVNYRGQVVSLIRMRNPWGEVEWTGAWSDSSSEWNNVDPYERDQLRVKMEDGEFWMSFRDFMREFTRLEICNLTPDALKSRTIRKWNTTLYEGTWRRGSTAGGCRNYPATFWVNPQFKIRLDETDDPDDYGDRESGCSFVLALMQKHRRRERRFGRDMETIGFAVYEVPPELVGQPAVHLKRDFFLANASRARSEQFINLREVSTRFRLPPGEYVVVPSTFEPNKEGDFVLRFFSEKSAGTVELDDQIQANLPDEQVLSEEEIDENFKALFRQLAGEDMEISVKELRTILNRIISKHKDLRTKGFSLESCRSMVNLMDRDGNGKLGLVEFNILWNRIRNYLSIFRKFDLDKSGSMSAYEMRMAIESAGFKLNKKLYELIITRYSEPDLAVDFDNFVCCLVRLETMFRFFKTLDTDLDGVVTFDLFKWLQLTMFA

SEQ ID NO: 54746 - protein, 82 aa, Homo sapiens
KPPRLHLETPQPSPQEGGSVDIWRIPETGSPNSGLTPESGAEEPFLSNASSLLSLHVDLGPSILDDVLQIMDQDLDSMQIPT

SEQ ID NO: 54747 - protein, 60 aa, Homo sapiens
ICGTSENDDQLLFCDDCDRGYHMYCLTPSMSEPPEGSWSCHLCLDLLKEKASIYQNQNSS

SEQ ID NO: 54748 - protein, 187 aa, Homo sapiens
KPAQGFLHRGGRKPVSVAISLEGVHVIDSREKHVLLGLRFQELSWDHTSPEEEEPILWLEFDGDSEGTPVNKLLKIYSKQAELMSSLIEYCIELSQAAEPAGPQDSATGSPSDPSSSLAPVQRPKLRRQGSVVSSRIQHLSTIDYVEDGKGIRRVKPKRTTSFFSRQLSLGQGSYTVVQPGDSLEQG

SEQ ID NO: 54749 - protein, 12 aa, Homo sapiens
KGPMKLGARKLD

SEQ ID NO: 54750 - protein, 141 aa, Homo sapiens
ILLQDKQRKIYCVACQELDSDVDKDNPALNAQAALSQAREHQLASASELPLGSRPAPQPPVPRPEHCEGAAAGLKAAQGPPAPAVPPNTDVMACTQTALLQKLTWASAELGSSTSLETSIQLCGLIRACAEALRSLQQLQH

SEQ ID NO: 54751 - protein, 97 aa, Homo sapiens
LRKEMVGLRQLDMSLLCQLWGLYESIQDYKHLCQDLSFCQDLSSSLHSDSSYPPDAGLSDDEEPPDASLPPDPPPLTVPQTHNARDQWLQDAFHISL

SEQ ID NO: 54752 - protein, 128 aa, Homo sapiens
IEFSYELSKVEGKTGTPEKPLSDLGLLSYRSYWSQTILEILMGLKSESGERPQITINEISEITSIKKEDVISTLQYLNLINYYKGQYILTLSEDIVDGHERAMLKRLLRIDSKCLHFTPKDWSKRGKW

SEQ ID NO: 54753 - protein, 35 aa, Homo sapiens
VTGSLSSAKRKEPEPKGSTKKKAKTGAAGKFKRGK

SEQ ID NO: 54754 - protein, 427 aa, Homo sapiens
VPTFSWEEIQKHNLRTDRWLVIDRKVYNITKWSIQHPGGQRVIGHYAGEDATDAFRAFHPDLEFVGKFLKPLLIGELAPEEPSQDHGKNSKITEDFRALRKTAEDMNLFKTNHVFFLLLLAHIIALESIAWFTVFYFGNGWIPTLITAFVLATSQAQAGWLQHDYGHLSVYRKPKWNHLVHKFVIGHLKGASANWWNHRHFQHHAKPNIFHKDPDVNMLHVFVLGEWQPIEYGKKKLKYLPYNHQHEYFFLIGPPLLIPMYFQYQIIMTMIVHKNWVDLAWAVSYYIRFFITYIPFYGILGALLFLNFIRFLESHWFVWVTQMNHIVMEIDQEAYRDWFSSQLTATCNVEQSFFNDWFSGHLNFQIEHHLFPTMPRHNLHKIAPLVKSLCAKHGIEYQEKPLLRALLDIIRSLKKSGKLWLDAYLHK

SEQ ID NO: 54755 - protein, 87 aa, Homo sapiens
IIVVGCKTDLRKDKSLVNKLRRNGLEPVTYHRGQEMARSVGAVAYLECSARLHDNVHAVFQEAAEVALSSRGRNFWRRITQGFCVVT

SEQ ID NO: 54756 - protein, 199 aa, Homo sapiens
ISKKQLTWLVNRLPGLKDLLLAGCSWSAVSALSTSSCPLLRTLDLRWAVGIKDPQIRDLLTPPADKPGQDNRSKLRNMTDFRLAGLDITDATLRLIIRHMPLLSRLDLSHCSHLTDQSSNLLTAVGSSTRYSLTELNMAGCNKLTDQTLIYLRRIANVTLIDLRGCKQITRKACEHFISDLSINSLYCLSDEKLIQKIS

SEQ ID NO: 54757 - protein, 23 aa, Homo sapiens
KPRSPVVELSKVPLVQRGSANGL

SEQ ID NO: 54758 - protein, 154 aa, Homo sapiens
VNRQLQGHLGEIRELKQLNRRLQAENRELRDLCCFLDSERQRGRRAARQWQLFGTQASRAVREDLGGCWQKLAELEGRQEELLRENLALKELCLALGEEWGPRGGPSGAGGSGAGPAPELALPPCGPRDLGDGSSSTGSVGSPDQLPLACSPDD

SEQ ID NO: 54759 - protein, 201 aa, Homo sapiens
KKKYNARFPPARIKKIMQTDEEIGKVAAAVPVIISRALELFLESLLKKACQVTQSRNAKTMTTSHLKQCIELEQQFDFLKDLVASVPDMQGDGEDNHMDGDKGARRGRKPGSGGRKNGGMGTKSKDKKLSGTDSEQEDESEDTDTDGEEETSQPPPQASHPSAHFQSPPTPFLPFASTLPLPPAPPGPSAPDEEDEEDYDS

SEQ ID NO: 54760 - protein, 43 aa, Homo sapiens
KMSSSDTPLGTVALLQEKQKAQKTPYIVLSGSGKSMNANTITK

SEQ ID NO: 54761 - protein, 463 aa, Homo sapiens
TASFQGIVDAYGVGRYQEVNPAPYTIITFPFLFAVMFGDVGHGLLMFLFALAMVLAENRPAVKAAQNEIWQTFFRGRYLLLLMGLFSIYTGFIYNECFSRATSIFPSGWSVAAMANQSGWSDAFLAQHTMLTLDPNVTGVFLGPYPFGIDPIWSLAANHLSFLNSFKMKMSVILGVVHMAFGVVLGVFNHVHFGQRHRLLLETLPELTFLLGLFGYLVFLVIYKWLCVWAARAASAPSILIHFINMFLFSHSPSNRLLYPRQEVVQATLVVLALAMVPILLLGTPLHLLHRHRRRLRRRPADRQEENKAGLLDLPDASVNGWSSDEEKAGGLDDEEEAELVPSEVLMHQAIHTIEFCLGCVSNTASYLRLWALSLAHAQLSEVLWAMVMRIGLGLGREVGVAAVVLVPIFAAFAVMTVAILLVMEGLSAFLHALRLHWVEFQNKFYSGTGYKLSPFTFAATDD

SEQ ID NO: 54762 - protein, 8 aa, Homo sapiens
VSVSAFPA

SEQ ID NO: 54763 - protein, 883 aa, Homo sapiens
LQLPPPPPPGHYGAWAAQELQAKLAEIGAPIQGNREELVERLQSYTRQTGIVLNRPVLRGEDGDKAAPPPMSAQLPGIPMPPPPLGLPPLQPPPPPPPPPPGLGLGFPMAHPPNLGPPPPLRVGEPVALSEEERLKLAQQQAALLMQQEERAKQQGDHSLKEHELLEQQKRAAVLLEQERQQEIAKMGTPVPRPPQDMGQIGVRTPLGPRVAAPVGPVGPTPTVLPMGAPVPRPRGPPPPPGDENREMDDPSVGPKIPQALEKILQLKESRQEEMNSQQEEEEMETDARSSLGQSASETEEDTVSVSKKEKNRKRRNRKKKKKPQRVRGVSSESSGDREKDSTRSRGSDSPAADVEIEYVTEEPEIYEPNFIFFKRIFEAFKLTDDVKKEKEKEPEKLDKLENSAAPKKKGFEEEHKDSDDDSSDDEQEKKPEAPKLSKKKLRRMNRFTVAELKQLVARPDVVEMHDVTAQDPKLLVHLKATRNSVPVPRHWCFKRKYLQGKRGIEKPPFELPDFIKRTGIQEMREALQEKEEQKTMKSKMREKVRPKMGKIDIDYQKLHDAFFKWQTKPKLTIHGDLYYEGKEFETRLKEKKPGDLSDELRISLGMPVGPNAHKVPPPWLIAMQRYGPPPSYPNLKIPGLNSPIPESCSFGYHAGGWGKPPVDETGKPLYGDVFGTNAAEFQTKTEEEEIDRTPWGELEPSDEESSEEEEEEESDEDKPDETGFITPADSGLITPGGFSSVPAGMETPELIELRKKKIEEAMDGSETPQLFTVLPEKRTATVGGAMMGSTHIYDMSTVMSRKGPAPELQGVEVALAPEELELDPMAMTQKYEEHVREQQAQVEKEDFSDMVAEHAAKQKQKKRKAQPQDSRGGSKKYKEFKF

SEQ ID NO: 54764 - protein, 36 aa, Homo sapiens
IDGVEWSDIKFFQLAAQWPTHVKHFPVGLFSGSKAT

SEQ ID NO: 54765 - protein, 337 aa, Homo sapiens
REQRGRRMADIIARLREDGIQKRVIQEGRGELPDFQDGTKATFHYRTLHSDDEGTVLDDSRARGKPMELIIGKKFKLPVWETIVCTMREGEIAQFLCDIKHVVLYPLVAKSLRNIAVGKDPLEGQRHCCGVAQMREHSSLGHADLDALQQNPQPLIFHMEMLKVESPGTYQQDPWAMTDEEKAKAVPLIHQEGNRLYREGHVKEAAAKYYDAIACLKNLQMKEQPGSPEWIQLDQQITPLLLNYCQCKLVVEEYYEVLDHCSSILNKYDDNVKAYFKRGKAHAAVWNAQEAQADFAKVLELDPALAPVVSRELRALEARIRQKDEEDKARFRGIFSH

SEQ ID NO: 54766 - protein, 79 aa, Homo sapiens
RDTVLLRKESRKLIVQPNTRLEGSDVQLLEYEASAAGLIRSFSERFPEDGPELEEILTQLATADARFWKGPSEAPSGQA

SEQ ID NO: 54767 - protein, 42 aa, Homo sapiens
VESLSNKGISDIIKVLVLREGQSAPLLSAHVNMPGSEGLAAA

SEQ ID NO: 54768 - protein, 363 aa, Homo sapiens
VKLFIGNLPREATEQEIRSLFEQYGKVLECDIIKNYGFVHIEDKTAAEDAIRNLHHYKLHGVNINVEASKNKSKTSTKLHVGNISPTCTNKELRAKFEEYGPVIECDIVKDYAFVHMERAEDAVEAIRGLDNTEFQGKRMHVQLSTSRLRTAPGMGDQSGCYRCGKEGHWSKECPIDRSGRVADLTEQYNEQYGAVRTPYTMSYGDSLYYNNAYGALDAYYKRCRAARSYEAVAAAAASVYNYAEQTLSQLPQVQNTAMASHLTSTSLDPYDRHLLPTSGAAATAAAAAAAAAAVTAASTSYYGRDRSPLRRATAPVPTVGEGYGYGHESELSQASAAARNSLYDMARYEREQYADRARYSAF

SEQ ID NO: 54769 - protein, 61 aa, Homo sapiens
LPSLEHRDSPWHRGPAPARPKMLVISGGDGYEDFRLSSGGGSSSETVGRDDSTNHLLLWRV

SEQ ID NO: 54770 - protein, 115 aa, Homo sapiens
IGSDAFNCCTFLSGFLLLAGTQDGNIYQLDVRSPRAPVQVIHRSGAPVLSLLSVRDGFIASQGDGSCFIVQQDLDYVTELTGADCDPVYKVATWEKQIYTCCRDGLVRRYQLSDL

SEQ ID NO: 54771 - protein, 37 aa, Homo sapiens
LALQLQRMFDNERRTVSRRKGSVDQYLLRSSNMAGAK

SEQ ID NO: 54772 - protein, 192 aa, Homo sapiens
LGWQWKIDDKPVKIDKWDGSAVKNSLDDSAKKVLLEKYKYVENFGLIDGRLTICTISCFFAIVALIWDYMHPFPESKPVLALCVISYFVMMGILTIYTSYKEKSIFLVAHRKDPTGMDPDDIWQLSSSLKRFDDKYTLKLTFISGRTKQQREAEFTKSIAKFFDHSGTLVMDAYEPEISRLHDSLAIERKIK

SEQ ID NO: 54773 - protein, 23 aa, Homo sapiens
MESNWVSLVSKNYEIEQTIVQRK

SEQ ID NO: 54774 - protein, 241 aa, Homo sapiens
VTWYIAEFWNTVSNLIMIIPPMFGAVQSVRDGLEKRYIASYLALTVVGMGSWCFHMTLKYEMQLLDELPMIYSCCIFVYCMFECFKIKNSVNYHLLFTLVLFSLIVTTVYLKVKEPIFHQVMYGMLVFTLVLRSIYIVTWVYPWLRGLGYTSLGIFLLGFLFWNIDNIFCESLRNFRKKVPPIIGITTQFHAWWHILTGLGSYLHILFSLYTRTLYLRYRPKVKFLFGIWPVILFEPLRKH

SEQ ID NO: 54775 - protein, 53 aa, Homo sapiens
KDEFLGQVHLKADPDNLQALHTLHLRDRNSRQPSNLPGTVAVHILSSTSLMAV

SEQ ID NO: 54776 - protein, 62 aa, Homo sapiens
MNRHKMTTLTPAYHAENYSPEDNRFDLRPFLYNTSWPWQFRCIENQVLQLERAEPQSLDGVD

SEQ ID NO: 54777 - protein, 56 aa, Homo sapiens
IGRGMSEALKVPSSTVEYLKKHGIDVRVLQTEQAVKEYNALVAQGVRVGGVFHSTC

SEQ ID NO: 54778 - protein, 51 aa, Homo sapiens
IMLNIVKNELQEPCDSPKVKEERIDTPPACTEESIATPSEIKTENDTVESV

SEQ ID NO: 54779 - protein, 99 aa, Homo sapiens
IKPSESNVTILGRFDYSQCDIWYMRFSMDFWQKMLALGNQVGKLYVWDLEVEDPHKAKCTTLTHHKCGAAIRQTSFSRDSSILIAVCDDASIWRWDRLR

SEQ ID NO: 54780 - protein, 4 aa, Homo sapiens
MFLF

SEQ ID NO: 54781 - protein, 52 aa, Homo sapiens
IQPPPPEYQLGSRTWLEAETPGQKRQCSAFMEFTEESRRASHFSSILKIEPV

SEQ ID NO: 54782 - protein, 154 aa, Homo sapiens
RRRHRSRSRGPSCSRSRSRSRYRGSRYSRSPYSRSPYSRSRYSRSPYSRSRYRESRYGGSHYSSSGYSNSRYSRYHSSRSHSKSGSSTSSRSASTSKSSSARRSKSSSVSRSRSRSRSSSMTRSPPRVSKRKSKSRSRSKRPPKSPEEEGQMSS

SEQ ID NO: 54783 - protein, 371 aa, Homo sapiens
LNTDYLDSDYQRGQLYPFSLSSDVQVATFTLTNSAPMTQSFQERWYVNLHSLMDRALTPQCGSGEDLYILTGTVPSDYRVKDKVAVPEFVWLAACCAVPGGGWAMGFVKHTRDSDIIEDVMVKDLQKLLPFNPQLFQNNCGETEQDTEKMKKILEVVNQIQDEERMVQSQKSSSPLSSTRSKRSTLLPPEASEGSSSFLGKLMGFIATPFIKLFQLIYYLVVAILKNIVYFLWCVTKQVINGIESCLYRLGSATISYFMAIGEELVSIPWKVLKVVAKVIRALLRILCCLLKAICRVLSIPVRVLVDVATFPVYTMGAIPIVCKDIALGLGGTVSLLFDTAFGTLGGLFQVVFSVCKRIGYKVTFDNSGEL

SEQ ID NO: 54784 - protein, 74 aa, Homo sapiens
LSNTTAIAEAWARLDHKFDLMYAKRAFVHWYVGEGMEEGEFSEAREDMAALEKDYEEVGVDSVEGEGEEEREEY

SEQ ID NO: 54785 - protein, 7 aa, Homo sapiens
MAPQPRT

SEQ ID NO: 54786 - protein, 637 aa, Homo sapiens
MMSPVSKTQEHGLFYGDQHPGMLHEMVKPYPAPQPVRTDVAVLRYQPPPEYGVTSRPCQLPFPSTMQQHSPMSSQTSSASGPLHSVSLPLPLPMALGAPQPPPAASPSQQLGPDAFAIVERAQQMVEILTEENRVLHQELQGYYDNADKLHKFEKELQRISEAYESLVKSTTKRESLDKAMRNKLEGEIRRLHDFNRDLRDRLETANRQLSSREYEGHEDKAAEGHYASQNKEFLKEKEKLEMELAAVRTASEDHRRHIEILDQALSNAQARVIKLEEELREKQAYVEKVEKLQQALTQLQSACEKREQMERRLRTWLERELDALRTQQKHGNGQPANMPEYNAPALLELVREKEERILALEADMTKWEQKYLEESTIRHFAMNAAATAAAERDTTIINHSRNGSYGESSLEAHIWQEEEEVVQANRRCQDMEYTIKNLHAKIIEKDAMIKVLQQRSRKDAGKTDSSSLRPARSVPSIAAATGTHSRQTSLTSSQLAEEKKEEKTWKGSIGLLLGKEHHEHASAPLLPPPPTSALSSIASTTAASSAHAKTGSKDSSTQTDKSAELFWPSMASLPSRGRLSTTPAHSPVLKHPAAKGTAEKLENSPGHGKSPDHRGRVSSLLHKPEFPDGEMMEVLI

SEQ ID NO: 54787 - protein, 416 aa, Homo sapiens
VVKFQPSLWPWDSVRNNLRSALTEMCVLYDVLSIVRDKKFMTLDPVSQDALPPKQNPQTLQLISKKKSLAGAAQILLKGAERLTKSVTENQENKLQRDFNSELLRLRQHWKLRKVGDKILGDLSYRSAGSLFPHHGTFEVIKNTDLDLDKKIPEDYCPLDVQIPSDLEGSAYIKVSIQKQAPDIGDLGTVNLFKRPLPKSKPGSPHWQTKLEAAQNVLLCKEIFAQLSREAVQIKSQVPHIVVKNQIISQPFPSLQLSISLCHSSNDKKSQKFATEKQCPEDHLYVLEHNLHLLIREFHKQTLSSIMMPHPASAPFGHKRMRLSGPQAFDKNEINSLQSSEGLLEKIIKQAKHIFLRSRAAATIDSLASRIEDPQIQAHWSNINDVYESSVKVLITSQGYEQICNMCVYKGPFNCN

SEQ ID NO: 54788 - protein, 72 aa, Homo sapiens
ISVRNGPESGSKIMVQFPRNQCKDLPKSDVLQDNKWSHLRGPFKEVQWNKMEGRNFVYKMELLMSALSPCLL

SEQ ID NO: 54789 - protein, 168 aa, Homo sapiens
VPDQFQCKLIAVGIFQLLSVINLVVYVLLAPVVVYTLFVPFRQKTDVLKVYEILPTFDVLHFKSEGYNDLSLYNLFLEENISEVKSYKCLKVLENIKSSGQGIDPMLLLTNLGMIKMDVVDGKTPMSAEMREEQGNQTAELQGMNIDSETKANNGEKNARQRLLDSSC

SEQ ID NO: 54790 - protein, 145 aa, Homo sapiens
INEELSEVLQTLQDEFGQMSFDHQQLAKLIQESPTVELKDKLECELEALVGRMEAKANQITKVRKYQAQLEKQKLEKQKKELKATKKTLDEERNSSSRSGITGTTNKKDFMKLRPGEKRRKNLQLLKDMQSIQNSLQSSSLCWDY

SEQ ID NO: 54791 - protein, 36 aa, Homo sapiens
LDYLEQQGDMILPDRLVIRKLRATIRNKQKMTKSSQ

SEQ ID NO: 54792 - protein, 444 aa, Homo sapiens
LEALFNAVMNPKTANVPQTVPMRLRKLPDSFFKPPEPKSHSRQASTDAGTAGALTPQHVRAHSSPASLQLGAVSPGTLTPTGVVSGPAATPTAQHLRQSSFEIPDDVPLPAGWEMAKTSSGQRYFLNHIDQTTTWQDPRKAMLSQMNVTAPTSPPVQQNMMNSASGPLPDGWEQAMTQDGEIYYINHKNKTTSWLDPRLDPRFAMNQRISQSAPVKQPPPLAPQSPQGGVMGGSNSNQQQQMRLQQLQMEKERLRLKQQELLRQVRPQAMRNINPSTANSPKCQELALRSQLPTLEQDGGTQNPVSSPGMSQELRTMTTNSSDPFLNSGTYHSRDESTDSGLSMSSYSVPRTPDDFLNSVDEMDTGDTINQSTLPSQQNRFPDYLEAIPGTNVDLGTLEGDGMNIEGEELMPSLQEALSSDILNDMESVLAATKLDKESFLTWL

SEQ ID NO: 54793 - protein, 53 aa, Homo sapiens
RHCRSPDSTACSSSFLSSFSAVGSCFSWDTDPHWSSLWPSSYTHSSASSTVFF

SEQ ID NO: 54794 - protein, 283 aa, Homo sapiens
LIRMKGQEFVDEIQGRYPHLLEQLLSTSDTTGEENADPPIIHFGPGESSSEDAVMMNTPVVKSALEMGFNRDLVKQTVQSKILTTGENYKTVNDIVSALLNAEDEKREEEKEKQAEEMASDDLSLIRKNRMALFQQLTCVLPILDNLLKANVINKQEHDIIKQKTQIPLQARELIDTILVKGNAAANIFKNCLKEIDSTLYKNLFVDKNMKYIPTEDVSGLSLEEQLRRLQEERTCKVCMDKEVSVVFIPCGHLVVCQECAPSLRKCPICRGIIKGTVRTFLS

SEQ ID NO: 54795 - protein, 7 aa, Homo sapiens
RYPYTKR

SEQ ID NO: 54796 - protein, 36 aa, Homo sapiens
MNVQGDYEPIDATGFININSLRLKEYHRLQSKVTAK

SEQ ID NO: 54797 - protein, 39 aa, Homo sapiens
LCNIFPPDLVRIVMKRNPHMTDAQQLAAAILVEKSQLGY

SEQ ID NO: 54798 - protein, 176 aa, Homo sapiens
LLRAASAVLGGPAGRWLHHAGSRAGSSGLLRNRGPGGSAEASRSLSVSARARSSSEDKITVHFINRDGETLTTKGKVGDSLLDVVVENNLDIDGFGACEGTLACSTCHLIFEDHIYEKLDAITDEENDMLDLAYGLTDRSRLGCQICLTKSMDNMTVRVPETVADARQSIDVGKTS

SEQ ID NO: 54799 - protein, 25 aa, Homo sapiens
IYEFSPDQMGRSKESGWVENEIYGY

SEQ ID NO: 54800 - protein, 110 aa, Homo sapiens
KFQAFLDVSHFTPDEVTVRTVDNLLEVSARHPQRLDRHGFVSREFCRTYVLPADVDPWRVRAALSHDGILNLEAPRGGRHLDTEVNEVYISLLPAPPDPEEEEEAAIVEP

SEQ ID NO: 54801 - protein, 614 aa, Homo sapiens
VTSRSGPAPARRNSVTTGYGGVRALCGWTPSSGATPRNRLLLQLLGSPGRRYYSLPPHQKVPLPSLSPTMQAGTIARWEKKEGDKINEGDLIAEVETDKATVGFESLEECYMAKILVAEGTRDVPIGAIICITVGKPEDIEAFKNYTLDSSAAPTPQAAPAPTPAATASPPTPSAQAPGSSYPPHMQVLLPALSPTMTMGTVQRWEKKVGEKLSEGDLLAEIETDKATIGFEVQEEGYLAKILVPEGTRDVPLGTPLCIIVEKEADISAFADYRPTEVTDLKPQVPPPTPPPVAAVPPTPQPLAPTPSAPCPATPAGPKGRVFVSPLAKKLAVEKGIDLTQVKGTGPDGRITKKDIDSFVPSKVAPAPAAVVPPTGPGMAPVPTGVFTDIPISNIRRVIAQRLMQSKQTIPHYYLSIDVNMGEVLLVRKELNKILEGRSKISVNDFIIKASALACLKVPEANSSWMDTVIRQNHVVDVSVAVSTPAGLITPIVFNAHIKGVETIANDVVSLATKAREGKLQPHEFQGGTFTISNLGMFGIKNFSAIINPPQACILAIGASEDKLVPADNEKGFDVASMMSVTLSCDHRVVDGAVGAQWLAEFRKYLEKPITMLL

SEQ ID NO: 54802 - protein, 30 aa, Homo sapiens
LYSKFLSDEENLKLFGKCNNPNGHGHNYKD

SEQ ID NO: 54803 - protein, 502 aa, Homo sapiens
RLTLLTLLLLLLAGFLEPQDRASSNPNATSSSSQDPESLQDRGEGKVATTVISKMLFVEPILEVSSLPTTNSTTNSATKITANTTDEPTTQPTTEPTTQPTIQPTQPTTQLPTDSPTQPTTGSFCPGPVTLCSDLESHSTEAVLGDALVDFSLKLYHAFSAMKKVETNMAFSPFSIASLLTQVLLGAGENTKTNLESILSYPKDFTCVHQALKGFTTKGVTSVSQIFHSPDLAIRDTFVNASRTLYSSSPRVLSNNSDANLELINTWVAKNTNNKISRLLDSLPSDTRLVLLNAIYLSAKWKTTFDPKKTRMEPFHFKNSVIKVPMMNSKKYPVAHFIDQTLKAKVGQLQLSHNLSLVILVPQNLKHRLEDMEQALSPSVFKAIMEKLEMSKFQPTLLTLPRIKVTTSQDMLSIMEKLEFFDFSYDLNLCGLTEDPDLQVSAMQHQTVLELTETGVEAAAASAISVARTLLVFEVQQPFLFVLWDQQHKFPVFMGRVYDPRA

SEQ ID NO: 54804 - protein, 136 aa, Homo sapiens
KDFRRECRDERIREYFYGFRGCFYPHAFNVKFSDVKIYKVGAPTIPDSCLPLGMSQEDNQLKLVPVTPGRDMVHHLLSVSTAEGTEENLSETSVAGFIVVTSVDLEHQVFTVLSPAPRPLPKNFLLIMDIRFMDLK

SEQ ID NO: 54805 - protein, 297 aa, Homo sapiens
KMAVLAPLIALVYSVPRLSRWLAQPYYLLSALLSAAFLLVRKLPPLCHGLPTQREDGNPCDFDWREVEILMFLSAIVMMKNRRSITVEQHIGNIFMFSKVANTILFFRLDIRMGLLYITLCIVFLMTCKPPLYMGPEYIKYFNDKTIDEELERDKRVTWIVEFFANWSNDCQSFAPIYADLSLKYNCTGLNFGKVDVGRYTDVSTRYKVSTSPLTKQLPTLILFQGGKEAMRRPQIDKKGRAVSWTFSEENVIREFNLNELYQRAKKLSKAGDNIPEEQPVASTPTTVSDGENKKDK

SEQ ID NO: 54806 - protein, 285 aa, Homo sapiens
KRGRRRKDDKSPRLPKRRKKPPIQYVRCEMEGCGTVLAHPRYLQHHIKYQHLLKKKYVCPHPSCGRLFRLQKQLLRHAKHHTDQRDYICEYCARAFKSSHNLAVHRMIHTGEKPLQCEICGFTCRQKASLNWHMKKHDADSFYQFSCNICGKKFEKKDSVVAHKAKSHPEVLIAEALAANAGALITSTDILGTNPESLTQPSDGQGLPLLPEPLGNSTSGECLLLEAEGMSKSYCSGTERVSLMADGKIFVGSGSSGGTEGLVMNSDILGATTEVLIEDSDSAGP

SEQ ID NO: 54807 - protein, 103 aa, Homo sapiens
ICCRQLEHDRATERKKEVEKFKRLIRDPETIKHLDRHSDSKQGKYLNWDAVFRFLQKYIQKETECLRIAKPNVSASTQASRQKKMQEISSLVKYFIKCANRSK

SEQ ID NO: 54808 - protein, 38 aa, Homo sapiens
VHFGHRGISPRKRKIFLENYQKFLASQQNATVLKFGEQ

SEQ ID NO: 54809 - protein, 63 aa, Homo sapiens
IHVPAQHEDGPEDDPQLVGITARNIPRGPQLAAQNLGISLANLLLSKGAKNILDVARQLNDAH

SEQ ID NO: 54810 - protein, 18 aa, Homo sapiens
LSLAEDEELVLHLLRSQS

SEQ ID NO: 54811 - protein, 420 aa, Homo sapiens
LAMRSLLLLSAFCLLEAALAAEVKKPAAAAAPGTAEKLSPKAATLAERSAGLAFSLYQAMAKDQAVENILVSPVVVASSLGLVSLGGKATTASQAKAVLSAEQLRDEEVHAGLGELLRSLSNSTARNVTWKLGSRLYGPSSVSFADDFVRSSKQHYNCEHSKINFRDKRSALQSINEWAAQTTDGKLPEVTKDVERTDGALLVNAMFFKPHWDEKFHHKMVDNRGFMVTRSYTVGVMMMHRTGLYNYYDDEKEKLQIVEMPLAHKLSSLIILMPHHVEPLERLEKLLTKEQLKIWMGKMQKKAVAISLPKGVVEVTHDLQKHLAGLGLTEAIDKNKADLSRMSGKKDLYLASVFHATAFELDTDGNPFDQDIYGREELRSPKLFYADHPFIFLVRDTQSGSLLFIGRLVRPKGDKMRDEL

SEQ ID NO: 54812 - protein, 377 aa, Homo sapiens
LRGERQAEADRSQRSHGGPALSREGSGRWGTGSSILSALQDLFSVTWLNRSKVEKQLQVISVLQWVLSFLVLGVACSAILMYIFCTDCWLIAVLYFTWLVFDWNTPKKGGRRSQWVRNWAVWRYFRDYFPIQLVKTHNLLTTRNYIFGYHPHGIMGLGAFCNFSTEATEVSKKFPGIRPYLATLAGNFRMPVLREYLMSGGICPVSRDTIDYLLSKNGSGNAIIIVVGGAAESLSSMPGKNAVTLRNRKGFVKLALRHGADLVPIYSFGENEVYKQVIFEEGSWGRWVQKKFQKYIGFAPCIFHGRGLFSSDTWGLVPYSKPITTVVGEPITIPKLEHPTQQDIDLYHTMYMEALVKLFDKHKTKFGLPETEVLEVN

SEQ ID NO: 54813 - protein, 62 aa, Homo sapiens
LEATGFASGDQLEAFNCIPVDSAVAVECDEQVLGEFEEFSRRIYALNENVSSFRRPRRSSDK

SEQ ID NO: 54814 - protein, 13 aa, Homo sapiens
LAKPGRGTWSSPG

SEQ ID NO: 54815 - protein, 41 aa, Homo sapiens
LPCRHLCLCQACTEILMRHPVYHRNCPLCRRGILQTLNVYL

SEQ ID NO: 54816 - protein, 259 aa, Homo sapiens
LLLPLLAPLLGTGAPAELRVRVRLPDGQVTEESLQADSDADSISLELRKPDGTLVSFTADFKKDVKVFRALILGELEKGQSQFQALCFVTQLQHNEIIPSEAMAKLRQKNPRAVRQAEEVRGLEHLHMDVAVNFSQGALLSPHLHNVCAEAVDAIYTRQEDVRFWLEQGVDSSVFEALPKASEQAELPRCRQVGDHGKPCVCRYGLSLAWYPCMLKYCHSRDRPTPYKCGIRSCQKSYSFDFYVPQRQLCLWDEDPYPG

SEQ ID NO: 54817 - protein, 163 aa, Homo sapiens
IPLLQPYTTEERRKLVIARLPSVSKLNGSVVTDGEREDSERFFIRYYVDVPQEEVPFRYHELITKYGKLEPLAEVDLRPQSSAKVEVHFNDQVEEMSIRLDQTVAELKKQLKTLVQLPTSNMLLYYFDHEAPFGPEEMKYSSRALHSFGIRDGDKIYVESKTK

SEQ ID NO: 54818 - protein, 300 aa, Homo sapiens
VMDLVLRVADYYFFTPYVYPATWPEDDIFRQAISLLIVTNVGAYILYFFCATLSYYFVFDHALMKHPQFLKNQVRREIKFTVQALPWISILTVALFLLEIRGYSKLHDDLGEFPYGLFELVVSIISFLFFTDMFIYWIHRGLHHRLVYKRLHKPHHIWKIPTPFASHAFHPIDGFLQSLPYHIYPFIFPLHKVVYLSLYILVNIWTISIHDGDFRVPQILQPFINGSAHHTDHHMFFDYNYGQYFTLWDRIGGSFKNPSSFEGKGPLSYVKEMTEGKRSSHSGNGCKNEKLFNGEFTKTE

SEQ ID NO: 54819 - protein, 54 aa, Homo sapiens
KDFVQMVRKIPYLGFCSCEELGETGIWQLTDPPILPLTHGPTGGFNWRETLLQE

SEQ ID NO: 54820 - protein, 246 aa, Homo sapiens
VTEELLFELFHQAGPVIKVKIPKDKDGKPKQFAFVNFKHEVSVPYAMNLLNGIKLYGRPIKIQFRSGSSHAPQDVSLSYPQHHVGNSSPTSTSPSRYERTMDNMTSSAQIIQRSFSSPENFQRQAVMNSALRQMSYGGKFGSSPLDQSGFSPSVQSHSHSFNQSSSSQWRQGTPSSQRKVRMNSYPYLADRHYSREQRYTDHGSDHHYRGKRDDFFYEDRNHDDWSHDYDNRRDSSRDGKWRSSRH

SEQ ID NO: 54821 - protein, 28 aa, Homo sapiens
RHYQQRTLTFALRADDPLLKLLQEAQQS

SEQ ID NO: 54822 - protein, 296 aa, Homo sapiens
LPDFFLLLLFRGCLIGAVNLKSSNRTPVVQEFESVELSCIITDSQTSDPRIEWKKIQDEQTTYVFFDNKIQGDLAGRAEILGKTSLKIWNVTRRDSALYRCEVVARNDRKEIDEIVIELTVQVKPVTPVCRVPKAVPVGKMATLHCQESEGHPRPHYSWYRNDVPLPTDSRANPRFRNSSFHLNSETGTLVFTAVHKDDSGQYYCIASNDAGSARCEEQEMEVYDLNIGGIIGGVLVVLAVLALITLGICCAYRRGYFINNKQDGESYKNPGKPDGVNYIRTDEEGDFRHKSSFVI

SEQ ID NO: 54823 - protein, 282 aa, Homo sapiens
KNPNKRLEHQGIKIEFIGQIELYYDRGNHHEFVSLVKDLARPGEITQSQAFDFEFTHVEKPYESYTGQNVKLRYFLRATISRRLNDVVKEMDIVVHTLSTYPELNSSIKMEVGIEDCLHIEFEYNKSKYHLKDVIVGKIYFLLVRIKIKHMEIDIIKRETTGTGPNVYHENDTIAKYEIMDGAPVRGESIPIRLFLAGYELTPTMRDINKKFSVRYYLNLVLIDEEERRYFKQQEVVLWRKGDIVRKSMSHQAAIASQRFEGTTSLGEVRTPSQLSDNNCRQ

SEQ ID NO: 54824 - protein, 23 aa, Homo sapiens
LPRVVKRRVNALKNLQVKLNVHR

SEQ ID NO: 54825 - protein, 325 aa, Homo sapiens
IKDSIWGICTISKLDARIQQKREEQRRRRASSVLAQRRAQSIERKQESEPRIVSRIFQCCAWNGGVFWFSLLLFYRVFIPVLQSVTARIIGDPSLHGDVWSWLEFFLTSIFSALWVLPLFVLSKVVNAIWFQDIADLAFEVSGRKPHPFPSVSKIIADMLFNLLLQALFLIQGMFVSLFPIHLVGQLVSLLHMSLLYSLYCFEYRWFNKGIEMHQRLSNIERNWPYYFGFGLPLAFLTAMQSSYIISGCLFSILFPLFIISANEAKTPGKAYLFQLRLFSLVVFLSNRLFHKTVYLQSALSSSTSAEKFPSPHPSPAKLKATAGH

SEQ ID NO: 54826 - protein, 58 aa, Homo sapiens
RRNNKLIFKVNLLEMDDKILVDFRLSKGDGLEFKRHFLKIKGKLIDIVSSQKIWLPAT

SEQ ID NO: 54827 - protein, 205 aa, Homo sapiens
MSQHNRFVLDCKDKEPDVLFVGDSMVQLMQQYEIWRELFSPLHALNFGIGGDTTRHVLWRLKNGELENIKPKVIVVWVGTNNHENTAEEVAGGIEAIVQLINTRQPQAKIIVLGLLPRGEKPNPLRQKNAKVNQLLKVSLPKLANVQLLDTDGGFVHSDGAISCHDMFDFLHLTGGGYAKICKPLHELIMQLLEETPEEKQTTIA

SEQ ID NO: 54828 - protein, 28 aa, Homo sapiens
LRGPWEPLRGSWEGTFPNLRPGLKFWSW

SEQ ID NO: 54829 - protein, 90 aa, Homo sapiens
LEAAAAAATRPGGVLSPVAAAAATTAATAALPGPCSLWACPSWCSWWPRSRAIWGFWGPRTSRRKTPSLSAPTWTRSTASWSTSTPSTIL

SEQ ID NO: 54830 - protein, 761 aa, Homo sapiens
LNKQKGAPLLFVVRQKEAVVSFQVPLILRGMFQRKYLYQKVERTLCQPPTKNESEIQFFYVDVSTLSPVNTTYQLRVSRMDDFVLRTGEQFSFNTTAAQPQYFKYEFPEGVDSVIVKVTSNKAFPCSVISIQDVLCPVYDLDNNVAFIGMYQTMTKKAAITVQRKDFPSNSFYVVVVVKTEDQACGGSLPFYPFAEDEPVDQGHRQKTLSVLVSQAVTSEAYVSGMLFCLGIFLSFYLLTVLLACWENWRQKKKTLLVAIDRACPESGHPRVLADSFPGSSPYEGYNYGSFENVSGSTDGLVDSAGTGDLSYGYQGRSFEPVGTRPRVDSMSSVEEDDYDTLTDIDSDKNVIRTKQYLYVADLARKDKRVLRKKYQIYFWNIATIAVFYALPVVQLVITYQTVVNVTGNQDICYYNFLCAHPLGNLSAFNNILSNLGYILLGLLFLLIILQREINHNRALLRNDLCALECGIPKHFGLFYAMGTALMMEGLLSACYHVCPNYTNFQFDTSFMYMIAGLCMLKLYQKRHPDINASAYSAYACLAIVIFFSVLGVVFGKGNTAFWIVFSIIHIIATLLLSTQLYYMGRWKLDSGIFRRILHVLYTDCIRQCSGPLYVDRMVLLVMGNVINWSLAAYGLIMRPNDFASYLLAIGICNLLLYFAFYIIMKLRSGERIKLIPLLCIVCTSVVWGFALFFFFQGLSTWQKTPAESREHNRDCILLDFFDDHDIWHFLSSIAMFGSFLVLLTLDDDLDTVQRDKIYVF

SEQ ID NO: 54831 - protein, 25 aa, Homo sapiens
LHKECIKFWAQTNTNDTCPFCPTLK

SEQ ID NO: 54832 - protein, 24 aa, Homo sapiens
KPKATLSLLQLGLDEHNRVKVYRF

SEQ ID NO: 54833 - protein, 1057 aa, Homo sapiens
ISSNPFAALFGSLADAKQFAAIQKEQLKQQSDELPASPDDSDNSVSESLDEFDYSVAEISRSFRSQQEICEQLNINHMIQRIFLITLDNSDPSLKSGNGIPSRCVYLEEMAVELEDQDWLDMSNVEQALFARLLLQDPGNHLINMTSSTTLNLSADRDAGERHIFCYLYSCFQRAKEEITKVPENLLPFAVQCRNLTVSNTRTVLLTPEIYVDQNIHEQLVDLMLEAIQGAHFEDVTEFLEEVIEALILDEEVRTFPEVMIPVFDILLGRIKDLELCQILLYAYLDILLYFTRQKDMAKVFVEYIQPKDPTNGQMYQKTLLGVILSISCLLKTPGVVENHGYFLNPSRSSPQEIKVQEANIHQFMAQFHEKIYQMLKNLLQLSPETKHCILSWLGNCLHANAGRTKIWANQMPEIFFQMYASDAFFLNLGAALLKLCQPFCKPRSSRLLTFNPTYCALKELNDEERKIKNVHMRGLDKETCLIPAVQEPKFPQNYNLVTENLALTEYTLYLGFHRLHDQMVKINQNLHRLQVAWRDAQQSSSPAADNLREQFERLMTIYLSTKTAMTEPQMLQNCLNLQVSMAVLLVQLAIGNEGSQPIELTFPLPDGYSSLAYVPEFFADNLGDFLIFLRRFADDILETSADSLEHVLHFITIFTGSIERMKNPHLRAKLAEVLEAVMPHLDQTPNPLVSSVFHRKRVFCNFQYAPQLAEALIKVFVDIEFTGDPHQFEQKFNYRRPMYPILRYMWGTDTYRESIKDLADYASKNLEAMNPPLFLRFLNLLMNDAIFLLDEAIQYLSKIKIQQIEKDRGEWDSLTPEARREKEAGLQMFGQLARFHNIMSNETIGTLAFLTSEIKSLFVHPFLAERIISMLNYFLQHLVGPKMGALKVKDFSEFDFKPQQLVSDICTIYLNLGDEENFCATVPKDGRSYSPTLFAQTVRVLKKINKPGNMIMAFSNLAERIKSLADLQQQEEETYADACDEFLDPIMSTLMCDPVVLPSSRVTVDRSTIARHLLSDQTDPFNRSPLTMDQIRPNTELKEKIQRWLAERKQQKEQLE

SEQ ID NO: 54834 - protein, 922 aa, Homo sapiens
IRLDPDINGRRYYWRGPEDSGDQGLIFQITAFQEDFYLHLTPDAQFLAPAFSTEHLGVPLQGLTGGSSDLRRCFYSGDVNAEPDSFAAVSLCGGLRGAFGYRGAEYVISPLPNASAPAAQRNSQGAHLLQRRGVPGGPSGDPTSRCGVASGWNPAILRALDPYKPRRAGFGESRSRRRSGRAKRFVSIPRYVETLVVADESMVKFHGADLEHYLLTLLATAARLYRHPSILNPINIVVVKVLLLRDRDSGPKVTGNAALTLRNFCAWQKKLNKVSDKHPEYWDTAILFTRQDLCGATTCDTLGMADVGTMCDPKRSCSVIEDDGLPSAFTTAHELGHVFNMPHDNVKVCEEVFGKLRANHMMSPTLIQIDRANPWSACSAAIITDFLDSGHGDCLLDQPSKPISLPEDLPGASYTLSQQCELAFGVGSKPCPYMQYCTKLWCTGKAKGQMVCQTRHFPWADGTSCGEGKLCLKGACVERHNLNKHRVDGSWAKWDPYGPCSRTCGGGVQLARRQCTNPTPANGGKYCEGVRVKYRSCNLEPCPSSASGKSFREEQCEAFNGYNHSTNRLTLAVAWVPKYSGVSPRDKCKLICRANGTGYFYVLAPKVVDGTLCSPDSTSVCVQGKCIKAGCDGNLGSKKRFDKCGVCGGDNKSCKKVTGLFTKPMHGYNFVVAIPAGASSIDIRQRGYKGLIGDDNYLALKNSQGKYLLNGHFVVSAVERDLVVKGSLLRYSGTGTAVESLQASRPILEPLTVEVLSVGKMTPPRVRYSFYLPKEPREDKSSHPKDPRGPSVLHNSVLSLSNQVEQPDDRPPARWVAGSWGPCSASCGSGLQKRAVDCRGSAGQRTVPACDAAHRPVETQACGEPCPTWELSAWSPCSKSCGRGFQRRSLKCVGHGGRLLARDQCNLHRKPQELDFCVLRPC

SEQ ID NO: 54835 - protein, 165 aa, Homo sapiens
VTESNARWVQDFRLKAYASPAKLESIDGARYHALLIPSCPGALTDLASSGSLARILQHFHSESKPICAVGHGVAALCCATNEDRSWVFDSYSLTGPSVCELVRAPGFARLPLVVEDFVKDSGACFSASEPDAVHVVLDRHLVTGQNASSTVPAVQNLLFLCGSRK

SEQ ID NO: 54836 - protein, 99 aa, Homo sapiens
VEEILDRENKRMADSLASKVTRLKSLALDIDRDAEDQNRYLDGMDSDFTSMTSLLTGSVKRFSTMARSGQDNRKLLCGMAVGLIVAFFILSYFLSRART

SEQ ID NO: 54837 - protein, 31 aa, Homo sapiens
VASPPTMRCSRRSTRWLCWGRPTTLLPRRPP

SEQ ID NO: 54838 - protein, 468 aa, Homo sapiens
RPLFTSTMSLDIQSLDIQCEELSDARWAELLPLLQQCQVVRLDDCGLTEARCKDISSALRVNPALAELNLRSNELGDVGVHCVLQGLQTPSCKIQKLSLQNCCLTGAGCGVLSSTLRTLPTLQELHLSDNLLGDAGLQLLCEGLLDPQCRLEKLQLEYCSLSAASCEPLASVLRAKPDFKELTVSNNDINEAGVRVLCQGLKDSPCQLEALKLESCGVTSDNCRDLCGIVASKASLRELALGSNKLGDVGMAELCPGLLHPSSRLRTLWIWECGITAKGCGDLCRVLRAKESLKELSLAGNELGDEGARLLCETLLEPGCQLESLWVKSCSFTAACCSHFSSVLAQNRFLLELQISNNRLEDAGVRELCQGLGQPGSVLRVLWLADCDVSDSSCSSLAATLLANHSLRELDLSNNCLGDAGILQLVESVRQPGCLLEQLVLYDIYWSEEMEDRLQALEKDKPSLRVIS

SEQ ID NO: 54839 - protein, 119 aa, Homo sapiens
RKIMSSPLSKELRQKYNVRSMPIRKDDEVQVVRGHYKGQQIGKVIQVYRKKYVIYIERVQREKANGTTVHVGIHPSKVVITRLKLDKDRKKILERKAKSQQVGKEKGKYKEELIEKMQE

SEQ ID NO: 54840 - protein, 51 aa, Homo sapiens
KLSGPLISDFFAKRKRSAPEKSSGDVPAPCPSPSAAPGVGSVEQTPRKRLR

SEQ ID NO: 54841 - protein, 466 aa, Homo sapiens
LDCGHSFCQACLTANHKKSMLDKGESSCPVCRISYQPENIRPNRHVANIVEKLREVKLSPEGQKVDHCARHGEKLLLFCQEDGKVICWLCERSQEHRGHHTFLTEEVAREYQVKLQAALEMLRQKQQEAEELEADIREEKASWKTQIQYDKTNVLADFEQLRDILDWEESNELQNLEKEEEDILKSLTNSETEMVQQTQSLRELISDLEHRLQGSVMELLQGVDGVIKRTENVTLKKPETFPKNQRRVFRAPDLKGMLEVFRELTDVRRYWVDVTVAPNNISCAVISEDKRQVSSPKPQIIYGARGTRYQTFVNFNYCTGILGSQSITSGKHYWEVDVSKKTAWILGVCAGFQPDAMCNIEKNENYQPKYGYWVIGLEEGVKCSAFQDSSFHTPSVPFIVPLSVIICPDRVGVFLDYEACTVSFFNITNHGFLIYKFSHCSFSQPVFPYLNPRKCGVPMTLCSPSS

SEQ ID NO: 54842 - protein, 271 aa, Homo sapiens
IPQTPESAGNKHSNSNSVDDTIVALNMRAALRNGLEGSSEETSFHDESLQDDREEIENNSYHMHPAGIILTKVGYYTIPSMDDLAKITNEKGECIVSDFTIGRKGYGSIYFEGDVNLTNLNLDDIVHIRRKEVVVYLDDNQKPPVGEGLNRKAEVTLDGVWPTDKTSRCLIKSPDRLADINYEGRLEAVSRKQGAQFKEYRPETGSWVFKVSHFSKYGLQDSDEEEEEHPSKTSTKKLKTAPLPPASQTTPLQMALNGKPAPPPQVEKKGQ

SEQ ID NO: 54843 - protein, 64 aa, Homo sapiens
LLRVVLSLHHPPDRTSDSTPDPQRVPLRLLAPHIGRLPMPEDYAMDELRSLTQSYLRELAVGSL

SEQ ID NO: 54844 - protein, 173 aa, Homo sapiens
LLICYTTNAFPKEYIPTVFDNYSAQSAVDGRTVNLNLWDTAGQEEYDRLRTLSYPQTNVFVICFSIASPPSYENVRHKWHPEVCHHCPDVPILLVGTKKDLRAQPDTLRRLKEQGQAPITPQQGQALAKQIHAVRYLECSALQQDGVKEVFAEAVRAVLNPTPIKRGRSCILL

SEQ ID NO: 54845 - protein, 735 aa, Homo sapiens
VQPQWSPPAGTQPCRLHLYNSLTRNKEVFIPQDGKKVTWYCCGPTVYDASHMGHARSYISFDILRRVLKDYFKFDVFYCMNITDIDDKIIKRARQNHLFEQYREKRPEAAQLLEDVQAALKPFSVKLNETTDPDKKQMLERIQHAVQLATEPLEKAVQSRLTGEEVNSCVEVLLEEAKDLLSDWLDSTLGCDVTDNSIFSKLPKFWEGDFHRDMEALNVLPPDVLTRVSEYVPEIVNFVQKIVDNGYGYVSNGSVYFDTAKFASSEKHSYGKLVPEAVGDQKALQEGEGDLSISADRLSEKRSPNDFALWKASKPGEPSWPCPWGKGRPGWHIECSAMAGTLLGASMDIHGGGFDLRFPHHDNELAQSEAYFENDCWVRYFLHTGHLTIAGCKMSKSLKNFITIKDALKKHSARQLRLAFLMHSWKDTLDYSSNTMESALQYEKFLNEFFLNVKDILRAPVDITGQFEKWGEEEAELNKNFYDKKTAIHKALCDNVDTRTVMEEMRALVSQCNLYMAARKAVRKRPNQALLENIALYLTHMLKIFGAVEEDSSLGFPVGGPGTSLSLEATVMPYLQVLSEFREGVRKIAREQKVPEILQLSDALRDNILPELGVRFEDHEGLPTVVKLVDRNTLLKEREEKRRVEEEKRKKKEEAARRKQEQEAAKLAKMKIPPSEMFLSETDKYSKFDENGLPTHDMEGKELSKGQAKKLKKLFEAQEKLYKEYLQMAQNGSFQ

SEQ ID NO: 54846 - protein, 58 aa, Homo sapiens
ILSIREAQQELHRHLSAMLSSTARAAQAPTPGLLQSPRSWFLLCVFLACQLFINHILK

SEQ ID NO: 54847 - protein, 31 aa, Homo sapiens
IHTGEKPYKCEKCGKAFTQFSHLTVHESIHT

SEQ ID NO: 54848 - protein, 178 aa, Homo sapiens
IPMGKSMLVLLTFLAFASCCIAAYRPSETLCGGELVDTLQFVCGDRGFYFSRPASRVSRRSRGIVEECCFRSCDLALLETYCATPAKSERDVSTPPTVLPDNFPRYPVGKFFQYDTWKQSTQRLRRGLPALLRARRGHVLAKELEAFREAKRHRPLIALPTQDPAHGGAPPEMASNRK

SEQ ID NO: 54849 - protein, 127 aa, Homo sapiens
RPASRVSRRSRGIVEECCFRSCDLALLETYCATPAKSERDVSTPPTVLPDNFPRYPVGKFFQYDTWKQSTQRLRRGLPALLRARRGHVLAKELEAFREAKRHRPLIALPTQDPAHGGAPPEMASNRK

SEQ ID NO: 54850 - protein, 39 aa, Homo sapiens
INTSAEPLYGPQGLALTSDGHVVVADAGNHCFKAYRYLQ

SEQ ID NO: 54851 - protein, 117 aa, Homo sapiens
VKQYEAARLEYDAYRTDLEELSLGPRDAGTRGRLESAQATFQAHRDKYEKLRGDVAIKLKFLEENKIKVMHKQLLLFHNAVSAYFAGNQKQLEQTLQQFNIKLRPPGAEKPSWLEEQ

SEQ ID NO: 54852 - protein, 41 aa, Homo sapiens
KGLFEQRVEQYLEELPDTEQSGMNKFLRGLGNKMKFLHKKN

SEQ ID NO: 54853 - protein, 212 aa, Homo sapiens
KRRGREMFEVTGLHDVDQGWMRAVRKHAKGLHIVPRLLFEDWTYDDFRNVLDSEDEIEELSKTVVQVAKNQHFDGFVVEVWNQLLSQKRVGLIHMLTHLAEALHQARLLALLVIPPAITPGTDQLGMFTHKEFEQLAPVLDGFSLMTYDYSTAHQPGPNAPLSWVRACVQVLDPKSKWRSKILLGLNFYGMDYATSKDAREPVVGASVHGAS

SEQ ID NO: 54854 - protein, 38 aa, Homo sapiens
LTNSHFFLFDFQKTGPPLVGPKAQLSGLQLQPCLYKRR

SEQ ID NO: 54855 - protein, 195 aa, Homo sapiens
LWGGLLRLGSLLSLSCLALSVLLLAQLSDAAKNFEDVRCKCICPPYKENSGHIYNKNISQKDCDCLHVVEPMPVRGPDVEAYCLRCECKYEERSSVTIKVTIIIYLSILGLLLLYMVYLTLVEPILKRRLFGHAQLIQSDDDIGDHQPFANAHDVLARSRSRANVLNKVEYAQQRWKLQVQEQRKSVFDRHVVLS

SEQ ID NO: 54856 - protein, 39 aa, Homo sapiens
LAHPQNYFKYTAQESREMFPRSFIRLLRSKVSRFLRPYK

SEQ ID NO: 54857 - protein, 50 aa, Homo sapiens
LADCPITAHMYEDVALIKDHTLVNSLIRVLQTLQEFNITLETSLVKGIDI

SEQ ID NO: 54858 - protein, 44 aa, Homo sapiens
RIKVSQAAAELQQYCMQNACKDALLVGVPAGSNPFREPRSCALL

SEQ ID NO: 54859 - protein, 180 aa, Homo sapiens
IELLEKLQRSGEVPPQKLQALQRVLQSEFCNAVREVYEHVYETVDISSSPEVRANATAKATVAAFAASEGHSHPRVVELPKTEEGLGFNIMGGKEQNSPIYISRIIPGGIADRHGGLKRGDQLLSVNGVSVEGEHHEKAVELLKAAQGKVKLVVRYTPKVLEEMESRFEKMRSAKRRQQT

SEQ ID NO: 54860 - protein, 51 aa, Homo sapiens
KPIWTRNPDDITNEEYGEFCKNLTNDWEDHLAVKHFSVEGQLEFRALLFVP

SEQ ID NO: 54861 - protein, 120 aa, Homo sapiens
LFGLLLVLAVFCHSGHSLQCYNCPNPTADCKTAVNCSSDFDACLITKAGLQVYNKCWKFEHCNFNDVTTRLRENELTYYCCKKDLCNFNEQLENGGTSLSEKTVLLLVTPFLAAAWSLHP

SEQ ID NO: 54862 - protein, 125 aa, Homo sapiens
ISTMKLLTGLVFCSLVLSVSSRSFFSFLGEAFDGARDMWRAYSDMREANYIGSDKYFHARGNYDAAKRGPGGAWAAEVISNARENIQRLTGRGAEDSLADQAANKWGRSGRDPNHFRPAGLPEKY

SEQ ID NO: 54863 - protein, 59 aa, Homo sapiens
KAMGPDRAWSLLQECGLALELSEKFTRTCDILRIAEKRQRALIQSMLEKCDRFLWSQQA

SEQ ID NO: 54864 - protein, 379 aa, Homo sapiens
VSKYKYRDLTVRETVNVITLYKDLKPVLDSYVFNDGSSRELMNLTGTIPVPYRGNTYNIPICLWLLDTYPYNPPICFVKPTSSMTIKTGKHVDANGKIYLPYLHEWKHPQSDLLGLIQVMIVVFGDEPPVFSRPISASYPPYQATGPPNTSYMPGMPGGISPYPSGYPPNPSGYPGCPYPPGGPYPATTSSQYPSQPPVTTVGPSRDGTISEDTIRASLISAVSDKLRWRMKEEMDRAQAELNALKRTEEDLKKGHQKLEEMVTRLDQEVAEVDKNIELLKKKDEELSSALEKMENQSENNDIDEVIIPTAPLYKQILNLYAEENAIEDTIFYLGEALRRGVIDLDVFLKHVRLLSRKQFQLRALMQKARKTAGLSDLY

SEQ ID NO: 54865 - protein, 347 aa, Homo sapiens
LLGKYKFRDLTVEELRNVNVFFPHFKYSMDTYGNTYNIPIRFWILDSHPFAPPICFLKPTANMGILVGKHVDAQGRIYLPYLQNWSHPKSVIVGLIKEMIAKFQEELPMYSLSSSDEARQVDLLAYIAKITEGVSDTNSKSWANHENKTVNKITVVGGGELGIACTLAISAKGIADRLVLLDLSEGTKGATMDLEIFNLPNVEISKDLSASAHSKVVIFTVNSLGSSQSYLDVVQSNVDMFRALVPALGHYSQHSVLLVASQPVEIMTYVTWKLSTFPANRVIGIGCNLDSQRLQYIITNVLKAQTSGKEVWVIGEQGEDKVLTWSGQEEVVSHTSQVQLSNRDIMI

SEQ ID NO: 54866 - protein, 186 aa, Homo sapiens
KQPPPLMKKHSQTDLVSRLKTRKILGVGGEDDDGEVHRSKISQVLGNEIKFTIREPLGLRVWQFVSAVLFSGIAIMALAFPDQLYDAVFDGAQVTSKTPIRLYGGALLSISLIMWNALYTAEKVIIRWTLLTEACYFGVQFLVVTATLAETGLMSLGILLLLVSRLLFVVISIYYYYQVGRRPKKA

SEQ ID NO: 54867 - protein, 66 aa, Homo sapiens
MAHAMNEYPDSCAVLVRRHGVYVWGETWEKAKTMCECYDYLFDIAVSMKKVGLDPSQLPVGENGIV

SEQ ID NO: 54868 - protein, 173 aa, Homo sapiens
LHPNYDPILLDADIAILKLLDKARISTRVQPICLAASRDLSTSFQESHITVAGWNVLADVRSPGFKNDTLRSGVVSVVDSLLCEEQHEDHGIPVSVTDNMFCASWEPTAPSDICTAETGGIAAVSFPGRASPEPRWHLMGLVSWSYDKTCSHRLSTAFTKVLPFKDWIERNMK

SEQ ID NO: 54869 - protein, 96 aa, Homo sapiens
VDSLLCEEQHEDHGIPVSVTDNMFCASWEPTAPSDICTAETGGIAAVSFPGRASPEPRWHLMGLVSWSYDKTCSHRLSTAFTKVLPFKDWIERNMK

SEQ ID NO: 54870 - protein, 23 aa, Homo sapiens
LTEEMALREPAAAAAALLGGEEI

SEQ ID NO: 54871 - protein, 326 aa, Homo sapiens
VFVYENAKEGARNIRTSERVTLIVDNTRFVVDPSIFTAQPNTMLGRMFGSGREHNFTRPNEKGEYEVAEGIGSTVFRAILDYYKTGIIRCPDGISIPELREACDYLCISFEYSTIKCRDLSALMHELSNDGARRQFEFYLEEMILPLMVASAQSGERECHIVVLTDDDVVDWDEEYPPQMGEEYSQIIYSTKLYRFFKYIENRDVAKSVLKERGLKKIRLGIEGYPTYKEKVKKRPGGRPEVIYNYVQRPFIRMSWEKEEGKSRHVDFQCVKSKSITNLAAAAADIPQDQLVVMHPTPQVDELDILPIHPPSGNSDLDPDAQNPML

SEQ ID NO: 54872 - protein, 139 aa, Homo sapiens
IYLLGGEENDLDFFTKPSRLIQCFDTETDKCHVKPYVLPFAGRMHAAVHKDLVFIVAEGDSLVCYNPLLDSFTRLCLPEAWSSAPSLWKIASCNGSIYVFRDRYKKGDANTYKLDPATSAVTVTRGIKVLLTNLQFVLA

SEQ ID NO: 54873 - protein, 77 aa, Homo sapiens
VDMSVIMEMSCYNLQSPEKAAEQILEDMITIDVENVMEDICSKLQEIRNPIHAIGLLIREMDYETEVEMEKGFNPGK

SEQ ID NO: 54874 - protein, 195 aa, Homo sapiens
LTAEHFAALQSLLKASSKDVVRQLCQESFSSSALGLKKLLDVTCSSLSVTQEEAEELLQALHRLTRLVAFRDLSSAEAILALFPENFHQNLKNLLTKIILEHVSTWRTEAQANQISLPRLVDLDWRVDIKTSSDSISRMAVPTCLLQMKIQEDPSLCGDKPSISAVTVELSKETLDTMLDGLGRIRDQLSAVASK

SEQ ID NO: 54875 - protein, 44 aa, Homo sapiens
LEALRQRTFIKDDTLLVRCEVSTRFDMGSLRREGFQPRSTDAGV

SEQ ID NO: 54876 - protein, 415 aa, Homo sapiens
KSGLDVMPNISDVLLRKLRVHRSLPGSAPPLTEKEVENVFVQLSLAFRNDSYTLESRINQAERERNLTEENTEKELENFKASITSSASLWHHCEHRETYQKLLEDIAVLHRLAARLSSRAEVVGAVRQEKRMSKATEVMMQYVENLKRTYEKDHAELMEFKKLANQNSSRSCGPSEDGVPRTARSMSLTLGKNMPRRRVSVAVVPKFNALNLPGQTPSSSSIPSLPALSESPNGKGSLPVTSALPALLENGKTNGDPDCEASAPALTLSCLEELSQETKARMEEEAYSKGFQEGLKKTKELQDLKEEEEEQKSESPEEPEEVEETEEEEKGPRSSKLEELVHFLQVMYPKLCQHWQVIWMMAAVMLVLTVVLGLYNSYNSCAEQADGPLGRSTCSAAQRDSWWSSGLQHEQPTEQ

SEQ ID NO: 54877 - protein, 922 aa, Homo sapiens
INIILLKILRCQAAKVESAIAEGGASRFSASSGGGGSRGAPQHYPKTAGNSEFLGKTPGQNAQKWIPARSTRRDDNSAANNSANEKERHDAIFRKVRGILNKLTPEKFDKLCLELLNVGVESKLILKGVILLIVDKALEEPKYSSLYAQLCLRLAEDAPNFDGPAAEGQPGQKQSTTFRRLLISKLQDEFENRTRNVDVYDKRENPLLPEEEEQRAIAKIKMLGNIKFIGELGKLDLIHESILHKCIKTLLEKKKRVQLKDMGEDLECLCQIMRTVGPRLDHERAKSLMDQYFARMCSLMLSKELPARIRFLLQDTVELREHHWVPRKAFLDNGPKTINQIRQDAVKDLGVFIPAPMAQGMRSDFFLEGPFMPPRMKMDRDPLGGLADMFGQMPGSGIGTGPGVIQDRFSPTMGRHRSNQLFNGHGGHIMPPTQSQFGEMGGKFMKSQGLSQLYHNQSQGLLSQLQGQSKDMPPRFSKKGQLNADEISLRPAQSFLMNKNQVPKLQPQITMIPPSAQPPRTQTPPLGQTPQLGLKTNPPLIQEKPAKTSKKPPPSKEELLKLTETVVTEYLNSGNANEAVNGVREMRAPKHFLPEMLSKVIILSLDRSDEDKEKASSLISLLKQEGIATSDNFMQAFLNVLDQCPKLEVDIPLVKSYLAQFAARAIISELVSISELAQPLESGTHFPLFLLCLQQLAKLQDREWLTELFQQSKVNMQKMLPEIDQNKDRMLEILEGKGLSFLFPLLKLEKELLKQIKLDPSPQTIYKWIKDNISPKLHVDKGFVNILMTSFLQYISSEVNPPSDETDSSSAPSKEQLEQEKQLLLSFKPVMQKFLHDHVDLQVSALYALQVHCYNSNFPKGMLLRFFVHFYDMEIIEEEAFLAWKEDITQEFPGKGKALFQVNQWLTWLETAEEEESEEEAD

SEQ ID NO: 54878 - protein, 35 aa, Homo sapiens
TLRNGFLHEALDEMTTPQQTTPQTKKNDMMQSSGK

SEQ ID NO: 54879 - protein, 55 aa, Homo sapiens
LLRSRCWETSNSLESLASLILFTNLSFISASKHFWKRRRESNSKIWERIWSASVR

SEQ ID NO: 54880 - protein, 4 aa, Homo sapiens
MEMA

SEQ ID NO: 54881 - protein, 398 aa, Homo sapiens
LSANLSDMSGPVPSRARVYTDVNTHRPREYWDYESHVVEWGNQDDYQLVRKLGRGKYSEVFEAINITNNEKVVVKILKPVKKKKIKREIKILENLRGGPNIITLADIVKDPVSRTPALVFEHVNNTDFKQLYQTLTDYDIRFYMYEILKALDYCHSMGIMHRDVKPHNVMIDHEHRKLRLIDWGLAEFYHPGQEYNVRVASRYFKGPELLVDYQMYDYSLDMWRLGCMLASMIFRKEPFFHGRDNYDQLVRIAKFLGTEDLYGYIDKYNIELDPRFNDILGRHSRKRWERFVHSENQHLVSPEALDFLDKLLRYDHQSRLTAREAMEHPYFYTVVKDQARMGSSSMPGGSTPVSSANVMSGISSVPTPSPLGPLAGSPVIAAANPLGMPVPAATGAQQ

SEQ ID NO: 54882 - protein, 506 aa, Homo sapiens
RLRAVPTNKACFDCGAKNPSWASITYGVFLCIDCSGVHRSLGVHLSFIRSTELDSNWNWFQLRCMQVGGNANATAFFRQHGCTANDANTKYNSRAAQMYREKIRQLGSAALARHGTDLWIDNMSSAVPNHSPEKKDSDFFTEHTQPPAWDAPATEPSGTQQPAPSTESSGLAQPEHGPNTDLLGTSPKASLELKSSIIGKKKPAAAKKGLGAKKGLGAQKVSSQSFSEIERQAQVAEKLREQQAADAKKQAEESMVASMRLAYQELQIDRKKEEKKLQNLEGKKREQAERLGMGLVSRSSVSHSVLSEMQVIEQETPVSAKSSRSQLDLFDDVGTFASGPPKYKDNPFSLGESFGSRWDTDAAWGMDRVEEKEPEVTISSIRPISERATNRREVESRSSGLESSEARQKFAGAKAISSDMFFGREVDAEYEARSRLQQLSGSSAISSSDLFGDMDGAHGAGSVSLGNVLPTADIAQFKQGVKSVAGKMAVLANGVMNSLQDRYGSY

SEQ ID NO: 54883 - protein, 195 aa, Homo sapiens [sequence omitted]

SEQ ID NO: 54884 - protein, 706 aa, Homo sapiens
IKGYQRRWFVLSNGLLSYYRSKAEMRHTCRGTINLATANITVEDSCNFIISNGGAQTYHLKASSEVERQRWVTALELAKAKAVKMLAESDESGDEESVSQTDKTELQNTLRTLSSKVEDLSTCNDLIAKHGTALQRSLSELESLKLPAESNEKIKQVNERATLFRITSNAMINACRDFLMLAQTHSKKWQKSLQYERDQRIRLEETLEQLAKQHNHLERAFRGATVLPANTPGNVGSGKDQCCSGKGDMSDEDDENEFFDAPEIITMPENLGHKRTGSNISGASSDISLDEQYKHQLEETKKEKRTRIPYKPNYSLNLWSIMKNCIGKELSKIPMPVNFNEPLSMLQRLTEDLEYHELLDRAAKCENSLEQLCYVAAFTVSSYSTTVFRTSKPFNPLLGETFELDRLEENGYRSLCEQVSHHPPAAAHHAESKNGWTLRQEIKITSKFRGKYLSIMPLGTIHCIFHATGHHYTWKKVTTTVHNIIVGKLWIDQSGEIDIVNHKTGDKCNLKFVPYSYFSRDVARKVTGEVTDPSGKVHFALLGTWDEKMECFKVQPVIGENGGDARQRGHEAEESRVMLWKRNPLPKNAENMYYFSELALTLNAWESGTAPTDSRLRPDQRLMENGRWDEANAEKQRLEEKQRLSRKKREAEAMKATEDGTPYDPYKALWFERKKDPVTKELTHIYRGEYWECKEKQDWSSCPDIF

SEQ ID NO: 54885 - protein, 12 aa, Homo sapiens
LELMPGHFLKRQ

SEQ ID NO: 54886 - protein, 370 aa, Homo sapiens
KCTENDIRVMFSSFGQIEECRILRGPDGLSRGCAFVTFTTRAMAQTAIKAMHQAQTMEGCSSPMVVKFADTQKDKEQKRMAQQLQQQMQQISAASVWGNLAGLNTLGPQYLALYLQLLQQTASSGNLNTLSSLHPMGGLNAMQLQNLAALAAAASAAQNTPSGTNALTTSSSPLSVLTSSAGSSPSSSSSNSVNPIASLGALQTLAGATAGLNVGSLAGMAALNGGLGSSGLSNGTGSTMEALTQAYSGIQQYAAAALPTLYNQNLLTQQSIGAAGSQKEGPEGANLFIYHLPQEFGDQDLLQMFMPFGNVVSAKVFIDKQTNLSKCFGFVSYDNPVSAQAAIQSMNGFQIGMKRLKVQLKRSKNDSKPY

SEQ ID NO: 54887 - protein, 145 aa, Homo sapiens
KELEDLQKKPPPYLRNLSSDDANVLVWHALLLPDQPPYHLKAFNLRISFPPEYPFKPPMIKFTTKIYHPNVDENGQICLPIISSENWKPCTKTCQVLEALNVLVNRPNIREPLRMDLADLLTQNPELFRKNAEEFTLRFGVDRPS

SEQ ID NO: 54888 - protein, 203 aa, Homo sapiens
TAPPPTAATAPPGADKSGAGCGPFYLMRELPGSTELTGSTNLITHYNLEQAYNKFCGKKVKEKLSNFLPDLPGMIDLPGSHDNSSLRSLIEKPPILSSSFNPITGTMLAGFRLHTGPLPEQCRLMHIQPPKKKNKHKHKQSRTQDPVPPETPSDSDHKKKKKKKEEDPERKRKKKEKKKKKNRHSPDHPGMGSSQASSSSSLR

SEQ ID NO: 54889 - protein, 38 aa, Homo sapiens
VLLSATMPTDVLEVTKKIHERSSLNSGEKGRRNQTVLH

SEQ ID NO: 54890 - protein, 58 aa, Homo sapiens
ILLLYYLLRSPFYDRFSEARILFLLQLLADHVPGVGLVTRPLMDYLPTWQKIYFYSWG

SEQ ID NO: 54891 - protein, 31 aa, Homo sapiens
LADHVPGVGLVTRPLMDYLPTWQKIYFYSWG

SEQ ID NO: 54892 - protein, 160 aa, Homo sapiens
KNRIAIYELLFKEGVMVAKKDVHMPKHPELADKNVPNLHVMKAMQSLKSRGYVKEQFAWRHFYWYLTNEGIQYLRDYLHLPPEIVPAILRRSRPETGRPRPKGLEGERPARLTRGEADRDTYRRSAVPPGADKKAEAGAGSATEFQFRGGFGRGRGQPPQ

SEQ ID NO: 54893 - protein, 382 aa, Homo sapiens
LDSRIEDLEEGQQVIRSVNLLVVKVLEKSDQTNILSALLVLLQDSLLATASSPKFSELVMKCLWRMVRLLPDTINSINLDRILLDIHIFMKVFPKEKLKQCKSEFPIRTLKTLLHTLCKLKGPKILDHLTMIDNKNESELEAHLCRMMKHSMDQTGSKSDKETEKGASRIDEKSSKAKVNDFLAEIFKKIGSKENTKEGLAELYEYKKKYSDADIEPFLKNSSQFFQSYVERGLRVIEMEREGKGRISTSTGISPQMEVTCVPTPTSTVSSIGNTNGEEVGPSVYLERLKILRQRCGLDNTKQDDRPPLTSLLSKPAVPTVASSTDMLHSKLSQLRESREQHQHSDLDSNQTHSSGTVTSSSSTANIDDLKKRLERIKSSRK

SEQ ID NO: 54894 - protein, 1727 aa, Homo sapiens
VSTLRESSAMASPLPREMEEELVPTGSEPGDTRAKPPVKPKPRALPAKPALPAKPSLLVPVGPRPPRGPLAELPSARKMNMLAGPQPYGGSKRPLPFAPRPAVEASTGGEATQETGKEEAGKEEPPPLTPPARCAAPGGVRKAPAPFRPASERFAATTVEEILAKMEQPRKEVLASPDRLWGSRLTFNHDGSSRYGPRTYGTTTAPRDEDGSTLFRGWSQEGPVKSPAECREEHSKTPEERSLPSDLAFNGDLAKAASSELPADISKPWIPSSPAPSSENGGPASPGLPAEASGSGPGSPHLHPPDKSSPCHSQLLEAQTPEASQASPCPAVTPSAPSAALPDEGSRHTPSPGLPAEGAPEAPRPSSPPPEVLEPHSLDQPPATSPRPLIEVGELLDLTRTFPSGGEEEAKGDAHLRPTSLVQRRFSEGVLQSPSQDQEKLGGSLAALPQGQGSQLALDRPFGAESNWSLSQSFEWTFPTRPSGLGVWRLDSPPPSPITEASEAAEAAEAGNLAVSSREEGVSQQGQGAGSAPSGSGSSWVQGDDPSMSLTQKGDGESQPQFPAVPLEPLPTTEGTPGLPLQQAEERYESQEPLAGQESPLPLATREAALPILEPVLGQEQPAAPDQPCVLFADAPEPGQALPVEEEAVTLARAETTQARTEAQDLCRASPEPPGPESSSRWLDDLLASPPPSGGGARRGAGAELKDTQSPSTCSEGLLGWSQKDLQSEFGITGDPQPSSFSPSSWCQGASQDYGLGGASPRGDPGLGERDWTSKYGQGAGEGSTREWASRCGIGQEEMEASSSQDQSKVSAPGVLTAQDRVVGKPAQLGTQRSQEADVQDWEFRKRDSQGTYSSRDAELQDQEFGKRDSLGTYSSRDVSLGDWEFGKRDSLGAYASQDANEQGQDLGKRDHHGRYSSQDADEQDWEFQKRDVSLGTYGSRAAEPQEQEFGKSAWIRDYSSGGSSRTLDAQDRSFGTRPLSSGFSPEEAQQQDEEFEKKIPSVEDSLGEGSRDAGRPGERGSGGLFSPSTAHVPDGALGQRDQSSWQNSDASQEVGGHQERQQAGAQGPGSADLEDGEMGKRGWVGEFSLSVGPQREAAFSPGQQDWSRDFCIEASERSYQFGIIGNDRVSGAGFSPSSKMEGGHFVPPGKTTAGSVDWTDQLGLRNLEVSSCVGSGGSSEARESAVGQMGWSGGLSLRDMNLTGCLESGGSEEPGGIGVGEKDWTSDVNVKSKDLAEVGEGGGHSQARESGVGQTDWSGVEAGEFLKSRERGVGQADWTPDLGLRNMAPGAVCSPGESKELGVGQMDWGNNLGLRDLEVTCDPDSGGSQGLRGCGVGQMDWTQDLAPQNVELFGAPSEAREHGVGGVSQCPEPGLRHNGSLSPGLEARDPLEARELGVGETSGPETQGEDYSSSSLEPHPADPGMETGEALSFGASPGRCPARPPPSGSQGLLEEMLAASSSKAVARRESAASGLGGLLEEEGAGAGAAQEEVLEPGRDSPPSWRPQPDGEASQTEDVDGTWGSSAARWSDQGPAQTSRRPSQGPPARSPSQDFSFIEDTEILDSAMYRSRANLGRKRGHRAPVIRPGGTLGLSEAADSDAHLFQDSTEPRASRVPSSDEEVVEEPQSRRTRMSLGTKGLKVNLFPGLSPSALKAKLRPRNRSAEEGELAESKSSQKESAVQRSKSCKVPGLGKPLTLPPKPEKSSGSEGSSPNWLQALKLKKKKV

SEQ ID NO: 54895 - protein, 587 aa, Homo sapiens
IGDQPVFEIPLSNVSQCTTGKNEVTLEFHQNDDAEVSLMEVRFYVPPTQEDGVDPVEAFAQNVLSKADVIQATGDAICIFRELQCLTPRGRYDIRIYPTFLHLHGKTFDYKIPYTTVLRLFLLPHKDQRQMFFVISLDPPIKQGQTRYHFLILLFSKDEDISLTLNMNEEEVEKRFEGRLTKNMSGSLYEMVSRVMKALVNRKITVPGNFQGHSGAQCITCSYKASSGLLYPLERGFIYVHKPPVHIRFDEISFVNFARGTTTTRSFDFEIETKQGTQYTFSSIEREEYGKLFDFVNAKKLNIKNRGLKEGMNPSYDEYADSDEDQHDAYLERMKEEGKIREENANDSSDDSGEETDESFNPGEEEEDVAEEFDSNASASSSSNEGDSDRDEKKRKQLKKAKMAKDRKSRKKPVEVKKGKDPNAPKRPMSAYMLWLNASREKIKSDHPGISITDLSKKAGEIWKGMSKEKKEEWDRKAEDARRDYEKAMKEYEGGRGESSKRDKSKKKKKVKVKMEKKSTPSRGSSSKSSSRQLSESFKSKEFVSSDESSSGENKSKKKRRRSEDSEEEELASTPPSSEDSASGSDE

SEQ ID NO: 54896 - protein, 40 aa, Homo sapiens
LDRCVSKYLDIHERMGKKLTELSMQDEELMKRVQQSSGPA

SEQ ID NO: 54897 - protein, 32 aa, Homo sapiens
TAPARRSTGSWWSAGAAWASRRSPSSSSSPIL

SEQ ID NO: 54898 - protein, 191 aa, Homo sapiens
KYRLVVVGGGGVGKSALTIQFIQSYFVTDYDPTIEDSYTKQCVIDDRAARLDILDTAGQEEFGAMREQYMRTGEGFLLVFSVTDRGSFEEIYKFQRQILRVKDRDEFPMILIGNKADLDHQRQVTQEEGQQLARQLKVTYMEASAKIRMNVDQAFHELVRVIRKFQEQECPPSPEPTRKEKDKKGCHCVIF

SEQ ID NO: 54899 - protein, 34 aa, Homo sapiens
RIYSSFSLQIERSRIARTFNASYSCMFGASTQLC

SEQ ID NO: 54900 - protein, 81 aa, Homo sapiens
KRLNLEEWILEQLTRLYDCQEEEIPELEIDVDELLDMESDDARAARVKELLVDCYKPTEAFISGLLDKIRGMQKLSTPQKK

SEQ ID NO: 54901 - protein, 75 aa, Homo sapiens
IYSWSLPMAMSICHRGTGIALSAGVSLFGMLALLLPGNFESYLECVKSLCPGPALIHTAKFALIFPLMYHIWNGV

SEQ ID NO: 54902 - protein, 26 aa, Homo sapiens
LQPPYPPGPAPPYGFPPPPGPAWPGY

SEQ ID NO: 54903 - protein, 20 aa, Homo sapiens
VSRSSPDGPLQASTCRTTTW

SEQ ID NO: 54904 - protein, 257 aa, Homo sapiens
VDKPPSVLPYFNRPPSALPLMGLPPPPIPPPPPLSSSFGVPPPPPGIHYQHLMPPPPRLPPHLAVPPPGAIPPALHLNPAFFPPPNATVGPPPDTYMKASAPYNHHGSRDSGPPPSTVSEAEFEDIMKRNRAISSSAISKAVSGASAGDYSDAIETLLTAIAVIKQSRVANDERCRVLISSLKDCLHGIEAKSYSVGASGSSSRKRHRSRERSPSRSRESSRRHRDLLHNEDRHDDYFQERNREHERHRDRERDRHH

SEQ ID NO: 54905 - protein, 28 aa, Homo sapiens [sequence omitted]

SEQ ID NO: 54906 - protein, 646 aa, Homo sapiens
VPVPGGAMATGANATPLDFPSKKRKRSRWNQDTMEQKTVIPGMPTVIPPGLTREQERAYIVQLQIEDLTRKLRTGDLGIPPNPEDRSPSPEPIYNSEGKRLNTREFRTRKKLEEERHNLITEMVALNPDFKPPADYKPPATRVSDKVMIPQDEYPEINFVGLLIGPRGNTLKNIEKECNAKIMIRGKGSVKEGKVGRKDGQMLPGEDEPLHALVTANTMENVKKAVEQIRNILKQGIETPEDQNDLRKMQLRELARLNGTLREDDNRILRPWQSSETRSITNTTVCTKCGGAGHIASDCKFQRPGDPQSAQDKARMDKEYLSLMAELGEAPVPASVGSTSGPATTPLASAPRPAAPANNPPPPSLMSTTQSRPPWMNSGPSESRPYHGMHGGGPGGPGGGPHSFPHPLPSLTGGHGGHPMQHNPNGPPPPWMQPPPPPMNQGPHPPGHHGPPPMDQYLGSTPVGSGVYRLHQGKGMMPPPPMGMMPPPPPPPSGQPPPPPSGPLPPWQQQQQQPPPPPPPSSSMASSTPLPWQQNTTTTTTSAGTGSIPPWQQQQAAAAASPGAPQMQGNPTMVPLPPGVQPPLPPGAPPPPPPPPPGSAGMMYAPPPPPPPPMDPSNFVTMMGMGVAGMPPFGMPPAPPPPPPQN

SEQ ID NO: 54907 - protein, 533 aa, Homo sapiens
KRKRSRWNQDTMEQKTVIPGMPTVIPPGLTREQERAYIVQLQIEDLTRKLRTGDLGIPPNPEDRSPSPEPIYNSEGKRLNTREFRTRKKLEEERHNLITEMVALNPDFKPPADYKPPATRVSDKVMIPQDEYPEINFVGLLIGPRGNTLKNIEKECNAKIMIRGKGSVKEGKVGRKDGQMLPGEDEPLHALVTANTMENVKKAVEQIRNILKQGIETPEDQNDLRKMQLRELARLNGTLREDDNRILRPWQSSETRSITNTTVCTKCGGAGHIASDCKFQRPGDPQSAQDKARMDKEYLSLMAELGEAPVPASVGSTSGPATTPLASAPRPAAPANNPPPPSLMSTTQSRPPWMNSGPSESRPYHGMHGGGPGGPGGGPHSFPHPLPSLTGGHGGHPMQHNPNGPPPPWMQPPPPPMNQGPHPPGHHGPPPMDQYLGSTPVGSGVYRLHQGKGMMPPPPMGMMPPPPPPPSGQPPPPPSGPLPPWQQQQQQPPPPPPPSSSMASSTPLPWQQRSLPAAAMARAMRVRTFRAHW

SEQ ID NO: 54908 - protein, 19 aa, Homo sapiens
VSTPSDYTLSFLKRQRKGL

SEQ ID NO: 54909 - protein, 606 aa, Homo sapiens
LALTGAVVAHAYYLKHQFYPTVVYLTKSSPSMAVLYIQAFVLVFLLGKVMGKVFFGQLRAAEMEHLLERSWYAVTETCLAFTVFRDDFSPRFVALFTLLLFLKCFHWLAEDRVDFMERSPNISWLFHCRIVSLMFLLGILDFLFVSHAYHSILTRGASVQLVFGFEYAILMTMVLTIFIKYVLHSVDLQSENPWDNKAVYMLYTELFTGFIKVLLYMAFMTIMIKVHTFPLFAIRPMYLAMRQFKKAVTDAIMSRRAIRNMNTLYPDATPEELQAMDNVCIICREEMVTGAKRLPCNHIFHTSCLRSWFQRQQTCPTCRMDVLRASLPAQSPPPPEPADQGPPPAPHPPPLLPQPPNFPQGLLPPFPPGMFPLWPPMGPFPPVPPPPSSGEAVAPPSTSAAALSRPSGAATTTAAGTSATAASATASGPGSGSAPEAGPAPGFPFPPPWMGMPLPPPFAFPPMPVPPAGFAGLTPEELRALEGHERQHLEARLQSLRNIHTLLDAAMLQINQYLTVLASLGPPRPATSVNSTEETATTVVAAASSTSIPSSEATTPTPGASPPAPEMERPPAPESVGTEEMPEDGEPDAAELRRRRLQKLESPVAH

SEQ ID NO: 54910 - protein, 27 aa, Homo sapiens
IFAVAGTAVQSPICSSLSAPRSYTPSR

SEQ ID NO: 54911 - protein, 119 aa, Homo sapiens
ISKDRRYADLTEDLLPSCESLKDTIARALTFWNEEIVPQIKEGKRVLIAAHGNSLRGIAKHLEGLSEEAIMELNLPTGIPIVYEWDKNLKPIKPMQFLGDEEMVRKAMEAVAAQGKAKK

SEQ ID NO: 54912 - protein, 134 aa, Homo sapiens
LLPCEVAVDGPAPVGRFFTPAIRQGPEGLEVSFRGRCLRGEEVAVPPGLVGYVMVTEEKKVSMGKPDPLRDSGTDDQEEEPLERDFDRFIGATANFSRFTLWGLETIPGPDAKVRGALTWPSLAAAIHAQVPED

SEQ ID NO: 54913 - protein, 444 aa, Homo sapiens
RMLPCASCLPGSLLLWALLLLLLGSASPQDSEEPDSYTECTDGYEWDPDSQHCRDVNECLTIPEACKGEMKCINHYGGYLCLPRSAAVINDLHGEGPPPPVPPAQHPNPCPPGYEPDDQDSCVDVDECAQALHDCRPSQDCHNLPGSYQCTCPDGYRKIGPECVDIDECRYRYCQHRCVNLPGSFRCQCEPGFQLGPNNRSCVDVNECDMGAPCEQRCFNSYGTFLCRCHQGYELHRDGFSCSDIDECSYSSYLCQYRCINEPGRFSCHCPQGYQLLATRLCQDIDECESGAHQCSEAQTCVNFHGGYRCVDTNRCVEPYIQVSENRCLCPASNPLCREQPSSIVHRYMTITSERSVPADVFQIQATSVYPGAYNAFQIRAGNSQGDFYIRQINNVSAMLVLARPVTGPREYVLDLEMVTMNSLMSYRASSVLRLTVFVGAYTF

SEQ ID NO: 54914 - protein, 51 aa, Homo sapiens
KQVSCMAHRGEVPAMLPLKVKGRRFYFLLDKTGHFPNTKLFDNTVGAYRSL

SEQ ID NO: 54915 - protein, 524 aa, Homo sapiens [sequence omitted]

SEQ ID NO: 54916 - protein, 274 aa, Homo sapiens
KPALRAVRQRSEFTLMAKRIGKDLSNTFAKLEKLTILAKRKSLFDDKAVEIEELTYIIKQDINSLNKQIAQLQDFVRAKGSQSGRHLQTHSNTIVVSLQSKLASMSNDFKSVLEVRTENLKQQRSRREQFSRAPVSALPLAPNHLGGGAVVLGAESHASKDVAIDMMDSRTSQQLQLIDEQDSYIQSRADTMQNIESTIVELGSIFQQLAHMVKEQEETIQRIDENVLGAQLDVEAAHSEILKYFQSVTSNRWLMVKIFLILIVFFIIFVVFLA

SEQ ID NO: 54917 - protein, 121 aa, Homo sapiens
IAPAPSSTPGSSTPGPGTPVPTGSVPSPSGSVPGAGAPFRPLFNDFGPPSMGYVQAMKPPGAQGSQSTYTDLLSVIEEMGKEIRPTYAGSKSAMERLKRGIIHARALVRECLAETERNART

SEQ ID NO: 54918 - protein, 57 aa, Homo sapiens
IKEEMLLEVNRFALASHFLWGLWSIVQAKISSIEFGYMDYAQARFDAYFHQKRKLGV

SEQ ID NO: 54919 - protein, 169 aa, Homo sapiens
VRSCTTESCDFVRAMVDPAQTVEQRLKLFKLASEKHQHMYRLAMTGSGIDRHLFCLYVVSKYLAVESPFLKEVLSEPWRLSTSQTPQQQVELFDLENNPEYVSSGGGFGPVADDGYGVSYILVGENLINFHISSKFSCPETDSHRFGRHLKEAMTDIITLFGLSSNSKK

SEQ ID NO: 54920 - protein, 98 aa, Homo sapiens
VTSEDLILIGNELDLACGERIRLEKVLLVGADNFTLLGKPLLGKDLVRVEATVIEKTESWPRIIMRFRKRKNFKKKRIVTTPQTVLRINSIEIAPCLL

SEQ ID NO: 54921 - protein, 477 aa, Homo sapiens
LSLLGLLPGAVAAPAQPRAASFQAWGPPSPELLAPTRFALEMFNRGRAAGTRAVLGLVRGRVRRAGQGSLYSLEATLEEPPCNDPMVCRLPVSKKTLLCSFQVLDELGRHVLLRKDCGPVDTKVPGAGEPKSAFTQGSAMISSLSQNHPDNRNETFSSVISLLNEDPLSQDLPVKMASIFKNFVITYNRTYESKEEARWRLSVFVNNMVRAQKIQALDRGTAQYGVTKFSDLTEEEFRTIYLNTLLRKEPGNKMKQAKSVGDLAPPEWDWRSKGAVTKVKDQGMCGSCWAFSVTGNVEGQWFLNQGTLLSLSEQELLDCDKMDKACMGGLPSNAYSAIKNLGGLETEDDYSYQGHMQSCNFSAEKAKVYINDSVELSQNEQKLAAWLAKRGPISVAINAFGMQFYRHGISRPLRPLCSPWLIDHAVLLVGYGNRSDVPFWAIKNSWGTDWGEKGYYYLHRGSGACGVNTMASSAVVD

SEQ ID NO: 54922 - protein, 150 aa, Homo sapiens
VKLFIGNLPREATEQEIRSLFEQYGKVLECDIIKNYGFVHIEDKTAAEDAIRNLHHYKLHGVNINVEASKNKSKASTKLHVGNISPTCTNQELRAKFEEYGPVIECDIVKDYAFVHMERAEDAVEAIRGLDNTEFQGELLWAWVVAPSGV

SEQ ID NO: 54923 - protein, 316 aa, Homo sapiens
LEQTGATAAVLQSDTMDHYRTFHMLERLLHAPPKLLHQLIFQIPPSRQALLIERYYAFDEAFVREVLGKKLSKGTKKDLDDISTKTGITLKSCRRQFDNFKRVFKVVEEMRGSLVDNIQQHFLLSDRLARDYAAIVFFANNRFETGKKKLQYLSFGDFAFCAELMIQNWTLGAVDSQMDDMDMDLDKEFLQDLKELKVLVADKDLLDLHKSLVCTALRGKLGVFSEMEANFKNLSRGLVNVAAKLTHNKDVRDLFVDLVEKFVEPCRSDHWPLSDVRFFLNQYSASVHSLDGFRHQALWDRYMGTLRGCLLRLYHD

SEQ ID NO: 54924 - protein, 300 aa, Homo sapiens
MLERLLHAPPKLLHQLIFQIPPSRQALLIERYYAFDEAFVREVLGKKLSKGTKKDLDDISTKTGITLKSCRRQFDNFKRVFKVVEEMRGSLVDNIQQHFLLSDRLARDYAAIVFFANNRFETGKKKLQYLSFGDFAFCAELMIQNWTLGAVGEAPTDPDSQMDDMDMDLDKEFLQDLKELKVLVADKDLLDLHKSLVCTALRGKLGVFSEMEANFKNLSRGLVNVAAKLTHNKDVRDLFVDLVEKFVEPCRSDHWPLSDVRFFLNQYSASVHSLDGFRHQALWDRYMGTLRGCLLRLYHD

SEQ ID NO: 54925 - protein, 51 aa, Homo sapiens
MTTPSLTPFTPSLVFTYPSTPEPCASAHRKSSSSSGDPSSDPLGSPTLLAL

SEQ ID NO: 54926 - protein, 227 aa, Homo sapiens
LAAEAMAADMDPWLVFDARTTPATELDAWLAKYPPSQVTRYGDPGSPNSEPVGWIAVYGQGYSPNSGDVQGLQAAWEALQTSGRPITPGTLRQLAITHHVLSGKWLMHLAPGFKLDHAWAGIARAVVEGQLQVAKVSPRAKEGGRQVICVYTDDFTDRLGVLEADSAIRAAGIKCLLTYKPDVYTYLGIYRANRWHLCPTLYESRFQLGGSARGSRVLDRANNVELT

SEQ ID NO: 54927 - protein, 956 aa, Homo sapiens
RRRSWASLVLAFLGVCLGITLAVDRSNFKTCEESSFCKRQRSIRPGLSPYRALLDSLQLGPDSLTVHLIHEVTKVLLVLELQGLQKNMTRFRIDELEPRRPRYRVPDVLVADPPIARLSVSGRDENSVELTMAEGPYKIILTARPFRLDLLEDRSLLLSVNARGLLEFEHQRAPRVSFSDKVNLTLGSIWDKIKNLFSRQGSKDPAEGDGAQPEETPRDGDKPEETQGKAEKDEPGAWEETFKTHSDSKPYGPMSVGLDFSLPGMEHVYGIPEHADNLRLKVTEGGEPYRLYNLDVFQYELYNPMALYGSVPVLLAHNPHRDLGIFWLNAAETWVDISSNTAGKTLFGKMMDYLQGSGETPQTDVRWMSETGIIDVFLLLGPSISDVFRQYASLTGTQALPPLFSLGYHQSRWNYRDEADVLEVDQGFDDHNLPCDVIWLDIEHADGKRYFTWDPSRFPQPRTMLERLASKRRKLVAIVDPHIKVDSGYRVHEELRNLGLYVKTRDGSDYEGWCWPGSAGYPDFTNPTMRAWWANMFSYDNYEGSAPNLFVWNDMNEPSVFNGPEVTMLKDAQHYGGWEHRDVHNIYGLYVHMATADGLRQRSGGMERPFVLARAFFAGSQRFGAVWTGDNTAEWDHLKISIPMCLSLGLVGLSFCGADVGGFFKNPEPELLVRWYQMGAYQPFFRAHAHLDTGRREPWLLPSQHNDIIRDALGQRYSLLPFWYTLLYQAHREGIPVMRPLWVQYPQDVTTFNIDDQYLLGDALLVHPVSDSGAHGVQVYLPGQGEVWYDIQSYQKHHGPQTLYLPVTLSSIPVFQRGGTIVPRWMRVRRSSECMKDDPITLFVALSPQGTAQGELFLDDGHTFNYQTRQEFLLRRFSFSGNTLVSSSADPEGHFETPIWIERVVIIGAGKPAAVVLQTKGSPESRLSFQHDPETSVLVLRKPGINVASDWSIHLR

SEQ ID NO: 54928 - protein, 116 aa, Homo sapiens
INRPRTELKKKLFKRRRVLNRERRLRHRVVGAVIDQGLITRHHLKKRASSARANITLSGKKRRKLLQQIRLAQKEKTAMEVEAPSKPARTSEPQLKRQKKTKAPQDVEMKDLEDES

SEQ ID NO: 54929 - protein, 287 aa, Homo sapiens
IEMGFPRGRAEKALALTGNQGIEAAMDWLMEHEDDPDVDEPLETPLGHILGREPTSSEQGGLEGSGSAAGEGKPALSEEERQEQTKRMLELVAQKQREREEREEREALERERQRRRQGQELSAARQRLQEDEMRRAAEERRREKAEELAARQRVREKIERDKAERAKKYGGSVGSQPPPVAPEPGPVPSSPSQEPPTKREYDQCRIQVRLPDGTSLTQTFRAREQLAAVRLYVELHRGEELGGGQDPVQLLSGFPRRAFSEADMERPLQELGLVPSAVLIVAKKCPS

SEQ ID NO: 54930 - protein, 740 aa, Homo sapiens
VTELRSELQRRGLDSRGLKVDLAQRLQEALDAEMLEDEAGGGGAGPGGACKAEPRPVAASGGGPGGDEEEDEEEEEEDEEALLEDEDEEPPPAQALGQAAQPPPEPPEAAAMEAAAEPDASEKPAEATAGSGGVNGGEEQGLGKREEDEPEERSGDETPGSEVPGDKAAEEQGDDQDSEKSKPAGSDGERRGVKRQRDEKDEHGRAYYEFREEAYHSRSKSPLPPEEEAKDEEEDQTLVNLDTYTSDLHFQVSKDRYGGQPLFSEKFPTLWSGARSTYGVTKGKVCFEAKVTQNLPMKEGCTEVSLLRVGWSVDFSRPQLGEDEFSYGFDGRGLKAENGQFEEFGQTFGENDVIGCFANFETEEVELSFSKNGEDLGVAFWISKDSLADRALLPHVLCKNCVVELNFGQKEEPFFPPPEEFVFIHAVPVEERVRTAVPPKTIEECEVILMVGLPGSGKTQWALKYAKENPEKRYNVLGAETVLNQMRMKGLEEPEMDPKSRDLLVQQASQCLSKLVQIASRTKRNFILDQCNVYNSGQRRKLLLFKTFSRKVVVVVPNEEDWKKRLELRKEVEGDDVPESIMLEMKANFSLPEKCDYMDEVTYGELEKEEAQPIVTKYKEEARKLLPPSEKRTNRRNNRNKRNRQNRSRGQGYVGGQRRGYDNRAYGQQYWGQPGNRGGYRNFYDRYRGDYDRFYGRDYEYNRYRDYYRQYNRDWQSYYYHHPQDRDRYYRNYYGYQGYR

SEQ ID NO: 54931 - protein, 37 aa, Homo sapiens
KNSNTGAVLRLWMTLFFKWLYPPSSSRDPPFSISRKM

SEQ ID NO: 54932 - protein, 60 aa, Homo sapiens
LGCSSAPSSFCSGCLSSSMAPSTIPICRQSATSALCISTTGPTVIPPPPHSAPSLLPMSR

SEQ ID NO: 54933 - protein, 267 aa, Homo sapiens
IAASAAAAAVFACSCSPDPQSSTMNPVYSPVQPGAPYGNPKNMAYTGYPTAYPAAAPAYNPSLYPTNSPSYAPEFQFLHSAYATLLMKQAWPQNSSSCGTEGTFHLPVDTGTENRTYQASSAAFRYTAGTPYKVPPTQSNTAPPPYSPSPNPYQTAMYPIRSAYPQQNLYAQGAYYTQPVYAAQPHVIHHTTVVQPNSIPSAIYPAPVAAPRTNGVAMGMVAGTTMAMSAGTLLTTPQHTAIGAHPVSMPTYRAQGTPAYSYVPPHW

SEQ ID NO: 54934 - protein, 42 aa, Homo sapiens
IYMAILLTHRCLRDEHRCASKYGRDWERYTAAVPYRLLPGIF

SEQ ID NO: 54935 - protein, 59 aa, Homo sapiens
VIDIKVVAGAKVAKGQPLCVLSAMKMETVVTSPMEGTVRKVHVTKDMTLEGDDLILEIE

SEQ ID NO: 54936 - protein, 17 aa, Homo sapiens
MQPPAAAVTLHLGAHGF

SEQ ID NO: 54937 - protein, 48 aa, Homo sapiens
LAGLSSSPQLPPSLPAWVAAMGRKRLITDSYPGRSPSPATRRKRSWSC

SEQ ID NO: 54938 - protein, 127 aa, Homo sapiens
LAGLSSSPQLPPSLPAWVAAMGRKRLITDSYPVVKRREGPAGHSKGELAPELGEEPQPRDEEEAELELLRQFDLAWQYGPCTGITRLQRWCRAKQMGLEPPPEVWQVLKTHPGDPRFQCSLWHLYPL

SEQ ID NO: 54939 - protein, 336 aa, Homo sapiens
KLNLDSIIGRLLEGSRVLTPHCAPVQGSRPGKNVQLTENEIRGLCLKSREIFLSQPILLELEAPLKICGDIHGQYYDLLRLFEYGGFPPESNYLFLGDYVDRGKQSLETICLLLAYKIKYPENFFLLRGNHECASINRIYGFYDECKRRYNIKLWKTFTDCFNCLPIAAIVDEKIFCCHGGLSPDLQSMEQIRRIMRPTDVPDQGLLCDLLWSDPDKDVQGWGENDRGVSFTFGAEVVAKFLHKHDLDLICRAHQVVEDGYEFFAKRQLVTLFSAPNYCGEFDNAGAMMSVDETLMCSFQILKPADKNKGKYGQFSGLNPGGRPITPPRNSAKAKK

SEQ ID NO: 54940 - protein, 45 aa, Homo sapiens
RGLPSLPLHLPAPRRYLQSRYACSQSSMTLTTMRSQRRGRGPQPE

SEQ ID NO: 54941 - protein, 41 aa, Homo sapiens
IRDTPAKNAQKSNQNGKDSKPSTPRSKGQESFKKKKTGKNS

SEQ ID NO: 54942 - protein, 4 aa, Homo sapiens
RKSL

SEQ ID NO: 54943 - skipped

SEQ ID NO: 54944 - protein, 1323 aa, Homo sapiens
MAAQHTAESECEQLVKEVAAWRERYEDSQQEEAQYGAMFQEQLMTLKEECEKARQELQEAKEKVAGIESHSELQISRQQNELAELHANLARALQQVQEKEVRAQKLADDLSTLQEKMAATSKEVARLETLVRKAGEQQETASRELVKEPARAGDRQPEWLEEQQGRQFCSTQAALQAMEREAEQMGNELERLRAALMESQGQQQEERGQQEREVARLTQERGRAQADLALEKAARAELEMRLQNALNEQRVEFATLQEALAHALTEKEGKDQELAKLRGLEAAQIKELEELRQTVKQLKEQLAKKEKEHASGSGAQSEAAGRTEPTGPKLEALRAEVSKLEQQCQKQQEQADSLERSLEAERASRAERDSALETLQGQLEEKAQELGHSQSALASAQRELAAFRTKVQDHSKAEDEWKAQVARGRQEAERKNSLISSLEEEVSILNRQVLEKEGESKELKRLVMAESEKSQKLEERLRLLQAETASNSARAAERSSALREEVQSLREEAEKQRVASENLRQELTSQAERAEELGQELKAWQEKFFQKEQALSTLQLEHTSTQALVSELLPAKHLCQQLQAEQAAAEKRHREELEQSKQAAGGLRAELLRAQRELGELIPLRQKVAEQERTAQQLRAEKASYAEQLSMLKKAHGLLAEENRGLGERANLGRQFLEVELDQAREKYVQELAAVRADAETRLAEVQREAQSTARELEVMTAKYEGAKVKVLEERQRFQEERQKLTAQVEQLEVFQREQTKQVEELSKKLADSDQASKVQQQKLKAVQAQGGESQQEAQRLQAQLNELQAQLSQKEQAAEHYKLQMEKAKTHYDAKKQQNQELQEQLRSLEQLQKENKELRAEAERLGHELQQAGLKTKEAEQTCRHLTAQVRSLEAQVAHADQQLRDLGKFQVATDALKSREPQAKPQLDLSIDSLDLSCEEGTPLSITSKLPRTQPDGTSVPGEPASPISQRLPPKVESLESLYFTPIPARSQAPLESSLDSLGDVFLDSGRKTRSARRRTTQIINITMTKKLDVEEPDSANSSFYSTRSAPASQASLRATSSTQSLARLGSPDYGNSALLSLPGYRPTTRSSARRSQAGVSSGAPPGRNSFYMGTCQDEPEQLDDWNRIAELQQRNRVCPPHLKTCYPLESRPSLSLGTITDEEMKTGDPQETLRRASMQPIQIAEGTGITTRQQRKRVSLEPHQGPGTPESKKATSCFPRPMTPRDRHEGRKQSTTEAQKKAAPASTKQADRRQSMAFSILNTPKKLGNSLLRRGASKKALSKASPNTRSGTRRSPRIATTTASAATAAAIGATPRAKGKAKH

SEQ ID NO: 54945 - protein, 43 aa, Homo sapiens
MAQHQDWRQCQPQVQAFKDCMSEQQARRQEELQRRQEQAGAHH

SEQ ID NO: 54946 - protein, 19 aa, Homo sapiens
VGPRGGGSHTKTLIERSGR

SEQ ID NO: 54947 - protein, 759 aa, Homo sapiens
IAMLLRLLLAWAAAGPTLGQDPWAAEPRAACGPSSCYALFPRRRTFLEAWRACRELGGDLATPRTPEEAQRVDSLVGAGPASRLLWIGLQRQARQCQLQRPLRGFTWTTGDQDTAFTNWAQPASGGPCPAQRCVALEASGEHRWLEGSCTLAVDGYLCQFGFEGACPALQDEAGQAGPAVYTTPFHLVSTEFEWLPFGSVAAVQCQAGRGASLLCVKQPEGGVGWSRAGPLCLGTGCSPDNGGCEHECVEEVDGHVSCRCTEGFRLAADGRSCEDPCAQAPCEQQCEPGGPQGYSCHCRLGFRPAEDDPHRCVDTDECQIAGVCQQMCVNYVGGFECYCSEGHELEADGISCSPAGAMGAQASQDLGDELLDDGEDEEDEDEAWKAFNGGWTEMPGILWMEPTQPPDFALAYRPSFPEDREPQIPYPEPTWPPPLSAPRVPYHSSVLSVTRPVVVSATHPTLPSAHQPPVIPATHPALSRDHQIPVIAANYPDLPSAYQPGILSVSHSAQPPAHQPPMISTKYPELFPAHQSPMFPDTRVAGTQTTTHLPGIPPNHAPLVTTLGAQLPPQAPDALVLRTQATQLPIIPTAQPSLTTTSRSPVSPAHQISVPAATQPAALPTLLPSQSPTNQTSPISPTHPHSKAPQIPREDGPSPKLALWLPSPAPTAAPTALGEAGLAEHSQRDDRWLLVALLVPTCVFLVVLLALGIVYCTRCGPHAPNKRITDCYRWVIHAGSKSPTEPMPPRGSLTGVQTCRTSV

SEQ ID NO: 54948 - protein, 73 aa, Homo sapiens
LDLSSEWWDDKLHARGSSRSWDSLPPSKRKKAPLVSGPYIVYMLQEIDILEDWTAIKKARAAVSPQKRKSDGP

SEQ ID NO: 54949 - protein, 30 aa, Homo sapiens
KEAENQHNKILYRQFKQELKAKYPNSPRRC

SEQ ID NO: 54950 - protein, 35 aa, Homo sapiens
VTSLLLLPGLNQHGIISKYIGVAKRELTKLLKQKE

SEQ ID NO: 54951 - protein, 79 aa, Homo sapiens
LQSSPDFCMKNEKVGSHGTQDRQCNKTSNGSDSCDLMCCGRGYNPYTDRVVERCHCKYHWCCYVTCRRCERTVERYVCK

SEQ ID NO: 54952 - protein, 155 aa, Homo sapiens
VLGQRGVSINQFCKEFNERTKDIKEGIPLPTKILVKPDRTFEIKIGQPTVSYFLKAAAGIEKGARQTGKEVAGLVTLKHVYEIARIKAQDEAFALQDVPLSSVVRSIIGSARSLGIRVVKDLSSEELAAFQKERAIFLAAQKEADLAAQEEAAKK

SEQ ID NO: 54953 - protein, 137 aa, Homo sapiens
VALKNFAKYFLHQSHEEREHAEKLMKLQNQRGGRIFLQDIKKPDCDDWESGLNVMECALHLEKNVNQSLLELHKLATDKNDPHLCDFIETHYLNEQVKAIKELDDHVTNLHKMGALESGLAEYLFDKHTLGDSDNES

SEQ ID NO: 54954 - protein, 83 aa, Homo sapiens
TKVVQPQEEIATKKLRLTKPSKSAALHIDLCKATSPADALQYLLQFARKPVEAESVEGVVRILLEHYYKRWSLSVLPRLVANS

SEQ ID NO: 54955 - protein, 147 aa, Homo sapiens
ITLNQRVQTVHFTVREAPQIYSLSSSSMEVFNANIFSTSCLFLKLLGSKLFYCSNGNLSSITSHLQDPNHLTLDWVANVEGLPEEEYTKQNLKRLWVVPANKQINSFQVFVEEVLKIALSDGFCIDSSHPHALDFMNNKIIRLIRYR

SEQ ID NO: 54956 - protein, 657 aa, Homo sapiens
LLLLALLTLGLAAQHQDKVPCKMVDKKVSCQVLGLLQVPSVLPPDTETLDLSGNQLRSILASPLGFYTALRHLDLSTNEISFLQPGAFQALTHLEHLSLAHNRLAMATALSAGGLGPLPRVTSLDLSGNSLYSGLLERLLGEAPSLHTLSLAENSLTRLTRHTFRDMPALEQLDLHSNVLMDIEDGAFEGLPRLTHLNLSRNSLTCISDFSLQQLRVLDLSCNSIEAFQTASQPQAEFQLTWLDLRENKLLHFPDLAALPRLIYLNLSNNLIRLPTGPPQDSKGIHAPSEGWSALPLSAPSGNASGRPLSQLLNLDLSYNEIELIPDSFLEHLTSLCFLNLSRNCLRTFEARRLGSLPCLMLLDLSHNALETLELGARALGSLRTLLLQGNALRDLPPYTFANLASLQRLNLQGNRVSPCGGPDEPGPSGCVAFSGITSLRSLSLVDNEIELLRAGAFLHTPLTELDLSSNPGLEVATGALGGLEASLEVLALQGNGLMVLQVDLPCFICLKRLNLAENRLSHLPAWTQAVSLEVLDLRNNSFSLLPGSAMGGLETSLRRLYLQGNPLSCCGNGWLAAQLHQGRVDVDATQDLICRFSSQEEVSLSHVRPEDCEKGGLKNINLIIILTFILVSAILLTTLAACCCVRRQKFNQQYKA

SEQ ID NO: 54957 - protein, 30 aa, Homo sapiens
RGTESAPVGGQMSLAPPAVWPSPASPPSAA

SEQ ID NO: 54958 - protein, 540 aa, Homo sapiens
MLAMAWRGAGPSVPGAPGGVGLSLGLLLQLLLLLGPARGFGDEEERRCDPIRISMCQNLGYNVTKMPNLVGHELQTDAELQLTTFTPLIQYGCSSQLQFFLCSVYVPMCTEKINIPIGPCGGMCLSVKRRCEPVLKEFGFAWPESLNCSKFPPQNDHNHMCMEGPGDEEVPLPHKTPIQPGEECHSVGTNSDQYIWVKRSLNCVLKCGYDAGLYSRSAKEFTDIWMAVWASLCFISTAFTVLTFLIDSSRFSYPERPIIFLSMCYNIYSIAYIVRLTVGRERISCDFEEAAEPVLIQEGLKNTGCAIIFLLMYFFGMASSIWWVILTLTWFLAAGLKWGHEAIEMHSSYFHIAAWAIPAVKTIVILIMRLVDADELTGLCYVGNQNLDALTGFVVAPLFTYLVIGTLFIAAGLVALFKIRSNLQKDGTKTDKLERLMVKIGVFSVLYTVPATCVIACYFYEISNWALFRYSADDSNMAVEMLKIFMSLLVGITSGMWIWSAKTLHTWQKCSNRLVNSGKVKREKRGNGWVKPGKGSETVV

SEQ ID NO: 54959 - protein, 233 aa, Homo sapiens
RPRGHFSPALRREFFTTTTKEGYDRRPVDITPLEQRKLTFDTHALVQDLETHGFDKTQAETIVSALTALSNVSLDTIYKEMVTQAQQEITVQQLMAHLDAIRKDMVILEKSEFANLRAENEKMKIELDQVKQQLMHETSRIRADNKLDINLERSRVTDMFTDQEKQLMETTTEFTKKDTQTKSIISETSNKIDAEIASLKTLMESNKLETIRYLAASVFTCLAIALGFYRFWK

SEQ ID NO: 54960 - protein, 23 aa, Homo sapiens
MHWFRTWKLMDLTKHKQKQLYQR

SEQ ID NO: 54961 - protein, 573 aa, Homo sapiens
KKKHLDYLIQCTNEMNVNIPQLADSLFERTTNSSWVVVFKSLITTHHLMVYGNERFIQYLASRNTLFNLSNFLDKSGLQGYDMSTFIRRYSRYLNEKAVSYRQVAFDFTKVKRGADGVMRTMNTEKLLKTVPIIQNQMDALLDFNVNSNELTNGVINAAFMLLFKDAIRLFAAYNEGIINLLEKYFDMKKNQCKEGLDIYKKFLTRMTRISEFLKVAEQVGIDRGDIPDLSQAPSSLLDALEQHLASLEGKKIKDSTAASRATTLSNAVSSLASTGLSLTKVDEREKQAALEEEQARLKALKEQRLKELAKKPHTSLTTAASPVSTSAGGIMTAPAIDIFSTPSSSNSTSKLPNDLLDLQQPTFHPSVHPMSTASQVASTWGGFTPSPVAQPHPSAGLNVDFESVFGNKSTNVIVDSGGFDELGGLLKPTVASQNQNLPVAKLPPSKLVSDDLDSSLANLVGNLGIGNGTTKNDVNWSQPGEKKLTGGSNWQPKVAPTTAWNAATMNGMHFPQYAPPVMAYPATTPTGMIGYGIPPQMGSVPVMTQPTLIYSQPVMRPPNPFGPVSGAQIQFM

SEQ ID NO: 54962 - protein, 85 aa, Homo sapiens
LATKGCTNNRLECCNNEWHAFSTIRTPCNGLSCYYTNRHDRIWNSSTNGKCSCNDATNLNIQPACHETSKPLWPCIRSTDTVYVT

SEQ ID NO: 54963 - protein, 33 aa, Homo sapiens
RRSKENGWIKEKYGQLEEYLNFADYFQEEKFEL

SEQ ID NO: 54964 - protein, 285 aa, Homo sapiens
LGRAGAGWRLCSSACCCLWELGASAEGLPADRDPLPRLPCPPCRGGRKMPVKKKRKSPGVAAAVAEDGGLKKCKISSYCRSQPPARLISGEEHFSSKKCLAWFYEYAGPDEVVGPEGMEKFCEDIGVEPENIIMLVLAWKLEAESMGFFTKEEWLKGMTSLQCDCTEKLQNKFDFLRSQLNDISSFKNIYRYAFDFARDKDQRSLDIDTAKSMLALLLGRTWPLFSVFYQYLEQSKYRVMNKDQWYNVLEFSRTVHADLSNYDEDGAWPVLLDEFVEWQKVRQTS

SEQ ID NO: 54965 - protein, 17 aa, Homo sapiens
IKSVSMKIRRMYNPYFK

SEQ ID NO: 54966 - protein, 190 aa, Homo sapiens [sequence omitted]

SEQ ID NO: 54967 - protein, 72 aa, Homo sapiens
VYLQKLDTAYDDLGNSGHFTIIYNQGFEIVLNDYKWFAFFKDVTDFISHLFMQLGTVGIYDLPHLRNKLVIK

SEQ ID NO: 54968 - protein, 307 aa, Homo sapiens
KNSQEKYSNRLYKYDHNFVKAINAIQKSWTATTYMEYETLTLGDMIRRSGGHSRKIPRPKPAPLTAEIQQKILHLPTSWDWRNVHGINFVSPVRNQASCGSCYSFASMGMLEARIRILTNNSQTPILSPQEVVSCSQYAQGCEGGFPYLIAGKYAQDFGLVEEACFPYTGTDSPCKMKEDCFRYYSSEYHYVGGFYGGCNEALMKLELVHHGPMAVAFEVYDDFLHYKKGIYHHTGLRDPFNPFELTNHAVLLVGYGTDSASGMDYWIVKNSWGTGWGENGYFRIRRGTDECAIESIAVAATPIPKL

SEQ ID NO: 54969 - protein, 236 aa, Homo sapiens
IQAPKPVEAIKRPSPDEPMTNLELKISASLKQALDKLKLSSGNEENKKEEDNDEIKIGTSCKNGGCSKTYQGLESLEEVCVYHSGVPIFHEGMKYWSCCRRKTSDFNTFLAQEGCTKGKHMWTKKDAGKKVVPCRHDWHQTGGEVTISVYAKNSLPELSRVEANSTLLNVHIVFEGEKEFDQNVKLWGVIDVKRSYVTMTATKIEITMRKAEPMQWASLELPAAKKQEKQKDATTD

SEQ ID NO: 54970 - protein, 110 aa, Homo sapiens
IYITLYISECLKKLQKCNSKSQGEKEMYTLGITNFPIPGKPGFLLNAIYAKPANKQEDEVMRAYLQQLRQETGLRLCEKVFDPQNDKPSKWWTCFVKRQFMNKSLSGPGQ

SEQ ID NO: 54971 - protein, 7 aa, Homo sapiens
MSTADAL

SEQ ID NO: 54972 - protein, 202 aa, Homo sapiens
KQYSSRDLPSHTKIKYRQTTQDAPEEVRNRDFRRELEERERAAAREKNRDRPTREHTTSSSVSKKPRLDQIPAANLDADDPLTDEEDEDFEEESDDDDTAALLAELEKIKKERAEEQARKEQEQKAEEERIRMENILSGNPLLNLTGPSQPQANFKVKRRWDDDVVFKNCAKGVDDQKKDKRFVNDTLRSEFHKKFMEKYIK

SEQ ID NO: 54973 - protein, 59 aa, Homo sapiens
KADFQYQESNLRTKMNSMEKAHKETVEQLQAKNRELLKQVAALSKGKKFDKSGSILTSP

SEQ ID NO: 54974 - protein, 7 aa, Homo sapiens
MVQKSNY

SEQ ID NO: 54975 - protein, 55 aa, Homo sapiens
IGRLIEHMQEYACSCDVEEIFRKVRFSFEQPDGRAQMPTTERVTLTRCFYLFPGH

SEQ ID NO: 54976 - protein, 203 aa, Homo sapiens
VEEEERDPQSPEFEIEEEEEMLSSVIPDSRRENELPDFPHIDEFFTLNSTPSRSAYDEPHLLVNIEKQKLELEKRRLDIEAERLQVEKERLQIEKERLRHLDMEHERLQLEKERLQIEREKLRLQIVNSEKPSLENELGQGEKSMLQPQDIETEKLKLERERLQLEKDRLQFLKFESEKLQIEKERLQVEKDRLRIQKEGHLQ

SEQ ID NO: 54977 - skipped

SEQ ID NO: 54978 - protein, 39 aa, Homo sapiens
IGETDLEETFENLILNQMNLSSYGEDLLDPNIDIEDYFD

SEQ ID NO: 54979 - protein, 475 aa, Homo sapiens
LVWGPGLQAAVVLPVRYFYLQAVNSEGQNLTRSPAGETPFKVVVKSLSPKELVRIHVPKPLDRNDGTFLMRYRMYETVDEGLKIEVLYGDEHVAQSPYILKGPVYHEYCECPEDPQAWQKTLSCPTKEPQIAKDFASFPSINLQQMLKEVPKRFGDERGAIVHYTILNNHVYRRSLGKYTDFKMFSDEILLSLTRKVLLPDLEFYVNLGDWPLEHRKVNGTPSPIPIISWCGSLDSRDVVLPTYDITHSMLEAMRGVTNDLLSIQGNTGPSWINKTERAFFRGRDSREERLQLVQLSKENPQLLDAGITGYFFFQEKEKELGKAKLMGFFDFFKYKYQVNVDGTVAAYRYPYLMLGDSLVLKQDSPYYEHFYMALEPWKHYVPIKRNLSDLLEKVKWAKENDEEAKKIAKEGQLMARDLLQPHRLYCYYYQVLQKYAERQSSKPEVRDGMELVPQPEDSTAICQCHRKKPSREEL

SEQ ID NO: 54980 - protein, 587 aa, Homo sapiens
KRKKMPKPINVRVTTMDAELEFAIQPNTTGKQLFDQVVKTVGLREVWFFGLQYVDSKGYSTWLKLNKKVTQQDVKKENPLQFKFRAKFFPEDVSEELIQEITQRLFFLQVKEAILNDEIYCPPETAVLLASYAVQAKYGDYNKEIHKPGYLANDRLLPQRVLEQHKLTKEQWEERIQNWHEEHRGMLREDSMMEYLKIAQDLEMYGVNYFEIKNKKGTELWLGVDALGLNIYEHDDKLTPKIGFPWSEIRNISFNDKKFVIKPIDKKAPDFVFYAPRLRINKRILALCMGNHELYMRRRKPDTIEVQQMKAQAREEKHQKQLERAQLENEKKKREIAEKEKERIEREKEELMERLKQIEEQTIKAQKELEEQTRKALELDQERKRAKEEAERLEKERRAAEEAKSAIAKQAADQMKNQEQLAAELAEFTAKIALLEEAKKKKEEEATEWQHKAFAAQEDLEKTKEELKTVMSAPPPPPPPPVIPPTENEHDEHDENNAEASAELSNEGVMNHRSEEERVTETQKNERVKKQLQALSSELAQARDETKKTQNDVLHAENVKAGRDKYKTLRQIRQGNTKQRIDEFEAM

SEQ ID NO: 54981 - protein, 188 aa, Homo sapiens
LTSQLTPHTHLATMDIAIHHPWIRRPFFPFHSPSRLFDQFFGEHLLESDLFPTSTSLSPFYLRPPSFLRAPSWFDTGLSEMRLEKDRFSVNLDVKHFSPEELKVKVLGDVIEVHGKHEERQDEHGFISREFHRKYRIPADVDPLTITSSLSSDGVLTVNGPRKQVSGPERTIPITREEKPAVTAAPKK

SEQ ID NO: 54982 - protein, 46 aa, Homo sapiens
LQEIGDRWADGKGPLAAAFSSSEVKALIRALFQNTERRAAALAKIK

SEQ ID NO: 54983 - protein, 106 aa, Homo sapiens
LEGLLKDIRELVTKNPFTLGDSSNPGQTERLQEFSQKMDQIIEGNMKAHFIMDDPAGNSYLQNVYAPEDDPEMKVERYKRTFDQNEELGLNDMKTEGYEAGLAPQR

SEQ ID NO: 54984 - protein, 47 aa, Homo sapiens
LGGHEHPDLSDGSQHLNSSCYPSTCITDILLSYKHPEVSFSMEQAGV

SEQ ID NO: 54985 - skipped

SEQ ID NO: 54986 - protein, 173 aa, Homo sapiens
VCWQAGTTPWNIFPVISLYLMGEVTNQSFRITILPQQYLRPVEDVATSQDDCYKFAISQSSTGTVMGAVIMEGFYVVFDRARKRIGFAVSACHVHDEFRTAAVEGPFVTLDMEDCGYNIPQTDESTLMTIAYVMAAICALFMLPLCLMVCQWRCLRCLRQQHDDFADDISLLK

SEQ ID NO: 54987 - protein, 81 aa, Homo sapiens
KVSLPTAEIDCSLAEYIDMICAILDIPVYKSRIQSLHLLFSLYSEFKNSQHFKALAEGKKAFTPSSNSTSQAGDMETLTFS

SEQ ID NO: 54988 - protein, 40 aa, Homo sapiens
MGPPPQQNLMVSHPLRQRSVSLDSQMGYLPAPGGMANLPF

SEQ ID NO: 54989 - protein, 144 aa, Homo sapiens
VPPRSAFSAKRSESRVPPPSDAPLPFDRVLVNEQGHYDAVTGKFTCQVPGVYYFAVHATVYRASLQFDLVKNGESIASFFQFFGGWPKPASLSGGAMVRLEPEDQVWVQVGVGDYIGIYASIKTDSTFSGFLVYSDWHSSPVFA

SEQ ID NO: 54990 - protein, 112 aa, Homo sapiens
KSAKKDKDPVNKSGGKAKKKKWSKGKVRDKLNNLVLFDKATYDKLCKEVPNYKLITPAVVSERLKIRGSLARAALQELLSKGLIKLVSKHRAQVIYTRNTKGGDAPAAGEDA

SEQ ID NO: 54991 - protein, 355 aa, Homo sapiens
IPESQGVISGAVFLIILFCFIPFPFLNCFVKEQCKAFPHHEFVALIGALLAICCMIFLGFADDVLNLRWRHKLLLPTAASLPLLMVYFTNFGNTTIVVPKPFRPILGLHLDLGILYYVYMGLLAVFCTNAINILAGINGLEAGQSLVISASIIVFNLVELEGDCRDDHVFSLYFMIPFFFTTLGLLYHNWYPSRVFVGDTFCYFAGMTFAVVGILGHFSKTMLLFFMPQVFNFLYSLPQLLHIIPCPRHRIPRLNIKTGKLEMSYSKFKTKSLSFLGTFILKVAESLQLVTVHQSETEDGEFTECNNMTLINLLLKVLGPIHERNLTLLLLLLQILGSAITFSIRYQLVRLFYDV

SEQ ID NO: 54992 - protein, 59 aa, Homo sapiens
LPCRRSGKQEITLPPSRKSELVVEVKSDKLPEEMGLLQGSSGDKRAPGDQGEKYIDLRH

SEQ ID NO: 54993 - protein, 68 aa, Homo sapiens
VIITSVLLLFPRAGEFPAPEVEVKIVDDFFIGRYVLLAFLSAIFLGGLFLVLIHYVLEPIYAKPLHSY

SEQ ID NO: 54994 - protein, 14 aa, Homo sapiens
VTTAPSPKQAPEQQ

SEQ ID NO: 54995 - protein, 339 aa, Homo sapiens
ISFKSMEDLVNEFDEKLNVCFRNYNAKTENLAPVKNQLQIQEEEETLQDEEVWDALTDNYIPSLSEDWRDPNIEALNGNCSDTEIHEKEEEEFNEKSENDSGINEEPLLTADQVIEEIEEMMQNSPDPEEEEEVLEEEDGGETSSQADSVLLQEMQALTQTFNNNWSYEGLRHMSGSELTELLDQVEGAIRDFSEELVQQLARRDELEFEKEVKNSFITVLIEVQNKQKEQRELMKKRRKEKGLSLQSSRIEKGNQMPLKRFSMEGISNILQSGIRQTFGSSGTDKQYLNTVIPYEKKASPPSVEDLQMLTNILFAMKEDNEKVPTLLTDYILKVLCPT

SEQ ID NO: 54996 - protein, 85 aa, Homo sapiens
VEPVPTQRTCCQDIVNDVSSDGSEDPAEFSRGDSCAHSETEINIVSWNALILPPVPEGCAEKTMWSPPGIPLDSPTEVLQQPRET

SEQ ID NO: 54997 - protein, 629 aa, Homo sapiens
KGGLVLWCFQGVSDSCTGPVNALIRSVLLQERGGNNSFTHEALTLKYKLDNQFELVFVVGFQKILTLTYVDKLIDDVHRLFRDKYRTEIQQQSALSLLNGTFDFQNDFLRLLREAEESSKIRAPTTMKKFEDSEKAKKPVRSMIETRGEKPKEKAKNSKKKGAKKEGSDGPLATSKPVPAEKSGLPVGPENGVELSKEELIRRKREEFIQKHGRGMEKSNKSTKSDAPKEKGKKAPRVWELGGCANKEVLDYSTPTTNGTPEAALSEDINLIRGTGSGGQLQDLDCSSSDDEGAAQNSTKPSATKGTLGGMFGMLKGLVGSKSLSREDMESVLDKMRDHLIAKNVAADIAVQLCESVANKLEGKVMGTFSTVTSTVKQALQESLVQILQPQRRVDMLRDIMDAQRRQRPYVVTFCGVNGVGKSTNLAKISFWLLENGFSVLIAACDTFRAGAVEQLRTHTRRLSALHPPEKHGGRTMVQLFEKGYGKDAAGIAMEAIAFARNQGFDVVLVDTAGRMQDNAPLMTALAKLITVNTPDLVLFVGEALVGNEAVDQLVKFNRALADHSMAQTPRLIDGIVLTKFDTIDDKVGAAISMTYITSKPIVFVGTGQTYCDLRSLNAKAVVAALMKA

SEQ ID NO: 54998 - protein, 109 aa, Homo sapiens
IWPGGVLPKFPRPVRTQEQKLAAEKQALQSLMGVLPDLVVEILGVNKCRLSWGLVLESLQQPLINRHLIYCLGDIILEFLDLSASVEESAATTSASDTPGNSKRMGVSS

SEQ ID NO: 54999 - protein, 236 aa, Homo sapiens
IVRTKVPCSVTMSRPRKRLAGTSGSDKGLSGKRTKTENSGEALAKVEDSNPQKTSATKNCLKNLSSHWLMKSEPESRLEKGVDVKFSIEDLKAQPKQTTCWDGVRNYQARNFLRAMKLGEEAFFYHSNCKEPGIAGLMKIVKEAYPDHTQFEKNNPHYDPSSKEDNPKWSMVDVQFVRMMKRFIPLAELKSYHQAHKATGGPLKNMVLFTRQRLSIQPLTQEEFDFVLSLEEKEPS

SEQ ID NO: 55000 - protein, 52 aa, Homo sapiens
RPETEPLLSFVASVSPADRMLTVTPLQDPQGLFPDLHHFLQVFLPQAIRHLK

SEQ ID NO: 55001 - protein, 432 aa, Homo sapiens
LYTYPENWRAFKALIAAQYSGAQVRVLSAPPHFHFGQTNRTPEFLRKFPAGKVPAFEGDDGFCVFESNAIAYYVSNEELRGSTPEAAAQVVQWVSFADSDIVPPASTWVFPTLGIMHHNKQATENAKEEVRRILGLLDAYLKTRTFLVGERVTLADITVVCTLLWLYKQVLEPSFRQAFPNTNRWFLTCINQPQFRAVLGEVKLCEKMAQFDAKKFAETQPKKDTPRKEKGSREEKQKPQAERKEEKKAAAPAPEEEMDECEQALAAEPKAKDPFAHLPKSTFVLDEFKRKYSNEDTLSVALPYFWEHFDKDGWSLWYSEYRFPEELTQTFMSCNLITGMFQRLDKLRKNAFASVILFGTNNSSSISGVWVFRGQELAFPLSPDWQVDYESYTWRKLDPGSEETQTLVREYFSWEGAFQHVGKAFNQGKIFK

SEQ ID NO: 55002 - protein, 418 aa, Homo sapiens
IRAHDQPGDKWLVIERRVYDISRWAQRHPGGSRLIGHHGAEDATDAFRAFHQDLNFVRKFLQPLLIGELAPEEPSQDGPLNAQLVEDFRALHQAAEDMKLFDASPTFFAFLLGHILAMEVLAWLLIYLLGPGWVPSALAAFILAISQAQSWCLQHDLGHASIFKKSWWNHVAQKFVMGQLKGFSAHWWNFRHFQHHAKPNIFHKDPDVTVAPVFLLGESSVEYGKKKRRYLPYNQQHLYFFLIGPPLLTLVNFEVENLAYMLVCMQWADLLWAASFYARFFLSYLPFYGVPGVLLFFVAVRVLESHWFVWITQMNHIPKEIGHEKHRDWVSSQLAATCNVEPSLFTNWFSGHLNFQIEHHLFPRMPRHNYSRVAPLVKSLCAKHGLSYEVKPFLTALVDIVRSLKKSGDIWLDAYLHQ

SEQ ID NO: 55003 - protein, 151 aa, Homo sapiens
RESPTLDKTCPFLERVYREDVGPCLDFTMQELSVLVRAAVEDNTLTIEPVASQTLPTVKVAEVDCSSTNTCALSGLTRTCRHRIRLGDSKSHYYISPSSRARITAVCNFFTYIRYIQQGLVRQDAEPMFWEIMRLRKEMSLAKLGFFPQEA

SEQ ID NO: 55004 - protein, 12 aa, Homo sapiens
LGLAPAMAVPWG

SEQ ID NO: 55005 - protein, 4 aa, Homo sapiens
RLFL

SEQ ID NO: 55006 - protein, 374 aa, Homo sapiens
RTPEPDIRLRKGHQLDGTRRGDNDSHQGDLEPILEASVLSSHHKKSSEEHEYSDEAPQEDEGFMGMSPLLQAHHAMEKMEEFVCKVWEGRWRVIPHDVLPDWLKDNDFLLHGHRPPMPSFRACFKSIFRIHTETGNIWTHLLGCVFFLCLGIFYMFRPNISFVAPLQEKVVFGLFFLGAILCLSFSWLFHTVYCHSEGVSRLFSKLDYSGIALLIMGSFVPWLYYSFYCNPQPCFIYLIVICVLGIAAIIVSQWDMFATPQYRGVRAGVFLGLGLSGIIPTLHYVISEGFLKAATIGQIGWLMLMASLYITGAALYAARIPERFFPGKCDIWFHSHQLFHIFVVAGAFVHFHGVSNLQEFRFMIGGGCSEEDAL

SEQ ID NO: 55007 - protein, 58 aa, Homo sapiens
RQLAREKKLYANMFERLAEEENKAKAEASSGDHPTDTEMKEEQKSNTAGSQSQVETEA

SEQ ID NO: 55008 - protein, 60 aa, Homo sapiens
IDGPAAVLKPDEVHAPSVSSSVVEEDAENTVDTASKPGLQERLQKHGYRHFRFCYCRPTS

SEQ ID NO: 55009 - protein, 220 aa, Homo sapiens
MYLEKEENQKIFLLAARKRKKSKTANYLISIDPVDLSREGESYVGKLRSNLMGTKFTVYDRGICPMKGRGLVGAAHTRQELAAISYETNVLGFKGPRKMSVIIPGMTLNHKQIPYQPQNNHDSLLSRWQNRTMENLVELHNKAPVWNSDTQSYVLNFRGRVTQASVKNFQIVHKNDPDYIVMQFGRVADDVFTLDYNYPLCAVQAFGIGLSSFDSKLACE

SEQ ID NO: 55010 - protein, 243 aa, Homo sapiens
KKCNMARGCLCCLKYMMFLFNLIFWLCGCGLLGVGIWLSVSQGNFATFSPSFPSLSAANLVIAIGTIVMVTGFLGCLGAIKENKCLLLSFFIVLLVILLAELILLILFFVYMDKVNENAKKDLKEGLLLYHTENNVGLKNAWNIIQAEMRCCGVTDYTDWYPVLGENTVPDRCCMENSQGCGRNATTPLWRTGCYEKVKMWFDDNKHVLGTVGMCILIMQILGMAFSMTLFQHIHRTGKKYDA

SEQ ID NO: 55011 - protein, 22 aa, Homo sapiens
IQGELKNLKSKVFGLENELRLC

SEQ ID NO: 55012 - protein, 25 aa, Homo sapiens
MTAAPLLPPPARPPLAAGWMRTVRR

SEQ ID NO: 55013 - protein, 269 aa, Homo sapiens
VTATATSQVAQQPPAAAAPGEQAVAGPAPSTVPSSTSKDRPVSQPSLVGSKEEPPPARSGSGGGSAKEPQEERSQQQDDIEELETKAVGMSNDGRFLKFDIEIGRGSFKTVYKGLDTETTVEVAWCELQDRKLTKSERQRFKEEAEMLKGLQHPNIVRFYDSWESTVKGKKCIVLVTELMTSGTLKTYLKRFKVMKIKVLRSWCRQILKGLQFLHTRTPPIIHRDLKCDNIFITGPTGSVKIGDLGLATLKRASFAKSVIGMFQVYLGA

SEQ ID NO: 55014 - protein, 63 aa, Homo sapiens
MCPPQQYGFPATPFGAQWSGTGGPAPQPLGQFQPVGTASLQNFNISNLQKSISNPPGSNLRTT

SEQ ID NO: 55015 - protein, 93 aa, Homo sapiens
LTDANSWWSLALNPVQRPEMFIIGAQPVCSQLPGLSPGQRKLCQLYQEHMAYIGEGAKTGIKECQHQFRQRRWNCSTADNASVFGRVMQIGCV

SEQ ID NO: 55016 - protein, 177 aa, Homo sapiens
KNFAKGSEEQGRVLMNLQNNEAGRRAVYKMADVACKCHGVSGSCSLKTCWLQLAEFRKVGDRLKEKYDSAAAMRVTRKGRLELVNSRFTQPTPEDLVYVDPSPDYCLRNESTGSLGTQGRLCNKTSEGMDGCELMCCGRGYNQFKSVQVERCHCKFHWCCFVRCKKCTEIVDQYICK

SEQ ID NO: 55017 - protein, 6 aa, Homo sapiens
VRDIDL

SEQ ID NO: 55018 - protein, 253 aa, Homo sapiens
KEKIIQGQGVDEPLSETGFKQAAAAGIFLNNVKFTHAFSSDLMRTKQTMHGILERSKFCKDMTVKYDSRLRERKYGVVEGKALSELRAMAKAAREECPVFTPPGGETLDQVKMRGIDFFEFLCQLILKEADQKEQFSQGSPSNCLETSLAEIFPLGKNHSSKVNSDSGIPGLAASVLVVSHGAYMRSLFDYFLTDLKCSLPATLSRSELMSVTPNTGMSLFIINFEEGREVKPTVQCICMNLQDHLNGLTETR

SEQ ID NO: 55019 - protein, 39 aa, Homo sapiens
LVDAPKKSEAAVGAEVSMTSPGQSKNFSLKNTNVLPPIV

SEQ ID NO: 55020 - protein, 260 aa, Homo sapiens
LLLAKSAKGAALATLIHQVLEAPGVYVFGELLDMPNVRELAESDFASTFRLLTVFAYGTYADYLAEARNLPPLTEAQKNKLRHLSVVTLAAKVKCIPYAVLLEALALRNVRQLEDLVIEAVYADVLRGSLDQRNQRLEVDYSIGRDIQRQDLSAIARTLQEWCVGCEVVLSGIEEQVSRANQHKEQQLGLKQQIESEVANLKKTIKVTTAAAAAATSQDPEQHLTELREPAPGTNQRQPSKKASKGKGLRGSAKIWSKSN

SEQ ID NO: 55021 - protein, 85 aa, Homo sapiens
KEKKEKVEEKASRKERKKEVVEEEENGAEEEEEETAEDGEEEDEGEEEDEEEEEEDDEGPALKRAAEEEDEADPKRQKTENGASA

SEQ ID NO: 55022 - protein, 52 aa, Homo sapiens
IEAKELLQESQEEEEEEEEEMPSKDPSPEPPSRRHQRVQDKTGRAPRVREEL

SEQ ID NO: 55023 - protein, 778 aa, Homo sapiens
VERHFNKTGQRVYLHLRRTRRPKEEDPATGTGDPPRKKPTRLAIGVEGGFDLSEEKFELDEDVKIVILPDYLEIARDGLGGLPDIVRDRVTSAVEALLSADSASRKQEVQAWDGEVRQVSKHAFSLKQLDNPARIPPCGWKCSKCDMRENLWLNLTDGSILCGRRYFDGSGGNNHAVEHYRETGYPLAVKLGTITPDGADVYSYDEDDMVLDPSLAEHLSHFGIDMLKMQKTDKTMTELEIDMNQRIGEWELIQESGVPLKPLFGPGYTGIRNLGNSCYLNSVVQVLFSIPDFQRKYVDKLEKIFQNAPTDPTQDFSTQVAKLGHGLLSGEYSKPVPESGDGERVPEQKEVQDGIAPRMFKALIGKGHPEFSTNRQQDAQEFFLHLINMVERNCRSSENPNEVFRFLVEEKIKCLATEKVKYTQRVDYIMQLPVPMDAALNKEELLEYEEKKRQAEEEKMALPELVRAQVPFSSCLEAYGAPEQVDDFWSTALQAKSVAVKTTRFASFPDYLVIQIKKFTFGLDWVPKKLDVSIEMPEELDISQLRGTGLQPGEEELPDIAPPLVTPDEPKAPMLDESVIIQLVEMGFPMDACRKAVYYTGNSGAEAAMNWVMSHMDDPDFANPLILPGSSGPGSTSAAADPPPEDCVTTIVSMGFSRDQALKALRATNNSLERAVDWIFSHIDDLDAEAAMDISEGRSAADSISESVPVGPKVRDGPGKYQLFAFISHMGTSTMCGHYVCHIKKEGRWVIYNDQKVCASEKPPKDLGYIYFYQRVAS

SEQ ID NO: 55024 - protein, 723 aa, Homo sapiens
LGGLPDIVRDRVTSAVEALLSADSASRKQEVQAWDGEVRQVSKHAFSLKQLDNPARIPPCGWKCSKCDMRENLWLNLTDGSILCGRRYFDGSGGNNHAVEHYRETGYPLAVKLGTITPDGADVYSYDEDDMVLDPSLAEHLSHFGIDMLKMQKTDKTMTELEIDMNQRIGEWELIQESGVPLKPLFGPGYTGIRNLGNSCYLNSVVQVLFSIPDFQRKYVDKLEKIFQNAPTDPTQDFSTQVAKLGHGLLSGEYSKPVPESGDGERVPEQKEVQDGIAPRMFKALIGKGHPEFSTNRQQDAQEFFLHLINMVERNCRSSENPNEVFRFLVEEKIKCLATEKVKYTQRVDYIMQLPVPMDAALNKEELLEYEEKKRQAEEEKMALPELVRAQVPFSSCLEAYGAPEQVDDFWSTALQAKSVAVKTTRFASFPDYLVIQIKKFTFGLDWVPKKLDVSIEMPEELDISQLRGTGLQPGEEELPDIAPPLVTPDEPKGSLGFYGNEDEDSFCSPHFSSPTSPMLDESVIIQLVEMGFPMDACRKAVYYTGNSGAEAAMNWVMSHMDDPDFANPLILPGSSGPGSTSAAADPPPEDCVTTIVSMGFSRDQALKALRATNNSLERAVDWIFSHIDDLDAEAAMDISEGRSAADSISESVPVGPKVRDGPGKYQLFAFISHMGTSTMCGHYVCHIKKEGRWVIYNDQKVCASEKPPKDLGYIYFYQRVAS

SEQ ID NO: 55025 - protein, 233 aa, Homo sapiens
KLALTMPVKGGTKCIKYLLFGFNFIFWLAGIAVLAIGLWLRFDSQTKSIFEQETNNNNSSFYTGVYILIGAGALMMLVGFLGCCGAVQESQCMLGLFFGFLLVIFAIEIAAAIWGYSHKDEVIKEVQEFYKDTYNKLKTKDEPQRETLKAIHYALNCCGLAGGVEQFISDICPKKDVLETFTVKSCPDAIKEVFDNKFHIIGAVGIGIAVVMIFGMIFSMILCCAIRRNREMV

SEQ ID NO: 55026 - protein, 433 aa, Homo sapiens
LPWATSAPGLAWGPLVLGLFGLLAASQPQAVPPYASENQTCRDQEKEYYEPQHRICCSRCPPGTYVSAKCSRIRDTVCATCAENSYNEHWNYLTICQLCRPCDPVMGLEEIAPCTSKRKTQCRCQPGMFCAAWALECTHCELLSDCPPGTEAELKDEVGKGNNHCVPCKAGHFQNTSSPSARCQPHTRCENQGLVEAAPGTAQSDTTCKNPLEPLPPEMSGTMLMLAVLLPLAFFLLLATVFSCIWKSHPSLCRKLGSLLKRRPQGEGPNPVAGSWEPPKAHPYFPDLVQPLLPISGDVSPVSTGLPAAPVLEAGVPQQQSPLDLTREPQLEPGEQSQVAHGTNGIHVTGGSMTITGNIYIYNGPVLGGPPGPGDLPATPEPPYPIPEEGDPGPPGLSTPHQEDGKAWHLAETEHCGATPSNRGPRNQFITHD

SEQ ID NO: 55027 - protein, 205 aa, Homo sapiens
RDASLTLPGLTIQDEGTYICQITTSLYRAQQIIQLNIQASPKVRLSLANEALLPTLICDIAGYYPLDVVVTWTREELGGSPAQVSGASFSSLRQSVAGTYSISSSLTAEPGSAGATYTCQVTHISLEEPLGASTQVVPPERRTALGVIFASSLFLLALMFLGLQRRQAPTGLGLLQAERWETTSCADTQSSHLHEDRTARVSQPS

SEQ ID NO: 55028 - protein, 11 aa, Homo sapiens
IQDLWQWRKSL

SEQ ID NO: 55029 - protein, 16 aa, Homo sapiens
KKTTPILRASARRHRS

SEQ ID NO: 55030 - protein, 138 aa, Homo sapiens
KESQEMDARPKLDLGFKEGQTIKLCIGNITNKKGGASKPRTARGGGLSLLPPPPGGKVTIPPPSSSVAISNHVTPPPIPKSNHGGSDADILLDLDSPAPVTTPAPTPVSVSNDLWGDFSTASSSVPNQAPQPSNWVQF

SEQ ID NO: 55031 - protein, 56 aa, Homo sapiens
VSNILGMDVCGIDLLMKDDGSFCVCEANANPFQEPKKQIQTNKKIPREKTFLLPPS

SEQ ID NO: 55032 - protein, 71 aa, Homo sapiens
MSLLSVVSTASETSEPELGPPASTAVDNMSASSSSVDSDPESTERELLTKLPGGLFNMNQLLANEIKLLVD

SEQ ID NO: 55033 - protein, 118 aa, Homo sapiens
IMKFQYKEDHPFEYRKKEGEKIRKKYPDRVPVIVEKAPKARVPDLDKRKYLVPSDLTVGQFYFLIRKRIHLRPEDALFFFVNNTIPPTSATMGQLYEDNHEEDYFLYVAYSDESVYGK

SEQ ID NO: 55034 - protein, 426 aa, Homo sapiens
IGHVAHGKSTVVKAISGVHTVRFKNELERNITIKLGYANAKIYQLDDPSCPRPECYRSCGSSMPDEFPTDIPGTKGNFRLVRHVSFVDCPGHDILMATMLNGAAVMDAALLLIAGNESCPQPQTSEHLAAIEIMKLKHILILQNKIDLVKERQAKEQYEQILAFVQGTVAEGAPIIPISAQLKYNIEVVCEYIVKKIPVPPRDFTSEPRLIVIRSFDVNKPGCEVDDLKGGVAGGSILKGVLKVGQETEVRPGIVSKDSEGKLMCKSIFSKIVSLFAEHNDLQYAAPGGLIGVGTKIDPTLCRADRMVGQILGAVGALPEIFTELEISYFLLRRLLGVRTEGDKKAAKVQKLSKNEVLMVNIGSLSTGGRVSAVKADLGKIVLTNPVCTEVGEKIALSRRVEKHWRLIGWGQIRRGVTIKPTVDDD

SEQ ID NO: 55035 - protein, 64 aa, Homo sapiens
MTYEKMSRALRHYYKLNIIRKEPGQRLLFRFMKTPDEIMSGRTDRLEHLESQELDEQIYQEDEC

SEQ ID NO: 55036 - protein, 34 aa, Homo sapiens
IDQTVPLLDRLNSMLPEGERLEPFSMKPDRELRL

SEQ ID NO: 55037 - protein, 25 aa, Homo sapiens
MEGEEEAAAAKGGVWGRLQGPLCHS

SEQ ID NO: 55038 - protein, 14 aa, Homo sapiens
ISPSSSGRGPGQAG

SEQ ID NO: 55039 - protein, 195 aa, Homo sapiens
VRVSNGSPSLERMDARQAEHPKPSACRNLFGPVDHEELTRDLEKHCRDMEEASQRKWNFDFQNHKPLEGKYEWQEVEKGSLPEFYYRPPRPPKGACKVPAQESQDVSGSRPAAPLIGAPANSEDTHLVDPKTDPSDSQTGLAEQCAGIRKRPATDDSSTQNKRANRTEENVSDGSPNAGSVEQTPKKPGLRRRQT

SEQ ID NO: 55040 - protein, 80 aa, Homo sapiens [sequence omitted]

SEQ ID NO: 55041 - protein, 131 aa, Homo sapiens
VIMSGRGKQGGKVRAKAKSRSSRAGLQFPVGRVHRLLRKGNYAERVGAGAPVYLAAVLEYLTAEILELAGNAARDNKKTRIIPRHLQLAIRNDEELNKLLGKVTIAQGGVLPNIQAVLLPKKTESQKTKSK

SEQ ID NO: 55042 - protein, 54 aa, Homo sapiens
MFEPTIVKVKSLKFATEAAITILRIDDLTKLHPESKDDKHGGYEDAVHSGALND

SEQ ID NO: 55043 - skipped

SEQ ID NO: 55044 - protein, 111 aa, Homo sapiens
MAAASSGDSIDMDFSFELFAHVTKFFNYKVVLLGKYNAQGLGSDHELMLRCTKGREYIKVVMQNGRMMGAVLIGETDLEETFENLILNQMNLSSYGEDLLDPNIDIEDYFD

SEQ ID NO: 55045 - protein, 36 aa, Homo sapiens
KAVGYICKCNGGRGAIREFAEHICLLMEKVNNSCQK

SEQ ID NO: 55046 - protein, 359 aa, Homo sapiens
IHVPPGSPEVPKLNVTVQDQEEHRCREGALSLLQHLRPHWDPQEVTLQLFTDGITNKLIGCYVGNTMEDVVLVRIYGNKTELLVDRDEEVKSFRVLQAHGCAPQLYCTFNNGLCYEFIQGEALDPKHVCNPAIFRLIARQLAKIHAIHAHNGWIPKSNLWLKMGKYFSLIPTGFADEDINKRFLSDIPSSQILQEEMTWMKEILSNLGSPVVLCHNDLLCKNIIYNEKQGDVQFIDYEYSGYNYLAYDIGNHFNEFAGVSDVDYSLYPDRELQSQWLRAYLEAYKEFKGFGTEVTEKEVEILFIQVNQFALASHFFWGLWALIQAKYSTIEFDFLGYAIVRFNQYFKMKPEVTALKVPE

SEQ ID NO: 55047 - protein, 277 aa, Homo sapiens
IDKSIKRREPKRKSLTFTGGAKGLMDIFGKGKETEFKQKVLNNCKTTADELKKLIRLQTEKLQSIEKQLESNEIEIRFWEQKYNSNLEEEIVRLEQKIKRNDVEIEEEEFWENELQIEQENEKQLKDQLQEIRQKITECENKLKDYLAQIRTMESGLEAEKLQREVQEAQVNEEEVKGKIGKVKGEIDIQGQQSLRLENGIKAVERSLGQATKRLQDKEQELEQLTKELRQVNLQQFIQQTGTKVTVLPAEPIEIEASHADIERGIIILSDKQECKD

SEQ ID NO: 55048 - protein, 152 aa, Homo sapiens
MESGLEAEKLQREVQEAQVNEEEVKGKIGKVKGEIDIQGQQSLRLENGIKAVERSLGQATKRLQDKEQELEQLTKELRQVNLQQFIQQTGTKVTVLPAEPIEIEASHADIEREAPFQSGSLKRPGSSRQLPSNLRILQNPISSGFNPEGIYV

SEQ ID NO: 55049 - protein, 287 aa, Homo sapiens
LPERTPGNERPPRRKALPPRTEKMAVDQDWPSVYPVAAPFKPSAVPLPVRMGYPVKKGVPMAKEGNLELLKIPNFLHLTPVAIKKHCEALKDFCTEWPAALDSDEKCEKHFPIEIDSTDYVSSGPSVRNPRARVVVLRVKLSSLNLDDHAKKKLIKLVGERYCKTTDVLTIKTDRCPLRRQNYDYAVYLLTVLYHESWNTEEWEKSKTEADMEEYIWENSSSERNILETLLQMKAAEKNMEINKEELLGTKEIEEYKKSVVSLKNEEENENSISQYKESVKRLLNVT

SEQ ID NO: 55050 - protein, 71 aa, Homo sapiens
TSKSGLNLTCALHNDGIYIMSRDVTLSTSLEHRVFLKYNIFSDSWEAFRRFPAFGHNLLVSSLYLPNKAET

SEQ ID NO: 55051 - protein, 150 aa, Homo sapiens
LEEERQRNKEALVSAAKLEKEAVKDAVLKVVEEERKNLEKAHAEERELWKTEHAKDQEKVSQEIQKAIQEQRKISQETVKAAIIEEQKRSEKAVEEAVKRTRDELIEYIKEQKRLDQVIRQRSLSSLELFLSCAQKQLSALIATEPVDIE

SEQ ID NO: 55052 - protein, 101 aa, Homo sapiens
KTEHAKDQEKVSQEIQKAIQEQRKISQETVKAAIIEEQKRSEKAVEEAVKRTRDELIEYIKEQKRLDQVIRQRSLSSLELFLSCAQKQLSALIATEPVDIE

SEQ ID NO: 55053 - protein, 181 aa, Homo sapiens
LGIAVTVVGFLMASISSSLLVRDTPFWAGIIVCLVAYLGLFMLCVSYQVDERTCIQFSMKLLYFLLSALGLTVCVLAVAFAAHHYSQLTQFTCETTLDSCQCKLPSSEPLSRTFVYRDVTDCTSVTGTFKLFLLIQMILNLVCGLVCLLACFVMWKHRYQVFYVGVRICSLTASEGPQQKI

SEQ ID NO: 55054 - protein, 64 aa, Homo sapiens
IEIDEQQGCKEQERIFQLEQENKGLREILQITRESFLNLRKDDASESTSLSALVTNSDLSLRKS

SEQ ID NO: 55055 - protein, 133 aa, Homo sapiens
VNSLADQFCNAIGVLQQCGPPASFNNIQTAINKDQPANPTEEYAQLFAALIARTAKDIDVLIDSLPSEESTAALQAASLYKLEEENHEAATCLEDVVYRGDMLLEKIQSALADIAQSQLKTRSGTHSQSLPDS

SEQ ID NO: 55056 - protein, 70 aa, Homo sapiens
KLRRSQHARKETEFLRLKRTRLGLDDFESLKVIGRGAFGEVRLVQKKDTGHIYAMKILRKSDMLEKEQVT

SEQ ID NO: 55057 - protein, 175 aa, Homo sapiens
IAPEVFMQTGYNKLCDWWSLGVIMYEMLIGYPPFCSETPQETYRKVMNWKETLVFPPEVPISEKAKDLILRFCIDSENRIGNSGVEEIKGHPFFEGVDWEHIRERPAAIPIEIKSIDDTSNFDDFPESDILQPVPNTTEPDYKSKDWVFLNYTYKRFEGLTQRGSIPTYMKAGKL

SEQ ID NO: 55058 - protein, 721 aa, Homo sapiens
MKGEGVEIVDRDIEVQKMKKAVESLMAANEEKDRKIEDLRQCLNRYKKMQDTVVLAQGKDGEYEELLNSSSISSLLDAQGFSDLEKSPSPTPVMGSPSCDPFNTSVPEEFHTTILQVSIPSLLPATVSMETSEKSKLTPKPETSFEENDGNIILGATVDTQLCDKLLTSSLQKSSSLGNLKKETSDGEKETIQKTSEDRAPAESRPFGTLPPRPPGQDTSMDDNPFGTRKVRSSFGRGFFKIKSNKRTASAPNLAETEKETAEHLDLAGASSRPKDSQRNSPFQIPPPSPDSKKKSRGIMKLFGKLRRSQSTTFNPDDMSEPEFKRGGTRATAGPRLGWSRDLGQSNSDLDMPFAKWTKEQVCNWLMEQGLGSYLNSGKHWIASGQTLLQASQQDLEKELGIKHSLHRKKLQLALQALGSEEETNHGKLDFNWVTRWLDDIGLPQYKTQFDEGRVDGRMLHYMTVDDLLSLKVVSVLHHLSIKRAIQVLRINNFEPNCLRRRPSDENTIAPSEVQKWTNHRVMEWLRSVDLAEYAPNLRGSGVHGGLMVLEPRFNVETMAQLLNIPPNKTLLRRHLATHFNLLIGAEAQHQKRDAMELPDYVLLTATAKVKPKKLAFSNFGNLRKKKQEDGEEYVCPMELGQASGSASKKGFKPGLDMRLYEEDDLDRLEQMEDSEGTVRQIGAFSEGINNLTHMLKEDDMFKDFAARSPSASITDEDSNV

SEQ ID NO: 55059 - protein, 661 aa, Homo sapiens
ISSLLDAQGFSDLEKSPSPTPVMGSPSCDPFNTSVPEEFHTTILQVSIPSLLPATVSMETSEKSKLTPKPETSFEENDGNIILGATVDTQLCDKLLTSSLQKSSSLGNLKKETSDGEKETIQKTSEDRAPAESRPFGTLPPRPPGQDTSMDDNPFGTRKVRSSFGRGFFKIKSNKRTASAPNLDRKRSASAPTLAETEKETAEHLDLAGASSRPKDSQRNSPFQIPPPSPDSKKKSRGIMKLFGKLRRSQSTTFNPDDMSEPEFKRGGTRATAGPRLGWSRDLGQSNSDLDMPFAKWTKEQVCNWLMEQGLGSYLNSGKHWIASGQTLLQASQQDLEKELGIKHSLHRKKLQLALQALGSEEETNHGKLDFNWVTRWLDDIGLPQYKTQFDEGRVDGRMLHYMTVDDLLSLKVVSVLHHLSIKRAIQVLRINNFEPNCLRRRPSDENTIAPSEVQKWTNHRVMEWLRSVDLAEYAPNLRGSGVHGGLMVLEPRFNVETMAQLLNIPPNKTLLRRHLATHFNLLIGAEAQHQKRDAMELPDYVLLTATAKVKPKKLAFSNFGNLRKKKQEDGEEYVCPMELGQASGSASKKGFKPGLDMRLYEEDDLDRLEQMEDSEGTVRQIGAFSEGINNLTHMLKEDDMFKDFAARSPSASITDEDSNV

SEQ ID NO: 55060 - protein, 174 aa, Homo sapiens
LAVEDGATEIDVVINRSLVLTGQWEALYDEIRQFRKACGEAHLKTILATGELGTLTNVYKASMIAMMAGSDFIKTSTGKETVNATFPVAIVMLRAIRDFFWKTGNKIGFKPAGGIRSAKDSLAWLSLVKEELGDEWLKPELFRIGASTLLSDIERQIYHHVTGRYAAYHDLPMS

SEQ ID NO: 55061 - protein, 25 aa, Homo sapiens
LGGSLPAGSAWLHLAAKLSFSIDRF

SEQ ID NO: 55062 - protein, 158 aa, Homo sapiens
IEKMVDLTQVMDDEVFMAFASYATIILSKMMLMSTATAFYRLTRKVFANPEDCVAFGKGENAKKYLRTDDRVERVRRAHLNDLENIIPFLGIGLLYSLSGPDPSTAILHFRLFVGARIYHTIAYLTPLPQPNRALSFFVGYGVTLSMAYRLLKSKLYL

SEQ ID NO: 55063 - protein, 99 aa, Homo sapiens
KQDPLVLYMYGAPQDVRAQATIPLLGYVVDEMPRSADLPHSFKLTQSKSVHSFAADSEELKQKWLKVILLAVTGETPGGPNEHPATLDDHPEPKKKSEC

SEQ ID NO: 55064 - protein, 56 aa, Homo sapiens
LTQSKSVHSFAADSEELKQKWLKVILLAVTGETPGGPNEHPATLDDHPEPKKKSEC

SEQ ID NO: 55065 - protein, 35 aa, Homo sapiens
IKNMITGTSQADCAVLIFAAGVGEFEAGISKNGQT

SEQ ID NO: 55066 - protein, 39 aa, Homo sapiens
LSDFIDPQEGWKKLAVAIKKPSGDDRYNQFHIRCCSQNC

SEQ ID NO: 55067 - protein, 51 aa, Homo sapiens
IEDYIDKKMNDADSTSVEAMYSVASQCLHEKKNKRPDIKKVQQLLQEMTAS

SEQ ID NO: 55068 - protein, 101 aa, Homo sapiens
IGTGGGHILLLDLSTRRLIRVIYNFCNSVRVMMTAQLGSLKNVMLVLGYNRKNTEGTQKQKEIQSCLTVWDINLPHEVQNLEKHIEVRKELAEKMRRTSVE

SEQ ID NO: 55069 - protein, 93 aa, Homo sapiens
VTHVMYMQDYWRTWLKGLRGFFFVGVLFSAVSIAAFCTFLVLAITRHQSLTDPTSYYLSSVWSFISFKWAFLLSLYAHRYRADFADISILSDF

SEQ ID NO: 55070 - protein, 551 aa, Homo sapiens
KITDEEATKSSYLNIVGLVGSIDNDFCGTDMTIGTDSALHRIMEIVDAITTTAQSHQRTFVLEVMGRHCGYLALVTSLSCGADWVFIPECPPDDDWEEHLCRRLSETRTRGSRLNIIIVAEGAIDKNGKPITSEDIKNGSRMGVEAVMALLEGTPDTPACVVSLSGNQAVRLPLMECVQVTKDVTKAMDEKKFDEALKLRGRSFMNNWEVYKLLAHVRPPVSKSGSHTVAVMNVGAPAAGMNAAVRSTVRIGLIQGNRVLVVHDGFEGLAKGQIEEAGWSYVGGWTGQGGSKLGTKRTLPKKSFEQISANITKFNIQGLVIIGGFEAYTGGLELMEGRKQFDELCIPFVVIPATVSNNVPGSDFSVGADTALNTICTANVEHLVQKMKTTVKRGLVLRNEKCNENYTTDFIFNLYSEEGKGIFDSRKNVLGHMQQGGSPTPFDRNFATKMGAKAMNWMSGKIKESYRNGRIFANTPDSGCVLGMRKRALVFQPVAELKDQTDFEHRIPKEQWWLKLRPILKILAKYEIDLDTSDHAHLEHITRKRSGEAAV

SEQ ID NO: 55071 - protein, 456 aa, Homo sapiens
LEGTPDTPACVVSLSGNQAVRLPLMECVQVTKDVTKAMDEKKFDEALKLRGRSFMNNWEVYKLLAHVRPPVSKSGSHTVAVMNVGAPAAGMNAAVRSTVRIGLIQGNRVLVVHDGFEGLAKGQIEEAGWSYVGGWTGQGGSKLGTKRTLPKKSFEQISANITKFNIQGLVIIGGFEAYTGGLELMEGRKQFDELCIPFVVIPATVSNNVPGSDFSVGADTALNTICTTCDRIKQSAAGTKRRVFIIETMGGYCGYLATMAGLAAGADAAYIFEEPFTIRDLQANVEHLVQKMKTTVKRGLVLRNEKCNENYTTDFIFNLYSEEGKGIFDSRKNVLGHMQQGGSPTPFDRNFATKMGAKAMNWMSGKIKESYRNGRIFANTPDSGCVLGMRKRALVFQPVAELKDQTDFEHRIPKEQWWLKLRPILKILAKYEIDLDTSDHAHLEHITRKRSGEAAV

SEQ ID NO: 55072 - protein, 416 aa, Homo sapiens
KKFDEALKLRGRSFMNNWEVYKLLAHVRPPVSKSGSHTVAVMNVGAPAAGMNAAVRSTVRIGLIQGNRVLVVHDGFEGLAKGQIEEAGWSYVGGWTGQGGSKLGTKRTLPKKSFEQISANITKFNIQGLVIIGGFEAYTGGLELMEGRKQFDELCIPFVVIPATVSNNVPGSDFSVGADTALNTICTTCDRIKQSAAGTKRRVFIIETMGGYCGYLATMAGLAAGADAAYIFEEPFTIRDLQANVEHLVQKMKTTVKRGLVLRNEKCNENYTTDFIFNLYSEEGKGIFDSRKNVLGHMQQGGSPTPFDRNFATKMGAKAMNWMSGKIKESYRNGRIFANTPDSGCVLGMRKRALVFQPVAELKDQTDFEHRIPKEQWWLKLRPILKILAKYEIDLDTSDHAHLEHITRKRSGEAAV

SEQ ID NO: 55073 - protein, 535 aa, Homo sapiens
LAVQLRPRGGGEVAPVRRRLAPRHPQSGPRGTMTLGSPRKGLLMLLMALVTQGDPVKPSRGPLVTCTCESPHCKGPTCRGAWCTVVLVREEGRHPQEHRGCGNLHRELCRGRPTEFVNHYCCDSHLCNHNVSLVLEATQPPSEQPGTDGQLALILGPVLALLALVALGVLGLWHVRRRQEKQRGLHSELGESSLILKASEQGDSMLGDLLDSDCTTGSGSGLPFLVQRTVARQVALVECVGKGRYGEVWRGLWHGESVAVKIFSSRDEQSWFRETEIYNTVLLRHDNILGFIASDMTSRNSSTQLWLITHYHEHGSLYDFLQRQTLEPHLALRLAVSAACGLAHLHVEIFGTQGKPAIAHRDFKSRNVLVKSNLQCCIADLGLAVMHSQGSDYLDIGNNPRVGTKRYMAPEVLDEQIRTDCFESYKWTDIWAFGLVLWEIARRTIVNGIVEDYRPPFYDVVPNDPSFEDMKKVVCVDQQTPTIPNRLAADPVLSGLAQMMRECWYPNPSARLTALRIKKTLQKISNSPEKPKVIQ

SEQ ID NO: 55074 - protein, 29 aa, Homo sapiens
LSFSSSAGPGLLKAYSIRTASASRRSARD

SEQ ID NO: 55075 - protein, 40 aa, Homo sapiens
VVVVDPGVIPINSRGEKQRMHLRDSFLADQLDPIYVAYNM

SEQ ID NO: 55076 - protein, 21 aa, Homo sapiens
LGTFSFCLMKTKLNRLLPNIY

SEQ ID NO: 55077 - protein, 5 aa, Homo sapiens
LPYEN

SEQ ID NO: 55078 - protein, 111 aa, Homo sapiens
KLHLSPKADVKNLMSYVVTKTKAINGKYHRFLGRHFPRFYVLYTIFMKGLQMLWADAKKARRIKTNMWKHNIKFHQLPYREMEHLRQKLSCLSCCTTWSCSPPTTLGQGAE

SEQ ID NO: 55079 - protein, 64 aa, Homo sapiens
LNIKVKLEAEIATYRRLLEDGEDFNLGDALDSSNSMQTIQKTTTRRIVDGKVVSETNDTKVLRH

SEQ ID NO: 55080 - protein, 258 aa, Homo sapiens
RKAEPHSFREKVFRKKPPVCAVCKVTIDGTGVSCRVCKVATHRKCEAKVTSACQALPPVELRRNTAPVRRIEHLGSTKSLNHSKQRSTLPRSFSLDPLMERRWDLDLTYVTERILAAAFPARPDEQRHRGHLRELAHVLQSKHRDKYLLFNLSEKRHDLTRLNPKVQDFGWPELHAPPLDKLCSICKAMETWLSADPQHVVVLYCKVGQDLGFPGAWRFQVSLELPDPHPCLSVCQGNKGKLGVIVSAYMHYSKISAG

SEQ ID NO: 55081 - protein, 655 aa, Homo sapiens
LKPPKAGEEGHEGCSYTMCPEGRYGHPGYPALVTYSYGGAVPSYCPAYGRVPHSCGSPGEGRGYPSPGAHSPRAGSISPGSPPYPQSRKLSYEIPTEEGGDRYPLPGHLASAGPLASAESLEPVSWREGPSGHSTLPRSPRDAPCSASSELSGPSTPLHTSSPVQGKESTRRQDTRSPTSAPTQRLSPGEALPPVSQAGTGKAPELPSGSGPEPLAPSPVSPTFPPSSPSDWPQERSPGGHSDGASPRSPVPTTLPGLRHAPWQGPRGPPDSPDGSPLTPVPSQMPWLVASPEPPQSSPTPAFPLAASYDTNGLSQPPLPEKRHLPGPGQQPGPWGPEQASSPARGISHHVTFAPLLSDNVPQTPEPPTQESQSNVKFVQDTSKFWYKPHLSRDQAIALLKDKDPGAFLIRDSHSFQGAYGLALKVATPPPSAQPWKGDPVEQLVRHFLIETGPKGVKIKGCPSEPYFGSLSALVSQHSISPISLPCCLRIPSKDPLEETPEAPVPTNMSTAADLLRQGAACSVLYLTSVETESLTGPQAVARASSAALSCSPRPTPAVVHFKVSAQGITLTDNQRKLFFRRHYPVNSITFSSTDPQDRRWTNPDGTTSKIFGFVAKKPGSPWENVCHLFAELDPDQPAGAIVTFITKVLLGQRK

SEQ ID NO: 55082 - protein, 242 aa, Homo sapiens
LTMTPHRLLPPLLLLLALLLAASPGGALARCPGCGQGVQAGCPGGCVEEEDGGSPAEGCAEAEGCLRREGQECGVYTPNCAPGLQCHPPKDDEAPLRALLLGRGRCLPARAPAVAEENPKESKPQAGTARPQDVNRRDQQRNPGTSTTPSQPNSAGVQDTEMGPCRRHLDSVLQQLQTEVYRGAQTLYVPNCDHRGFYRKRQCRSSQGQRRGPCWCVDRMGKSLPGSPDGNGSSSCPTGSSG

SEQ ID NO: 55083 - protein, 82 aa, Homo sapiens
VNNAGVAGIIGPTPWLTRDDFQRVLNVNTMGPIGVTLALLPLLQQARGRVINITSVLGRLAANGGGYCVSKFGLEAFSDSLR

SEQ ID NO: 55084 - protein, 22 aa, Homo sapiens
LDLDSDCGSTVPLTLISGSNQT

SEQ ID NO: 55085 - protein, 27 aa, Homo sapiens
IKITHKNQMPMLMGPPPRSTNFFGFLS

SEQ ID NO: 55086 - protein, 97 aa, Homo sapiens
IPKNFVCEHCFGAFRSSYHLKRHILIHTGEKPFECDICDMRFIQKYHLERHKRVHSGEKPYQCERCHQCFSRTDRLLRHKRMCQGCQSKTSDGQFSL

SEQ ID NO: 55087 - protein, 438 aa, Homo sapiens
LASCLGLELSRCRAKPPGRACSNPSFLRFQLDFYQVYFLALAADWLQAPYLYKLYQHYYFLEGQIAILYVCGLASTVLFGLVASSLVDWLGRKNSCVLFSLTYSLCCLTKLSQDYFVLLVGRALGGLSTALLFSAFEAWYIHEHVERHDFPAEWIPATFARAAFWNHVLAVVAGVAAEAVASWIGLGPVAPFVAAIPLLALAGALALRNWGENYDRQRAFSRTCAGGLRCLLSDRRVLLLGTIQALFESVIFIFVFLWTPVLDPHGAPLGIIFSSFMAASLLGSSLYRIATSKRYHLQPMHLLSLAVLIVVFSLFMLTFSTSPGQESPVESFIAFLLIELACGLYFPSMSFLRRKVIPETEQAGVLNWFRVPLHSLACLGLLVLHDSDRKTGTRNMFSICSAVMVMALLAVVGLFTVVRHDAELRVPSPTEEPYAPEL

SEQ ID NO: 55088 - protein, 53 aa, Homo sapiens
RWSGLYHSRTVCHSTARFDQAAPVGNATVSFSHDAWQHRIQCRFGCICSDYFS

SEQ ID NO: 55089 - protein, 14 aa, Homo sapiens
RLLGFGCICSDYFS

SEQ ID NO: 55090 - protein, 31 aa, Homo sapiens
RAFGMLGDKGRKHHRKLADSKERKEEEVPLY

SEQ ID NO: 55091 - protein, 72 aa, Homo sapiens
KRCPYTKHQTLELEKEFLFNMYLTRERRLEISKTINLTDRQVKIWFQNRRMKLKKMNRENRIRELTSNFNFT

SEQ ID NO: 55092 - protein, 84 aa, Homo sapiens
LDPSNPVANWIHARSTRKKRCPYTKYQTLELEKEFLFNMYLTRDRRYEVARVLNLTERQVKIWFQNRRMKMKKMNKEKTDKEQS

SEQ ID NO: 55093 - protein, 370 aa, Homo sapiens
KSESPKEPEQLRKLFIGGLSFETTDESLRSHFEQWGTLTDCVVMRDPNTKRSRGFGFVTYATVEEVDAAMNARPHKVDGRVVEPKRAVSREDSQRPGAHLTVKKIFVGGIKEDTEEHHLRDYFEQYGKIEVIEIMTDRGSGKKRGFAFVTFDDHDSVDKIVIQKYHTVNGHNCEVRKALSKQEMASASSSQRGRSGSGNFGGGRGGGFGGNDNFGRGGNFSGRGGFGGSRGGGGYGGSGDGYNGFGNDGGYGGGGPGYSGGSRGYGSGGQGYGNQGSGYGGSGSYDSYNNGGGGGFGGGSGSNFGGGGSYNDFGNYNNQSSNFGPMKGGNFGGRSSGPYGGGGQYFAKPRNQGGYGGSSSSSSYGSGRRF

SEQ ID NO: 55094 - protein, 6 aa, Homo sapiens
RWFRWE

SEQ ID NO: 55095 - protein, 201 aa, Homo sapiens
KNALCALNVVYMLVSLLLIGVAAWGKGLGLVSSIHIIGGVIAVGVFLLLIAVAGLVGAVNHHQVLLFFYMIILGLVFIFQFVISCSCLAINRSKQTDVINASWWVMSNKTRDELERSFDCCGLFNLTTLYQQDYDFCTAICKSQSPTCQMCGEKFLKHSDEALKILGGVGLFFSFTEILGVWLAMRFRNQKDPRANPSAFL

SEQ ID NO: 55096 - protein, 225 aa, Homo sapiens
KTKEGLIGLLQEGNTTVLVEVNCETDFVSRNLKFQLLVQQVALGTMMHCQTLKDQPSAYSKGFLNSSELSGLPAGPDREGSLKDQLALAIGKLGENMILKRAAWVKVPSGFYVGSYVHGAMQSPSLHKLVLGKYGALVICETSEQKTNLEDVGRRLGQHVVGMAPLSVGSLDDEPGGEAETKMLSQPYLLDPSITLGQYVQPQGVSVVDFVRFECGEGEEAAETE

SEQ ID NO: 55097 - protein, 69 aa, Homo sapiens
VAEPYGSWAFMWQQVFEPTWKHIGDGCCLTRETWKDLENAQFSEIQMERQPPPLKWLPVGPHIMGKAVK

SEQ ID NO: 55098 - protein, 100 aa, Homo sapiens
KGYAWSGGGRAVIRVDVSLDGGLTWQVAKLDGEEQRPRKAWAWRLWQLKAPVPAGQKELNIVCKAVDDGYNVQPDTVAPIWNLRGVLSNAWHRVHVYVSP

SEQ ID NO: 55099 - protein, 20 aa, Homo sapiens
RKKRMRRLKRKRRKMRQRSK

SEQ ID NO: 55100 - protein, 152 aa, Homo sapiens
KMCDFTEDQTAEFKEAFQLFDRTGDGKILYSQCGDVMRALGQNPTNAEVLKVLGNPKSDEMNVKVLDFEHFLPMLQTVAKNKDQGTYEDYVEGLRVFDKEGNGTVMGAEIRHVLVTLGEKMTEEEVEMLVAGHEDSNGCINYEAFVRHILSG

SEQ ID NO: 55101 - protein, 217 aa, Homo sapiens
LLKTSLRKGDTWYLVDSRWFKQWKKYVGFDSWDKYQMGDQNVYPGPIDNSGLLKDGDAQSLKEHLIDELDYILLPTEGWNKLVSWYTLMEGQEPIARKVVEQGMFVKHCKVEVYLTELKLCENGNMNNVVTRRFSKADTIDTIEKEIRKIFSIPDEKETRLWNKYMSNTFEPLNKPDSTIQDAGLYQGQVLVIEQKNEDGTWPRGPSTPKKPLEQSC

SEQ ID NO: 55102 - protein, 785 aa, Homo sapiens
VTDFLPTMPCTCLQIVVDVAGSFGLHNQELNISLTSIGLLWNISDYFFQRGETIEKELNKEEAAQQKQAEEKGVVLNRPFHPAPPFDCLWLCLYAKLGELCVDPRPAVRKSAGQTLFSTIGAHGTLLQHSTWHTVIWKVLFHLLDRVRESSTTADKEKIESGGGNILIHHSRDTAEKQWAETWVLTLAGVARIFNTRRYLLQPLGDFSRAWDVLLDHIQSAALSKNNEVSLAALKSFQEILQIVSPVRDSDKPETPPVVNVPVPVLIGPISGMSRPFVRTDSIGEKLGRYSSSEPPIVTDELEDLNLWWAAWNTWYRIGSESTKPPITFDKLTFIPSQPFLTALIQIFPALYQHIKTGFNMDDLQKLGVILHSAISVPISSDASPFILPSYTEAVLTSLQEAVLTALDVLQKAICVGPENMQIMYPAIFDQLLAFVEFSCKPPQYGQLETKHIANAKYNQIQLFAPAEWVALNYVPFAERSLEVVVDLYQKTACHKAVVNEKVLQNIIKTLRVPLSLKYSCPSESTWKLAVSSLLRVLSIGLPVARQHASSGKFDSMWPELANTFEDFLFTKSIPPDNLSIQEFQRNENIDVEVVQLISNEILPYANFIPKEFVGQIMTMLNKGSIHSQSSSFTEAEIDIRLREEFSKMCFETLLQFSFSNKVTTPQEGYISRMALSVLLKRSQDVLHRYIEDERLSGKCPLPRQQVTEIIFVLKAVSTLIDSLKKTQPENVDGNTWAQVIALYPTLVECITCSSSEVCSALKEALVPFKDFMQPPASRVQNGES

SEQ ID NO: 55103 - protein, 57 aa, Homo sapiens
KNWKELPAVLEKEKTIILQEKIERRKMLLQWYQHFKTELKMKFTNILESSFLMNNKS

SEQ ID NO: 55104 - protein, 21 aa, Homo sapiens
IKNLDKSIDNKALYDTFFCFW

SEQ ID NO: 55105 - protein, 156 aa, Homo sapiens
IDSPPIRRSTSSGQYTGFNDHKPLDPETIAQDIEETMNTALNELRELERQSTAKHAPDVVLDTLEQVKNSPTPATSTESLSPLHNVALRSSEPQIRRSTSSSSDTMSTFKPMVAPRMGVQLKPPALRPKPAVLPKTNPTIGPAPPPQGPTDKSCTM

SEQ ID NO: 55106 - protein, 110 aa, Homo sapiens
IRKMLHLRKQLLSLTNQCFDIEEEVSKYQEYTNELQETLPQKMFTASSGIKHTMTPIYPSSNTLVEMTLGMKKLKEEMEGVVKELAENNHILERFGSLTMDGGLRNVDCL

SEQ ID NO: 55107 - protein, 164 aa, Homo sapiens
IQPSASCDKILVIPSKVWQGQAFHLDRRNSPPNSLTPCLKIRNMFDPVMEIGDQWHLAIQEAILEKCSDNDGIVHIAVDKNSREGCVYVKCLSPEYAGKAFKALHGSWFDGKLVTVKYLRLDRYHHRFPQALTSNTPLKPSNKHMNSMSHLRLRTGLTNSQGSS

SEQ ID NO: 55108 - protein, 357 aa, Homo sapiens
IYPYMRNGTLFDRLQCVGDTAPLPWHIRIGILIGISKAIHYLHNVQPCSVICGSISSANILLDDQFQPKLTDFAMAHFRSHLEHQSCTINMTSSSSKHLWYMPEEYIRQGKLSIKTDVYSFGIVIMEVLTGCRVVLDDPKHIQLRDLLRELMEKRGLDSCLSFLDKKVPPCPRNFSAKLFCLAGRCAATRAKLRPSMDEVLNTLESTQASLYFAEDPPTSLKSFRCPSPLFLENVPSIPVEDDESQNNNLLPSDEGLRIDRMTQKTPFECSQSEVMFLSLDKKPESKRNEEACNMPSSSCEESWFPKYIVPSQDLRPYKVNIDPSSEAPGHSCRSRPVESSCSSKFSWDEYEQYKKE

SEQ ID NO: 55109 - protein, 1223 aa, Homo sapiens
ISNLLEKMTSSDKDFRFMATNDLMTELQKDSIKLDDDSERKVVKMILKLLEDKNGEVQNLAVKCLGPLVSKVKEYQVETIVDTLCTNMLSDKEQLRDISSIGLKTVIGELPPASSGSALAANVCKKITGRLTSAIAKQEDVSVQLEALDIMADMLSRQGGLLVNFHPSILTCLLPQLTSPRLAVRKRTIIALGHLVMSCGNIVFVDLIEHLLSELSKNDSMSTTRTYIQCIAAISRQAGHRIGEYLEKIIPLVVKFCNVDDDELREYCIQAFESFVRRCPKEVYPHVSTIINICLKYLTYDPNYNYDDEDEDENAMDADGGDDDDQGSDDEYSDDDDMSWKVRRAAAKCLDAVVSTRHEMLPEFYKTVSPALISRFKEREENVKADVFHAYLSLLKQTRPVQSWLCDPDAMEQGETPLTMLQSQVPNIVKALHKQMKEKSVKTRQCCFNMLTELVNVLPGALTQHIPVLVPGIIFSLNDKSSSSNLKIDALSCLYVILCNHSPQVFHPHVQALVPPVVACVGDPFYKITSEALLVTQQLVKVIRPLDQPSSFDATPYIKDLFTCTIKRLKAADIDQEVKERAISCMGQIICNLGDNLGSDLPNTLQIFLERLKNEITRLTTVKALTLIAGSPLKIDLRPVLGEGVPILASFLRKNQRALKLGTLSALDILIKNYSDSLTAAMIDAVLDELPPLISESDMHVSQMAISFLTTLAKVYPSSLSKISGSILNELIGLVRSPLLQGGALSAMLDFFQALVVTGTNNLGYMDLLRMLTGPVYSQSTALTHKQSYYSIAKCVAALTRACPKEGPAVVGQFIQDVKNSRSTDSIRLLALLSLGEVGHHIDLSGQLELKSVILEAFSSPSEEVKSAASYALGSISVGNLPEYLPFVLQEITSQPKRQYLLLHSLKEIISSASVVGLKPYVENIWALLLKHCECAEEGTRNVVAECLGKLTLIDPETLLPRLKGYLISGSSYARSSVVTAVKFTISDHPQPIDPLLKNCIGDFLKTLEDPDLNVRRVALVTFNSAAHNKPSLIRDLLDTVLPHLYNETKVRKELIREVEMGPFKHTVDDGLDIRKAAFECMYTLLDSCLDRLDIFEFLNHVEDGLKDHYDIKMLTFLMLVRLSTLCPSAVLQRLDRLVEPLRATCTTKVKANSVKQEFEKQDELKRSAMRAVAALLTIPEAEKSPLMSEFQSQISSNPELAAIFESIQKDSSSTNLESMDTS

SEQ ID NO: 55110 - protein, 7 aa, Homo sapiens
TLAAGTR

SEQ ID NO: 55111 - protein, 8 aa, Homo sapiens
TTKKTPQI

SEQ ID NO: 55112 - protein, 508 aa, Homo sapiens
IALYIGNLTWWTTDEDLTEAVHSLGVNDILEIKFFENRANGQSKGFALVGVGSEASSKKLMDLLPKRELHGQNPVVTPCNKQFLSQFEMQSRKTTQSGQMSGEGKAGPPGGSSRAAFPQGGRGRGRFPGAVPGGDRFPGPAGPGGPPPPFPGNLIKHLVKGTRPLFLETRIPWHMGHSIEEIPIFGLKAGQTPPRPPLGPPGPPGPPGPPPPGQVLPPPLAGPPNRGDRPPPPVLFPGQPFGQPPLGPLPPGPPPPVPGYGPPPGPPPPQQGPPPPPGPFPPRPPGPLGPPLTLAPPPHLPGPPPGAPPPAPHVNPAFFPPPTNSGMPTSDSRGPPPTDPYGRPPPYDRGDYGPPGREMDTARTPLSEAEFEEIMNRNRAISSSAISRAVSDASAGDYGSAIETLVTAISLIKQSKVSADDRCKVLISSLQDCLHGIESKSYGSGSRRERSRERDHSRSREKSRRHKSRSRDRHDDYYRERSRERERHRDRDRDRDRERDREREYRHR

SEQ ID NO: 55113 - protein, 120 aa, Homo sapiens
MHNYVNTENVTVPASAHKIEYSRRRDCTPTVFNFDIRRPSLEHRQLNYIQVDLEGGSDSDNPQTPKTPTTPLPQTPTRRTELYAVIDIERTAAMSNLQKALPRDDGTSRKTRHNSTDLPM

SEQ ID NO: 55114 - protein, 140 aa, Homo sapiens
ICWMIYGCISYWGLHCETTYTKDGFWTYITQIATCSPWMFWMFLNSVFHFMWVAVLLMCQMYQISCLGITTNERMNARRYKHFKVTTTSIESPFNHGCVRNIIDFFEFRCCGLFRPVIVDWTRQYTIEYDQISGSGYQLV

SEQ ID NO: 55115 - protein, 12 aa, Homo sapiens
MPDKACVSHLLQ

SEQ ID NO: 55116 - protein, 13 aa, Homo sapiens
IMFWLDFLTVCWS

SEQ ID NO: 55117 - protein, 205 aa, Homo sapiens
KVVLLGEGCVGKTSLVLRYCENKFNDKHITTLQASFLTKKLNIGGKRVNLAIWDTAGQERFHALGPIYYRDSNGAILVYDITDEDSFQKVKNWVKELRKMLGNEICLCIVGNKIDLEKERHVSIQEAESYAESVGAKHYHTSAKQNKGIEELFLDLCKRMIETAQVDERAKGNGSSQPGTARRGVQIIDDEPQAQTSGGGCCSSG

SEQ ID NO: 55118 - protein, 655 aa, Homo sapiens
IHSSCGKTNDQDGLISGILRVLEKDAEVIVDWRPLDDALDSSSILYARKDSSSVVEWTQAPKERGHRGSEHLNSYEAEWDMVNTVSFKRKPHTNGDAPSHRNGKSKWSFLFSLTDLKSIKQNKEGMGWSYLVFCLKDDVVLPALHFHQGDSKLLIESLEKYVVLCESPQDKRTLLVNCQNKSLSQSFENLLDEPAYGLIQKIKKDPYTATMIGFSKVTNYIFDSLRGSDPSTHQRPPSEMADFLSDAIPGLKINQQEEPGFEVITRIDLGERPVVQRREPVSLEEWTKNIDSEGRILNVDNMKQMIFRGGLSHALRKQAWKFLLGYFPWDSTKEERTQLQKQKTDEYFRMKLQWKSISQEQEKRNSRLRDYRSLIEKDVNRTDRTNKFYEGQDNPGLILLHDILMTYCMYDFDLGYVQGMSDLLSPLLYVMENEVDAFWCFASYMDQMHQNFEEQMQGMKTQLIQLSTLLRLLDSGFCSYLESQDSGYLYFCFRWLLIRFKREFSFLDILRLWEVMWTELPCTNFHLLLCCAILESEKQQIMEKHYGFNEILKHINELSMKIDVEDILCKAEAISLQMVKCKELPQAVCEILGLQGSEVTTPDSDVGEDENVVMTPCPTSAFQSNALPTLSASGARNDSPTQIPVSSDVCRLTPA

SEQ ID NO: 55119 - protein, 14 aa, Homo sapiens
LKISMDVLEVSLRW

SEQ ID NO: 55120 - protein, 20 aa, Homo sapiens
LHNGLRAVEVDPSLLLHMLE

SEQ ID NO: 55121 - protein, 319 aa, Homo sapiens
VQRKMPCVFVTEVKEEPSSKREHQPFKVLATETVSHKALDADIYSAIPTEKVDGTCCYVTTYKDQPYLWARLDRKPNKQAEKRFKNFLHSKENPKEFFWNVEEDFKPAPECWIPAKETEQINGNPVPDENGHIPGWVPVEKNNKQYCWHSSVVNYEFEIALVLKHHPDDSGLLEISAVPLSDLLEQTLELIGTNINGNPYGLGSKKHPLHLLIPHGAFQIRNLPSLKHNDLVSWFEDCKEGKIEGIVWHCSDGCLIKVHRHHLGLCWPIPDTYMNSRPVIINMNLNKCDSAFDIKCLFNHFLKIDNQKFVRLKDIIFDV

SEQ ID NO: 55122 - protein, 16 aa, Homo sapiens
VVSVASLAGLLFLRFS

SEQ ID NO: 55123 - protein, 172 aa, Homo sapiens
TRTYDREGFKKRAACLCFRSEQEDEVLLVSSSRYPDQWIVPGGGMEPEEEPGGAAVREVYEEAGVKGKLGRLLGIFENQDRKHRTYVYVLTVTEILEDWEDSVNIGRKREWFKVEDAIKVLQCHKPVHAEYLEKLKLGCSPANGNSTVPSLPDNNALFVTAAQTSGLPSSVR

SEQ ID NO: 55124 - protein, 16 aa, Homo sapiens
LPPFRTPRRDSFWDSH

SEQ ID NO: 55125 - protein, 50 aa, Homo sapiens
MNRTRTGRLAGGSCRGSVKALCCCPWGPEGLPSMPTGRREGTDPLAPTSF

SEQ ID NO: 55126 - protein, 28 aa, Homo sapiens
LQWGCIHCTDWGDCKSQLSQTISRELKV

SEQ ID NO: 55127 - protein, 112 aa, Homo sapiens
IANLCDSLNHFLTQTGHVPPQGGTHRPPAPARIADSCALTSGKQESAMSQVNSYGHPQAPHLYPGPSPMYPIPTQDSAGYNRPAHHMVPRPSVPPPGANEEIPDDFDWDLIT

SEQ ID NO: 55128 - protein, 52 aa, Homo sapiens
MGNATVGRRYLWLKDCKINLASKNKLASTPFKGGTLFGGEVCKVIKKRGNKH

SEQ ID NO: 55129 - protein, 113 aa, Homo sapiens
RDILKEMFPYEASTPTGISASCRRPIKGAAGRPLELSDFRMEESFSSKYVPKYVPLADVKSEKTKKGRSIPVWIKILLFVVVAVFLFLVYQAMETNQVNPFSNFLHVDPRKSN

SEQ ID NO: 55130 - protein, 93 aa, Homo sapiens
MSALNNLFGPQKPKVSMNQLSQQKPNQWLNQFVPPQGSPTMGSSVMGTQMNVIGQSAFGMQGNPFFNPQNFAQPPTTMTNSSSASNDLKDLFG

SEQ ID NO: 55131 - protein, 131 aa, Homo sapiens
IKLNPRLAILYAKRASVFVKLQKPNAAIRDCDRAIEINPDSAQPYKWRGKAHRLLGHWEEAAHDLALACKLDYDEDVSAMLKEVQPRAQKIEEHRRKYERKREEREIKERIERVKKAREKHERAQREEEAR

SEQ ID NO: 55132 - protein, 60 aa, Homo sapiens
MPGLNEILSDPEVLAAMQDPEVLVAFQDVAQNPANMSKYQSNPKVMNLISKLSVKFGGQV

SEQ ID NO: 55133 - protein, 150 aa, Homo sapiens
LGKDYVTSGITGEPLEAYIYFGPVYYQKLKHMVLDKMHARARGPRAVLTRQPTEGRSRDGGLRLGEMERDCLIGYGASMLLLERLMISSDAFEVDVCGQCGLLGYSGWCHYCKSSCHVSSLRIPYACKLLFQELQSMNIIPRLKLSKYNE

SEQ ID NO: 55134 - protein, 495 aa, Homo sapiens
VTCVAWVRCGVAKETPDKVELSKEEVKRLIAEAKEKLQEEGGGSDEEETGSPSEDGMQSARTQARPREPLEDGDPEDDRTLDDDELAEYDLDKYDEEGDPDAETLGESLLGLTVYGSNDQDPYVTLKDTEQYEREDFLIKPSDNLIVCGRAEQDQCNLEVHVYNQEEDSFYVHHDILLSAYPLSVEWLNFDPSPDDSTGNYIAVGNMTPVIEVWDLDIVDSLEPVFTLGSKLSKKKKKKGKKSSSAEGHTDAVLDLSWNKLIRNVLASASADNTVILWDMSLGKPAASLAVHTDKVQTLQFHPFEAQTLISGSYDKSVALYDCRSPDESHRMWRFSGQIERVTWNHFSPCHFLASTDDGFVYNLDARSDKPIFTLNAHNDEISGLDLSSQIKGCLVTASADKYVKIWDILGDRPSLVHSRDMKMGVLFCSSCCPDLPFIYAFGGQKEGLRVWDISTVSSVNEAFGRRERLVLGSARNSSISGPFGSRSSDTPMES

SEQ ID NO: 55135 - protein, 151 aa, Homo sapiens
LLRSPRLPARELSAPARLYHKKVVDHYENPRNVGSLDKTSKNVGTGLVGAPACGDVMKLQIQVDEKGKIVDARFKTFGCGSAIASSSLATEWVKGKTVEEALTIKNTDIAKELCLPPVKLHCSMLAEDAIKAALADYKLKQEPKKGEAEKK

SEQ ID NO: 55136 - protein, 222 aa, Homo sapiens
VGFGESWKKHLSGEFGKPYFIKLMGFVAEERKHYTVYPPPHQVFTWTQMCDIKDVKVVILGQDPYHGPNQAHGLCFSVQRPVPPPPSLENIYKELSTDIEDFVHPGHGDLSGWAKQGVLLLNAVLTVRAHQANSHKERGWEQFTDAVVSWLNQNSNGLVFLLWGSYAQKKGSAIDRKRHHVLQTAHPSPLSVYRGFFGCRHFSKTNELLQKSGKKPIDWKEL

SEQ ID NO: 55137 - protein, 562 aa, Homo sapiens
IIMCPVCDKYCPFMRLSDSCVYAKVTHLFDNGATVFFAVFMAVWATVFLEFWKRRRAVIAYDWDLIDWEEEEEEIRPQFEAKYSKKERMNPISGKPEPYQAFTDKCSRLIVSASGIFFMICVVIAAVFGIVIYRVVTVSTFAAFKWALIRNNSQVATTGTAVCINFCIIMLLNVLYEKVALLLTNLEQPRTESEWENSFTLKMFLFQFVNLNSSTFYIAFFLGRFTGHPGAYLRLINRWRLEECHPSGCLIDLCMQMGIIMVLKQTWNNFMELGYPLIQNWWTRRKVRQEHGPERKISFPQWEKDYNLQPMNAYGLFDEYLEMILQFGFTTIFVAAFPLAPLLALLNNIIEIRLDAYKFVTQWRRPLASRAKDIGIWYGILEGIGILSVITNAFVIAITSDFIPRLVYAYKYGPCAGQGEAGQKCMVGYVNASLSVFRISDFENRSEPESDGSEFSGTPLKYCRYRDYRDPPHSLVPYGYTLQFWHVLAARLAFIIVFEHLVFCIKHLISYLIPDLPKDLRDRMRREKYLIQEMMYEAELERLQKERKERKKNGKAHHNEWP

SEQ ID NO: 55138 - protein, 514 aa, Homo sapiens
LEFWKRRRAVIAYDWDLIDWEEEEEEIRPQFEAKYSKKERMNPISGKPEPYQAFTDKCSRLIVSASGIFFMICVVIAAVFGIVIYRVVTVSTFAAFKWALIRNNSQVATTGTAVCINFCIIMLLNVLYEKVALLLTNLEQPRTESEWENSFTLKMFLFQFVNLNSSTFYIAFFLGRFTGHPGAYLRLINRWRLEECHPSGCLIDLCMQMGIIMVLKQTWNNFMELGYPLIQNWWTRRKVRQEHGPERKISFPQWEKDYNLQPMNAYGLFDEYLEMILQFGFTTIFVAAFPLAPLLALLNNIIEIRLDAYKFVTQWRRPLASRAKDIGIWYGILEGIGILSVITNAFVIAITSDFIPRLVYAYKYGPCAGQGEAGQKCMVGYVNASLSVFRISDFENRSEPESDGSEFSGTPLKYCRYRDYRDPPHSLVPYGYTLQFWHVLAARLAFIIVFEHLVFCIKHLISYLIPDLPKDLRDRMRREKYLIQEMMYEAELERLQKERKERKKNGKAHHNEWP

SEQ ID NO: 55139 - protein, 132 aa, Homo sapiens
IGPFSKISEFKTCIPGFPGAPSAVRISKNVEGIHLSWEPPTSPSGNILEYSAYLAIRTAQIQDNPSQLVFMRIYCGLKTSCIVTAGQLANAHIDYTSRPAIVFRISAKNEKGYGPATQVRWLQGNNKKAPLN

SEQ ID NO: 55140 - protein, 30 aa, Homo sapiens
TLSELAAETDLPVVFVKQRKIGGHGPTLKG

SEQ ID NO: 55141 - protein, 501 aa, Homo sapiens
KLLKMNGPEDLPKSYDYDLIIIGGGSGGLAAAKEAAQYGKKVMVLDFVTPTPLGTRWGLGGTCVNVGCIPKKLMHQAALLGQALQDSRNYGWKVEETVKHDWDRMIEAVQNHIGSLNWGYRVALREKKVVYENAYGQFIGPHRIKATNNKGKEKIYSAERFLIATGERPRYLGIPGDKEYCISSDDLFSLPYCPGKTLVVGASYVALECAGFLAGIGLDVTVMVRSILLRGFDQDMANKIGEHMEEHGIKFIRQFVPIKVEQIEAGTPGRLRVVAQSTNSEEIIEGEYNTVMLAIGRDACTRKIGLETVGVKINEKTGKIPVTDEEQTNVPYIYAIGDILEDKVELTPVAIQAGRLLAQRLYAGSTVKCDYENVPTTVFTPLEYGACGLSEEKAVEKFGEENIEVYHSYFWPLEWTIPSRDNNKCYAKIICNTKDNERVVGFHVLGPNAGEVTQGFAAALKCGLTKKQLDSTIGIHPVCAEVFTTLSVTKRSGASILQAGC

SEQ ID NO: 55142 - protein, 45 aa, Homo sapiens
TRTTDEMTTEFFQNISSEHQTQLYEVYKLDFLMFNYSVPSYLKLE

SEQ ID NO: 55143 - protein, 1145 aa, Homo sapiens
KNYGKFLEEYTSQLRRIEDALDDSIGDVWDFNLDPIALKLLPYEQSSLLELIKTENKVLNKVITVYAALCCEIKKLKYEAETKFYNGLLFYGEGATDASMVEGDCQIQMGRFISFLQELSCFVTRCYEVVMNVVHQLAALYISNKIAPKIIETTGVHFQTMYEHLGELLTVLLTLDEIIDNHITLKDHWTMYKRLLKSVHHNPSKFGIQEEKLKPFEKFLLKLEGQLLDGMIFQACIEQQFDSLNGGVSVSKNSTFAEEFAHSIRSIFANVEAKLGEPSEIDQRDKYVGICGLFVLHFQIFRTIDKKFYKSLLDICKKVPAITLTANIIWFPDNFLIQKIPAAAKLLDRKSLQAIKIHRDTFLQQKAQSLTKDVQSYYVFVSSWMMKMESILSKEQRMDKFAEDLTNRCNVFIQGFLYAYSISTIIKTTMNLYMSMQKPMTKTSVKALCRLVELLKAIEHMFYRRSMVVADSVSHITQHLQHQALHSISVAKKRVISDKKYSEQRLDVLSALVLAENTLNGPSTKQRRLIVSLALSVGTQMKTFKDEELFPLQVVMKKLDLISELRERVQTQCDCCFLYWHRAVFPIYLDDVYENAVDAARLHYMFSALRDCVPAMMHARHLESYEILLDCYDKEIMEILNEHLLDKLCKEIEKDLRLSVHTHLKLDDRNPFKVGMKDLALFFSLNPIRFFNRFIDIRAYVTHYLDKTFYNLTTVALHDWATYSEMRNLATQRYGLVMTEAHLPSQTLEQGLDVLEIMRNIHIFVSRYLYNLNNQIFIERTSNNKHLNTINIRHIANSIRTHGTGIMNTTVNFTYQFLKKKFYIFSQFMYDEHIKSRLIKDIRFFREIKDQNDHKYPFDRAEKFNRGIRKLGVTPEGQSYLDQFRQLISQIGNAMGYVRMIRSGGLHCSSNAIRFVPDLEDIVNFEELVKEEGLAEETLKAARHLDSVLSDHTRNSAEGTEYFKMLVDVFAPEFRRPKNIHLRNFYIIVPPLTLNFVEHSISCKEKLNKKNKIGAAFTDDGFAMGVAYILKLLDQYREFDSLHWFQSVREKYLKEIRAVAKQQNVQSASQDEKLLQTMNLTQKRLDVYLQEFELLYFSLSSARIFFRADKTAAEENQEKKEKEEETKTSNGDLSDSTVSADPVVK

SEQ ID NO: 55144 - protein, 29 aa, Homo sapiens
RRNYGGVYVGLPSEAVNMVSSQTKTVRKN

SEQ ID NO: 55145 - protein, 52 aa, Homo sapiens
KPGLEQPEVEATKQALTSCGFDCLETSIGAPGVSIHSATSLDSRVQQALDGL

SEQ ID NO: 55146 - protein, 578 aa, Homo sapiens
LHLLVWKNDYRQLEKELQGQNVEAVDPRGRTLLHLAVSLGHLESARVLLRHKADVTKENRQGWTVLHEAVSTGDPEMVYTVLQHRDYHNTSMALEGVPELLQKILEAPDFYVQMKWEFTSWVPLVSRICPNDVCRIWKSGAKLRVDITLLGFENMSWIRGRRSFIFKGEDNWAELMEVNHDDKVVTTERFDLSQEMERLTLDLMKPKSREVERRLTSPVINTSLDTKNIAFERTKSGFWGWRTDKAEVVNGYEAKVYTVNNVNVITKIRTEHLTEEEKKRYKADRNPLESLLGTVEHQFGAQGDLTTECATANNPTAITPDEYFNEEFDLKDRDIGRPKELTIRTQKFKAMLWMCEEFPLSLVEQVIPIIDLMARTSAHFARLRDFIKLEFPPGFPVKIEIPLFHVLNARITFGNVNGCSTAEESVSQNVEGTQADSASHITNFEVDQSVFEIPESYYVQDNGRNVHLQDEDYEIMQFAIQQSLLESSRSQELSGPASNGGISQTNTYDAQYERAIQESLLTSTEGLCPSALSETSRFDNDLQLAMELSAKELEEWELRLQEEEAELQQVLQLSLTDK

SEQ ID NO: 55147 - protein, 327 aa, Homo sapiens
VLISYCPTATEEAPYWTYLLCALGLFIYQSLDAIDGKQARRTNSCSPLGELFDHGCDSLSTVFMAVGASIAARLGTYPDWFFFCSFIGMFVFYCAHWQTYVSGMLRFGKVDVTEIQIALVIVFVLSAFGGATMWDYTIPILEIKLKILPVLGFLGGVIFSCSNYFHVILHGGVGKNGSTIAGTSVLSPGLHIGLIIILAIMIYKKSATDVFEKHPCLYILMFGCVFAKVSQKLVVAHMTKSELYLQDTVFLGPGLLFLDQYFNNFIDEYVVLWMAMVISSFDMVIYFSALCLQISRHLHLNIFKTACHQAPEQVQVLSSKSHQNNMD

SEQ ID NO: 55148 - protein, 193 aa, Homo sapiens
TGTTPPESGIFGFMINFSAFLGAATMYTRYKIVQKQNQTCYFSTPVFNLVSLVLGLVGCFGMGIVANFQELAVPVVHDGGALLAFVCGVVYTLLQSIISYKSCPQWNSLSTCHIRMVISAVSCAAVIPMIVCASLISITKLEWNPREKDYVYHVVSAICEWTVAFGFIFYFLTFIQDFQSVTLRISTEINGDI

SEQ ID NO: 55149 - protein, 35 aa, Homo sapiens
LEQLMECKKQCFLKQQSQTSIGQVIQEGGEDRLIL

SEQ ID NO: 55150 - protein, 1010 aa, Homo sapiens
KERWGSNELPAEEGKTLLELVIEQFEDLLVRILLLAACISFVLAWFEEGEETITAFVEPFVILLILVANAIVGVWQERNAENAIEALKEYEPEMGKVYRQDRKSVQRIKAKDIVPGDIVEIAVGDKVPADIRLTSIKSTTLRVDQSILTGESVSVIKHTDPVPDPRAVNQDKKNMLFSGTNIAAGKAMGVVVATGVNTEIGKIRDEMVATEQERTPLQQKLDEFGEQLSKVISLICIAVWIINIGHFNDPVHGGSWIRGAIYYFKIAVALAVAAIPEGLPAVITTCLALGTRRMAKKNAIVRSLPSVETLGCTSVICSDKTGTLTTNQMSVCRMFILDRVEGDTCSLNEFTITGSTYAPIGEVHKDDKPVNCHQYDGLVELATICALCNDSALDYNEAKGVYEKVGEATETALTCLVEKMNVFDTELKGLSKIERANACNSVIKQLMKKEFTLEFSRDRKSMSVYCTPNKPSRTSMSKMFVKGAPEGVIDRCTHIRVGSTKVPMTSGVKQKIMSVIREWGSGSDTLRCLALATHDNPLRREEMHLEDSANFIKYETNLTFVGCVGMLDPPRIEVASSVKLCRQAGIRVIMITGDNKGTAVAICRRIGIFGQDEDVTSKAFTGREFDELNPSAQRDACLNARCFARVEPSHKSKIVEFLQSFDEITAMTGDGVNDAPALKKAEIGIAMGSGTAVAKTASEMVLADDNFSTIVAAVEEGRAIYNNMKQFIRYLISSNVGEVVCIFLTAALGFPEALIPVQLLWVNLVTDGLPATALGFNPPDLDIMNKPPRNPKEPLISGWLFFRYLAIGCYVGAATVGAAAWWFIAADGGPRVSFYQLSHFLQCKEDNPDFEGVDCAIFESPYPMTMALSVLVTIEMCNALNSLSENQSLLRMPPWENIWLVGSICLSMSLHFLILYVEPLPLIFQITPLNVTQWLMVLKISLPVILMDETLKFVARNYLEPGKECVQPATKSCSFSACTDGISWPFVLLIMPLVIWVYSTDTNFSDMFWS

SEQ ID NO: 55151 - protein, 965 aa, Homo sapiens
KERWGSNELPAEEGKTLLELVIEQFEDLLVRILLLAACISFVLAWFEEGEETITAFVEPFVILLILVANAIVGVWQERNAENAIEALKEYEPEMGKVYRQDRKSVQRIKAKDIVPGDIVEIAVGDKVPADIRLTSIKSTTLRVDQSILTGESVSVIKHTDPVPDPRAVNQDKKNMLFSGTNIAAGKAMGVVVATGVNTEIGKIRDEMVATEQERTPLQQKLDEFGEQLSKVISLICIAVWIINIGHFNDPVHGGSWIRGAIYYFKIAVALAVAAIPEGLPAVITTCLALGTRRMAKKNAIVRSLPSVETLGCTSVICSDKTGTLTTNQMSVCRMFILDRVEGDTCSLNEFTITGSTYAPIGEVHKDDKPVNCHQYDGLVELATICALCNDSALDYNEAKGVYEKVGEATETALTCLVEKMNVFDTELKGLSKIERANACNSVIKQLMKKEFTLEFSRDRKSMSVYCTPNKPSRTSMSKMFVKGAPEGVIDRCTHIRVGSTKVPMTSGVKQKIMSVIREWGSGSDTLRCLALATHDNPLRREEMHLEDSANFIKYETNLTFVGCVGMLDPPRIEVASSVKLCRQAGIRVIMITGDNKGTAVAICRRIGIFGQDEDVTSKAFTGREFDELNPSAQRDACLNARCFARVEPSHKSKIVEFLQSFDEITAMTGDGVNDAPALKKAEIGIAMGSGTAVAKTASEMVLADDNFSTIVAAVEEGRAIYNNMKQFIRYLISSNVGEVVCIFLTAALGFPEALIPVQLLWVNLVTDGLPATALGFNPPDLDIMNKPPRNPKEPLISGWLFFRYLAIGCYVGAATVGAAAWWFIAADGGPRVSFYQLSHFLQCKEDNPDFEGVDCAIFESPYPMTMALSVLVTIEMCNALNSLSENQSLLRMPPWENIWLVGSICLSMSLHFLILYVEPLPLIFQITPLNVTQWLMVLKISLPVILMDETLKFVARNYLEPAILE

SEQ ID NO: 55152 - protein, 586 aa, Homo sapiens
RPRGLPPLLVVLLGCWASVSAQTDATPAVTTEGLNSTEAALATFGTFPSTRPPGTPRAPGPSSGPRPTPVTDVAVLCVCDLSPAQCDINCCCDPDCSSVDFSVFSACSVPVVTGDSQFCSQKAVIYSLNFTANPPQRVFELVDQINPSIFCIHITNYKPALSFINPEVPDENNFDTLMKTSDGFTLNAESYVSFTTKLDIPTAAKYEYGVPLQTSDSFLRFPSSLTSSLCTDNNPAAFLVNQAVKCTRKINLEQCEEIEALSMAFYSSPEILRVPDSRKKVPITVQSIVIQSLNKTLTRREDTDVLQPTLVNAGHFSLCVNVVLEVKYSLTYTDAGEVTKADLSFVLGTVSSVVVPLQQKFEIHFLQENTQPVPLSGNPGYVVGLPLAAGFQPHKGSGIIQTTNRYGQLTILHSTTEQDCLALEGVRTPVLFGYTMQSGCKLRLTGALPCQLVAQKVKSLLWGQGFPDYVAPFGNSQAQDMLDWVPIHFITQSFNRKDSCQLPGALVIEVKWTKYGSLLNPQAKIVNVTANLISSSFPEANSGNERTILISTAVTFVDVSAPAEAGFRAPPAINARLPFNFFFPFV

SEQ ID NO: 55153 - protein, 18 aa, Homo sapiens
VEAAPAIEGDLRLTGRTP

SEQ ID NO: 55154 - protein, 33 aa, Homo sapiens
IPNGQWMTQSFTDQIPSFSNHCGTQEQEEESHA

SEQ ID NO: 55155 - protein, 87 aa, Homo sapiens
TMSLPLNPKPFLNGLTGKPVMVKLKWGMEYKGYLVSVDGYMNMQLANTEEYIDGALSGHLGEVLIRCNNVLYIRGVEEEEEDGEMRE

SEQ ID NO: 55156 - protein, 216 aa, Homo sapiens
KHVTRPVVSLPSTSEAAAASAFLASSVSAKISSLMLPNAASISSASPFSSRSPSLSPNSPLPSEHRSLFLEAACHDSDSLEPLNLSSGSKTKSPSLPPKAKKPKGLEISAPPLVLSGTDIGSIALNSPALPSGSLTPAFFTAQTPNGLLLTPSPLLSSIHFWSSLSPVAPLSPARLQGPSTLFQFPTLLNGHMPVPIPSLDRAASPVLLSSNSQKS

SEQ ID NO: 55157 - protein, 42 aa, Homo sapiens
IKQFHMQLNEMHSLLERYSVNEGLVAEIERLREENKRLRAHF

SEQ ID NO: 55158 - protein, 118 aa, Homo sapiens
KQRRTFEQRVEDVRLIREQHPTKIPVIIERYKGEKQLPVLDKTKFLVPDHVNMSELIKIIRRRLQLNANQAFFLLVNGHSMVSVSTPISEVYESEKDEDGFLYMVCASQETFGMKLSV

SEQ ID NO: 55159 - protein, 70 aa, Homo sapiens
TANVPYQTVMRNADLDSFTTHRRHRGLIRAYEFAVDQLAFQSPLPVCRSSCDAMATHYYDLALAFPYNHV

SEQ ID NO: 55160 - protein, 33 aa, Homo sapiens
IEYRLSVGTNEKIQLSSLIAAFQVTRDLIVAEA

SEQ ID NO: 55161 - protein, 181 aa, Homo sapiens
LRRDPFRDSPLSSRLLDDGFGMDPFPDDLTASWPDWALPRLSSAWPGTLRSGMVPRGPTATARFGVPAEGRTPPPFPGEPWKVCVNVHSFKPEELMVKTKDGYVEVSGKHEEKQQEGGIVSKNFTKKIQLPAEVDPVTVFASLSPEGLLIIEAPQVPPYSTFGESSFNNELPQDSQEVTCT

SEQ ID NO: 55162 - protein, 233 aa, Homo sapiens
MDSPEDADLFHSEEIKAPEKEEFLAWQHDLEVNDKAPAQARPTVFRWTGGGKEVYLSGSFNNWSKLPLTRSHNNFVAILDLPEGEHQYKFFVDGQWTHDPSEPIVTSQLGTVNNIIQVKKTDFEVFDALMVDSQKCSDVSELSSSPPGPYHQEPYVCKPEERFRAPPILPPHLLQVILNKDTGISCDPALLPEPNHVMLNHLYALSIKDGVMVLSATHRYKKKYVTTLLYKPI

SEQ ID NO: 55163 - protein, 57 aa, Homo sapiens
LQDEEDDSLCRICMDAVIDCVLLECGHMVTCTKCGKRMSECPICRQYVVRAVHVFKS

SEQ ID NO: 55164 - protein, 34 aa, Homo sapiens
LAFTFLILFLGNFLTTLKVVHAKLQKNRGKTKQP

SEQ ID NO: 55165 - protein, 194 aa, Homo sapiens
ISESSGADCKGDPRNSAKLDADYPLRVLYCGVCSLPTEYCEYMPDVAKCRQWLEKNFPNEFAKLTVENSPKQEAGISEGQGTAGEEEEKKKQKRGGRGQIKQKKKTVPQKVTIAKIPRAKKKYVTRVCGLATFEIDLKEAQRFFAQKFSCGASVTGEDEIIIQGDFTDDIIDVIQEKWPEVDDDSIEDLGEVKK

SEQ ID NO: 55166 - protein, 75 aa, Homo sapiens
KSRIQAMKPMTKEEWDARQSIIRKVVDPETGRTRLIKGDGEVLEEIVTKERHREINKQATRGDCLAFQMRAGLLP

SEQ ID NO: 55167 - protein, 20 aa, Homo sapiens
LYDYGDRSKASIEAHPWLKH

SEQ ID NO: 55168 - protein, 28 aa, Homo sapiens
VWPDNDWERERDFRDDRIKGREKKERGK

SEQ ID NO: 55169 - protein, 185 aa, Homo sapiens
TVSGYFVSIDAHAEECFFERVTSGTKMGLIFEVAEGGFLDIDVEITGPDNKGIYKGDRESSGKYTFAAHMDGTYKFCFSNRMSTMTPKIVMFTIDIGEAPKGQDMETEAHQNKLEEMINELAVAMTAVKHEQEYMEVRERIHRAINDNTNSRVVLWSFFEALVLVAMTLGQIYYLKRFFEVRRVV

SEQ ID NO: 55170 - protein, 281 aa, Homo sapiens
KESQFTLSKCIDAVMVLGNSHLFMNRSNKLAVIASHIQESRFLYPGKNGRLGDFFGDPGNPPEFNPSGSKDGKYELLTSANEVIVEEIKDLMTKSDIKGQHTETLLAGSLAKALCYIHRMNKEVKDNQEMKSRILVIKAAEDSALQYMNFMNVIFAAQKQNILIDACVLDSDSGLLQQACDITGGLYLKVPQMPSLLQYLLWVFLPDQDQRSQLILPPPVHVDYRAACFCHRNLIEIGYVCSVCLSIFCNFSPICTTCETAFKISLPPVLKAKKKKLKVSA

SEQ ID NO: 55171 - protein, 80 aa, Homo sapiens
LEKAIAFADRLRAVDTDGVEPMESVLEDRCLYLRSDNVVEGNCADELLQNSHRVVEEYFVAPPGNISLPKLDEQEPFPHS

SEQ ID NO: 55172 - protein, 54 aa, Homo sapiens
VPSFQNSFSQAIEAAFMKLDTPATSDPLSEEKGGKKRKKQKQKLLFSTSVVHTK

SEQ ID NO: 55173 - protein, 274 aa, Homo sapiens
LLLLPPAIRGPGLGVAGVAGAAGAGLPESVIWAVNAGGEAHVDVHGIHFRKDPLEGRVGRASDYGMKLPILRSNPEDQILYQTERYNEETFGYEVPIKEEGDYVLVLKFAEVYFAQSQQKVFDVRLNGHVVVKDLDIFDRVGHSTAHDEIIPMSIRKGKLSVQGEVSTFTGKLYIEFVKGYYDNPKVCALYIMAGTVDDVPKLQPHPGLEKKEEEEEEEEYDEGSNLKKQTNKNRVQSGPRTPNPYASDNSSLMFPILVAFGVFIPTLFCLCRL

SEQ ID NO: 55174 - protein, 23 aa, Homo sapiens
IYEGTSEIQRLVIAGHLLRSYRS

SEQ ID NO: 55175 - protein, 103 aa, Homo sapiens
LRLWALSLAHAQLSDVLWAMLMRVGLRVDTTYGVLLLLPVIALFAVLTIFILLIMEGLSAFLHAIRLHWVEFQNKFYVGAGTKFVPFSFSLLSSKFNNDDSVA

SEQ ID NO: 55176 - protein, 20 aa, Homo sapiens
KTGREKLRLTLNLPNRASLR

SEQ ID NO: 55177 - protein, 29 aa, Homo sapiens
KLEHLEKQVRLLNIRLNRVLESLDRSKDK

SEQ ID NO: 55178 - protein, 146 aa, Homo sapiens
VYKGEIQARNLGMAVEAWNEEGKAVWGESGELVCTKPIPCQPTHFWNDENGNKYRKAYFSKFPGIWAHGDYCRINPKTGGIVMLGRSDGTLNPNGVRFGSSEIYNIVYAQRQESGSCRQTDHRWKSRGARRCFLEPRDPGSVPGHP

SEQ ID NO: 55179 - protein, 162 aa, Homo sapiens
IWAFVAPALFVIVVNIGILIAVTRVISQISADNYKIHGDPSAFKLTAKAVAVLLPILGTSWVFGVLAVNGCAVVFQYMFATLNSLQGLFIFLFHCLLNSEVRAAFKHKTKVWSLTSSSARTSNAKPFHSDLMNGTRPGMASTKLSPWDKSSHSAHRVDLSAV

SEQ ID NO: 55180 - protein, 115 aa, Homo sapiens
KAVAVLLPILGTSWVFGVLAVNGCAVVFQYMFATLNSLQGLFIFLFHCLLNSEVRAAFKHKTKVWSLTSSSARTSNAKPFHSDLMNGTRPGMASTKLSPWDKSSHSAHRVDLSAV

SEQ ID NO: 55181 - protein, 35 aa, Homo sapiens
IHTGEKPYRCIECGKAFSQKSQLINHQRTHTVKKS

SEQ ID NO: 55182 - protein, 36 aa, Homo sapiens
KSKAKVLAGLVSGEGLLCASKMTPCCCILWRHSLEN

SEQ ID NO: 55183 - protein, 39 aa, Homo sapiens
LLLEGLQHMLSDQADIENVTKCKLCIERRLSALLTGICA

SEQ ID NO: 55184 - protein, 36 aa, Homo sapiens
TPLQFININYVPLKFRVLFANLAALFWYAYLASLGK

SEQ ID NO: 55185 - protein, 85 aa, Homo sapiens
KAQIEKRIQEIIEQLDVTTSEYEKEKLNERLAKLSDVVAVLKVGGTSDVEVNEKKDRVRMPLMLQELLLKKALYWEGVVPCFDAF

SEQ ID NO: 55186 - protein, 365 aa, Homo sapiens
KSPLELGEKLSPLPGGPGAGDPRIWPGRSTPESDVGAGGEEEAGSPPFSPPAGGGVPEGTGAGGLAAGGTGGGPDRLEPEMVRMVVESVERIFRSFPRGDAGEVTSLLKLNKKLARSVGHIFEMDDNDSQKEEEIRKYSIIYGRFDSKRREGKQLSLHELTINEAAAQFCMRDNTLLLRRVELFSLSRQVARESTYLSSLKGSRLHPEELGGPPLKKLKQEVGEQSHPEIQQPPPGPESYVPPYRPSLEEDSASLSGESLDGHLQAVGSCPRLTPPPADLPLALPAHGLWSRHILQQTLMDEGLRLARLVSHDRVGRLSPCVPAKPPLAEFEEGLLDRCPAPGPHPALVEGRRSSVKVEAEASRQ

SEQ ID NO: 55187 - protein, 40 aa, Homo sapiens
MALAVWRALQWTGSQATSTGQTRALMSSRSPGSMAPSATW

SEQ ID NO: 55188 - protein, 30 aa, Homo sapiens
IFVSFLSFDYKLVQKVCPDYNFQSEHPYFG

SEQ ID NO: 55189 - protein, 39 aa, Homo sapiens
KLQLQEALLYLIQNDDNFLNIIYEAYLFSMTQAAMKKTM

SEQ ID NO: 55190 - protein, 12 aa, Homo sapiens
LAECGKWHMFQK

SEQ ID NO: 55191 - protein, 74 aa, Homo sapiens
KPEVVKTHLRDMIILPKMVGSMVGVYNGKTFNQVEIKPEMISHYLGEFSITYKLVKHCRPGIGATHSSRFIPLK

SEQ ID NO: 55192 - protein, 120 aa, Homo sapiens
IIRFAVPSATKEPTCTMTVQARGRIRTAGSVRAAPSPLQKTTSDTASAAPNAERKWVRWRSLLAQWTGTPCVAAGRTSTGIIGVKTFSSASIAASASMGPCTSPARRNRTPCAPAMQVSF

SEQ ID NO: 55193 - protein, 176 aa, Homo sapiens
IDNMSLLGPKVLLFLAAFIITSDWIPLGVNSQRGDDVTQATPETFTEDPNLVNDPATDETVLAVLADIAPSTDDLASLSEKNTTAECWDEKFTCTRLYSVHRPVKQCIHQLCFTSLRRMYIVNKEICSRLVCKEHEAMKDELCRQMAGLPPRRLRRSNYFRLPPCENVDLQRPNGL

SEQ ID NO: 55194 - protein, 413 aa, Homo sapiens
LTLRLSASQNCLKKSLEDVVIDIQSSLSKGIRGNEPVYTSTQEDCINSCCSTKNISGDKACNLMIFDTRKTARQPNCYLFFCPNEEACPLKPAKGLMSYRIITDFPSLTRNLPSQELPQEDSLLHGQFSQAVTPLAHHHTDYSKPTDISWRDTLSQKFGSSDHLEKLFKMDEASAQLLAYKEKGHSQSSQFSSDQEIAHLLPENVSALPATVAVASPHTTSATPKPATLLPTNASVTPSGTSQPQLATTAPPVTTVTSQPPTTLISTVFTRAAATLQAMATTAVLTTTFQAPTDSKGSLETIPFTEISNLTLNTGNVYNPTALSMSNVESSTMNKTASWEGREASPGSSSQGSVPENQYGLPFEKWLLIGSLLFGVLFLVIGLVLLGRILSESLRRKRYSRLDYLINGIYVDI

SEQ ID NO: 55195 - protein, 198 aa, Homo sapiens
VRRERLGYNMLGMIKNSLFGSVETWPWQVLSKGDKEEVAYEERACEGGKFATVEVTDKPVDEALREAMPKVAKYAGGTNDKGIGMGMTVPISFAVFPNEDGSLQKKLKVWFRIPNQFQSDPPAPSDKSVKIEEREGITVYSMQFGGYAKEADYVAQATRLRAALEGTATYRGDIYFCTGYDPPMKPYGRRNEIWLLKT

SEQ ID NO: 55196 - protein, 111 aa, Homo sapiens
LSRRCDFRMSGRGKGGKGLGKGGAKRHRKVLRDNIQGITKPAIRRLARRGGVKRISGLIYEETRGVLKVFLENVIRDAVTYTEHAKRKTVTAMDVVYALKRQGRTLYGFGG

SEQ ID NO: 55197 - protein, 20 aa, Homo sapiens
MMIMLGAICAIIVVVIVRRG

SEQ ID NO: 55198 - protein, 116 aa, Homo sapiens
LWDWVPLACRSFSLGVPRLIGIRLTLPPPKVVDRWNEKRAMFGVYDNIGILGNFEKHPKELIRGPIWLRGWKGNELQRCIRKRKMVGSRMFADDLHNLNKRIRYLYKHFNRHGKFR

SEQ ID NO: 55199 - protein, 1863 aa, Homo sapiens
LSETETPKLKKKKKPKKPRDPKIPKSKRQKKELGDSSGEGPEFVEEEEEVALRSDSEGSDYTPGKKKKKKLGPKKEKKSKSKRKEEEEEEDDDDDSKEPKSSAQLLEDWGMEDIDHVFSEEDYRTLTNYKAFSQFVRPLIAAKNPKIAVSKMMMVLGAKWREFSTNNPFKGSSGASVAAAAAAAVAVVESMVTATEVAPPPPPVEVPIRKAKTKEGKGPNARRKPKGSPRVPDAKKPKPKKVAPLKIKLGGFGSKRKRSSSEDDDLDVESDFDDASINSYSVSDGSTSRSSRSRKKLRTTKKKKKGEEEVTAVDGYETDHQDYCEVCQQGGEIILCDTCPRAYHMVCLDPDMEKAPEGKWSCPHCEKEGIQWEAKEDNSEGEEILEEVGGDLEEEDDHHMEFCRVCKDGGELLCCDTCPSSYHIHCLNPPLPEIPNGEWLCPRCTCPALKGKVQKILIWKWGQPPSPTPVPRPPDADPNTPSPKPLEGRPERQFFVKWQGMSYWHCSWVSELQLELHCQVMFRNYQRKNDMDEPPSGDFGGDEEKSRKRKNKDPKFAEMEERFYRYGIKPEWMMIHRILNHSVDKKGHVHYLIKWRDLPYDQASWESEDVEIQDYDLFKQSYWNHRELMRGEEGRPGKKLKKVKLRKLERPPETPTVDPTVKYERQPEYLDATGGTLHPYQMEGLNWLRFSWAQGTDTILADEMGLGKTVQTAVFLYSLYKEGHSKGPFLVSAPLSTIINWEREFEMWAPDMYVVTYVGDKDSRAIIRENEFSFEDNAIRGGKKASRMKKEASVKFHVLLTSYELITIDMAILGSIDWACLIVDEAHRLKNNQSKFFRVLNGYSLQHKLLLTGTPLQNNLEELFHLLNFLTPERFHNLEGFLEEFADIAKEDQIKKLHDMLGPHMLRRLKADVFKNMPSKTELIVRVELSPMQKKYYKYILTRNFEALNARGGGNQVSLLNVVMDLKKCCNHPYLFPVAAMEAPKMPNGMYDGSALIRASGKLLLLQKMLKNLKEGGHRVLIFSQMTKMLDLLEDFLEHEGYKYERIDGGITGNMRQEAIDRFNAPGAQQFCFLLSTRAGGLGINLATADTVIIYDSDWNPHNDIQAFSRAHRIGQNKKVMIYRFVTRASVEERITQVAKKKMMLTHLVVRPGLGSKTGSMSKQELDDILKFGTEELFKDEATDGGGDNKEGEDSSVIHYDDKAIERLLDRNQDETEDTELQGMNEYLSSFKVAQYVVREEEMGEEEEVEREIIKQEESVDPDYWEKLLRHHYEQQQEDLARNLGKGKRIRKQVNYNDGSQEDRDWQDDQSDNQSDYSVASEEGDEDFDERSEAPRRPSRKGLRNDKDKPLPPLLARVGGNIEVLGFNARQRKAFLNAIMRYGMPPQDAFTTQWLVRDLRGKSEKEFKAYVSLFMRHLCEPGADGAETFADGVPREGLSRQHVLTRIGVMSLIRKKVQEFEHVNGRWSMPELAEVEENKKMSQPGSPSPKTPTPSTPGDTQPNTPAPVPPAEDGIKIEENSLKEEESIEGEKEVKSTAPETAIECTQAPAPASEDEKVVVEPPEGEEKVEKAEVKERTEEPMETEPKGAADVEKVEEKSAIDLTPIVVEDKEEKKEEEEKKEVMLQNGETPKDLNDEKQKKNIKQRFMFNIADGGFTELHSLWQNEERAATVTKKTYEIWHRRHDYWLLAGIINHGYARWQDIQNDPRYAILNEPFKGEMNRGNFLEIKNKFLARRFKLLEQALVIEEQLRRAAYLNMSEDPSHPSMALNTRFAEVECLAESHQHLSKESMAGNKPANAVLHKVLKQLEELLSDMKADVTRLPATIARIPPVAVRLQMSERNILSRLANRAPEPTPQQVAQQQ

SEQ ID NO: 55200 - protein, 35 aa, Homo sapiens
KGPQPPTVSPIRSSRPPPAKRKKSQSRGNSQLLLS

SEQ ID NO: 55201 - protein, 242 aa, Homo sapiens
LEHYLDSIENLPFELQRNFQLMRDLDQRTEDLKAEIDKLATEYMSSARSLSSEEKLALLKQIQEAYGKCKEFGDDKVQLAMQTYEMVDKHIRRLDTDLARFEADLKEKQIESSDYDSSSSKGKKSRTQKEKKAARARSKGKNSDEEAPKTAQKKLKLVRTSPEYGMPSVTFGSVHPSDVLDMPVDPNEPTYCLCHQVSYGEMIGCDNPDCSIEWFHFACVGLTTKPRGKWFCPRCSQERKKK

SEQ ID NO: 55202 - protein, 163 aa, Homo sapiens
MQTYEMVDKHIRRLDTDLARFEADLKEKQIESSDYDSSSSKGKKKGRTQKEKKAARARSKGKNSDEEAPKTAQKKLKLVRTSPEYGMPSVTFGSVHPSDVLDMPVDPNEPTYCLCHQVSYGEMIGCDNPDCSIEWFHFACVGLTTKPRGKWFCPRCSQERKKK

SEQ ID NO: 55203 - protein, 30 aa, Homo sapiens
LTPYKTAEHHKDICLTVTTSTIQVEHLASS

SEQ ID NO: 55204 - protein, 22 aa, Homo sapiens
LVQDLKCLVFSLIGLHFKIKPI

SEQ ID NO: 55205 - protein, 309 aa, Homo sapiens
MMLRMAGQEIPEEGREVEEFSEDDDEDDSDDSEAEKQSQKQHKEESHSDGTSTASSQQQAPPQSVPPSQIQAPPMPGPPPLGPPPAPPLRPPGPPTGLPPGPPPGAPPFLRPPGMPGLRGPLPRLLPPGPPPGRPPGPPPGPPPGLPPGPPPRGPPPRLPPPAPPGIPPPRPGMMRPPLVPPLGPAPPGLFPPAPLPNPGVLSAPPNLIQRPKADDTSAATIEKKATATISAKPQITNPKAEITRFVPTALRVRRENKGATAAPQRKSEDDSAVPLAKAAPKSGPSVPVSVQTKDDVYEAFMKEMEGLL

SEQ ID NO: 55206 - protein, 5 aa, Homo sapiens
MDCRE

SEQ ID NO: 55207 - protein, 53 aa, Homo sapiens
ISSTASLRAFQPFFVELTMPYSVIRGEVFTLKATVLNYLPKCIRVLMCLSSCP

SEQ ID NO: 55208 - protein, 5 aa, Homo sapiens
MASTA

SEQ ID NO: 55209 - protein, 5 aa, Homo sapiens
LLNFA

SEQ ID NO: 55210 - protein, 385 aa, Homo sapiens
RKRKVFLKMRRLNRKKTLSLVKELDAFPKVPESYVETSASGGTVSLIAFTTMALLTIMEFSVYQDTWMKYEYEVDKDFSSKLRINIDITVAMKCQYVGADVLDLAETMVASADGLVYEPTVFDLSPQQKEWQRMLQLIQSRLQEEHSLQDVIFKSAFKSTSTALPPREDDSSQSPNACRIHGHLYVNKVAGNFHITVGKAIPHPRGHAHLAALVNHESYNFSHRIDHLSFGELVPAIINPLDGTEKIAIDHNQMFQYFITVVPTKLHTYKISADTHQFSVTERERIINHAAGSHGVSGIFMKYDLSSLMVTVTEEHMPFWQFFVRLCGIVGGIFSTTGMLHGIGKFIVEIICCRFRLGSYKPVNSVPFEDGHTDNHLPLLENNTH

SEQ ID NO: 55211 - protein, 47 aa, Homo sapiens
KGKYVSARAYYERALQLVPDSKLLKENLAKLDRLEKRLQEVREKDQT

SEQ ID NO: 55212 - protein, 34 aa, Homo sapiens
LGVKQLIVGVNKMDSTEPPYSQKRYEEIVKEVNT

SEQ ID NO: 55213 - protein, 24 aa, Homo sapiens
IHAKRVTIMPKDIQLARRIRGERA

SEQ ID NO: 55214 - protein, 86 aa, Homo sapiens
LFKEAPFSEFFLDPGTSVLDTCRKANAIPDGPRGYRMITEGGVSINHQQVTNPESVLIVGQHILKNGLSLLKIGKRNFYIIKWLQL

SEQ ID NO: 55215 - protein, 660 aa, Homo sapiens
IILETNLERKRMASVSALTEELDSITSELHAVEIQIQELTERQQELIQKKKVLTKKIKQCLEDSDAGASNEYDSSPAAWNKEDFPWSGKVKDILQNVFKLEKFRPLQLETINVTMAGKEVFLVMPTGGGKSLCYQLPALCSDGFTLVICPLISLMEDQLMVLKQLGISATMLNASSSKEHVKWVHAEMVNKNSELKLIYVTPEKIAKSKMFMSRLEKAYEARRFTRIAVDEVHCCSQWGHDFRPDYKALGILKRQFPNASLIGLTATATNHVLTDAQKILCIEKCFTFTASFNRPNLYYEVRQKPSNTEDFIEDIVKLINGRYKGQSGIIYCFSQKDSEQVTVSLQNLGIHAGAYHANLEPEDKTTVHRKWSANEIQVVVATVAFGMGIDKPDVRFVIHHSMSKSMENYYQESGRAGRDDMKADCILYYGFGDIFRISSMVVMENVGQQKLYEMVSYCQNISKCRRVLMAQHFDEVWNSEACNKMCDNCCKDSAFERKNITEYCRDLIKILKQAEELNEKLTPLKLIDSWMGKGAAKLRVAGVVAPTLPREDLEKIIAHFLIQQYLKEDYSFTAYATISYLKIGPKANLLNNEAHAITMQVTKSTQNSFRAESSQTCHSEQGDKKMEEKNSGNFQKKAANMLQQSGSKNTGAKKRKIDDA

SEQ ID NO: 55216 - protein, 7 aa, Homo sapiens
LCNLETR

SEQ ID NO: 55217 - protein, 147 aa, Homo sapiens
IRFNLDPECKCTDDRLWEALEIAQLKNMVKSLPGGLDAVVTEGGENFSVGQRQLFCLARAFVRKSSILIMDEATASIDMATENILQKVVMTAFADRTVVTIAHRVHTILTADLVIVMKRGNILEYDTPESLLAQENGVFASFVRADM

SEQ ID NO: 55218 - protein, 385 aa, Homo sapiens
KDCSNGCSAECTGEGGSKEVVGTFKAKDLIVTPATILKEKPDPNNLVFGTVFTDHMLTVEWSSEFGWEKPHIKPLQNLSLHPGSSALHYAVELFEGLKAFRGVDNKIRLFQPNLNMDRMYRSAVRATLPVFDKEELLECIQQLVKLDQEWVPYSTSASLYIRPTFIGTEPSLGVKKPTKALLFVLLSPVGPYFSSGTFNPVSLWANPKYVRAWKGGTGDCKMGGNYGSSLFAQCEAVDNGCQQVLWLYGEDHQITEVGTMNLFLYWINEDGEEELATPPLDGIILPGVTRRCILDLAHQWGEFKVSERYLTMDDLTTALEGNRVREMFGSGTACVVCPVSDILYKGETIHIPTMENGPKLASRILSKLTDIQYGREESDWTIVLS

SEQ ID NO: 55219 - protein, 160 aa, Homo sapiens
VDEYDPTIEDSYRKQVVIDGETCLLDILDTAGQEEYSAMRDQYMRTGEGFLCVFAINNTKSFEDIHHYREQIKRVKDSEDVPMVLVGNKCDLPSRTVDTKQAQDLARSYGIPFIETSAKTRQGVDDAFYTLVREIRKHKEKMSKDGKKKKKKSKTKCVIM

SEQ ID NO: 55220 - protein, 112 aa, Homo sapiens
KSWQDSERLKGILERGKEELAEAEIIKDSPDSPEPPNKKPLVEMDETPQVEKSKGPVSLLSLWSNRINTANSRKHQEFAGRLNSVNNRAELYQHLKEENGMETTENGKASRQ

SEQ ID NO: 55221 - protein, 44 aa, Homo sapiens
IESLFDNRLCTCGTSDSDEGRYIEYIRVKGSNYHLSDNDASDVE

SEQ ID NO: 55222 - protein, 306 aa, Homo sapiens
KSAIIFSIKPLQFHIFAEDQLHHSFKGRLDNWSFLQTFNYTLYPITFPSENAAEWKKLFKPCASQRLFLPLILKEVDSLLYVDTDILFLRPVDDIWSLLKKFNSTQIAAMAPEHEEPRIGWYNRFARHPYYGKTGVNSGVMLMNMTRMRRKYFKNDMTTVRLQWGDILMPLLKKYKLNITWGDQDLLNIVFFHNPESLFVFPCQWNYRPDHCIYGSNCQEAEEGGIFILHGNRGVYHDDKQPAFRAVYEALRNCSFEDDNIRSLLKPLELELQKTVHTYCGKIYKIFIKQLAKSVRDRYARSPKEK

SEQ ID NO: 55223 - protein, 137 aa, Homo sapiens
LKFPISGRKPRPVSQLVAQQVTQQFVPPTQSKKEKKDKVEKEKSEKETTSKKNSHKKTRPRLKNVDRSSAQHLEVTVGDLTVIITDFKEKTKSPPASSAASADQHSQSGSSSDNTERGMSRSSSPRGEASSLNGESH

SEQ ID NO: 55224 - protein, 209 aa, Homo sapiens
KSTVYVSNLPFSLTNNDLYRIFSKYGKVVKVTIMKDKDTRKSKGVAFILFLDKDSAQNCTRAINNKQLFGRVIKASIAIDNGRAAEFIRRRNYFDKSKCYECGESGHLSYACPKNMLGEREPPKKKEKKKKKKAPEPEEEIEEVEESEDEGEDPALDSLSQAIAFQQAKIEEEQKKWKPSSGVPSTSDDSRRPRIKKSTYFSDEEELSD

SEQ ID NO: 55225 - protein, 107 aa, Homo sapiens
LKSSPDMLYQYLKQIEPSLYPKLFQKNLDPDVFNQIVKILHDFYIEKEKPLLIFEILQRLSELKRFDMAVMFMSETEKKIARALFNHIDKSGLKDSSVEELKKRYGG

SEQ ID NO: 55226 - protein, 198 aa, Homo sapiens
LADLVSYSIQKVIGFAKMIPGFRDLTSEDQIVLLKSSAIEVIMLRSNESFTMDDMSWTCGNQDYKYRVSDVTKAGHSLELIEPLIKFQVGLKKLNLHEEEHVLLMAICIVSPDRPGVQDAALIEAIQDRLSNTLQTYIRCRHPPPGSHLLYAKMIQKLADLRSLNEEHSKQYRCLSFQPECSMKLTPLVLEVFGNEIS

SEQ ID NO: 55227 - protein, 31 aa, Homo sapiens
ITKDRPINFTQQHMPYFRKRMVWEILHRKLL

SEQ ID NO: 55228 - protein, 12 aa, Homo sapiens
ITTMIHRSAGLP

SEQ ID NO: 55229 - protein, 118 aa, Homo sapiens
LDYGAEVRVINLIGQTPISRLVALLVRGLGTEKEDSCFELLHRAVGHFELRKNGTMPREVARDPQLCEKLTVLCSAPGTLKTLARYAVRRSLGLQYLPDAVKGLPLPASLKEYLLLLE

SEQ ID NO: 55230 - protein, 68 aa, Homo sapiens
LLFDPSLTLEDHLVKEIAEDPVDILGQMQMAGDGCRSQGSRNSEKASAPLSQSGLATANGKPEPTSIS

SEQ ID NO: 55231 - protein, 30 aa, Homo sapiens
KGYQLECRGVVKVKGKGEMTTYFLNGGPSS

SEQ ID NO: 55232 - protein, 104 aa, Homo sapiens
ILVATDVAGRGIDIQDVSMVVNYDMAKNIEDYIHRIGRTGRAGKSGVAITFLTKEDSAVFYELKQAILESPVSSCPPELANHPDAQHKPGTILTKKRREETIFA

SEQ ID NO: 55233 - protein, 183 aa, Homo sapiens
VIMGNIFGNLLKSLIGKKEMRILMVGLDAAGKTTILYKLKLGEIVTTIPTIGFNVETVEYKNISFTVWDVGGQDKIRPLWRHYFQNTQGLIFVVDSNDRERVNEAREELMRMLAEDELRDAVLLVFANKQDLPNAMNAAEITDKLGLHSLRHRNWYIQATCATSGDGLYEGLDWLANQLKNKK

SEQ ID NO: 55234 - protein, 165 aa, Homo sapiens
LPPPEQPVLVPRLPAPRPVMTLRPSLLPLHLLLLLLLSAAVCRAEAGLETESPVRTLQVETLVEPPEPCAEPAAFGDTLHIHYTGSLVDGRIIDTSLTRDPLVIELGQKQVIPGLEQSLLDMCVGEKRRAIIPSHLAYGKRGFPPSVPGTKDNLMRPPGMTSSSQ

SEQ ID NO: 55235 - protein, 57 aa, Homo sapiens
LKHPCNLSYQLMEDHDIDVKTKGSHIDETALSLLISFDLDASCYATVCLKEIMKHDV

SEQ ID NO: 55236 - protein, 72 aa, Homo sapiens
LSPEDGASTALIAVVITVVFLTLLSVVILIFFYLYKNKGSYVTYEPTEGEPSAIVQMESDLAKGSEKEEYFI

SEQ ID NO: 55237 - protein, 77 aa, Homo sapiens
IENSNAFSTPQTPDIKVSLLGPVTTPEHQLLKTPSSSSLSQRVRSTLTKNTPRFGSKSKSATNLGRQGNFFASPMLK

SEQ ID NO: 55238 - protein, 92 aa, Homo sapiens
IAAVLIALNNVLVILVPTIKYIFGFIGASSATMLIFILPAVFYLKLVKKETFRSPQKVGALIFLVVGIFFMIGSMALIIIDWIYDPPNSKHH

SEQ ID NO: 55239 - protein, 18 aa, Homo sapiens
RGFFCHYADFYSSSSFLS

SEQ ID NO: 55240 - protein, 335 aa, Homo sapiens
IFARARNGKYRLLKISIENEQLVIGSYSQPSDSWDKDYDSFVLPLLEDKQPCYILFRLDSQNAQGYEWIFIAWSPDHSHVRQKMLYAATRATLKKEFGGGHIKDEVFGTVKEDVSLHGYKKYLLSQSSPAPLTAAEEELRQIKINEVQTDVGVDTKHQTLQGVAFPISREAFQALEKLNNRQLNYVQLEIDIKNEIIILANTTNTELKDLPKRIPKDSARYHFFLYKHSHEGDYLESIVFIYSMPGYTCSIRERMLYSSCKSRLLEIVERQLQMDVIRKIEIDNGDELTADFLYEEVHPKQHAHKQSFAKPKGPAGKRGIRRLIRGPAETEATTD

SEQ ID NO: 55241 - protein, 1461 aa, Homo sapiens
KKTVCTLNMGDKKYEDMEGEENGDNTISTGLLYSEADRCPICLNCLLEKEVGFPESCNHVFCMTCILKWAETLASCPIDRKPFQAVFKFSALEGYVKVQVKKQLRETKDKKNENSFEKQVSCHENSKSCIRRKAIVREDLLSAKVCDLKWIHRNSLYSETGGKKNAAIKINKPQRSNWSTNQCFRNFFSNMFSSVSHSGESSFTYRAYCTEFIEASEISALIRQKRHELELSWFPDTLPGIGRIGFIPWNVETEVLPLISSVLPRTIFPTSTISFEHFGTSCKGYALAHTQEGEEKKQTSGTSNTRGSRRKPAMTTPTRRSTRNTRAETASQSQRSPISDNSGCDAPGNSNPSLSVPSSAESEKQTRQAPKRKSVRRGRKPPLLKKKLRSSVAAPEKSSSNDSVDEETAESDTSPVLEKEHQPDVDSSNICTVQTHVENQSANCLKSCNEQIEESEKHTANYDTEERVGSSSSESCAQDLPVLVGEEGEVKKLENTGIEANVLCLESEISENILEKGGDPLEKQDQISGLSQSEVKTDVCTVHLPNDFPTCLTSESKVYQPVSCPLSDLSENVESVVNEEKITESSLVEITEHKDFTLKTEELIESPKLESSEGEIIQTVDRQSVKSPEVQLLGHVETEDVEIIATCDTFGNEDFNNIQDSENNLLKNNLLNTKLEKSLEEKNESLTEHPRSTELPKTHIEQIQKHFSEDNNEMIPMECDSFCSDQNESEVEPSVNADLKQMNENSVTHCSENNMPSSDLADEKVETVSQPSESPKDTIDKTKKPRTRRSRFHSPSTTWSPNKDTPQEKKRPQSPSPRRETGKESRKSQSPSPKNESARGRKKSRSQSPKKDIARERRQSQSRSPKRDTTRESRRSESLSPRRETSRENKRSQPRVKDSSPGEKSRSQSRERESDRDGQRRERERRTRKWSRSRSHSRSPSRCRTKSKSSSFGRIDRDSYSPRWKGRWANDGWRCPRGNDRYRKNDPEKQNENTRKEKNDIHLDADDPNSADKHRNDCPNWITEKINSGPDPRTRNPEKLKESHWEENRNENSGNSWNKNFGSGWVSNRGRGRGNRGRGTYRSSFAYKDQNENRWQNRKPLSGNSNSSGSESFKFVEQQSYKRKSEQEFSFDTPADRSGWTSASSWAVRKTLPADVQNYYSRRGRNSSGPQSGWMKQEEETSGQDSSLKDQTNQQVDGSQLPINMMQPQMNVMQQQMNAQHQPMNIFPYPVGVHAPLMNIQRNPFNIHPQLPLHLHTGVPLMQVATPTSVSQGLPPPPPPPPPSQQVNYIASQPDGKQLQGIPSSSHVSNNMSTPVLPAPTAAPGNTGMVQGPSSGNTSSSSHSKASNAAVKLAESKVSVAVEASADSSKTDKKLQIQEKAAQEVKLAIKPFYQNKDITKEEYKEIVRKAVDKVCHSKSGEVNSTKVANLVKAYVDKYKYSRKGSQKKTLEEPVSTEKNIG

SEQ ID NO: 55242 - protein, 41 aa, Homo sapiens
LSETTIQTPDGEERLGGEAHSMVWDPSGERLAVLMKGERQG

SEQ ID NO: 55243 - protein, 17 aa, Homo sapiens
ILLFRTRNSPVFELLPW

SEQ ID NO: 55244 - protein, 50 aa, Homo sapiens
VLGRAQEPPAGGGGSIHDLPLFTETSPTSAPWDPLPGPPPVLPHSPHSHL

SEQ ID NO: 55245 - protein, 92 aa, Homo sapiens
LLAHKDCPVTALQKKTQGYLESPKESSEPTGSPAPVIQHSSATAPSNGLSVRSAAEAVATSVLTQMASQRTELSMPIQSHVIMTPQSQSAGR

SEQ ID NO: 55246 - protein, 218 aa, Homo sapiens
RADVSVSDHSQSRGPGGLSLSGGTVCDMGKKTKRTADSSSSEDEEEYVVEKVLDRRVVKGQVEYLLKWKGFSEEHNTWEPEKNLDCPELISEFMKKYKKMKEGENNKPREKSESNKRKSNFSNSADDIKSKKKREQSNDIARGFERGLEPEKIIGATDSCGDLMFLMKWKDTDEADLVLAKEANVKCPQIVIAFYEERLTWHAYPEDAENKEKETAKS

SEQ ID NO: 55247 - protein, 614 aa, Homo sapiens
KDGEDLKDHSTESKKMENCLGESRHEVEKSEISENTDASGKIEKYNVPLNRLKMMFEKGEPTQTKILRAQSRSASGRKISENSYSLDDLEIGPGQLSSSTFDSEKNESRRNLELPRLSETSIKDRMAKYQAAVSKQSSSTNYTNELKASGGEIKIHKMEQKENVPPGPEVCITHQEGEKISANENSLAVRSTPAEDDSRDSQVKSEVQQPVHPKPLSPDSRASSLSESSPPKAMKKFQAPARETCVECQKTVYPMERLLANQQVFHISCFRCSYCNNKLSLGTYASLHGRIYCKPHFNQLFKSKGNYDEGFGHRPHKDLWASKNENEEILERPAQLANARETPHSPGVEDAPIAKVGVLAASMEAKASSQQEKEDKPAETKKLRIAWPPPTELGSSGSALEEGIKMSKPKWPPEDEISKPEVPEDVDLDLKKLRRSSSLKERSRPFTVAASFQSTSVKSPKTVSPPIRKGWSMSEQSEESVGGRVAERKQVENAKASKKNGNVGKTTWQNKESKGETGKRSKEGHSLEMENENLVENGADSDEDDNSFLKQQSPQEPKSLNWSSFVDNTFAEEFTTQNQKSQDVELWEGEVVKELSVEEQIKRNRYYDEDEDEE

SEQ ID NO: 55248 - protein, 4 aa, Homo sapiens
KEDL

SEQ ID NO: 55249 - protein, 559 aa, Homo sapiens
LGPEQKMSDDSVSGDHGESASLGNINPAYSNPSLSQSPGDSEEYFATYFNEKISIPEEEYSCFSFRKLWAFTGPGFLMSIAYLDPGNIESDLQSGAVAGFKLLWILLLATLVGLLLQRLAARLGVVTGLHLAEVCHRQYPKVPRVILWLMVELAIIGSDMQEVIGSAIAINLLSVGRIPLWGGVLITIADTFVFLFLDKYGLRKLEAFFGFLITIMALTFGYEYVTVKPSQSQVLKGMFVPSCSGCRTPQIEQAVGIVGAVIMPHNMYLHSALVKSRQVNRNNKQEVREANKYFFIESCIALFVSFIINVFVVSVFAEAFFGKTNEQVVEVCTNTSSPHAGLFPKDNSTLAVDIYKGGVVLGCYFGPAALYIWAVGILAAGQSSTMTGTYSGQFVMEGFLNLKWSRFARVVLTRSIAIIPTLLVAVFQDVEHLTGMNDFLNVLQSLQLPFALIPILTFTSLRPVMSDFANGLGWRIAGGILVLIICSINMYFVVVYVRDLGHVALYVVAAVVSVAYLGFVFYLGWQCLIALGMSFLDCGHTVSISKGLLTEEATRGYVK

SEQ ID NO: 55250 - protein, 566 aa, Homo sapiens
LGPEQKMSDDSVSGDHGESASLGNINPAYSNPSLSQSPGDSEEYFATYFNEKISIPEEEYSCFSFRKLWAFTGPGFLMSIAYLDPGNIESDLQSGAVAGFKLLWILLLATLVGLLLQRLAARLGVVTGLHLAEVCHRQYPKVPRVILWLMVELAIIGSDMQEVIGSAIAINLLSVGRIPLWGGVLITIADTFVFLFLDKYGLRKLEAFFGFLITIMALTFGYEYVTVKPSQSQVLKGMFVPSCSGCRTPQIEQAVGIVGAVIMPHNMYLHSALVKSRQVNRNNKQEVREANKYFFIESCIALFVSFIINVFVVSVFAEAFFGKTNEQVVEVCTNTSSPHAGLFPKDNSTLAVDIYKGGVVLGCYFGPAALYIWAVGILAAGQSSTMTGTYSGQFVMEGFLNLKWSRFARVVLTRSIAIIPTLLVAVFQDVEHLTGMNDFLNVLQSLQLPFALIPILTFTSLRPVMSDFANGLGWRIAGGILVLIICSINMYFVVVYVRDLGHVALYVVAAVVSVAYLGFVFYLGWQCLIALGMSFLDCGHTCHLGLTAQPELYLLNTMDADSLVSR

SEQ ID NO: 55251 - protein, 5 aa, Homo sapiens
LASWW

SEQ ID NO: 55252 - protein, 411 aa, Homo sapiens
MSDVLALPIFKQEESSLPPDNENKILPFQYVLCAATSPAVKLHDETLTYLNQGQSYEIRMLDNRKLGELPEINGKLVKSIFRVVFHDRRLQYTEHQQLEGWRWNRPGDRILDIDIPMSVGIIDPRANPTQLNTVEFLWDPAKRTSVFIQPKGADRKQKTDREKMEKRTPHEKEKYQPSYETTILTECSPWPEITYVNNSPSPGFNSSHSSFSLGEGNGSPNHQPEPPPPVTDNLLPTTTPQEAQQWLHRNRFSTFTRLFTNFSGADLLKLTRDDVIQICGPADGIRLFNALKGRMVRPRLTIYVCQESLQLREQQQQQQQQQQKHEDGDSNGTFFVYHAIYLEELTAVELTEKIAQLFSISPCQISQIYKQGPTGIHVLISDEMIQNFQEEACFILDTMKETNDSYHIILK

SEQ ID NO: 55253 - protein, 424 aa, Homo sapiens
VKLHDETLTYLNQGQSYEIRMLDNRKLGELPEINGKLVKSIFRVVFHDRRLQYTEHQQLEGWRWNRPGDRILDIDIPMSVGIIDPRANPTQLNTVEFLWDPAKRTSVFIQVHCISTEFTMRKHGGEKGVPFRVQIDTFKENENGEYTEHLHSASCQIKVFKPKGADRKQKTDREKMEKRTPHEKEKYQPSYETTILTECSPWPEITYVNNSPSPGFNSSHSSFSLGEGNGSPNHQPEPPPPVTDNLLPTTTPQEAQQWLHRNRFSTFTRLFTNFSGADLLKLTRDDVIQICGPADGIRLFNALKGRMVRPRLTIYVCQESLQLREQQQQQQQQQQKHEDGDSNGTFFVYHAIYLEELTAVELTEKIAQLFSISPCQISQIYKQGPTGIHVLISDEMIQNFQEEACFILDTMKAETNDSYHIILK

SEQ ID NO: 55254 - protein, 1045 aa, Homo sapiens
TPESPLHAVQLRWGPRRRPPLLPLLLLLLPPPPRVGGFNLDAEAPAVLSGPPGSFFGFSVEFYRPGTDGVSVLVGAPKANTSQPGVLQGGAVYLCPWGASPTQCTPIEFDSKGSRLLESSLSSSEGEEPVEYKSLQWFGATVRAHGSSILACAPLYSWRTEKEPLSDPVGTCYLSTDNFTRILEYAPCRSDFSWAAGQGYCQGGFSAEFTKTGRVVLGGPGSYFWQGQILSATQEQIAESYYPEYLINLVQGQLQTRQASSIYDDSYLGYSVAVGEFSGDDTEDFVAGVPKGNLTYGYVTILNGSDIRSLYNFSGEQMASYFGYAVAATDVNGDGLDDLLVGAPLLMDRTPDGRPQEVGRVYVYLQHPAGIEPTPTLTLTGHDEFGRFGSSLTPLGDLDQDGYNDVAIGAPFGGETQQGVVFVFPGGPGGLGSKPSQVLQPLWAASHTPDFFGSALRGGRDLDGNGYPDLIVGSFGVDKAVVYRGRPIVSASASLTIFPAMFNPEERSCSLEGNPVACINLSFCLNASGKHVADSIGFTVELQLDWQKQKGGVRRALFLASRQATLTQTLLIQNGAREDCREMKIYLRNESEFRDKLSPIHIALNFSLDPQAPVDSHGLRPALHYQSKSRIEDKAQILLDCGEDNICVPDLQLEVFGEQNHVYLGDKNALNLTFHAQNVGEGGAYEAELRVTAPPEAEYSGLVRHPGNFSSLSCDYFAVNQSRLLVCDLGNPMKAGASLWGGLRFTVPHLRDTKKTIQFDFQILSKNLNNSQSDVVSFRLSVEAQAQVTLNGVSKPEAVLFPVSDWHPRDQPQKEEDLGPAVHHVYELINQGPSSISQGVLELSCPQALEGQQLLYVTRVTGLNCTTNHPINPKGLELDPEGSLHHQQKREAPSRSSASSGPQILKCPEAECFRLRCELGPLHQQESQSLQLHFRVWAKTFLQREHQPFSLQCEAVYKALKMPYRILPRQLPQKERQVATAVQWTKAEGSYGVPLWIIILAILFGLLLLGLLIYILYKLGFFKRSLPYGTAMEKAQLKPPATSDA

SEQ ID NO: 55255 - protein, 40 aa, Homo sapiens
IKLDLKTKSENGLEFTSSDSANTVATKVMGSLETKYRWTE

SEQ ID NO: 55256 - protein, 30 aa, Homo sapiens
MNFETAKSRVTQSNFAVGYKTDEFQLHTNV

SEQ ID NO: 55257 - protein, 34 aa, Homo sapiens
KCYPCENSYSTRGSASVLYQHFCLQHCTSSATSS

SEQ ID NO: 55258 - protein, 22 aa, Homo sapiens
LETSESLSDSLYDSLSSCGSQG

SEQ ID NO: 55259 - protein, 869 aa, Homo sapiens
KSQIMSLWGLVSKMPPEKVQRLYVDFPQHLRHLLGDWLESQPWEFLVGSDAFCCNLASALLSDTVQHLQASVGEQGEGSTILQHISTLESIYQRDPLKLVATFRQILQGEKKAVMEQFRHLPMPFHWKQEELKFKTGLRRLQHRVGEIHLLREALQKGAEAGQVSLHSLIETPANGTGPSEALAMLLQETTGELEAAKALVLKRIQIWKRQQQLAGNGAPFEESLAPLQERCESLVDIYSQLQQEVGAAGGELEPKTRASLTGRLDEVLRTLVTSCFLVEKQPPQVLKTQTKFQAGVRFLLGLRFLGAPAKPPLVRADMVTEKQARELSVPQGPGAGAESTGEIINNTVPLENSIPGNCCSALFKNLLLKKIKRCERKGTESVTEEKCAVLFSASFTLGPGKLPIQLQALSLPLVVIVHGNQDNNAKATILWDNAFSEMDRVPFVVAERVPWEKMCETLNLKFMAEVGTNRGLLPEHFLFLAQKIFNDNSLSMEAFQHRSVSWSQFNKMRNLMLRGLCSLFKFPKQEILLGRGFTFWQWFDGVLDLTKRCLRSYWSDRLIIGFISKQYVTSLLLNEPDGTFLLRFSDSEIGGITIAHVIRGQDGSPQIENIQPFSAKDLSIRSLGDRIRDLAQLKNLYPKKPKDEAFRSHYKPEQMGKDGRGYVPATIKMTVERDQPLPTPELQMPTMVPSYDLGMAPDSSMSMQLGPDMVPQVYPPHSHSIPPYQGLSPEESVNVLSAFQEPHLQMPPSLGQMSLPFDQPHPQGLLPCQPQEHAVSSPDPLLCSDVTMVEDSCLSQPVTAFPQGTWIGEDIFPPLLPPTEQDLTKLLLEGQGESGGGSLGAQPLLQPSHYGQSGISMSHMDLRANPSW

SEQ ID NO: 55260 - protein, 55 aa, Homo sapiens
RPFSAVFAPSMLASQVPPLSSLRIRRKQTPLLSRICSSVSSTSSTRSQGPACSQR

SEQ ID NO: 55261 - protein, 1103 aa, Homo sapiens
LCAVLGRAGRSDSGGRGELGQPSGVAAERPCPTTCRCLGDLLDCSRKRLARLPEPLPSWVARLDLSHNRLSFIKASSMSHLQSLREVKLNNNELETIPNLGPVSANITLLSLAGNRIVEILPEHLKEFQSLETLDLSSNNISELQTAFPALQLKYLYLNSNRVTSMEPGYFDNLANTLLVLKLNRNRISAIPPKMFKLPQLQHLELNRNKIKNVDGLTFQGLGALKSLKMQRNGVTKLMDGAFWGLSNMEILQLDHNNLTEITKGWLYGLLMLQELHLSQNAINRISPDAWEFCQKLSELDLTFNHLSRLDDSSFLGLSLLNTLHIGNNRVSYIADCAFRGLSSLKTLDLKNNEISWTIEDMNGAFSGLDKLRRLILQGNRIRSITKKAFTGLDALEHLDLSDNAIMSLQGNAFSQMKKLQQLHLNTSSLLCDCQLKWLPQWVAENNFQSFVNASCAHPQLLKGRSIFAVSPDGFVCDDFPKPQITVQPETQSAIKGSNLSFICSAASSSDSPMTFAWKKDNELLHDAEMENYAHLRAQGGEVMEYTTILRLREVEFASEGKYQCVISNHFGSSYSVKAKLTVNMLPSFTKTPMDLTIRAGAMARLECAAVGHPAPQIAWQKDGGTDFPAARERRMHVMPEDDVFFIVDVKIEDIGVYSCTAQNSAGSISANATLTVLETPSFLRPLLDRTVTKGETAVLQCIAGGSPPPKLNWTKDDSPLVVTERHFFAAGNQLLIIVDSDVSDAGKYTCEMSNTLGTERGNVRLSVIPTPTCDSPQMTAPSLDDDGWATVGVVIIAVVCCVVGTSLVWVVIIYHTRRRNEDCSITNTDETNLPADIPSYLSSQGTLADRQDGYVSSESGSHHQFVTSSGAGFFLPQHDSSGTCHIDNSSEADVEAATDLFLCPFLGSTGPMYLKGNVYGSDPFETYHTGCSPDPRTVLMDHYEPSYIKKKECYPCSHPSEESCERSFSNISWPSHVRKLLNTSYSHNEGPGMKNLCLNKSSLDFSANPEPASVASSNSFMGTFGKALRRPHLDAYSSFGQPSDCQPRAFYLKAHSSPDLDSGSEEDGKERTDFQEENHICTFKQTLENYRTPNFQSYDLDT

SEQ ID NO: 55262 - protein, 165 aa, Homo sapiens
LHVWGRLWNSTFLEEYSAVKSLEVIVRANITVKSSIKNLMLRDASTVIPVMVYLDPMAVVAEGVPWWVILLAVLAGLLVLALLVLLLWKMGFFKRAKHPEATVPQYHAVKIPREDRQQFKEEKTGTILRNNWGSPRREGPDAHPILAADGHPELGPDGHPGPGTA

SEQ ID NO: 55263 - protein, 81 aa, Homo sapiens
LLLWKMGFFKRAKHPEATVPQYHAVKIPREDRQQFKEEKTGTILRNNWGSPRREGPDAHPILAADGHPELGPDGHPGPGTA

SEQ ID NO: 55264 - protein, 228 aa, Homo sapiens
KFLLYVLLLAFCACAVGLIAVGVGAQLVLSQTIIQGATPGSLLPVVIIAVGVFLFLVAFVGCCGACKENYCLMITFAIFLSLIMLVEVAAAIAGYVFRDKVMSEFNNNFRQQMENYPKNNHTASILDRMQADFKCCGAANYTDWEKIPSMSKNRVPDSCCINVTVGCGINFNEKAIHKEGCVEKIGGWLRKNVLVVAAAALGIAFVEVLGIVFACCLVKSIRSGYEVM

SEQ ID NO: 55265 - protein, 206 aa, Homo sapiens
TVELHKLKLAELKQECLARGLETKGIKQDLIHRLQAYLEEHAEEEANEEDVLGDETEEEETKPIELPVKEEEPPEKTVDVAAEKKVVKITSEIPQTERMQKRAERFNVPVSLESKKAARAARFGISSVPTKGLSSDNKPMVNLDKLKERAQRFGLNVSSISRKSEDDEKLKKRKERFGIVTSSAGTGTTEDTEAKKRKRAERFGIA

SEQ ID NO: 55266 - protein, 521 aa, Homo sapiens
RHGQPLELSSGGTMNCQQLWLGFLLPMTVSGRVLGLAEVAPVDYLSQYGYLQKPLEGSNNFKPEDITEALRAFQEASELPVSGQLDDATRARMRQPRCGLEDPFNQKTLKYLLLGRWRKKHLTFRILNLPSTLPPHTARAALRQAFQDWSNVAPLTFQEVQAGAADIRLSFHGRQSSYCSNTFDGPGRVLAHADIPELGSVHFDEDEFWTEGTYRGVNLRIIAAHEVGHALGLGHSRYSQALMAPVYEGYRPHFKLHPDDVAGIQALYGKKSPVIRDEEEEETELPTVPPVPTEPSPMPDPCSSELDAMMLGPRGKTYAFKGDYVWTVSDSGPGPLFRVSALWEGLPGNLDAAVYSPRTQWIHFFKGDKVWRYINFKMSPGFPKKLNRVEPNLDAALYWPLNQKVFLFKGSGYWQWDELARTDFSSYPKPIKGLFTGVPNQPSAAMSWQDGRVYFFKGKVYWRLNQQLRVEKGYPRNISHNWMHCRPRTIDTTPSGGNTTPSGTGITLDTTLSATETTFEY

SEQ ID NO: 55267 - protein, 27 aa, Homo sapiens
LPDPGTPLPPDPTAPSPGTVTPVPPPQ

SEQ ID NO: 55268 - protein, 34 aa, Homo sapiens
RSQYRHLIVNMLSATPASPSGSLSNRHVQWTVVL

SEQ ID NO: 55269 - protein, 59 aa, Homo sapiens
LATLETRQMNRRYYENYVAKRIPGKQAVVVMACENQHMGDDMVQEPGLVMIFAHGVEEI

SEQ ID NO: 55270 - protein, 262 aa, Homo sapiens
MEQYIYERKSDGIYIINLKRTWEKLLLAAHAIVAIENPADVSVISSRNTGQTAVLKFAAATGATPIAGRFTPGTFTNQIQAAFREPRLLVVTDPRADHQPLTEASYVNLPTIALCNTDSPLRYVDIAIPCNNKGAYSVGLMWWMLAREVLCMLGTISCEHPWEVMPDLYFYRDPEEIEKEEQAAAEKAVTKEEFQGEWTAPAPEFTAIQPEVADWSEGVQVPSVPIQQFPTEDWSSQPAMEDWSAAPTAQATEWVGATTDWS

SEQ ID NO: 55271 - protein, 211 aa, Homo sapiens
VHIRMAFLRKVYSILSLQVLLTTVTSTVFLYFESVRTFVHESPALILLFALGSLGLIFALILNRHKYPLNLYLLFGFTLLEALTVAVVVTFYDVYIILQAFILTTTVFFGLTVYTLQSKKDFSKFGAGLFALLWILCLSGFLKFFFYSEIMELVLAAAGALLFCGFIIYDTHSLMHKLSPEEYVLAAISLYLDIINLFLHLLRFLEAVNKK

SEQ ID NO: 55272 - protein, 122 aa, Homo sapiens
KWKRKMRAEKRKKNAPKEASRLKSILKLDGDVLMKDVQEIATVVVPKPKHCQEKMQCEVKDEKDDMKMETDIKRNKKTLLDQHGQYPIWMNQRQRKRLKAKREKRKGKSKAKAVKVAKGLAW

SEQ ID NO: 55273 - protein, 40 aa, Homo sapiens
IKDFLAKNLIIVIGISFGLAVIEILGLVFSMVLYCQIGNK

SEQ ID NO: 55274 - protein, 85 aa, Homo sapiens
LENPGQPCSLQPGVVSGATGAKVRVQRSSSAWATAAALGAEVERPHYAKDERLGLAGPASGGPAGNRLGSEEPGSPLWSMQGSGG

SEQ ID NO: 55275 - protein, 137 aa, Homo sapiens
RKQARKVDHPLSEQVHQPLLEEQCSIDEPLFEDQCSFDQPQPEEQCIKTVNSFTIPKKNKKKTSNQKAQEEYEQIQAKRAAKKQEFERRKQEREEAQRQYKKKKMEVFKILNKKTKKGQPNLNVQMEYLLQKIQEKC

SEQ ID NO: 55276 - protein, 93 aa, Homo sapiens
IKYSDSLLQMKAKEYELLAKEFNSLHISNKDGCQLKENRAKESEVPSSNGEIPPFTQRVFSNYTNDTDSDTGISSNHSQDSETTVGDVVLLST

SEQ ID NO: 55277 - protein, 37 aa, Homo sapiens
MRGLSAAAVRAICWSSRTAKRSRHTTVCAGSQRCLSL

SEQ ID NO: 55278 - protein, 855 aa, Homo sapiens
IRAQMAQWEMLQNLDSPFQDQLHQLYSHSLLPVDIRQYLAVWIEDQNWQEAALGSDDSKATMLFFHFLDQLNYECGRCSQDPESLLLQHNLRKFCRDIQPFSQDPTQLAEMIFNLLLEEKRILIQAQRAQLEQGEPVLETPVESQQHEIESRILDLRAMMEKLVKSISQLKDQQDVFCFRYKIQAKGKTPSLDPHQTKEQKILQETLNELDKRRKEVLDASKALLGRLTTLIELLLPKLEEWKAQQQKACIRAPIDHGLEQLETWFTAGAKLLFHLRQLLKELKGLSCLVSYQDDPLTKGVDLRNAQVTELLQRLLHRAFVVETQPCMPQTPHRPLILKTGSKFTVRTRLLVRLQEGNESLTVEVSIDRNPPQLQGFRKFNILTSNQKTLTPEKGQSQGLIWDFGYLTLVEQRSGGSGKGSNKGPLGVTEELHIISFTVKYTYQGLKQELKTDTLPVVIISNMNQLSIAWASVLWFNLLSPNLQNQQFFSNPPKAPWSLLGPALSWQFSSYVGRGLNSDQLSMLRNKLFGQNCRTEDPLLSWADFTKRESPPGKLPFWTWLDKILELVHDHLKDLWNDGRIMGFVSRSQERRLLKKTMSGTFLLRFSESSEGGITCSWVEHQDDDKVLIYSVQPYTKEVLQSLPLTEIIRHYQLLTEENIPENPLRFLYPRIPRDEAFGCYYQEKVNLQERRKYLKHRLIVVSNRQVDELQQPLELKPEPELESLELELGLVPEPELSLDLEPLLKAGLDLGPELESVLESTLEPVIEPTLCMVSQTVPEPDQGPVSQPVPEPDLPCDLRHLNTEPMEIFRNCVKIEEIMPNGDPLLAGQNTVDEVYVSRPSHFYTDGPLMPSDF

SEQ ID NO: 55279 - protein, 223 aa, Homo sapiens
LVPRSLHKMPGEATETVPATEQELPQPQAETGSGTESDSDESVPELEEQDSTQATTQQAQLAAAAEIDEEPVSKAKQSRSEKKARKAMSKLGLRQVTGVTRVTIRKSKNILFVITKPDVYKSPASDTYIVFGEAKIEDLSQQAQLAAAEKFKVQGEAVSNIQENTQTPTVQEESEEEEVDETGVEVKDIELVMSQANVSRAKAVRALKNNSNDIVNAIMELTM

SEQ ID NO: 55280 - protein, 144 aa, Homo sapiens
VRLVLGTASQDPEKGLLFIPFLQKCPAKPQKPSLLQSRSCRSPRLRQGLEQNLTVMNQYQSLKNRIPPRQPHNKPSWRQQLKLMKNQSVKQNRVGVKRRHGRLCPNWVFGRLQELLESLSGNLRISSLSSQNQMSTRALLQILT

SEQ ID NO: 55281 - protein, 193 aa, Homo sapiens
KGSGTESDSDESVPELEEQDSTQATTQQAQLAAAAEIDEEPVSKAKQSRSEKKARKAMSKLGLRQVTGVTRVTIRKSKNILFVITKPDVYKSPASDTYIVFGEAKIEDLSQQAQLAAAEKFKVQGEAVSNIQENTQTPTVQEESEEEEVDETGVEVKDIELVMSQANVSRAKAVRALKNNSNDIVNAIMELTM

SEQ ID NO: 55282 - protein, 182 aa, Homo sapiens
KRRSTGVVNIPAAECLDEYEDDEAGQKERKREDAITQQNTIQNEAVNLLDPGSSYLLQEPPRTVSGRYKSTTSVSEEDVSSRYSRTDRSGFPRYNRDANVSGTLVSSSTLEKKIEDLEKEVVRERQENLRLVRLMQDKEEMIGKLKEEIDLLNRDLDDIEDENEQLKQENKTLLKVVGQLTR

SEQ ID NO: 55283 - protein, 932 aa, Homo sapiens
INQPDNEGWIPLHAAASCGYLDIAEFLIGQGAHVGAVNSEGDTPLDIAEEEAMEELLQNEVNRQGVDIEAARKEEERIMLRDARQWLNSGHINDVRHAKSGGTALHVAAAKGYTEVLKLLIQAGYDVNIKDYDGWTPLHAAAHWGKEEACRILVDNLCDMEMVNKVGQTAFDVADEDILGYLEELQKKQNLLHSEKRDKKSPLIESTANMDNNQSQKTFKNKETLIIEPEKNASRIESLEQEKVDEEEEGKKDESSCSSEEDEEDDSESEAETDKTKPLASVTNANTSSTQAAPVAVTTPTVSSGQATPTSPIKKFPTTATKISPKEEERKDESPATWRLGLRKTGSYGALAEITASKEGQKEKDTAGVTRSASSPRLSSSLDNKEKEKDSKGTRLAYVAPTIPRRLASTSDIEEKENRDSSSLRTSSSYTRRKWEDDLKKNSSVNEGSTYHKSCSFGRRQDDLISSSVPSTTSTPTVTSAAGLQKSLLSSTSTTTKITTGSSSAGTQSSTSNRLWAEDSTEKEKDSVPTAVTIPVAPTVVNAAASTTTLTTTTAGTVSSTTEVRERRRSYLTPVRDEESESQRKARSRQARQSRRSTQGVTLTDLQEAEKTIGRSRSTRTREQENEEKEKEEKEKQDKEKQEEKKESETSREDEYKQKYSRTYDETYQRYRPVSTSSSTTPSSSLSTMSSSLYASSQLNRPNSLVGITSAYSRGITKENEREGEKREEEKEGEDKSQPKSIRERRRPREKRRSTGVSFWTQDSDENEQEQQSDTEEGSNKKETQTDSISRYETSSTSAGDRYDSLLGRSGSYSYLEERKPYSSRLEKDDSTDFKKLYEQILAENEKLKAQLHDTNMELTDLKLQLEKATQRQERFADRSLLEMEKRERRALERRISEMEEELKMLPDLKADNQRLKDENGALIRVISKLSK

SEQ ID NO: 55284 - protein, 12 aa, Homo sapiens
LPPAMKRYLLYQ

SEQ ID NO: 55285 - protein, 228 aa, Homo sapiens
IPWFQYPIIYDIRARPRKISSPTGSKDLQMVNISLRVLSRPNAQELPSMYQRLGLDYEERVLPSIVNEVLKSVVAKFNASQLITQRAQVSLLIRRELTERAKDFSLILDDVAITELSFSREYTAAVEAKQVAQQEAQRAQFLVEKAKQEQRQKIVQAEGEAEAAKMLGEALSKNPGYIKLRKIRAAQNISKTIATSQNRIYLTADNLVLNLQDESFTRGSDSLIKGKK

SEQ ID NO: 55286 - protein, 56 aa, Homo sapiens
MSSSRCLDPECGGNISGEALTPKAVQAQCGGCFSGESSRLAQPGAPSSWPKSYPSS

SEQ ID NO: 55287 - protein, 99 aa, Homo sapiens
LEDCKEVLLEFRKKIAENKAKAVRKDIQRLSLNNDIFEANSDSGQQSKTKEDTSPKKKKKKLRQREEKSPDDLKKKKAKAGKLKDKSKPDLESSLESLV

SEQ ID NO: 55288 - protein, 347 aa, Homo sapiens
LRGAFGTLNQLGIVVGILVAQIFGLEFILGSEELWPLLLGFTILPAILQSAALPFCPESPRFLLINRKEEENAKQILQRLWGTQDVSQDIQEMKDESARMSQEKQVTVLELFRVSSYRQPIIISIVLQLSQQLSGINAVFYYSTGIFKDAGVQEPIYATIGAGVVNTIFTVVSLFLVERAGRRTLHMIGLGGMAFCSTLMTVSLLLKDNYNGMSFVCIGAILVFVAFFEIGPGPIPWFIVAELFSQGPRPAAMAVAGCSNWTSNFLVGLLFPSAAHYLGAYVFIIFTGFLITFLAFTFFKVPETRGRTFEDITRAFEGQAHGADRSGKDGVMEMNSIEPAKETTTNV

SEQ ID NO: 55289 - protein, 34 aa, Homo sapiens
MVGRNQLFPKRTIPEDFWRRAVSQLCSQNTGKLT

SEQ ID NO: 55290 - protein, 341 aa, Homo sapiens
KEPAFSKEDNPRGLLEESSFATLFPKYREAYLKECWPLVQKALNEHHVNATLDLIEGSMTVCTTKKTFDPYIIIRARDLIKLLARSVSFEQAVRILQDDVACDIIKIGSLVRNKERFVKRRQRLIGPKGSTLKALELLTNCYIMVQGNTVSAIGPFSGLKEVRKVVLDTMKNIHPIYNIKSLMIKRELAKDSELRSQSWERFLPQFKHKNVNKRKEPKKKTVKKEYTPFPPPQPESQIDKELASGEYFLKANQKKRQKMEAIKAKQAEAISKRQEERNKAFIPPKEKPIVKPKEASTETKIDVASIKEKVKKAKNKKLGALTAEEIALKMEADEKKKKKKK

SEQ ID NO: 55291 - protein, 60 aa, Homo sapiens
KPQPQQLHPYPHPHPHPHSHPHSHPHPHPHPHPHQIPHPHPQPHSQPHGHRLLRSTSNSA

SEQ ID NO: 55292 - protein, 911 aa, Homo sapiens
ICRFTEWLHINGKRSINLSSFIMEGGLADGEPDRTSLLGDSKDVLGPSTVVANSDESQLLTPGKMSQRQGKEAYPTPTKDLHQPSLSPASPHSQGFERGKEDISQNKDESSLSMSKSKSESKLYNGSEKDSSTSSKLTKKESLKVQKKNYREEKKRATKELLSTITDPSVIVMADWLKIRGTLKSWTKLWCVLKPGVLLIYKTQKNGQWVGTVLLNACEIIERPSKKDGFCFKLFHPLEQSIWAVKGPKGEAVGSITQPLPSSYLIIRATSESDGRCWMDALELALKCSSLLKRTMIREGKEHDLSVSSDSTHVTFYGLLRANNLHSGDNFQLNDSEIERQHFKDQDMYSDKSDKENDQEHDESDNEVMGKSEESDTDTSERQDDSYIEPEPVEPLKETTYTEQSHEELGEAGEASQTETVSEENKSLIWTLLKQVRPGMDLSKVVLPTFILEPRSFLDKLSDYYYHADFLSEAALEENPYFRLKKVVKWYLSGFYKKPKGLKKPYNPILGETFRCLWIHPRTNSKTFYIAEQVSHHPPISAFYVSNRKDGFCLSGSILAKSKFYGNSLSAILEGEARLTFLNRGEDYVMTMPYAHCKGILYGTMTLELGGTVNITCQKTGYSAILEFKLKPFLGSSDCVNQISGKLKLGKEVLATLEGHWDSEVFITDKKTDNSEVFWNPTPDIKQWRLIRHTVKFEEQGDFESEKLWQRVTRAINAKDQTEATQEKYVLEEAQRQAARDRKTKNEEWSCKLFELDPLTGEWHYKFADTRPWDPLNDMIQFEKDGVIQTKVKHRTPMVSVPKMKHKPTRQQKKVAKGYSSPEPDIQDSSGSEAQSVKPSTRRKKGIELGDIQSSIESIKQTQEEIKRNIMALRNHLVSSTPATDYFLQQKDYFIIFLLILLQVIINFMFK

SEQ ID NO: 55293 - protein, 153 aa, Homo sapiens
RKNLDSTTVAIHDEEIYCKSCYGKKYGPKGYGYGQGAGTLNMDRGERLGIKPESVQPHRPTTNPNTSKFAQKYGGAEKCSRCGDSVYAAEKIIGAGKPWHKNCFRCAKCGKSLESTTLTEKEGEIYCKGCYAKNFGPKGFGYGQGAGALVHAQ

SEQ ID NO: 55294 - protein, 145 aa, Homo sapiens
IIKETQRLLAEPVPGIKAEPDESNARYFHVVIAGPQDSPFEGGTFKLELFLPEEYPMAAPKVRFMTKIYHPNVDKLGRICLDILKDKWSPALQIRTVLLSIQALLSAPNPDDPLANDVAEQWKTNEAQAIETARAWTRLYAMNNI

SEQ ID NO: 55295 - protein, 182 aa, Homo sapiens
IMGGFFSSIFSSLFGTREMRILILGLDGAGKTTILYRLQVGEVVTTIPTIGFNVETVTYKNLKFQVWDLGGQTSIRPYWRCYYSNTDAVIYVVDSCDRDRIGISKSELVAMLEEEELRKAILVVFANKQDMEQAMTSSEMANSLGLPALKDRKWQIFKTSATKGTGLDEAMEWLVETLKSRQ

SEQ ID NO: 55296 - protein, 168 aa, Homo sapiens
IPANQFIFRLCTSEAMGKISSLPTQLFKCCFCDFLKVKMHTMSSSHLFYLALCLLTFTSSATAGPETLCGAELVDALQFVCGDRGFYFNKPTGYGSSSRRAPQTGIVDECCFRSCDLRRLEMYCAPLKPAKSARSVRAQRHTDMPKTQKEVHLKNASRGSAGNKNYRM

SEQ ID NO: 55297 - protein, 110 aa, Homo sapiens
IDGYEYAYLKAIVLFSPDHPSLENMEQIEKFQEKAYVEFQDYITKTYPDDTYRLSRLLLRLPALRLMNATITEELFFKGLIGNIRIDSVIPHILKMEPADYNSQIIGHSI

SEQ ID NO: 55298 - protein, 1409 aa, Homo sapiens
RRILQRTPGRVGSQGSDLDSSATPINTVDVNNESSSEGFICPQCMKSLGSADELFKHYEAVHDAGNDSGHGGESNLALKRDDVTLLRQEVQDLQASLKEEKWYSEELKKELEKYQGLQQQEAKPDGLVTDSSAELQSLEQQLEEAQTENFNIKQMKDLFEQKAAQLATEIADIKSKYDEERSLREAAEQKVTRLTEELNKEATVIQDLKTELLQRPGIEDVAVLKKELVQVQTLMDNMTLERERESEKLKDECKKLQSQYASSEATISQLRSELAKGPQEVAVYVQELQKLKSSVNELTQKNQTLTENLLKKEQDYTKLEEKHNEESVSKKNIQATLHQKDLDCQQLQSRLSASETSLHRIHVELSEKGEATQKLKEELSEVETKYQHLKAEFKQLQQQREEKEQHGLQLQSEINQLHSKLLETERQLGEAHGRLKEQRQLSSEKLMDKEQQVADLQLKLSRLEEQLKEKVTNSTELQHQLDKTKQQHQEQQALQQSTTAKLREAQNDLEQVLRQIGDKDQKIQNLEALLQKSKENISLLEKEREDLYAKIQAGEGETAVLNQLQEKNHTLQEQVTQLTEKLKNQSESHKQAQENLHDQVQEQKAHLRAAQDRVLSLETSVNELNSQLNESKEKVSQLDIQIKAKTELLLSAEAAKTAQRADLQNHLDTAQNALQDKQQELNKITTQLDQVTAKLQDKQEHCSQLESHLKEYKEKYLSLEQKTEELEGQIKKLEADSLEVKASKEQALQDLQQQRQLNTDLELRATELSKQLEMEKEIVSSTRLDLQKKSEALESIKQKLTKQEEEKKILKQDFETLSQETKIQHEELNNRIQTTVTELQKVKMEKEALMTELSTVKDKLSKVSDSLKNSKSEFEKENQKGKAAILDLEKTCKELKHQLQVQMENTLKEQKELKKSLEKEKEASHQLKLELNSMQEQLIQAQNTLKQNEKEEQQLQGNINELKQSSEQKKKQIEALQGELKIAVLQKTELENKLQQQLTQAAQELAAEKEKISVLQNNYEKSQETFKQLQSDFYGRESELLATRQDLKSVEEKLSLAQEDLISNRNQIGNQNKLIQELKTAKATLEQDSAKKEQQLQERCKALQDIQKEKSLKEKELVNEKSKLAEIEEIKCRQEKEITKLNEELKSHKLESIKEITNLKDAKQLLIQQKLELQGKADSLKAAVEQEKRNQQILKDQVKKEEEELKKEFIEKEAKLHSEIKEKEVGMKKHEENEAKLTMQITALNENLGTVKKEWQSSQRRVSELEKQTDDLRGEIAVLEATVQNNQDERRALLERCLKGEGEIEKLQTKVLELQRKLDNTTAAVQELGRENQSLQIKHTQALNRKWAEDNEVQNCMACGKGFSVTVRRHHCRQCGNIFCAECSAKNALTPSSKKPVRVCDACFNDLQG

SEQ ID NO: 55299 - protein, 373 aa, Homo sapiens
KSRKKSGPKGAPAAEPGKRSEGGKTPVARSSGGGGWADPRTCLSLLSLGTCLGLAWFVFQQSEKFAKVENQYQLLKLETNEFQQLQSKISLISEKLESTESILQEATSSMSLMTQFEQEVSNLQDIMHDIQNNEEVLTQRMQSLNEKFQNITDFWKRSLEEMNINTDIFKSEAKHIHSQVTVQINSAEQEIKLLTERLKDLEDSTLRNIRTVKRQEEEDLLRVEEQLGSDTKAIEKLEEEQHALFARDEDLTNKLSDYEPKVEECKTHLPTIESAIHSVLRVSQDLIETEKKMEDLTMQMFNMEDDMLKAVSEIMEMQKTLEGIQYDNSILKMQNELDILKEKVHDFIAYSSTGEKGTLKEYNIENKGIGGDF

SEQ ID NO: 55300 - protein, 304 aa, Homo sapiens
LSLLSLGTCLGLAWFVFQQSEKFAKVENQYQLLKLETNEFQQLQSKISLISEKWQKSEAIMEQLKSFQIIAHLKRLQEEINEVKTWSNRITEKQDILNNSLTTLSQDITKVDQSTTSMAKDVGLKITSVKTDIRRISGLVTDVISLTDSVQELENKIEKVEKNTVKNIGDLLSSSIDRTATLRKTASENSQRINSVKKTLTELKSDFDKHTDRFLSLEGDRAKVLKTVTFANDLKPKVYNLKKDFSRLEPLVNDLTLRIGRLVTDLLQREKEIAFLSEKISNLTIVQAEIKDIKDEIAHISDMN

SEQ ID NO: 55301 - protein, 152 aa, Homo sapiens
MWGVGCIFFEMASGRPLFPGSTVEDELHLIFRLLGTPSQETWPGISSNEEFKNYNFPKYKPQPLINHAPRLDSEGIELITKFLQYESKKRVSAEEAMKHVYFRSLGPRIHALPESVSIFSLKEIQLQKDPGFRNSSYPETGVFVINHFTCRS

SEQ ID NO: 55302 - protein, 35 aa, Homo sapiens
LHEPQGTPRDPAATSKPSGKPAPENLKSPSWMSKS

SEQ ID NO: 55303 - protein, 9 aa, Homo sapiens
MVLNFKMKM

SEQ ID NO: 55304 - protein, 47 aa, Homo sapiens
RLPLAHGSLLMMNHPTNTHWYHSLPVRKKVLAPRVNLTFRKILLTKK

SEQ ID NO: 55305 - protein, 5 aa, Homo sapiens
ILLET

SEQ ID NO: 55306 - protein, 205 aa, Homo sapiens
MDGDSSTTDASQLGISADYIGGSHYVIQPHDDTEDSMNDHEDTNGSKESFREQDIYLPIANVARIMKNAIPQTGKIAKDAKECVQECVSEFISFITSEASERCHQEKRKTINGEDILFAMSTLGFDSYVEPLKLYLQKFREAMKGEKGIGGAVTATDGLSEELTEEAFTNQLPAGLITTDGQQQNVMVYTTSYQQISGVQQIQFS

SEQ ID NO: 55307 - protein, 4 aa, Homo sapiens
VMTI

SEQ ID NO: 55308 - protein, 179 aa, Homo sapiens
LVLGDLHIPHRCNSLPAKFKKLLVPGKIQHILCTGNLCTKESYDYLKTLAGDVHIVRGDFDENLNYPEQKVVTVGQFKIGLIHGHQVIPWGDMASLALLQRQFDVDILISGHTHKFEAFEHENKFYINPGSATGAYNALETNIIPSFVLMDIQASTVVTYVYQLIGDDVKVERIEYKKP

SEQ ID NO: 55309 - protein, 315 aa, Homo sapiens
IDSIIQRLLEVRGSKPGKNVQLQENEIRGLCLKSREIFLSQPILLELEAPLKICGDIHGQYYDLLRLFEYGGFPPESNYLFLGDYVDRGKQSLETICLLLAYKIKYPENFFLLRGNHECASINRIYGFYDECKRRYNIKLWKTFTDCFNCLPIAAIVDEKIFCCHGGLSPDLQSMEQIRRIMRPTDVPDQGLLCDLLWSDPDKDVLGWGENDRGVSFTFGAEVVAKFLHKHDLDLICRAHQVVEDGYEFFAKRQLVTLFSAPNYCGEFDNAGAMMSVDETLMCSFQILKPAEKKKPNATRPVTPPRGMITKQAKK

SEQ ID NO: 55310 - protein, 99 aa, Homo sapiens
RRPKDDQVFEAVGTTDELSSAIGFALELVTEKGHTFAEELQKIQCTLQDVGSALATPCSSAREAHLKYTTFKAGPILELEQWIDKYTSQLPPLTAFILP

SEQ ID NO: 55311 - protein, 40 aa, Homo sapiens
KFLNRLSDYLFTLARYAAMKEGNQEKIYMKNDPSAESEGL

SEQ ID NO: 55312 - protein, 198 aa, Homo sapiens
LPADKQIETGPFLEAVSHLPPFFDCLGSPVFTPIKADISGNITKIKAVYDTNPAKFRTLQNILEVEKEMYGAEWPKVGATLALMWLKRGLRFIQVFLQSICDGERDENHPNLIRVNATKAYEMALKKYHGWIVQKIFQAALYAAPYKSDFLKALSKGQNVTEEECLEKIRLFLVNYTATIDVIYEMYTQMNAELNYKV

SEQ ID NO: 55313 - protein, 412 aa, Homo sapiens
VCADCSGPDPSWASVNRGTFLCDECCSVHRSLGRHISQVRHLKHTPWPPTLLQMVETLYNNGANSIWEHSLLDPASIMSGRRKANPQDKVHPNKAEFIRAKYQMLAFVHRLPCRDDDSVTAKDLSKQLHSSVRTGNLETCLRLLSLGAQANFFHPEKGNTPLHVASKAGQILQAELLAVYGADPGTQDSSGKTPVDYARQGGHHELAERLVEIQYELTDRLAFYLCGRKPDHKNGQHFIIPQMADSSLDLSELAKAAKKKLQSLSNHLFEELAMDVYDEVDRRETDAVWLATQNHSALVTETTVVPFLPVNPEYSSTRNQGRQKLARFNAHEFATLVIDILSDAKRRQQGSSLSGSKDNVELILKTINNQHSVESQDNDQPDYDSVASDEDTDLETTASKTNRQKLLGKDAN

SEQ ID NO: 55314 - protein, 116 aa, Homo sapiens
IRKTEQITKNIQELLRAAQENKHDSYIPCSERIHVAVTEMAALFPKKPKSDMVRTSLRLLTSSAYRLQSECKKTLPGDPGSPTDVQLVTQQVIQCAYDIAKAAKQLVTITTKENNN

SEQ ID NO: 55315 - protein, 84 aa, Homo sapiens
IHVAVTEMAALFPKKPKSDMVRTSLRLLTSSAYRLQSECKKTLPGDPGSPTDVQLVTQQVIQCAYDIAKAAKQLVTITTKENNN

SEQ ID NO: 55316 - protein, 128 aa, Homo sapiens
LHSNVRLLSSLLLTMSNNNPELFSPPQKYQLLVYHADSLFHDKEYRNAVSKYTMALQQKKALSKTSKVRPSTGNSASTPQSQCLPSEIEVKYKMAECYTMLKQDKDAIAILDGIPSRQRTPKACCPFL

SEQ ID NO: 55317 - protein, 436 aa, Homo sapiens
MALQQKKALSKTSKVRPSTGNSASTPQSQCLPSEIEVKYKMAECYTMLKQDKDAIAILDGIPSRQRTPKINMMLANLYKKAGQERPSVTSYKEVLRQCPLALDAILGLLSLSVKGAEVASMTMNVIQTVPNLDWLSVWIKAYAFVHTGDNSRAISTICSLEKKSLLRDNVDLLGSLADLYFRAGDNKNSVLKFEQAQMLDPYLIKGMDVYGYLLAREGRLEDVENLGCRLFNISDQHAEPWVVSGCHSFYSKRYSRALYLGAKAIQLNSNSVQALLLKGAALRNMGRVQEAIIHFREAIRLAPCRLDCYEGLIECYLASNSIREAMVMANNVYKTLGANAQTLTLLATVCLEDPVTQEKAKTLLDKALTQRPDYIKAVVKKAELLSREQKYEDGIALLRNALANQSDCVLHRILGDFLVAVNEYQEAMDQYSIALR

SEQ ID NO: 55318 - protein, 370 aa, Homo sapiens
VPNLDWLSVWIKAYAFVHTGDNSRAISTICSLEKKSLLRDNVDLLGSLADLYFRAGDNKNSVLKFEQAQMLDPYLIKGMDVYGYLLAREGRLEDVENLGCRLFNISDQHAEPWVVSGCHSFYSKRYSRALYLGAKAIQLNSNSVQALLLKGAALRNMGRVQEAIIHFREAIRLAPCRLDCYEGLIECYLASNSIREAMVMANNVYKTLGANAQTLTLLATVCLEDPVTQEKAKTLLDKALTQRPDYIKAVVKKAELLSREQKYEDGIALLRNALANQSDCVLHRILGDFLVAVNEYQEAMDQYSIALSLDPNDQKSLEGMQKMEKEESPTDATQEEDVDDMEGSGEEGDLEGSDSEAAQWADQEQWFGMQ

SEQ ID NO: 55319 - protein, 362 aa, Homo sapiens
ISYGDEYPDYLDSIVVLEDLSPLEARVTRIFLVVVYSIVCFLGILGNGLVIIIATFKMKKTVNMVWFLNLAVADFLFNVFLPIHITYAAMDYHWVFGTAMCKISNFLLIHNMFTSVFLLTIISSDRCISVLLPVWSQNHRSVRLAYMACMVIWVLAFFLSSPSLVFRDTANLHGKISCFNNFSLSTPGSSSWPTHSQMDPVGYSRHMVVTVTRFLCGFLVPVLIITACYLTIVCKLQRNRLAKTKKPFKIIVTIIITFFLCWCPYHTLNLLELHHTAMPGSVFSLGLPLATALAIANSCMNPILYVFMGQDFKKFKVALFSRLVNALSEDTGHSSYPSHRSFTKMSSMNERTSMNERETGML

SEQ ID NO: 55320 - protein, 54 aa, Homo sapiens
RTQLSLLPRALQRPSAAAPQAENGPAAAPAVAAPAATEAPKMSNADFAKLFLRK

SEQ ID NO: 55321 - protein, 47 aa, Homo sapiens
IRREHPVLYAKELVLGAPWFRRQPPASSSFCCCSWGLCLLPTPALCP

SEQ ID NO: 55322 - protein, 406 aa, Homo sapiens
IDKSYPTVCGHTGPVLDIDWCPHNDQVIASGSEDCTVMVWQIPENGLTLSLTEPVVILEGHSKRVGIVAWHPTARNVLLSAGCDNAIIIWNVGTGEALINLDDMHSDMIYNVSWNRNGSLICTASKDKKVRVIDPRKQEIVAEKEKAHEGARPMRAIFLADGNVFTTGFSRMSERQLALWNPKNMQEPIALHEMDTSNGVLLPFYDPDTSIIYLCGKGDSSIRYFEITDESPYVHYLNTFSSKEPQRGMGYMPKRGLDVNKCEIARFFKLHERKCEPIIMTVPRKSDLFQDDLYPDTAGPEAALEAEEWFEGKNADPILISLKHGYIPGKNRDLKVVKKNILDSKPTANKKCDLISIPKKTTDTASVQNEAKLDEILKEIKSIKDTICNQDERISKLEQQMAKIAA

SEQ ID NO: 55323 - protein, 525 aa, Homo sapiens
KSSSSSSASAAAAAAAASSSASCSRRLGRALNFLFYLALVAAAAFSGWCVHHVLEEVQQVRRSHQDFSRQREELGQGLQGVEQKVQSLQATFGTFESILRSSQHKQDLTEKAVKQGESEVSRISEVLQKLQNEILKDLSDGIHVVKDARERDFTSLENTVEERLTELTKSINDNIAIFTEVQKRSQKEINDMKAKVASLEESEGNKQDLKALKEAVKEIQTSAKSREWDMEALRSTLQTMESDIYTEVRELVSLKQEQQAFKEAADTERLALQALTEKLLRSEESVSRLPEEIRRLEEELRQLKSDSHGPKEDGGFRHSEAFEALQQKSQGLDSRLQHVEDGVLSMQVASARQTESLESLLSKSQEHEQRLAALQGRLEGLGSSEADQDGLASTVRSLGETQLVLYGDVEELKRSVGELPSTVESLQKVQEQVHTLLSQDQAQAARLPPQDFLDRLSSLDNLKASVSQVEADLKMLRTAVDSLVAYSVKIETNENNLESAKGLLDDLRNDLDRLFVKVEKIHEKV

SEQ ID NO: 55324 - protein, 54 aa, Homo sapiens
LEWADSEVTLQALRRKTAAHFHEPPKKKRSVVLDEILEQLEGSDSDSEEQTLQL

SEQ ID NO: 55325 - protein, 901 aa, Homo sapiens
LKLALIGQSLFGQEVYSHLRKEGHRVVGVFTVPDKDGKADPLALAAEKDGTPVFKLPKWRVKGKTIKEVAEAYRSVGAELNVLPFCTQFIPMDIIDSPKHGSIIYHPSILPRHRGASAINWTLIMGDKKAGFSVFWADDGLDTGPILLQRSCDVEPNDTVDALYNRFLFPEGIKAMVEAVQLIADGKAPRIPQPEEGATYEGIQKKENAEISWDQSAEVLHNWIRGHDKVPGAWTEINGQMVTFYGSTLLNSSVPPGEPLEIKGAKKPGLVTKNGLVLFGNDGKALTVRNLQFEDGKMIPASQYFSTGETSVVELTAEEVKVAETIKVIWAGILSNVPIIEDSTDFFKSGASSMDVARLVEEIRQKCGGLQLQNEDVYMATKFEGFIQKVVRKLRGEDQEVELVVDYISKEVNEIMVKMPYQCFINGQFTDADDGKTYDTINPTDGSTICKVSYASLADVDKAVAAAKDAFENGEWGRMNARERGRLMYRLADLLEENQEELATIEALDSGAVYTLALKTHIGMSVQTFRYFAGWCDKIQGSTIPINQARPNRNLTFTKKEPLGVCAIIIPWNYPLMMLAWKSAACLAAGNTLVLKPAQVTPLTALKFAELSVKAGFPKGVINIIPGSGGIAGQRLSEHPDIRKLGFTGSTPIGKQIMKSCAVSNLKKVSLELGGKSPLIIFNDCELDKAVRMGMGAVFFNKGENCIAAGRLFVEESIHDEFVTRVVEEIKKMKIGDPLDRSTDHGPQNHKAHLEKLLQYCETGVKEGATLVYGGRQVQRPGFFMEPTVFTDVEDYMYLAKEESFGPIMVISKFQNGDIDGVLQRANSTEYGLASGVFTRDINKAMYVSEKLEAGTVFINTYNKTDVAAPFGGVKQSGFGKDLGEEALNEYLKTKTVTLEY

SEQ ID NO: 55326 - protein, 642 aa, Homo sapiens
LSVFEEDAGTLTDYTNQLLQAMQRVYGAQNEMCLATQQLSKQLLAYEKQNFALGKGDEEVISTLHYFSKVVDELNLLHTELAKQLADTMVLPIIQFREKDLTEVSTLKDLFGLASNEHDLSMAKYSRLPKKKENEKVKTEVGKEVAAARRKQHLSSLQYYCALNALQYRKQMAMMEPMIGFAHGQINFFKKGAEMFSKRMDSFLSSVADMVQSIQVELEAEAEKMRVSQQELLSVDESVYTPDSDVAAPQINRNLIQKAGYLNLRNKTGLVTTTWERLYFFTQGGNLMCQPRGAVAGGLIQDLDNCSVMAVDCEDRRYCFQITTPNGKSGIILQAESRKENEEWICAINNISRQIYLTDNPEAVAIKLNQTALQAVTPITSFGKKQESSCPSQNLKNSEMENENDKIVPKATASLPEAEELIAPGTPIQFDIVLPATEFLDQNRGSRRTNPFGETEDESFPEAEDSLLQQMFIVRFLGSMAVKTDSTTEVIYEAMRQVLAARAIHNIFRMTESHLMVTSQSLRLIDPQTQVSRANFELTSVTQFAAHQENKRLVGFVIRVPESTGEESLSTYIFESNSEGEKICYAINLGKEIIEVQKDPEALAQLMLSIPLTNDGKYVLLNDQPDDDDGNPNEHRGAESEA

SEQ ID NO: 55327 - protein, 47 aa, Homo sapiens
VGRYFSEFTGTHYIPNAELEIRYPEDLEFVYETVQNIYSAKKENIDE

SEQ ID NO: 55328 - protein, 12 aa, Homo sapiens
KKMKEFLTYRTF

SEQ ID NO: 55329 - protein, 204 aa, Homo sapiens
VGNLPTDVREKDLEDLFYKYGRIREIELKNRHGLVPFAFVRFEDPRDAEDAIYGRNGYDYGQCRLRVEFPRTYGGRGGWPRGGRNGPPTRRSDFRVLVSGLPPSGSWQDLKDHMREAGDVCYADVQKDGVGMVEYLRKEDMEYALRKLDDTKFRSHEGETSYIRVYPERSTSYGYSRSRSGSRGRDSPYQSRGSPHYFSPFRPY

SEQ ID NO: 55330 - protein, 147 aa, Homo sapiens
KQKALAQGYRAGLAWVLGDAEELPFDDDKFDIYTIAFGIRNVTHIDQALQEAHRVLKPGGRFLCLEFSQVNNPLISRLYDLYSFQVIPVLGEVIAGDWKSYQYLVESIRRFPSQEEFKDMIEDAGFHKVTYESLTSGIVAIHSGFKL

SEQ ID NO: 55331 - protein, 162 aa, Homo sapiens
VRFKHRYLLCELVSDDPRCRLSLDDRVLSSLVRDTIARVHGTFGAAACSIGFAVRYLNAYTGIVLLRCRKEFYQLVWSALPFITYLENKGHRYPCFFNTLHVGGTIRTCQKFLIQYNRRQLLILLQNCTDEGEREAIQKSVTRSCLLEEEEESGEEAAEAME

SEQ ID NO: 55332 - protein, 340 aa, Homo sapiens
KEKDSNSSSGSFNGNSTNNSIQTIDSTQALFLPIGASVSLLVMFFFFDSVQVVFTICTAVLATIAFAFLLLPMCQYLTRPCSPQNKISFGCCGRFTAAELLSFSLSVMLVLIWVLTGHWLLMDALAMGLCVAMIAFVRLPSLKVSCLLLSGLLIYDVFWVFFSAYIFNSNVMVKVATQPADNPLDVLSRKLHLGPNVGRDVPRLSLPGKLVFPSSTGSHFSMLGIGDIVMPGLLLCFVLRYDNYKKQASGDSCGAPGPANISGRMQKVSYFHCTLIGYFVGLLTATVASRIHRAAQPALLYLVPFTLLPLLTMAYLKGDLRRMWSEPFHSKSSSSRFLEV

SEQ ID NO: 55333 - protein, 41 aa, Homo sapiens
KSGELNGDQVSLGTKKKKKAKKASETSPFPPAKSATAIPAN

SEQ ID NO: 55334 - protein, 7 aa, Homo sapiens
MGPSPCR

SEQ ID NO: 55335 - protein, 15 aa, Homo sapiens
KLEKAKAKELATKLG

SEQ ID NO: 55336 - protein, 722 aa, Homo sapiens
KIAVLVLLNEMSRTGEGAVSLMERRRLNQLLLPLLQGPDITLSKLYKLIEESCPQLANSVQIRIKLMAEGELKDMEQFFDDLSDSFSGTEPEVHKTSVVGLFLRHMILAYSKLSFSQVFKLYTALQQYFQNGEKKTVEDADMELTSRDEGERKMEKEELDVSVREEEVSCSGPLSQKQAEFFLSQQASLLKNDETKALTPASLQKELNNLLKFNPDFAEAHYLSYLNNLRVQDVFSSTHSLLHYFDRLILTGAESKSNGEEGYGRSLRYAALNLAALHCRFGHYQQAELALQEAIRIAQESNDHVCLQHCLSWLYVLGQKRSDSYVLLEHSVKKAVHFGLPYLASLGIQSLVQQRAFAGKTANKLMDALKDSDLLHWKHSLSELIDISIAQKTAIWRLYGRSTMALQQAQMLLSMNSLEAVNAGVQQNNTESFAVALCHLAELHAEQGCFAAASEVLKHLKERFPPNSQHAQLWMLCDQKIQFDRAMNDGKYHLADSLVTGITALNSIEGVYRKAVVLQAQNQMSEAHKLLQKLLVHCQKLKNTEMVISVLLSVAELYWRSSSPTIALPMLLQALALSKEYRLQYLASETVLNLAFAQLILGIPEQALSLLHMAIEPILADGAILDKGRAMFLVAKCQVASAASYDQPKKAEALEAAIENLNEAKNYFAKVDCKERIRDVVYFQARLYHTLGKTQERNRCAMLFRQLHQELPSHGVPLINHL

SEQ ID NO: 55337 - protein, 15 aa, Homo sapiens
KCSRFVSASHDLGLQ

SEQ ID NO: 55338 - protein, 68 aa, Homo sapiens
LPTGLQKKRQPGENRVTLIFFLGGVTFAEIAALRFLSQLEDGGTEYVIATTKLMNGTSWIEALMEKPF

SEQ ID NO: 55339 - protein, 21 aa, Homo sapiens
IYPVSWRNPVCTRPVGWNCFR

SEQ ID NO: 55340 - protein, 302 aa, Homo sapiens
LNKSKELLTVENQKMEEFRKEIETLKQAAAQKSQQLSALQEENVKLAEELGRSRDEVTSHQKLEEERSVLNNQLLEMKKRESKFIKDADEEKASLQKSISITSALLTEKDAELEKLRNEVTVLRGENASAKSLHSVVQTLESDKVKLELKVKNLELQLKENKRQLSSSSGNTDTQADEDERAQESQIDFLNSVIVDLQRKNQDLKMKVEMMSEAALNGNGDDLNNYDSDDQEKQSKKKPRLFCDICDCFDLHDTEDCPTQAQMSEDPPHSTHHGSRGEERPYCEICEMFGHWATNCNDDETF

SEQ ID NO: 55341 - protein, 91 aa, Homo sapiens [sequence omitted]

SEQ ID NO: 55342 - protein, 59 aa, Homo sapiens
TSPQPESGIKRLFSFFSRDKKRLANTQRNVHIQESFGQWANTHRDDGYTEQGQEALQHL

SEQ ID NO: 55343 - protein, 65 aa, Homo sapiens
RPSSAGSTPFPYNPLIMRLQAGVMASPPPPGLPAGSGPLAGPHHAWDEEPKPLLCSQYETLSDSE

SEQ ID NO: 55344 - protein, 532 aa, Homo sapiens
LERAAFYGITSNLVLFLNGAPFCWEGAQASEALLLFMGLTYLGSPFGGWLADARLGRARAILLSLALYLLGMLAFPLLAAPATRAALCGSARLLNCTAPGPDAAARCCSPATFAGLVLVGLGVATVKANITPFGADQVKDRGPEATRRFFNWFYWSINLGAILSLGGIAYIQQNVSFVTGYAIPTVCVGLAFVVFLCGQSVFITKPPDGSAFTDMFKILTYSCCSQKRSGERQSNGEGIGVFQQSSKQSLFDSCKMSHGGPFTEEKVEDVKALVKIVPVFLALIPYWTVYFQMQTTYVLQSLHLRIPEISNITTTPHTLPAAWLTMFDAVLILLLIPLKDKLVDPILRRHGLLPSSLKRIAVGMFFVMCSAFAAGILESKRLNLVKEKTINQTIGNVVYHAADLSLWWQVPQYLLIGISEIFASIAGLEFAYSAAPKSMQSAIMGLFFFFSGVGSFVGSGLLALVSIKAIGWMSSHTDFGNINGCYLNYYFFLLAAIQGATLLLFLIISVKYDHHRDHQRSRANGVPTSRRA

SEQ ID NO: 55345 - protein, 107 aa, Homo sapiens
ISDSQITRQALNEIESRHKDIMKLETSIRELHEMFMDMAMFVETQGEMINNIERNVMNATDYVEHAKEETKKAIKYQSKARRKLMFIIICVIVLLVILGIILATTLS

SEQ ID NO: 55346 - protein, 60 aa, Homo sapiens [sequence omitted]

SEQ ID NO: 55347 - protein, 87 aa, Homo sapiens
LDPQAIKPILKALLDNTKDKNTVVRAYSDQAIVNLLKMRQGEEVFQSLSKILDVASLEVLNEVNRRSLKKLASQADSTEQVDDTILT

SEQ ID NO: 55348 - protein, 598 aa, Homo sapiens
LADLESTTSHISKRPVFLSEETPYSYPTGNHTYQEIAVPPPVPPPPSSEALNGTILDPLDQWQPSSSRFIHQQPQSSSPVYGSSAKTSSVSNPQDSVGSPCSRVGEEEHVYSFPNKQKSAEPSPTVMSTSLGSNLSELDRLLLELNAVQHNPPGFPADEANSSPPLPGALSPLYGVPETNSPLGGKAGPLTKEKPKRNGGRGLEDVRPSVESLLDELESSVPSPVPAITVNQGEMSSPQRVTSTQQQTRISASSATRELDELMASLSDFKGSWPLEEVVLLVSISSSVQEGEKYPHPCAARHRTPSLRSPDQPPPCPQFMAQGKTGSSSPPGGPPKPGSQLDSMLGSLQSDLNKLGVATVAKGVCGACKKPIAGQVVTAMGKTWHPEHFVCTHCQEEIGSRNFFERDGQPYCEKDYHNLFSPRCYYCNGPILDKVVTALDRTWHPEHFFCAQCGAFFGPEGFHEKDGKAYCRKDYFDMFAPKCGGCARAILENYISALNTLWHPECFVCRECFTPFVNGSFFEHDGQPYCEVHYHERRGSLCSGCQKPITGRCITAMAKKFHPEHFVCAFCLKQLNKGTFKEQNDKPYCQNCFLKLFC

SEQ ID NO: 55349 - protein, 28 aa, Homo sapiens
KDKEAIQAYSESLMTSAPKGSVLQEAKL

SEQ ID NO: 55350 - protein, 49 aa, Homo sapiens
IWHFKEDGTIFHPHSGLCLSAYRTPEGRPDVQMRTCDALDKNQIWSFEK

SEQ ID NO: 55351 - protein, 17 aa, Homo sapiens
LGTLCQIFTRWKTNCVM

SEQ ID NO: 55352 - protein, 21 aa, Homo sapiens
IDMEKLVMGQRSRYFSGKCCC

SEQ ID NO: 55353 - protein, 1202 aa, Homo sapiens
KEANHDGDFGITLAELRALMELRSTDALRKIQESYGDVYGICTKLKTSPNEGLSGNPADLERREAVFGKNFIPPKKPKTFLQLVWEALQDVTLIILEIAAIVSLGLSFYQPPEGDNALCGEVSVGEEEGEGETGWIEGAAILLSVVCVVLVTAFNDWSKEKQFRGLQSRIEQEQKFTVIRGGQVIQIPVADITVGDIAQVKYGDLLPADGILIQGNDLKIDESSLTGESDHVKKSLDKDPLLLSGTHVMEGSGRMVVTAVGVNSQTGIIFTLLGAGGEEEEKKDEKKKEKKNKKQDGAIENRNKAKAQDGAAMEMQPLKSEEGGDGDEKDKKKANLPKKEKSVLQGKLTKLAVQIGKAGLLMSAITVIILVLYFVIDTFWVQKRPWLAECTPIYIQYFVKFFIIGVTVLVVAVPEGLPLAVTISLAYSVKKMMKDNNLVRHLDACETMGNATAICSDKTGTLTMNRMTVVQAYINEKHYKKVPEPEAIPPNILSYLVTGISVNCAYTSKILPPEKEGGLPRHVGNKTECALLGLLLDLKRDYQDVRNEIPEEALYKVYTFNSVRKSMSTVLKNSDGSYRIFSKGASEIILKKCFKILSANGEAKVFRPRDRDDIVKTVIEPMASEGLRTICLAFRDFPAGEPEPEWDNENDIVTGLTCIAVVGIEDPVRPEVPDAIKKCQRAGITVRMVTGDNINTARAIATKCGILHPGEDFLCLEGKDFNRRIRNEKGEIEQERIDKIWPKLRVLARSSPTDKHTLVKGIIDSTVSDQRQVVAVTGDGTNDGPALKKADVGFAMGIAGTDVAKEASDIILTDDNFTSIVKAVMWGRNVYDSISKFLQFQLTVNVVAVIVAFTGACITQDSPLKAVQMLWVNLIMDTLASLALATEPPTESLLLRKPYGRNKPLISRTMMKNILGHAFYQLVVVFTLLFAGEKFFDIDSGRNAPLHAPPSEHYTIVFNTFVLMQLFNEINARKIHGERNVFEGIFNNAIFCTIVLGTFVVQIIIVQFGGKPFSCSELSIEQWLWSIFLGMGTLLWGQLISTIPTSRLKFLKEAGHGTQKEEIPEEELAEDVEEIDHAERELRRGQILWFRGLNRIQTQIRVVNAFRSSLYEGLEKPESRSSIHNFMTHPEFRIEDSEPHIPLIDDTDAEDDAPTKRNSSPPPSPNKNNNAVDSGIHLTIEMNKSATSSSPGSPLHSLETSL

SEQ ID NO: 55354 - protein, 8 aa, Homo sapiens
RIQTICQK

SEQ ID NO: 55355 - protein, 22 aa, Homo sapiens
MKSHKPVFNMCCLRHISVVNIN

SEQ ID NO: 55356 - protein, 7 aa, Homo sapiens
MSLLKNK

SEQ ID NO: 55357 - protein, 160 aa, Homo sapiens
IGEIAAAVSFISKFLRTKGLTSERQLQTFSQSLQELLAEHYKHHWFPEKPCKGSGYRCIRINHKMDPLIGQAAQRIGLSSQELFRLLPSELTLWVDPYEVSYRIGEDGSICVLYEASPAGGSTQNSTNVQMVDSRISCKEELLLGRTSPSKNYNMMTVSG

SEQ ID NO: 55358 - protein, 259 aa, Homo sapiens
MTLVMLAAAGGQDDLLRLLITKGAKVNGRQKNGTTALIHAAEKNFLTTVAILLEAGAFVNVQQSNGETALMKACKRGNSDIVRLVIECGADCNILSKHQNSALHFAKQSNNVLVYDLLKNHLETLSRVAEETIKDYFEARLALLEPVFPIACHRLCEGPDFSTDFNYKPPQNIPEGSGILLFIFHANFLGKEVIARLCGPCSVQAVVLNDKFQLPVFLDSHFVYSFSPVAGPNKLFIRLTEAPSAKVKLLIGAYRVQLQ

SEQ ID NO: 55359 - protein, 162 aa, Homo sapiens
LNTLFYFNTKYFGLKTVEQHLRLSFGTVFRHWKKNPLTMENKACLRYQVSSLCGTDNEDKITTGKRKHEDDEPVFEQIENTANPSRCPVKMFECYLSKSPQNLNQRMDVFYLQPECSSSTDSPVWYTSTSLDRNTLENMLVRVLLVKDIYDKDNYELDEDTD

SEQ ID NO: 55360 - protein, 130 aa, Homo sapiens
KEEDVLKFLAAGTHLGGTNLDFQMEQYIYKRKSDGIYIINLKKTWEKLLLAARAIVAIENPADVSVISSRNTGQRAVLKFAAATGATPIAGRFTPGTFTNQIQAAFREPRLLVVTDPRADPPASHGGVLC

SEQ ID NO: 55361 - protein, 100 aa, Homo sapiens
LTALLWRGRIPGRQWIGKHRRPRFVSLRAKQNMIRRLEIEAENHYWLSMPYMTREQERGHAAVRRREAFEAIKAAATSKFPPHRFIADQLDHLNVTKKWS

SEQ ID NO: 55362 - protein, 298 aa, Homo sapiens
VLFLISKMVREQYTTATEGICIERPENQYVYKIGIYGWRKRCLYLFVLLLLIILVVNLALTIWILKVMWFSPAGMGHLCVTKDGLRLEGESEFLFPLYAKEIHSRVDSSLLLQSTQNVTVNARNSEGEVTGRLKVGPKMVEVQNQQFQINSNDGKPLFTVDEKEVVVGTDKLRVTGPEGALFEHSVETPLVRADPFQDLRLESPTRSLSMDAPRGVHIQAHAGKIEALSQMDILFHSSDGMLVLDAETVCLPKLVQGTWGPSGSSQSLYEICVCPDGKLYLSVAGVSTTCQEHNHICL

SEQ ID NO: 55363 - protein, 67 aa, Homo sapiens
IQAMHPTLAGKITGMLLEIDNSELLYMLESPESLRSKVDEAVAVLQAHQAKEATQKAVNSATGVPTV

SEQ ID NO: 55364 - protein, 6 aa, Homo sapiens
VKVKKE

SEQ ID NO: 55365 - protein, 68 aa, Homo sapiens
VVNKLIPDSIGKDIEKTCQSIYPLHDVFVRKVKMLKKPKFELGKLMELHGEGSSSGKATGSKTGAKVE

SEQ ID NO: 55366 - protein, 492 aa, Homo sapiens
IEPRHLCRGALPEGITSELECVTNSTLAAIIRQLSSLSKHAEDIFGELFNEANNFYIRANSLQDRIDRLAVKVTQLDSTVEEVSLQDINMKKAFKSSTVQDQQVVSKNSIPNPVADIYNQSDKPPPLNILTPYRDDKKDGLKFYTDPSYFFDLWKEKMLQDTEDKRKEKRRQKREKHKLNPNRNQQVNVRKVRTRKEEWERRKMGIEFMSDAKKLEQAGSAKEDRVPSGSHASDVTDYSYPATPNHSLHPQPVTPSYAAGDVPPHGPASQAAEHEYRPPSASARHMALNRPQQPPPPPPPQAPEGSQASAPMAPADYGMLPAQIIEYYNPSGPPPPPPPPVIPSAQTAFVSPLQMPMQPPFPASASSTHAAPPHPPSTGLLVTAPPPPGPPPPPPGPPGPGSSLSSSPMHGPPVAEAKRQEPAQPPISDARSDLLAAIRMGIQLKKVQEQREQEAKREPVGNDVATILSRRIAVEYSDSDDDSEFDENDWSD

SEQ ID NO: 55367 - protein, 15 aa, Homo sapiens
KDYKDQKASRNESTF

SEQ ID NO: 55368 - protein, 19 aa, Homo sapiens
KRCFENTFQELIAAANGQL

SEQ ID NO: 55369 - protein, 57 aa, Homo sapiens
ITDLLARGIDVQQVSLVINYDLPTNRENYIHRIGRRGQFGRKGVAINMVTEEDKRTL

SEQ ID NO: 55370 - protein, 224 aa, Homo sapiens
LGNTTVICGVKAEFAAPSTDAPDKGYVVPNVDLPPLCSSRFRSGPPGEEAQVASQFIADVIENSQIIQKEDLCISPGKLVWVLYCDLICLDYDGNILDACTFALLAALKNVQLPEVTINEETALAEVNLKKKSYLNIRTHPVATSFAVFDDTLLIVDPTGEEEHLATGTLTIVMDEEGKLCCLHKPGGSGLTGAKLQDCMSRAVTRHKEVKKLMDEVIKSMKPK

SEQ ID NO: 55371 - protein, 287 aa, Homo sapiens
ISSGELRSLWTCDCELALLPLAQLLRLQPGAFQLSGDQLVVARPGEPAAARGGFNVFGDGLVRLDGQLYRLSSYIKRYVELTNYCDYKDYRETILSKPMLFFINVQTKKDTSKERTYAFLVNTRHPKIRRQIEQGMDMVISSVIGESYRLQFDFQEAVKNFFPPGNEVVNGENLSFAYEFKADALFDFFYWFGLSNSVVKVNGKVLNLSSTSPEKKETIKLFLEKMSEPLIRRSSFSDRKFSVTSRGSIDDVFNCNLSPRSSLTEPLLAELPFPSVLESEETPNQFI

SEQ ID NO: 55372 - protein, 472 aa, Homo sapiens
LASEDTKKEVKQSQDLEKSGISRKNDIDLKGIVFVIQSQSNSFHAKRAEQLKKSILKQAADLTQELPSVLLLHQLAKQEGAWTILPLLPHFSVTYSRNSSWIFFCEEETRIQIPKLLETLRRYDPSKEWFLGKALHDEEATIIHHYAFSENPTVFKYPDFAAGWALSIPLVNKLTKRLKSESLKSDFTIDLKHEIALYIWDKGGGPPLTPVPEFCTNDVDFYCATTFHSFLPLCRKPVKKKDIFVAVKTCKKFHGDRIPIVKQTWESQASLIEYYSDYTENSIPTVDLGIPNTDRGHCGKTFAILERFLNRSQDKTAWLVIVDDDTLISISRLQHLLSCYDSGEPVFLGERYGYGLGTGGYSYITGGGGMVFSREAVRRLLASKCRCYSNDAPDDMVLGMCFSGLGIPVTHSPLFHQARPVDYPKDYLSHQVPISFHKHWNIDPVKVYFTWLAPSDEDKARQETQKGFREEL

SEQ ID NO: 55373 - protein, 106 aa, Homo sapiens
LGVAALAFAGRYAFRIWKPLEQVITETAKKISTPSFSSYYKGGFEQKMSRREAGLILGVSPSAGKAKIRTAHRRVMILNHPDKGGSPYVAAKINEAKDLLETTTKH

SEQ ID NO: 55374 - protein, 25 aa, Homo sapiens
LEAFVAKFMALYKKFMEDGLEGMMF

SEQ ID NO: 55375 - protein, 207 aa, Homo sapiens
LVYIGQRGDNIPKILVFTEDGYFLRAWNYTVDTPHGIFAASTLYEQSVWITDVGSDFMILWLHGENGTGPAKFNIPHSVTLDSAGRVWVADRGNKRIQVFDKDTGEWLGAWNNCFTEEGPSSVRFTPDGKYLIVAQLNLSRLSVVAAPPVGSIGECSVISTIQLADQVLPHLLEVDRKTGAVYVAEIGAKQVQKYVPLNSYVPSFGS

SEQ ID NO: 55376 - protein, 49 aa, Homo sapiens
ISTIQLADQVLPHLLEVDRKTGAVYVAEIGAKQVQKYVPLNSYVPSFGS

SEQ ID NO: 55377 - protein, 600 aa, Homo sapiens
KALSTFFVENSLRTRRNLRGDIERKSLAINEEFVSIFKEVKEELESISEDVQAMSNCCQDMTSRLQAAKEQTQDLIVKTTKLQSESQKLEIRAQVADAFLSKFQLTSDEMSLLRGTREGPITEDFFKALGRVKQIHNDVKVLLRTNQQTAGLEIMEQMALLQETAYERLYRWAQSECRTLTQESCDVSPVLTQAMEALQDRPVLYKYTLDEFGTARRSTVVRGFIDALTRGGPGGTPRPIEMHSHDPLRYVGDMLAWLHQATASEKEHLEALLKHVTTQGVEENIQEVVGHITEGVCRPLKVRIEQVIVAEPGAVLLYKISNLLKFYHHTISGIVGNSATALLTTIEEMHLLSKKIFFNSLSLHASKLMDKVELPPPDLGPSSALNQTLMLLREVLASHDSSVVPLDARQADFVQVLSCVLDPLLQMCTVSASNLGTADMATFMVNSLYMMKTTLALFEFTDRRLEMLQFQIEAHLDTLINEQASYVLTRVGLSYIYNTVQQHKPEQGSLANMPNLDSVTLKAAMVQFDRYLSAPDNLLIPQLNFLLSATVKEQIVKQSTELVCRAYGEVYAAVMNPINEYKDPENILHRSPQQVQTLLS

SEQ ID NO: 55378 - protein, 81 aa, Homo sapiens
LAEQVSSYNESKRSESLMDIHHKKLKSKAAEDKNKPQERIPFDRDKDLKVNRFDEAQKKALIKKSRELNTRFSHGKGNMFL

SEQ ID NO: 55379 - protein, 196 aa, Homo sapiens
VSFTLNEDLANIHDIGGKPASVSAPREHPFVLQSVGGQTLTVFTESSSDKLSLEGIVVQRAECRPAASENYMRLKRLQIEESSKPVRLSQQLDKVVTTNYKPVANHQYNIEYERKKKEDGKRARADKQHVLDMLFSAFEKHQYYNLKDLVDITKQPVVYLKEILKEIGVQNVKGIHKNTWELKPEYRHYQGEEKSD

SEQ ID NO: 55380 - protein, 289 aa, Homo sapiens
RTCALCPKDVEYNVLYFAQSENIAAHENCLLYSSGLVECEDQDPLNPDRSFDVESVKKEIQRGRKLKCKFCHKRGATVGCDLKNCNKNYHFFCAKKDDAVPQSDGVRGIYKLLCQQHAQFPIIAQSAKFSGVKRKRGRKKPLSGNHVQPPETMKCNTFIRQVKEEHGRHTDATVKVPFLKKCKEAGLLNYLLEEILDKVHSIPEKLMDETTSESDYEEIGSALFDCRLFEDTFVNFQAAIEKKIHASQQRWQQLKEEIELLQDLKQTLCSFQENRDLMSSSTSISSLSY

SEQ ID NO: 55381 - protein, 235 aa, Homo sapiens
VNELRAFVKMCKKDPSILHTQEMRFLREWVESMGGTATQKAKSEENTKEEKPDSKVEEDLKADEPSSEESDLEIDKEGVIEPDTDAPQEMGDENAEITEEVMDQANDKKVAAIEALNDGELQKAIDLFTDAIKLNPRLAILYAKRASVFVKLQKPNAAIRDCDRAIEINPDSAQPYKRRGKAHRLLGHWEEAAHDLALACKFDYDEDASAMLKEVQPRAQKIAEHQRKYERKREE

SEQ ID NO: 55382 - protein, 57 aa, Homo sapiens
VTGGANLGRIGVITNRERHPGSFDIVHMEDANGNSFATQLSNIFVIGKGNKLWISLP

SEQ ID NO: 55383 - protein, 27 aa, Homo sapiens
LPAVNEVDNPNVALNHTANYDVLANEI

SEQ ID NO: 55384 - protein, 110 aa, Homo sapiens
LSDALCEFDAVLADFASPFHERHFHYEEHLERMKRRSSASVSDSSGFSDSESADSLYRNSFSFSDEKLNSPTDSTPALLSATVTPQKAKLGDTKELEAFIADLDKTLASM

SEQ ID NO: 55385 - protein, 68 aa, Homo sapiens
IASEAEVAELYFHDSANKEFMLLSKQLQEKGWKVGDLLQAVLQYYEVMEKASSEERCKSLFDWLLENA

SEQ ID NO: 55386 - protein, 57 aa, Homo sapiens
LKKLRFDIEGSDEADGSKHLPGESKFQQKLAEMTSTRTRMQKQKMNDSMDTSNKEEK

SEQ ID NO: 55387 - protein, 18 aa, Homo sapiens
MEHNRLFWYKLTQEKHLQ

SEQ ID NO: 55388 - protein, 1152 aa, Homo sapiens
IRREDGQFQCITGPAQVPMMSPNGSVPPIYVPPGYAPQVIEDNGVRRVVVVPQAPEFHPGSHTVLHRSPHPPLPGFIPVPTMMPPPPRHMYSPVTGAGDMTTQYMPQYQSSQVYGDVDAHSTHGRSNFRDERSSKTYERLQKKLKDRQGTQKDKMSSPPSSPQKCPSPINEHNGLIKGQIAGGINTGSAKIKSGKGKGGTQVDTEIEEKDEETKAFEALLSNIVKPVASDIQARTVVLTWSPPSSLINGETDESSVPELYGYEVLISSTGKDGKYKSVYVGEETNITLNDLKPAMDYHAKVQAEYNSIKGTPSEAEIFTTLSCEPDIPNPPRIANRTKNSLTLQWKAPSDNGSKIQNFVLEWDEGKGNGEFCQCYMGSQKQFKITKLSPAMGCKFRLSARNDYGTSGFSEEVLYYTSGCAPSMPASPVLTKAGITWLSLQWSKPSGTPSDEGISYILEMEEETSGYGFKPKYDGEDLAYTVKNLRRSTKYKFKVIAYNSEGKSNPSEVVEFTTCPDKPGIPVKPSVKGKIHSHSFKITWDPPKDNGGATINKYVVEMAEGSNGNKWEMIYSGATREHLCDRLNPGCFYRLRVYCISDGGQSAVSESLLVQTPAVPPGPCLPPRLQGRPKAKEIQLRWGPPLVDGGSPISCYSVEMSPIEKDEPREVYQGSEVECTVSSLLPGKTYSFRLRAANKMGFGPFSEKCDITTAPGPPDQCKPPQVTCRSATCAQVNWEVPLSNGTDVTEYRLEWGGVEGSMQICYCGPGLSYEIKGLSPATTYYCRVQALSVVGAGPFSEVVACVTPPSVPGIVTCLQEISDDEIENPHYSPSTCLAISWEKPCDHGSEILAYSIDFGDKQSLTVGKVTSYIINNLQPDTTYRIRIQALNSLGAGPFSHMIKLKTKPLPPDPPRLECVAFSHQNLKLKWGEGTPKTLSTDSIQYHLQMEDKNGRFVSLYRGPCHTYKVQRLNESTSYKFCIQACNEAGEGPLSQEYIFTTPKSVPAALKAPKIEKVNDHICEITWECLQPMKGDPVIYSLQVMLGKDSEFKQIYKGPDSSFRYSSLQLNCEYRFRVCAIRQCQDSLGHQDLVGPYSTTVLFISQRTEPPASTNRDTVESTRTRRALSDEQCAAVILVLFAFFSILIAFIIQYFVIK

SEQ ID NO: 55389 - protein, 33 aa, Homo sapiens
KESTITRKLKDGKLVVECVMNNVTCTRIYEKVE

SEQ ID NO: 55390 - protein, 94 aa, Homo sapiens
IKYNVSTTPYLQSVKKKVQFDGTNSAFKELKFLTPVRRSRRLQEKTSKLPDMLKDHYPCVSSLEQLTELGRETDAFVCRPNAALCRVYYEADTT

SEQ ID NO: 55391 - protein, 81 aa, Homo sapiens
TPVSKTIRYCEKCQLIKPDRAHHCSTCDSCILKMDHHCPWVNNCVGFSNYKFFLLFLLYSLLYCLFVAAYSFRVLYKILDE

SEQ ID NO: 55392 - protein, 26 aa, Homo sapiens
IEKGEEHCGHLIEAHKECMRALGFKI

SEQ ID NO: 55393 - protein, 239 aa, Homo sapiens
IIPPDAVAVDCKDPDDVVPVGQRRAWCWCMCFGLAFMLAGVILGGAYLYKYFALQPDDVYYCGIKYIKDDVILNEPSADAPAALYQTIEENIKIFEEEEVEFISVPVPEFADSDPANIVHDFNKKLTAYLDLNLDKCYVIPLNTSIVMPPRNLLELLINIKAGTYLPQSYLIHEHMVITDRIENIDHLGFFIYRLCHDKETYKLQRRETIKGIQKREASNCFAIRHFENKFAVETLICS

SEQ ID NO: 55394 - protein, 18 aa, Homo sapiens
RCYSRRSILVQIFCTSTR

SEQ ID NO: 55395 - protein, 5 aa, Homo sapiens
INITA

SEQ ID NO: 55396 - protein, 332 aa, Homo sapiens
LTKALEQKPDDAQYYCQRAYCHILLGNYCVAVADAKKSLELNPNNSTAMLRKGICEYHEKNYAAALETFTEGQKLDIETGFHRVGQAGLQLLTSSDPPALDSQSAGITGADANFSVWIKRCQEAQNGSESEVWTHQSKIKYDWYQTESQVVITLMIKNVQKNDVNVEFSEKELSALVKLPSGEDYNLKLELLHPIIPEQSTFKVLSTKIEIKLKKPEAVRWEKLEGQGDVPTPKQFVADVKNLYPSSSPYTRNWDKLVGEIKEEEKNEKLEGDAALNRLFQQIYSDGSDEVKRAMNKSFMESGGTVLSTNWSDVGKRKVEINPPDDMEWKKY

SEQ ID NO: 55397 - protein, 155 aa, Homo sapiens
VVPGWSRVSGIPSRRHWPVPYKRFDFRPKPDPYCQAKYTFCPTGSPIPVMEGDDDIEVFRLQAPVWEFKYGDLLGHLKIMHDAIGFRSTLTGKNYTMEWYELFQLGNCTFPHLRPEMDAPFWCNQGAACFFEGIDDVHWKENGTLVQVATISGKL

SEQ ID NO: 55398 - protein, 322 aa, Homo sapiens
VVPGWSRVSGIPSRRHWPVPYKRFDFRPKPDPYCQAKYTFCPTGSPIPVMEGDDDIEVFRLQAPVWEFKYGDLLGHLKIMHDAIGFRSTLTGKNYTMEWYELFQLGNCTFPHLRPEMDAPFWCNQGAACFFEGIDDVHWKENGTLVQVATISGNMFNQMAKWVKQDNETGIYYETWNVKASPEKGAETWFDSYDCSKFVLRTFNKLAEFGAEFKNIETNYTRIFLYSGEPTYLGNETSVFGPTGNKTLGLAIKRFYYPFKPHLPTKEFLLSLLQIFDAVIVHKQFYLFYNFEYWFLPMKFPFIKITYEEIPLPIRNKTLSGL

SEQ ID NO: 55399 - protein, 35 aa, Homo sapiens
IQQIKETGANLEICQWGFDDEANHLLLQNNLPAVC

SEQ ID NO: 55400 - protein, 63 aa, Homo sapiens
MHSKHSENSLLLTKTEPKHVTENQKSKTLNVPKEHEDNIFTPKPTLFTKKEAPEWSKKQKMKT

SEQ ID NO: 55401 - protein, 487 aa, Homo sapiens
LLVLVDLQYEGAECGVNADVEKHLELGKKLLAAGQLADALSQFHAAVDGDPDNYIAYYRRATVFLAMGKSKAALPDLTKVIQLKMDFTAARLQRGHLLLKQGKLDEAEDDFKKVLKSNPSENEEKEAQSQLIKSDEMQRLRSQALNAFGSGDYTAAIAFLDKILEVCVWDAELRELRAECFIKEGEPRKAISDLKAASKLKNDNTEAFYKISTLYYQLGDHELSLSEVRECLKLDQDHKRCFAHYKQVKKLNKLIESAEELIRDGRYTDATSKYESVMKTEPSIAEYTVRSKERICHCFSKDEKPVEAIRVCSEVLQMEPDNVNALKDRAEAYLIEEMYDEAIQDYETAQEHNENDQQIREGLEKAQRLLKQSQKRDYYKILGVKRNAKKQEIIKAYRKLALQWHPDNFQNEEEKKKAEKKFIDIAAAKEVLSDPEMRKKFDDGEDPLDAESQQGGGGNPFHRSWNSWQGFNPFSSGGPFRFKFHFN

SEQ ID NO: 55402 - protein, 10 aa, Homo sapiens
RSAMILKSLY

SEQ ID NO: 55403 - protein, 363 aa, Homo sapiens
ITMALNVAPVRDTKWLTLEVCRQFQRGTCSRSDEECKFAHPPKSCQVENGRVIACFDSLKGRCSRENCKYLHPPTHLKTQLEINGRNNLIQQKTAAAMLAQQMQFMFPGTPLHPVPTFPVGPAIGTNTAISFAPYLAPVTPGVGLVPTEILPTTPVIVPGSPPVTVPGSTATQKLLRTDKLEVCREFQRGNCARGETDCRFAHPADSTMIDTSDNTVTVCMDYIKGRCMREKCKYFHPPAHLQAKIKAAQHQANQAAVAAQAAAAAATVMAFPPGALHPLPKRQALEKSNGTSAVFNPSVLHYQQALTSAQLQQHAAFIPTDNSEIISRNGMECQESALRITKHCYCTYYPVSSSIELPQTAC

SEQ ID NO: 55404 - protein, 29 aa, Homo sapiens
TSATVSAATTPATSVPFAATATANQIILK

SEQ ID NO: 55405 - protein, 972 aa, Homo sapiens
ILSIKIGDTRLSTMETGTGLIRAMIEVINHKCDLVNYSYGEATHWPNSGRICEVINEAVWKHNIIYVSSAGNNGPCLSTVGCPGGTTSSVIGVGAYVSPDMMVAEYSLREKLPANQYTWSSRGPSADGALGVSISAPGGAIASVPNWTLRGTQLMNGTSMSSPNACGGIALILSGLKANNIDYTVHSVRRALENTAVKADNIEVFAQGHGIIQVDKAYDYLVQNTSFANKLGFTVTVGNNRGIYLRDPVQVAAPSDHGVGIEPVFPENTENSEKISLQLHLALTSNSSWVQCPSHLELMNQCRHINIRVDPRGLREGLHYTEVCGYDIASPNAGPLFRVPITAVIAAKVNESSHYDLAFTDVHFKPGQIRRHFIEVPEGATWAEVTVCSCSSEVSAKFVLHAVQLVKQRAYRSHEFYKFCSLPEKGTLTEAFPVLGGKAIEFCIARWWASLSDVNIDYTISFHGIVCTAPQLNIHASEGINRFDVQSSLKYEDLAPCITLKNWVQTLRPVSAKTKPLGSRDVLPNNRQLYEMVLTYNFHQPKSGEVTPSCPLLCELLYESEFDSQLWIIFDQNKRQMGSGDAYPHQYSLKLEKGDYTIRLQIRHEQISDLERLKDLPFIVSHRLSNTLSLDIHENHSFALLGKKKSSNLTLPPKYNQPFFVTSLPDDKIPKGAGPGCYLAGSLTLSKTELGKKAGQSAAKRQGKFKKDVIPVHYYLIPPPTKTKNGSKDKEKDSEKEKDLKEEFTEALRDLKIQWMTKLDSSDIYNELKETYPNYLPLYVARLHQLDAEKERMKRLNEIVDAANAVISHIDQTALAVYIAMKTDPRPDAATIKNDMDKQKSTLVDALCRKGCALADHLLHTQAQDGAISTDAEGKEEEGESPLDSLAETFWETTKWTDLFDNKVLTFAYKHALVNKMYGRGLKFATKLVEEKPTKENWKNCIQLMKLLGWTHCASFTENWLPIMYPPDYCVF

SEQ ID NO: 55406 - protein, 222 aa, Homo sapiens
LEANPEVTNQFLKQLGLHPNWQFVDVYGMDPELLSMVPRPVCAVLLLFPITEKYEVFRTEEEEKIKSQGQDVTSSVYFMKQTISNACGTIGLIHAIANNKDKMHFESGSTLKKFLEESVSMSPEERARYLENYDAIRVTHETSAHEGQTEAPSIDEKVDLHFIALVHVDGHLYELDGRKPFPINHGETSDETLLEDAIEVCKKFMERDPDELRFNAIALSAA

SEQ ID NO: 55407 - protein, 1270 aa, Homo sapiens
KNFETKDFRASLENGVLLCDLINKLKPGVIKKINRLSTPIAGLDNINVFLKACEQIGLKEAQLFHPGDLQDLSNRVTVKQEETDRRVKNVLITLYWLGRKAQSNPYYNGPHLNLKAFENLLGQALTKALEDSSFLKRSGRDSGYGDIWCPERGEFLAPPRHHKREDSFESLDSLGSRSLTSCSSDITLRGGREGFESDTDSEFTFKMQDYNKDDMSYRRISAVEPKTALPFNRFLPNKSRQPSYVPAPLRKKKPDKHEDNRRSWASPVYTEADGTFSRLFQKIYGENGSKSMSDVSAEDVQNLRQLRYEEMQKIKSQLKEQDQKWQDDLAKWKDRRKSYTSDLQKKKEEREEIEKQALEKSKRSSKTFKEMLQDRESQNQKSTVPSRRRMYSFDDVLEEGKRPPTMTVSEASYQSERVEEKGATYPSEIPKEDSTTFAKREDRVTTEIQLPSQSPVEEQSPASLSSLRSRSTQMESTRVSASLPRSYRKTDTVRLTSVVTPRPFGSQTRGISSLPRSYTMDDAWKYNGDVEDIKRTPNNVVSTPAPSPDASQLASSLSSQKEVAATEEDVTRLPSPTSPFSSLSQDQAATSKATLSSTSGLDLMSESGEGEISPQREVSRSQDQFSDMRISINQTPGKSLDFGFTIKWDIPGIFVASVEAGSPAEFSQLQVDDEIIAINNTKFSYNDSKEWEEAMAKAQETGHLVMDVRRYGKAGSPETKWIDATSGIYNSEKSSNLSVTTDFSESLQSSNIESKEINGIHDESNAFESKASESISLKNLKRRSQFFEQGSSDSVVPDLPVPTISAPSRWVWDQEEERKRQERWQKEQDRLLQEKYQREQEKLREEWQRAKQEAERENSKYLDEELMVLSSNSMSLTTREPSLATWEATWSEGSKSSDREGTRAGEEERRQPQEEVVHEDQGKKPQDQLVIERERKWEQQLQEEQEQKRLQAEAEEQKRPAEEQKRQAEIERETSVRIYQYRRPVDSYDIPKTEEASSGFLPGDRNKSRSTTELDDYSTNKNGNNKYLDQIGNMTSSQRRSKKEQVPSGAELERQQILQEMRKRTPLHNDNSWIRQRSASVNKEPVSLPGIMRRGESLDNLDSPRSNSWRQPPWLNQPTGFYASSSVQDFSRPPPQLVSTSNRAYMRNPSSSVPPPSAGSVKTSTTGVATTQSPTPRSHSPSASQSGSQLRNRSVSGKRICSYCNNILGKGAAMIIESLGLCYHLHCFKCVACECDLGGSSSGAEVRIRNHQLYCNDCYLRFKSGRPTAM

SEQ ID NO: 55408 - protein, 1242 aa, Homo sapiens
INVFLKACEQIGLKEAQLFHPGDLQDLSNRVTVKQEETDRRVKNVLITLYWLGRKAQSNPYYNGPHLNLKAFENLLGQALTKALEDSSFLKRSGRDSGYGDIWCPERGEFLAPPRHHKREDSFESLDSLGSRSLTSCSSDITLRGGREGFESDTDSEFTFKMQDYNKDDMSYRRISAVEPKTALPFNRFLPNKSRQPSYVPAPLRKKKPDKHEDNRRSWASPVYTEADGTFSRSKSMSDVSAEDVQNLRQLRYEEMQKIKSQLKEQDQKWQDDLAKWKDRRKSYTSDLQKKKEEREEIEKQALEKSKRSSKTFKEMLQDRESQNQKSTVPSRRRMYSFDDVLEEGKRPPTMTVSEASYQSERVEEKGATYPSEIPKEDSTTFAKREDRVTTEIQLPSQSPVEEQSPASLSSLRSRSTQMESTRVSASLPRSYRKTDTVRLTSVVTPRPFGSQTRGISSLPRSYTMDDAWKYNGDVEDIKRTPNNVVSTPAPSPDASQLASSLSSQKEVAATEEDVTRLPSPTSPFSSLSQDQAATSKATLSSTSGLDLMSESGEGEISPQREVSRSQDQFSDMRISINQTPGKSLDFGFTIKWDIPGIFVASVEAGSPAEFSQLQVDDEIIAINNTKFSYNDSKEWEEAMAKAQETGHLVMDVRRYGKADWGKDQPSLPFIRHKTLNLTSMATKIIGSPETKWIDATSGIYNSEKSSNLSVTTDFSESLQSSNIESKEINGIHDESNAFESKASESISLKNLKRRSQFFEQGSSDSVVPDLPVPTISAPSRWVWDQEEERKRQERWQKEQDRLLQEKYQREQEKLREEWQRAKQEAERENSKYLDEELMVLSSNSMSLTTREPSLATWEATWSEGSKSSDREGTRAGEEERRQPQEEVVHEDQGKKPQDQLVIERERKWEQQLQEEQEQKRLQAEAEEQKRPAEEQKRQAEIERETSVRIYQYRRPVDSYDIPKTEEASSGFLPGDRNKSRSTTELDDYSTNKNGNNKYLDQIGNMTSSQRRSKKEQVPSGAELERQQILQEMRKRTPLHNDNSWIRQRSASVNKEPVSLPGIMRRGESLDNLDSPRSNSWRQPPWLNQPTGFYASSSVQDFSRPPPQLVSTSNRAYMRNPSSSVPPPSAGSVKTSTTGVATTQSPTPRSHSPSASQSGSQLRNRSVSGKRICSYCNNILGKGAAMIIESLGLCYHLHCFKCVACECDLGGSSSGAEVRIRNHQLYCNDCYLRFKSGRPTAM

SEQ ID NO: 55409 - protein, 995 aa, Homo sapiens
VERLFQKIYGENGSKSMSDVSAEDVQNLRQLRYEEMQKIKSQLKEQDQKWQDDLAKWKDRRKSYTSDLQKKKEEREEIEKQALEKSKRSSKTFKEMLQDRESQNQKSTVPSRRRMYSFDDVLEEGKRPPTMTVSEASYQSERVEEKGATYPSEIPKEDSTTFAKREDRVTTEIQLPSQSPVEEQSPASLSSLRSRSTQMESTRVSASLPRSYRKTDTVRLTSVVTPRPFGSQTRGISSLPRSYTMDDAWKYNGDVEDIKRTPNNVVSTPAPSPDASQLASSLSSQKEVAATEEDVTRLPSPTSPFSSLSQDQAATSKATLSSTSGLDLMSESGEGEISPQREVSRSQDQFSDMRISINQTPGKSLDFGFTIKWDIPGIFVASVEAGSPAEFSQLQVDDEIIAINNTKFSYNDSKEWEEAMAKAQETGHLVMDVRRYGKAGSPETKWIDATSGIYNSEKSSNLSVTTDFSESLQSSNIESKEINGIHDESNAFESKASESISLKNLKRRSQFFEQGSSDSVVPDLPVPTISAPSRWVWDQEEERKRQERWQKEQDRLLQEKYQREQEKLREEWQRAKQEAERENSKYLDEELMVLSSNSMSLTTREPSLATWEATWSEGSKSSDREGTRAGEEERRQPQEEVVHEDQGKKPQDQLVIERERKWEQQLQEEQEQKRLQAEAEEQKRPAEEQKRQAEIERETSVRIYQYRRPVDSYDIPKTEEASSGFLPGDRNKSRSTTELDDYSTNKNGNNKYLDQIGNMTSSQRRSKKEQVPSGAELERQQILQEMRKRTPLHNDNSWIRQRSASVNKEPVSLPGIMRRGESLDNLDSPRSNSWRQPPWLNQPTGFYASSSVQDFSRPPPQLVSTSNRAYMRNPSSSVPPPSAGSVKTSTTGVATTQSPTPRSHSPSASQSGSQLRNRSVSGKRICSYCNNILGKGAAMIIESLGLCYHLHCFKCVACECDLGGSSSGAEVRIRNHQLYCNDCYLRFKSGRPTAM

SEQ ID NO: 55410 - protein, 37 aa, Homo sapiens
KSCGRTKPSLFVFSAFTEHTNGINSCFSFSPQKLPEN

SEQ ID NO: 55411 - protein, 29 aa, Homo sapiens
MKKIAWKTYPTAWASYLSHGKLINLNLMG

SEQ ID NO: 55412 - protein, 17 aa, Homo sapiens
LASSFLITKRSRCGWIS

SEQ ID NO: 55413 - protein, 12 aa, Homo sapiens
MVWKALPTSAEV

SEQ ID NO: 55414 - protein, 23 aa, Homo sapiens
IPRENAQISLDGDVTFFGALKLL

SEQ ID NO: 55415 - protein, 581 aa, Homo sapiens
IYWLAQCLYLTAQYHRAAHALRSRKLDKLYEACRYLAARCHYAAKEHQQALDVLDMEEPINKRLFEKYLKDESGFKDPSSDWEMSQSSIKSSICLLRGKIYDALDNRTLATYSYKEALKLDVYCFEAFDLLTSHHMLTAQEEKELLESLPLSKLCNEEQELLRFLFENKLKKYNKPSETVIPESVDGLQENLDVVVSLAERHYYNCDFKMCYKLTSVVMEKDPFHASCLPVHIGTLVELNKANELFYLSHKLVDLYPSNPVSWFAVGCYYLMVGHKNEHARRYLSKATTLEKTYGPAWIAYGHSFAVESEHDQAMAAYFTAAQLMKGCHLPMLYIGLEYGLTNNSKLAERFFSQALSIAPEDPFVMHEVGVVAFQNGEWKTAEKWFLDALEKIKAIGNEVTVDKWEPLLNNLGHVCRKLKKYAEALDYHRQALVLIPQNASTYSAIGYIHSLMGNFENAVDYFHTALGLRRDDTFSVTMLGHCIEMYIGDSEAYIGADIKDKLKCYDFDVHTMKTLKNIISPPWDFREFEVEKQTAEETGLTPLETSRKTPDSRPSLEETFEIEMNESDMMLETSMSDHST

SEQ ID NO: 55416 - protein, 299 aa, Homo sapiens
IWKPVLSIDTEPRKPALFPEPAKTAPPASPEARKRALFPEPRKHALFPELPKSALFSESQKAVELGDELQIDAIDDQKCDILVQEELLASPKKLLEDTLFPSSKKLKKDNQESSDAELSSSEYIKTDLDAMDIKGQESSSDQEQVDVESIDFSKENKMDMTSPEQSRNVLQFTEEKEAFISEEEIAKYMKRGKGKYYCKICCCRAMKKGAVLHHLVNKHNVHSPYKCTICGKAFLLESLLKNHVAAHGQSLLKCPRCNFESNFPRGFKKHLTHCQSRHNEEANKKLMEALEPPLEEQQI

SEQ ID NO: 55417 - protein, 7 aa, Homo sapiens
MRSGSSP

SEQ ID NO: 55418 - protein, 1691 aa, Homo sapiens
VTVGFLAQSVLAGVKKFDVPCGGRDCSGGCQCYPEKGGRGQPGPVGPQGYNGPPGLQGFPGLQGRKGDKGERGAPGVTGPKGDVGARGVSGFPGADGIPGHPGQGGPRGRPGYDGCNGTQGDSGPQGPPGSEGFTGPPGPQGPKGQKGEPYALPKEERDRYRGEPGEPGLVGFQGPPGRPGHVGQMGPVGAPGRPGPPGPPGPKGQQGNRGLGFYGVKGEKGDVGQPGPNGIPSDTLHPIIAPTGVTFHPDQYKGEKGSEGEPGIRGISLKGEEGIMGFPGLRGYPGLSGEKGSPGQKGSRGLDGYQGPDGPRGPKGEAGDPGPPGLPAYSPHPSLAKGARGDPGFPGAQGEPGSQGEPGDPGLPGPPGLSIGDGDQRRGLPGEMGPKGFIGDPGIPALYGGPPGPDGKRGPPGPPGLPGPPGPDGFLFGLKGAKGRAGFPGLPGSPGARGPKGWKGDAGECRCTEGDEAIKGLPGLPGPKGFAGINGEPGRKGDRGDPGQHGLPGFPGLKGVPGNIGAPGPKGAKGDSRTITTKGERGQPGVPGVPGMKGDDGSPGRDGLDGFPGLPGPPGDGIKGPPGDPGYPGIPGTKGTPGEMGPPGLGLPGLKGQRGFPGDAGLPGPPGFLGPPGPAGTPGQIDCDTDVKRAVGGDRQEAIQPGCIGGPKGLPGLPGPPGPTGAKGLRGIPGFAGADGGPGPRGLPGDAGREGFPGPPGFIGPRGSKGAVGLPGPDGSPGPIGLPGPDGPPGERGLPGEVLGAQPGPRGDAGVPGQPGLKGLPGDRGPPGFRGSQGMPGMPGLKGQPGLPGPSGQPGLYGPPGLHGFPGAPGQEGPLGLPGIPGREGLPGDRGDPGDTGAPGPVGMKGLSGDRGDAGFTGEQGHPGSPGFKGIDGMPGTPGLKGDRGSPGMDGFQGMPGLKGRPGFPGSKGEAGFFGIPGLKGLAGEPGFKGSRGDPGPPGPPPVILPGMKDIKGEKGDEGPMGLKGYLGAKGIQGMPGIPGLSGIPGLPGRPGHIKGVKGDIGVPGIPGLPGFPGVAGPPGITGFPGFIGSRGDKGAPGRAGLYGEIGATGDFGDIGDTINLPGRPGLKGERGTTGIPGLKGFFGEKGTEGDIGFPGITGVTGVQGPPGLKGQTGFPGLTGPPGSQGELGRIGLPGGKGDDGWPGAPGLPGFPGLRGIRGLHGLPGTKGFPGSPGSDIHGDPGFPGPPGERGDPGEANTLPGPVGVPGQKGDQGAPGERGPPGSPGLQGFPGITPPSNISGAPGDKGAPGIFGLKGYRGPPGPPGSAALPGSKGDTGNPGAPGTPGTKGWAGDSGPQGRPGVFGLPGEKGPRGEQGFMGNTGPTGAVGDRGPKGPKGDPGFPGAPGTVGAPGIAGIPQKIAVQPGTVGPQGRRGPPGAPGEMGPQGPPGEPGFRGAPGKAGPQGRGGVSAVPGFRGDEGPIGHQGPIGQEGAPGRPGSPGLPGMPGRSVSIGYLLVKHSQTDQEPMCPVGMNKLWSGYSLLYFEGQEKAHNQDLGLAGSCLARFSTMPFLYCNPGDVCYYASRNDKSYWLSTTAPLPMMPVAEDEIKPYISRCSVCEAPAIAIAVHSQDVSIPHCPAGWRSLWIGYSFLMHTAAGDEGGGQSLVSPGSCLEDFRATPFIECNGGRGTCHYYANKYSFWLTTIPEQSFQGSPSADTLKAGLIRTHISRCQVCMKNL

SEQ ID NO: 55419 - protein, 52 aa, Homo sapiens
KPRDAWDARAEGPARPPRTFRPARPVWASRTAWIPRSSWPRGALGAARNPRP

SEQ ID NO: 55420 - protein, 50 aa, Homo sapiens
RDAWDARAEGPARPPRTFRPARPVWASRTAWIPRSSWPRGALGAARNPRP

SEQ ID NO: 55421 - protein, 74 aa, Homo sapiens
RAYGAERIPGRKRYPRNARHPRAVRNPWAAWEARPHQRSQGRHRSPRHPRFARIPWGGWPPWNYGIPRIHRKPG

SEQ ID NO: 55422 - protein, 62 aa, Homo sapiens
TAGSTSNGTRFSASDLTNGADGMLATSSNGSQYSGSRVETPVSYVGEDDEEDDDFNENDEDD

SEQ ID NO: 55423 - protein, 319 aa, Homo sapiens
LAGLLLLGESLFIRREQANNILARVTRANSFLEEMKKGHLERECMEETCSYEEAREVFEDSDKTNEFWNKYKDGDQCETSPCQNQGKCKDGLGEYTCTCLEGFEGKNCELFTRKLCSLDNGDCDQFCHEEQNSVVCSCARGYTLADNGKACIPTGPYPCGKQTLERRKRSVAQATSSSGEAPDSITWKPYDAADLDPTENPFDLLDFNQTQPERGDNNLTRIVGGQECKDGECPWQALLINEENEGFCGGTILSEFYILTAAHCLYQAKRFKGTGTRSRRRAVRRCTRWRWSSSTTGSQRRPMTSTSPCSGSRPPSPSA

SEQ ID NO: 55424 - protein, 475 aa, Homo sapiens
LAGLLLLGESLFIRREQANNILARVTRANSFLEEMKKGHLERECMEETCSYEEAREVFEDSDKTNEFWNKYKDGDQCETSPCQNQGKCKDGLGEYTCTCLEGFEGKNCELFTRKLCSLDNGDCDQFCHEEQNSVVCSCARGYTLADNGKACIPTGPYPCGKQTLERRKRSVAQATSSSGEAPDSITWKPYDAADLDPTENPFDLLDFNQTQPERGDNNLTRIVGGQECKDGECPWQALLINEENEGFCGGTILSEFYILTAAHCLYQAKRFKVRVGDRNTEQEEGGEAVHEVEVVIKHNRFTKETYDFDIAVLRLKTPITFRMNVAPACLPERDWAESTLMTQKTGIVSGFGRTHEKGRQSTRLKMLEVPYVDRNSCKLSSSFIITQNMFCAGYDTKQEDACQGDSGGPHVTRFKDTYFVTGIVSWGEGCARKGKYGIYTKVTAFLKWIDRSMKTRGLPKAKSHAPEVITSSPLK

SEQ ID NO: 55425 - protein, 407 aa, Homo sapiens
LLLLLLLLLLGLMHCASAAMFMVKNGNGTACIMANFSAAFSVNYDTKSGPKNMTFDLPSDATVVLNRSSCGKENTSDPSLVIAFGRGHTLTLNFTRNATRYSVQLMSFVYNLSDTHLFPNASSKEIKTVESITDIRADIDKKYRCVSGTQVHMNNVTVTLHDATIQAYLSNSSFSRGETRCEQDRPSPTTAPPAPPSPSPSPVPKSPSVDKYNVSGTNGTCLLASMGLQLNLTYERKDNTTVTRLLNINPNKTSASGSCGAHLVTLELHSEGTTVLLFQFGMNASSSRFFLQGIQLNTILPDARDPAFKAANGSLRALQATVGNSYKCNAEEHVRVTKAFSVNIFKVWVQAFKVEGGQFGSVEECLLDENSMLIPIAVGGALAGLVLIVLIAYLVGRKRSHAGYQTI

SEQ ID NO: 55426 - protein, 12 aa, Homo sapiens
KFILQHLLCTTE

SEQ ID NO: 55427 - protein, 643 aa, Homo sapiens
LHRGRGVAAMQSRQWVRDSCRKLSGLLRQKNAVLNKLKTAIGAVEKDVGLSDEEKLFQVHTFEIFQKELNESENSVFQAVYGLQRALQGDYKDVVNMKESSRQRLEALREAAIKEETEYMELLAAEKHQVEALKNMQHQNQSLSMLDEILEDVRKAADRLEEEIEEHAFDDNKSVKGVNFEAVLRVEEEEANSKQNITKREVEDDLGLSMLIDSQNNQYILTKPRDSTIPRADHHFIKDIVTIGMLSLPCGWLCTAIGLPTMFGYIICGVLLGPSGLNSIKSIVQVETLGEFGVFFTLFLVGLEFSPEKLRKVWKISLQGPCYMTLLMIAFGLLWGHLLRIKPTQSVFISTCLSLSSTPLVSRFLMGSARGDKEGDIDYSTVLLGMLVTQDVQLGLFMAVMPTLIQAGASASSSIVVEVLRILVLIGQILFSLAAVFLLCLVIKKYLIGPYYRKLHMESKGNKEILILGISAFIFLMLTVTELLDVSMELGCFLAGALVSSQGPVVTEEIATSIEPIRDFLAIVFFASIGLHVFPTFVAYELTVLVFLTLSVVVMKFLLAALVLSLILPRSSQYIKWIVSAGLAQVSEFSFVLGSRARRAGVISREVYLLILSVTTLSLLLAPVLWRAAITRCVPRPERRSSL

SEQ ID NO: 55428 - protein, 15 aa, Homo sapiens
MDPADYGKQHFNDVL

SEQ ID NO: 55429 - protein, 4 aa, Homo sapiens
MEGS

SEQ ID NO: 55430 - protein, 82 aa, Homo sapiens
RHEHQLMLMRQDLMRRQEELRRLEELRNQELQKRKQIQLRHEEEHRRREEEMIRHREQEELRRQQEGFKPNYMENGDKRKCG

SEQ ID NO: 55431 - protein, 96 aa, Homo sapiens
MSEGLGMRYAFIGPLETMHLNAEGMLSYCDRYSEGIKHVLQTFGPIPEFSRATAEKVNQDMCMKVPDDPEHLAARRQWRDECLMRLAKLKSQVQPQ

SEQ ID NO: 55432 - protein, 78 aa, Homo sapiens
IVIADPPYLSEECLRKTSETVKYLTRGKILLCTGAIMEEQAAELLGVKMCTFVPRHTRNLANEFRCYVNYDSGLDCGI

SEQ ID NO: 55433 - protein, 341 aa, Homo sapiens
VVVWSYYAYVVELCVFTIFGNEENGKTVVYLVAFHLFFVMFVWSYWMTIFTSPASPSKEFYLSNSEKERYEKEFSQERQQEILRRAARALPIYTTSASKTIRYCEKCQLIKPDRAHHCSACDSCILKMDHHCPWVNNCVGFSNYKFFLLFLLYSLLYCLFVAATVLEYFIKFWTNELTDTRAKFHVLFLFFVSAMFFISVLSLFSYHCWLVGKNRTTIESFRAPTFSYGPDGNGFSLGCSKNWRQVFGDEKKYWLLPIFSSLGDGCSFPTRLVGMDPEQASVTNQNEYARSSGSNQPFPIKPLSESKNRLLDSESQWLENGAEEGIVKSGTNNHVTVAIEN

SEQ ID NO: 55434 - protein, 391 aa, Homo sapiens
LAGAGAAWHHSRVSVAARDGSFTVSAQKNVEHGIIYIGKPSLRKQRFMQFSSLEHEGEYYMTPRDFLFSVMFEQMERKTSVKKLTKKDIEDTLSGIQTAGCGSTFFRDLGDKGLISYTEYLFLLTILTKPHSGFHVAFKMLDTDGNEMIEKREFFKLQKIISKQDDLMTVKTNETGYQEAIVKEPEINTTLQMRFFGKRGQRKLHYKEFRRFMENLQTEIQEMEFLQFSKGLSFMRKEDFAEWLLFFTNTENKDIYWKNVREKLSAGESISLDEFKSFCHFTTHLEDFAIAMQMFSLAHRPVRLAEFKRAVKVATGQELSNNILDTVFKIFDLDGDECLSHEEFLGVLKNRMHRGLWVPQHQSIQEYWKCVKKESIKGVKEVWKQAGKGLF

SEQ ID NO: 55435 - protein, 132 aa, Homo sapiens
LKSFQKIQVRLVRELEKKFSGKHVVFIVQRRILPKPTRKSRTKNKQKRPRSHTLTAVHDAILEDLVFPSEIVGKRIRVKLDGSRLIKVHLDKAQQNNVEHKVETFSGVYKKLTGKDVNFEFPEFQLQTKMTT

SEQ ID NO: 55436 - protein, 55 aa, Homo sapiens
INLELYASYVYLSMSYYFDRDDVALKNFAKYFLHQSHEEREHAEKLMELQNQLGG

SEQ ID NO: 55437 - protein, 97 aa, Homo sapiens
KKPDCDDWESRLNATECALHLEKNVNQSLLELHKLATDKNDPHLCDFIETHYLNEQVKAIKELGDQVTNLRKMGAPESGLAEYLFDKHILGDSDNES

SEQ ID NO: 55438 - protein, 113 aa, Homo sapiens
KETQEKFYGLPYVPNTAWQLRFSHLVGYGARYYSYLMSRAVASMVWKECFLQDPFNRAAGERYRREMLAHGGGREPMLMVEGMLQKCPSVDDFVSALVSDLDLDFETFLMDSE

SEQ ID NO: 55439 - protein, 614 aa, Homo sapiens
KVEQVKLLDRFSTSNKSLTGTLYLTATHLLFIDSHQKETWILHHHIASVEKLALTTSGCPLVIQCKNFRTVHFIVPRERDCHDIYNSLLQLSKQAKYEDLYAFSYNPKQNDSERLQGWQLIDLAEEYKRMGVPNSHWQLSDANRDYKICETYPRELYVPRIASKPIIVGSSKFRSKGRFPVLSYYHQDKEAAICRCSQPLSGFSARCLEDEHLLQAISKANPVNRYMYVMDTRPKLNAMANRAAGKGYENEDNYSNIRFQFVGIENIHVMRSSLQKLLEVNGTKGLSVNDFYSGLESSGWLRHIKAVMDAAIFLAKAITVENASVLVHCSDGWDRTSQVCSLGSLLLDSYYRTIKGFMVLIEKDWISFGHKFSERCGQLDGDPKEVSPVFTQFLECVWHLTEQFPQAFEFSEAFLLQIHEHIHSCQFGNFLGNCQKEREELKLKEKTYSLWPFLLEDQKKYLNPLYSSESHRFTVLEPNTVSFNFKFWRNMYHQFDRTLHPRQSVFNIIMNMNEQNKQLEKDIKDLESKIKQRKNKQTDGILTKELLHSVHPESPNLKTSLCFKEQTLLPVNDALRTIEGSSPADNRYSEYAEEFSKSEPAVVSLEYGVARMTC

SEQ ID NO: 55440 - protein, 29 aa, Homo sapiens
IEPFSSPPELPDVMKPQDSGSSANEQAVQ

SEQ ID NO: 55441 - protein, 75 aa, Homo sapiens
IDNLSTRHYEHNSIDSELGKICSVCISDYVTGNKLRQLPCMHEFHIHCIDRWLSENCTCPICRQPVLGSNIANNG

SEQ ID NO: 55442 - protein, 112 aa, Homo sapiens
IGQHDLDTKTKQIQQWIKKKHLVQITIKKGKNVDVSENEMEEIFHQILQTMPGIATFSSRPQAVQGGKALMCVLRAFSKNEEKAYKETQETQERDTLNKDHGNDKESNVLHQ

SEQ ID NO: 55443 - protein, 624 aa, Homo sapiens
LLNIGQQMLRRKVVDCSREETRLSRCLNTFDLVALGVGSTLGAGVYVLAGAVARENAGPAIVISFLIAALASVLAGLCYGEFGARVPKTGSAYLYSYVTVGELWAFITGWNLILSYIIGTSSVARAWSATFDELIGRPIGEFSRTHMTLNAPGVLAENPDIFAVIIILILTGLLTLGVKESAMVNKIFTCINVLVLGFIMVSGFVKGSVKNWQLTEEDFGNTSGRLCLNNDTKEGKPGVGGFMPFGFSGVLSGAATCFYAFVGFDCIATTGEEVKNPQKAIPVGIVASLLICFIAYFGVSAALTLMMPYFCLDNNSPLPDAFKHVGWEGAKYAVAVGSLCALSASLLGSMFPMPRVIYAMAEDGLLFKFLANVNDRTKTPIIATLASGAVAAVMAFLFDLKDLVDLMSIGTLLAYSLVAACVLVLRYQPEQPNLVYQMASTSDELDPADQNELASTNDSQLGFLPEAEMFSLKTILSPKNMEPSKISGLIVNISTSLIAVLIITFCIVTVLGREALTKGALWAVFLLAGSALLCAVVTGVIWRQPESKTKLSFKVPFLPVLPILSIFVNVYLMMQLDQGTWVRFAVWMLIGFIIYFGYGLWHSEEASLDADQARTPDGNLDQCK

SEQ ID NO: 55444 - protein, 47 aa, Homo sapiens
TTYLSRTISTWKCHIRSIKTSFWQNNSDAFGGQRDITRAKLSRSEES

SEQ ID NO: 55445 - protein, 320 aa, Homo sapiens
LLQLAVLGAALAAAALVLISIVAFTTATKMPALHRHEEEKFFLNAKGQKETLPSIWDSPTKQLSVVVPSYNEEKRLPVMMDEALSYLEKRQKRDPAFTYEVIVVDDGSKDQTSKVAFKYCQKYGSDKVRVITLVKNRGKGGAIRMGIFSSRGEKILMADADGATKFPDVEKLEKGLNDLQPWPNQMAIACGSRAHLEKESIAQRSYFRTLLMYGFHFLVWFLCVKGIRDTQCGFKLFTREAASRTFSSLHVERWAFDVELLYIAQFFKIPIAEIAVNWTEIEGSKLVPFWSWLQMGKDLLFIRLRYLTGAWRLEQTRKMN

SEQ ID NO: 55446 - protein, 102 aa, Homo sapiens
LSQVSPGKETDQTETVSVQSSVLGKGVKHRPPPIKLPSSSGNSSSGNYFTPQQTSSFLKSPTPPPSSKPSSIPRKSSVDLNQVSMLSPAALSPASSSQRHES

SEQ ID NO: 55447 - protein, 209 aa, Homo sapiens
KKPRGKMSSYAFFVQTCREEHKKKHPDASVNFSEFSKKCSERWKTMSAKEKGKFEDMAKADKARYEREMKTYIPPKGETKKKFKDPNAPKRPPSAFFLFCSEYRPKIKGEHPGLSIGDVAKKLGEMWNNTAADDKQPYEKKAAKLKEKYEKDIAAYRAKGKPDAAKKGVVKAEKSKKKKEEEEDEEDEEDEEEEEDEEDEDEEEDDDDE

SEQ ID NO: 55448 - protein, 60 aa, Homo sapiens
RQLFRILFRTLNHQYDYTFDWTMLKQKAAQQAASSSGQGQQAQTQTGKQTEKNKNNVKDN

SEQ ID NO: 55449 - protein, 193 aa, Homo sapiens
IRDYLYALNSKRMFCYDPSHNMWLKCVSLKRNDFQEACVFNEEIYCICDIPVMKVYNPVRAEWRQMNNIPLVSETNNYRIIKHGQKLLLITSRTPQWKKNRVTVYEYDIRGDQWINIGTTLGLLQFDSNFFCLSARVYPSCLEPGQSFLTEEEEIPSESSTEWDLGGFSEPDSESGSSSSLSDDDFWVRVAPQ

SEQ ID NO: 55450 - protein, 5 aa, Homo sapiens
KSLYK

SEQ ID NO: 55451 - protein, 105 aa, Homo sapiens [sequence omitted]

SEQ ID NO: 55452 - protein, 110 aa, Homo sapiens
IIDNTNIQAWEMKPYVEVAIGKGYRVEFHEPETWWKFDPEELEKRNKHGVSRKKIAQMLDRYEYQMSISIVMNSVEPSHKSTQRPPPPQGRQRWGGSLGSHNRVCVTNNH

SEQ ID NO: 55453 - protein, 4 aa, Homo sapiens
RAWL

SEQ ID NO: 55454 - protein, 16 aa, Homo sapiens
IKPSKDPDNLQINWRL

SEQ ID NO: 55455 - protein, 65 aa, Homo sapiens
ICEENAIALLSAAVKYDAQDLEEFCFRFCINHLTVVTQTSGFAEMDHDLLKNFISKASRVGAFKN

SEQ ID NO: 55456 - protein, 179 aa, Homo sapiens
LGLRLGRGQGAADRGALIWLCYDALVHFALEGPFVYLSLVGNVANSDGLIASLWKEYGKADARWVYFDPTIVSVEILTVALDGSLALFLIYAIVKEKYYRHFLQITLCVCELYGCWMTFLPEWLTRSPNLNTSNWLYCWLYLFFFNGVWVLIPGLLLWQSWLELKKMHQKETSSVKKFQ

SEQ ID NO: 55457 - protein, 14 aa, Homo sapiens
RRRNGARATKWRTC

SEQ ID NO: 55458 - protein, 10 aa, Homo sapiens
IKAFWISALA

SEQ ID NO: 55459 - protein, 190 aa, Homo sapiens
ISHDEMFSDIYKIREIADGLCLEVEGKMVSRTEGNIDDSLIGGNASAEGPEGEGTESTVITGVDIVMNHHLQETSFTKEAYKKYIKDYMKSIKGKLEEQRPERVKPFMTGAAEQIKHILANFKNYQFFIGENMNPDGMVALLDYREDGVTPYMIFFKDGLEMEKCDAKERNPCAFCLSLWRPRLNWGIHL

SEQ ID NO: 55460 - protein, 38 aa, Homo sapiens
KNEGFFALYKGFWPNWLRLGPWNIIFFVTYEQLKKLDL

SEQ ID NO: 55461 - protein, 190 aa, Homo sapiens
KREDQQDEEKMPDPLDVIDVDWSGLMPKHPKEPREPGAALLKFTPGAVMLRVGISKKLAGSELFAKVKETCQRLLEKPKDADNLFEHELGALNMAALLRKEERASLLSNLGPCCKALCFRRDSAIRKQLVKNEKGTIKQAYTSAPMVDNELLRLSLRLFKRKTTCHAPGHEKTEDNKLSQSSIQQELCVS

SEQ ID NO: 55462 - protein, 321 aa, Homo sapiens
IVFIEEQAAGIGKSAKIVVHLHPAPPNKEPGPFQSSKNSYIKLSFKEHGQIEFYRRLSEEMTQRRWENMPVSQSLQTNRGPQPGRIRAVGIVGIERKLEEKRKETDKNISEAFEDLSKLMIKAKEMVELSKSIANKIKDKQGDITEDETIRFKSYLLSMGIANPVTRETYGSGTQYHMQLAKQLAGILQVPLEERGGIMSLTEVYCLVNRARGMELLSPEDLVNACKMLEALKLPLRLRVFDSGVMVIELQSHKEEEMVASALETVSEKGSLTSEEFAKLVGMSVLLAKERLLLAEKMGHLCRDDSVEGLRFYPNLFMTQS

SEQ ID NO: 55463 - protein, 96 aa, Homo sapiens
IPPPYDKKKRMVVPAALKVVRLKPTRKFAYLGRLAHEVGWKYQAVTATLEEKRKEKAKIHYRKKKQLMRLRKQAEKNVEKKIDKYTEVLKTHGLLV

SEQ ID NO: 55464 - protein, 25 aa, Homo sapiens
MRYNASSSPCTLPLAICASFLSGNL

SEQ ID NO: 55465 - protein, 75 aa, Homo sapiens
VKKHHVIQELPLDNTFVGGCDTLSKRSSTSSDHFSASECSSQGGFKTKGPLHTRQVNEHFYWSISTAYKCPVNQY

SEQ ID NO: 55466 - protein, 4 aa, Homo sapiens
RKSL

SEQ ID NO: 55467 - protein, 55 aa, Homo sapiens
LLEISRILNTGLDMETLSICVRLCEQGINPEALSSVIKELRKATEALKAAENMTS

SEQ ID NO: 55468 - protein, 628 aa, Homo sapiens
KTAVSEKMLKPTGRVVGIIKRNWRPYCGMLSKSDIKESRRHLFTPADKRIPRIRIETRQASTLEGRRIIVAIDGWPRNSRYPNGHFVRNLGDVGEKETETEVLLLEHDVPHQPFSQAVLSFLPKMPWSITEKDMKNREDLRHLCICSVDPPGCTDIDDALHCRELENGNLEVGVHIADVSHFIRPGNALDQESARRGTTVYLCEKRIDMVPELLSSNLCSLKCDVDRLAFSCIWEMNHNAEILKTKFTKSVINSKASLTYAEAQLRIDSANMNDDITTSLRGLNKLAKILKKRRIEKGALTLSSPEVRFHMDSETHDPIDLQTKELRETNSMVEEFMLLANISVAKKIHEEFSEHALLRKHPAPPPSNYEILVKAARSRNLEIKTDTAKSLAESLDQAESPTFPYLNTLLRILATRCMMQAVYFCSGMDNDFHHYGLASPIYTHFTSPIRRYADVIVHRLLAVAIGADCTYPELTDKHKLADICKNLNFRHKMAQYAQRASVAFHTQLFFKSKGIVSEEAYILFVRKNAIVVLIPKYGLEGTVFFEEKDKPNPQLIYDDEIPSLKIEDTVFHVFDKVKVKIMLDSSNLQHQKIRMSLVEPQIPGISIPTDTSNMDLNGPKKKKMKLGK

SEQ ID NO: 55469 - protein, 27 aa, Homo sapiens
KATIAGGGVIPHIHKSLIGKKGQQKTV

SEQ ID NO: 55470 - protein, 36 aa, Homo sapiens
LRVLNSYWVGEDSTYKFFEVILTDPFHKAIRRNPDT

SEQ ID NO: 55471 - protein, 50 aa, Homo sapiens
MQAPHKIHWIEKANHSMAVKGRSTNDVFKEINTQILFWIQEITEMDKKCH

SEQ ID NO: 55472 - protein, 333 aa, Homo sapiens
VDPEKIAVEIPKRFGQRQSLCHYTLKDNKVYIKTHGEHVGFRIFMDAILLSLTRKVKMPDVELFVNLGDWPLEKKKSNSNIHPIFSWCGSTDSKDIVMPTYDLTDSVLETMGRVSLDMMSVQANTGPPWESKNSTAVWRGRDSRKERLELVKLSRKHPELIDAAFTNFFFFKHDENLYGPIVKHISFFDFFKHKYQINIDGTVAAYRLPYLLVGDSVVLKQDSIYYEHFYNELQPWKHYIPVKSNLSDLLEKLKWAKDHDEEAKKIAKAGQEFARNNLMGDDIFCYYFKLFQEYANLQVSEPQIREGMKRVEPQTEDDLFPCTCHRKKTKDEL

SEQ ID NO: 55473 - protein, 121 aa, Homo sapiens
IEREVLRRVEEAKRIMEKQLLEELERQRQAELAAQKAREEEERAKREELERILEENNRKIAEAQAKLAEEQLRIVEEQRKIHEERMKLEQERQRQQKEEQKIILGKGKSRPKLSFSLKTQD

SEQ ID NO: 55474 - skipped

SEQ ID NO: 55475 - protein, 33 aa, Homo sapiens
KKFAQKMLRKARRKLIYEKAKHYHKEYRQIYGT

SEQ ID NO: 55476 - protein, 118 aa, Homo sapiens
KVLPLTTPLVDGEDESSSGASVVAIDNKIEQAMDLVKSHLMYAVREEVEVLKEQIKELIEKNSQLEQENNLLKTLASPEQLAQFQAQLQTGSPPATTQPQGTTQPPAQPASQGSGPTA

SEQ ID NO: 55477 - protein, 317 aa, Homo sapiens
RSGTELSAVGSVCSDADCQEYAKIACSKTHPCGHPCGGVKNEEHCLPCLHGCDKSATSLKQDADDMCMICFTEALSAAPAIQLDCSHIFHLQCCRRVLENRWLGPRITFGFISCPICKNKINHIVLKDLLDPIKELYEDVRRKALMRLEYEGLHKSEAITTPGVRFYNDPAGYAMNRYAYYVCYKCRKAYFGGEARCDAEAGRGDDYDPRELICGACSDVSRAQMCPKHGTDFLEYKCRYCCSVAVFFCFGTTHFCNACHDDFQRMTSIPKEELPHCPAGPKGKQLEGTECPLHVVHPPTGEEFALGCGVCRNAHTF

SEQ ID NO: 55478 - protein, 387 aa, Homo sapiens
VYEAIDSRDGASCAELVSFKHPHVANPRLQMASPEEKCQQVLEPPYDEMFAAHLRCTYAVGNHDFIEAYKCQTVIVQSFLRAFQAHKEENWALPVMYAVALDLRVFANNADQQLVKKGKSKVGDMLEKAAELLMSCFRVCASDTRAGIEDSKKWGMLFLVNQLFKIYFKINKLHLCKPLIRAIDSSNLKDDYSTAQRVTYKYYVGRKAMFDSDFKQAEEYLSFAFEHCHRSSQKNKRMILIYLLPVKMLLGHMPTVELLKKYHLMQFAEVTRAVSEGNLLLLHEALAKHEAFFIRCGIFLILEKLKIITYRNLFKKVYLLLKTHQLSLDAFLVALKFMQVEDVDIDEVQCILANLIYMGHVKGYISHQHQKLVVSKQNPFPPLSTVC

SEQ ID NO: 55479 - protein, 252 aa, Homo sapiens [sequence omitted]

SEQ ID NO: 55480 - protein, 5 aa, Homo sapiens
MDHHL

SEQ ID NO: 55481 - protein, 7 aa, Homo sapiens
MWMAPRS

SEQ ID NO: 55482 - protein, 646 aa, Homo sapiens
IDPDFEPLPRPRSCTWPLPRPEFSQSNSATSSPAPSGSAAANPDAAAGLPSASAAAVSADFMSNLSLLEESEDFPQAPGSVAAAVAAAAAAAATGGLCGDFQGPEAGCLHPAPPQPPPPGPLSQHPPVPPAAAGPLAGQPRKSSSSRRNAWGNLSYADLITKAIESSAEKRLTLSQIYEWMVKSVPYFKDKGDSNSSAGWKNSIRHNLSLHSKFIRVQNEGTGKSSWWMLNPEGGKSGKSPRRRAASMDNNSKFAKSRSRAAKKKASLQSGQEGAGDSPGSQFSKWPASPGSHSNDDFDNWSTFRPRTSSNASTISGRLSPIMTEQDDLGEGDVHSMVYPPSAAKMASTLPSLSEISNPENMENLLDNLNLLSSPTSLTVSTQSSPGTMMQQTPCYSFAPPNTSLNSPSPNYQKYTYGQSSMSPLPQMPIQTLQDNKSSYGGMSQYNCAPGLLKELLTSDSPPHNDIMTPVDPGVAQPNSRVLGQNVMMGPNSVMSTYGSQASHNKMMNPSSHTHPGHAQQTSAVNGRPLPHTVSTMPHTSGMNRLTQVKTPVQVPLPHPMQMSALGGYSSVSSCNGYGRMGLLHQEKLPSDLDGMFIERLDCDMESIIRNDLMDGDTLDFNFDNVLPNQSFPHSVKTTTHSWVSG

SEQ ID NO: 55483 - protein, 62 aa, Homo sapiens
LEKHLESFPKQGPIRHFMELVTCGLSKNPYLSVKQKVEHIEWFRNYFNEKKDILKESNIQFN

SEQ ID NO: 55484 - protein, 30 aa, Homo sapiens
IRESSWNFSHVDLRGMLYYGCCCPTERPSI

SEQ ID NO: 55485 - protein, 58 aa, Homo sapiens
KSSWGRTRSLGGLISAVGVGSTGGGCGGPGPGALPPANTYASIDFLSHHLKEATIVKE

SEQ ID NO: 55486 - protein, 12 aa, Homo sapiens
LRFVLFCFNKIS

SEQ ID NO: 55487 - protein, 1660 aa, Homo sapiens
LLLPAALLLHEEHSRAAAKGGCAGSGCGKCDCHGVKGQKGERGLPGLQGVIGFPGMQGPEGPQGPPGQKGDTGEPGLPGTKGTRGPPGASGYPGNPGLPGIPGQDGPPGPPGIPGCNGTKGERGPLGPPGLPGFAGNPGPPGLPGMKGDPGEILGHVPGMLLKGERGFPGIPGTPGPPGLPGLQGPVGPPGFTGPPGPPGPPGPPGEKGQMGLSFQGPKGDKGDQGVSGPPGVPGQAQVQEKGDFATKGEKGQKGEPGFQGMPGVGEKGEPGKPGPRGKPGKDGDKGEKGSPGFPGEPGYPGLIGRQGPQGEKGEAGPPGPPGIVIGTGPLGEKGERGYPGTPGPRGEPGPKGFPGLPGQPGPPGLPVPGQAGAPGFPGERGEKGDRGFPGTSLPGPSGRDGLPGPPGSPGPPGQPGYTNGIVECQPGPPGDQGPPGIPGQPGFIGEIGEKGQKGESCLICDIDGYRGPPGPQGPPGEIGFPGQPGAKGDRGLPGRDGVAGVPGPQGTPGLIGQPGAKGEPGEFYFDLRLKGDKGDPGFPGQPGMPGRAGSPGRDGHPGLPGPKGSPGSVGLKGERGPPGGVGFPGSRGDTGPPGPPGYGPAGPIGDKGQAGFPGGPGSPGLPGPKGEPGKIVPLPGPPGAEGLPGSPGFPGPQGDRGFPGTPGRPGLPGEKGAVGQPGIGFPGPPGPKGVDGLPGDMGPPGTPGRPGFNGLPGNPGVQGQKGEPGVGLPGLKGLPGLPGIPGTPGEKGSIGVPGVPGEHGAIGPPGLQGIRGEPGPPGLPGSVGSPGVPGIGPPGARGPPGGQGPPGLSGPPGIKGEKGFPGFPGLDMPGPKGDKGAQGLPGITGQSGLPGLPGQQGAPGIPGFPGSKGEMGVMGTPGQPGSPGPVGAPGLPGEKGDHGFPGSSGPRGDPGLKGDKGDVGLPGKPGSMDKVDMGSMKGQKGDQGEKGQIGPIGEKGSRGDPGTPGVPGKDGQAGQPGQPGPKGDPGISGTPGAPGLPGPKGSVGGMGLPGTPGEKGVPGIPGPQGSPGLPGDKGAKGEKGQAGPPGIGIPGLRGEKGDQGIAGFPGSPGEKGEKGSIGIPGMPGSPGLKGSPGSVGYPGSPGLPGEKGDKGLPGLDGIPGVKGEAGLPGTPGPTGPAGQKGEPGSDGIPGSAGEKGEPGLPGRGFPGFPGAKGDKGSKGEVGFPGLAGSPGIPGSKGEQGFMGPPGPQGQPGLPGSPGHATEGPKGDRGPQGQPGLPGLPGPMGPPGLPGIDGVKGDKGNPGWPGAPGVPGPKGDPGFQGMPGIGGSPGITGSKGDMGPPGVPGFQGPKGLPGLQGIKGDQGDQGVPGAKGLPGPPGPPGPYDIIKGEPGLPGPEGPPGLKGLQGLPGPKGQQGVTGLVGIPGPPGIPGFDGAPGQKGEMGPAGPTGPRGFPGPPGPDGLPGSMGPPGTPSVDHGFLVTRHSQTIDDPQCPSGTKILYHGYSLLYVQGNERAHGQDLGTAGSCLRKFSTMPFLFCNINNVCNFASRNDYSYWLSTPEPMPMSMAPITGENIRPFISRCAVCEAPAMVMAVHSQTIQIPPCPSGWSSLWIGYSFVMHTSAGAEGSGQALASPGSCLEEFRSAPFIECHGRGTCNYYANAYSFWLATIERSEMFKKPTPSTLKAGELRTHVSRCQVCMRRT

SEQ ID NO: 55488 - protein, 67 aa, Homo sapiens
KWNPRCSRTSGTKRICWWNGLARNTWRERCAWHPWPTRFTWLTWRQRCKRRERAGRPTWHRHPRAAR

SEQ ID NO: 55489 - protein, 8 aa, Homo sapiens
RRSRRPGS

SEQ ID NO: 55490 - protein, 70 aa, Homo sapiens
KMLDEQDVPAAEQMCFETSAKTGYNVDLLFETLFDLVVPMILQQRAERPSHTVDISSHKPPKRTRSGCCA

SEQ ID NO: 55491 - protein, 10 aa, Homo sapiens
MLDLISFEGS

SEQ ID NO: 55492 - protein, 31 aa, Homo sapiens; identical to SEQ ID NO: 51968

SEQ ID NO: 55493 - protein, 76 aa, Homo sapiens
LYPSLIPSETASTSPAASGFFMWLQMAGFPKGFWLKHIPWCICTAVSSSLQLCLNRSFTMLSSRFNSMAPKDEISF

SEQ ID NO: 55494 - protein, 611 aa, Homo sapiens
LTITGPSHPFLSGAETFHTPSLGDEEFEIPPISLDSDPSLAVSDVVGHFDDLADPSSSQDGSFSAQYGVQTLDMPVGMTHGLMEQGGGLLSGGLTMDLDHSIGTQYSANPPVTIDVPMTDMTSGLMGHSQLTTIDQSELSSQLGLSLGGGTILPPAQSPEDRLSTTPSPTSSLHEDGVEDFRRQLPSQKTVVVEAGKKQKAPKKRKKKDPNEPQKPVSAYALFFRDTQAAIKGQNPNATFGEVSKIVASMWDSLGEEQKQVYKRKTEAAKKEYLKALAAYKDNQECQATVETVELDPAPPSQTPSPPPMATVDPASPAPASIEPPALSPSIVVNSTLSSYVANQASSGAGGQPNITKLIITKQMLPSSITMSQGGMVTVIPATVVTSRGLQLGQTSTATIQPSQQAQIVTRSVLQAAAAAAAAASMQLPPPRLQPPPLQQMPQPPTQQQVTILQQPPPLQAMQQPPPQKVRINLQQQPPPLQIKSVPLPTLKMQTTLVPPTVESSPERPMNNSPEAHTVEAPSPETICEMITDVVPEVESPSQMDVELVSGSPVALSPQPRCVRSGCENPPIVSKDWDNEYCSNECVVKHCRDVFLAWVASRNSNTVVFVK

SEQ ID NO: 55495 - protein, 320 aa, Homo sapiens
TGMPKRGKKGAVAEDGDELRTEPEAKKSKTAAKKNDKEAAGEGPALYEDPPDQKTSPSGKPATLKICSWNVDGLRAWIKKKGLDWVKEEAPDILCLQETKCSENKLPAELQELPGLSHQYWSAPSDKEGYSGVGLLSRQCPLKVSYGIGDEEHDQEGRVIVAEFDSFVLVTAYVPNAGRGLVRLEYRQRWDEAFRKFLKGLASRKPLVLCGDLNVAHEEIDLRNPKGNKKNAGFTPQERQGFGELLQAVPLADSFRHLYPNTPYAYTFWTYMMNARSKNVGWRLDYFLLSHSLLPALCDSKIRSKALGSDHCPITLYLAL

SEQ ID NO: 55496 - protein, 170 aa, Homo sapiens
LNPKFEVGDIMLIRDHINLPGFSGQNPLRGPNDERFGDRFPAMSDAYDRTMRQRALSTWKQMGEQRELQEGTYVMVAGPSFETVAECRVLQKLGADAVGMSTVPEVIVARHCGLRVFGFSLITNKVIMDYESLEKANHEEVLAAGKQAAQKLEQFVSILMASIPLPDKAS

SEQ ID NO: 55497 - protein, 245 aa, Homo sapiens
LEPEPEPEPEEEPPRPRAPPGAPGPGPGSGAPGSQEEEEEPGLVEGDPGDGAIEDPELEAIKARVREMEEEAEKLKELQNEVEKQMNMSPPPGNAGPVIMSIEEKMEADARSIYVGNVDYGATAEELEAHFHGCGSVNRVTILCDKFSGHPKGFAYIEFSDKESVRTSLALDESLFRGRQIKVIPKRTNRPGISTTDRGFPRARYRARTTNYNSSRSRFYSGFNSRPRGRVYRGRARATSWYSPY

SEQ ID NO: 55498 - protein, 203 aa, Homo sapiens
LIKTAVTGSLSENDPLRFKPHPSNMMSKLSSEDEEEDEAEDDQSEASGKKSVKGVSKKYVPPRLVPVHYDETEAEREKKRLERAKRRALSSSVIRELKEQYSDAPEEIRDARHPHVTRQSQEDQHRINYEESMMVRLSVSKREKGRRKRANVMSSQLHSLTHFSDISALTGGTVHLDEDQNPIKKRKKIPQKGRKKKGFRRRR

SEQ ID NO: 55499 - protein, 68 aa, Homo sapiens
IPPKEFLFKHPKRTATLSMRNTSVMKKGGIFSAEFLKVFFPSLLLSHLLAIGLGIYIGRRLTTSTSTF

SEQ ID NO: 55500 - protein, 117 aa, Homo sapiens
LQGEGLSVTGTVCHVGKAEDRERLVAMAVKLHGGIDILVSNAAVNPFFGSLMDVTEEVWDKLWMDKEKEESMKETLRIRRLGEPEDCAGIVSFLCSEDASYITGETVVVGGGTPSRL

SEQ ID NO: 55501 - protein, 168 aa, Homo sapiens
LQGEGLSVTGTVCHVGKAEDRERLVAMTLDINVKAPALMTKAVVPEMEKRGGGSVVIVSSIAAFSPSPGFSPYNVSKTALLGLNNTLAIELAPRNIRVNCLPGLIKTSFSRMLWMDKEKEESMKETLRIRRLGEPEDCAGIVSFLCSEDASYITGETVVVGGGTPSRL

SEQ ID NO: 55502 - protein, 425 aa, Homo sapiens
VVASMRIMTRLGTPVLQALGDGDFVKCLHSVGQPLTGQGEPVSQWPCNPEKTLIGHVPDQREIISFGSGYGGNSLLGKKCFALRIASRLARDEGWLAEHMLILGITSPAGKKRYVAAAFPSACGKTNLAMMRPALPGWKVECVGDDIAWMRFDSEGRLRAINPENGFFGVAPGTSATTNPNAMATIQSNTIFTNVAETSDGGVYWEGIDQPLPPGVTVTSWLGKPWKPGDKEPCAHPNSRFCAPARQCPIMDPAWEAPEGVPIDAIIFGGRRPKGKIIMHDPFAMRPFFGYNFGHYLEHWLSMEGRKGAQLPRIFHVNWFRRDEAGHFLWPGFGENARVLDWICRRLEGEDSARETPIGLVPKEGALDLSGLRAIDTTQLFSLPKDFWEQEVRDIRSYLTEQVNQDLPKEVLAELEALERRVHKM

SEQ ID NO: 55503 - protein, 147 aa, Homo sapiens [sequence omitted]

SEQ ID NO: 55504 - protein, 45 aa, Homo sapiens
IRDPFGHHVARNVALTTFLKRREAWEQQQGAVAKRRRALNSILED

SEQ ID NO: 55505 - protein, 49 aa, Homo sapiens
VDFPVGNKCNNCLAIPITNTYKEFQENMDFTIRNTLRLEKEESSHYIGH

SEQ ID NO: 55506 - protein, 166 aa, Homo sapiens
LSCPFLRTCSEAEEPVLEEMVMGLGVLLLVFVLGLGLTPPTLAQDNSRYTHFLTQHYDAKPQGRDDRYCESIMRRRGLTSPCKDINTFIHGNKRSIKAICENKNGNPHRENLRISKSSFQVTTCKLHGGSPWPPCQYRATAGFRNVVVACENGLPVHLDQSIFRRP

SEQ ID NO: 55507 - protein, 148 aa, Homo sapiens
LMALQRTHSLLLLLLLTLLGLGLVQPSYGQDGMYQRFLRQHVHPEETGGSDRYCNLMMQRRKMTLYHCKRFNTFIHEDIWNIRSICSTTNIQCKNGKMNCHEGVVKVTDCRDTGSSRAPNCRYRAIASTRRVVIACEGNPQVPVHFDG

SEQ ID NO: 55508 - protein, 628 aa, Homo sapiens
IRERQTVALKRMLNFNVPHIKNSTGEPVWKVLIYDRFGQDIISPLLSVKELRDMGITLHLLLHSDRDPIPDVPAVYFVMPTEENIDRMCQDLRNQLYESYYLNFISAISRSKLEDIANAALAASAVTQVAKVFDQYLNFITLEDDMFVLCNQNKELVSYRAINRPDITDTEMETVMDTIVDSLFCFFVTLGAVPIIRCSRGTAAEMVAVKLDKKLRENLRDARNSLFTGDTLGAGQFSFQRPLLVLVDRNIDLATPLHHTWTYQALVHDVLDFHLNRVNLEESSGVENSPAGARPKRKNKKSYDLTPVDKFWQKHKGSPFPEVAESVQQELESYRAQEDEVKRLKSIMGLEGEDEGAISMLSDNTAKLTSAVSSLPELLEKKRLIDLHTNVATAVLEHIKARKLDVYFEYEEKIMSKTTLDKSLLDIISDPDAGTPEDKMRLFLIYYISTQQAPSEADLEQYKKALTDAGCNLNPLQYIKQWKAFTKMASAPASYGSTTTKPMGLLSRVMNTGSQFVMEGVKNLVLKQQNLPVTRILDNLMEMKSNPETDDYRYFDPKMLRGNDSSVPRNKNPFQEAIVFVVGGGNYIEYQNLVDYIKGKQGKHILYGCSELFNATQFIKQLSQLGQK

SEQ ID NO: 55509 - protein, 46 aa, Homo sapiens
IPLHLNIREASDTGQPIVFSQPESDEAKAYLRIAVEVVRRLPSPSE

SEQ ID NO: 55510 - protein, 6 aa, Homo sapiens
MILFSE

SEQ ID NO: 55511 - protein, 49 aa, Homo sapiens
IVETTNIVAPPPPSNPGQLVEPMVPLQLPPPLQPQLIQPQLQTDPLGII

SEQ ID NO: 55512 - protein, 213 aa, Homo sapiens
LSLAVLQPTPQVTQEQGHLLPERKDFPVESVKLTEVPVEPVLTVHPESKSKTKTRSRSRGRARNKTSKSRSRSSSSSSSSSSSTSSSSGSSSSSGSSSSRSSSSSSSSTSGSSSRDSSSSTSSSSESRSRSRGRGHNRDRKHRRSVDRKRRDTSGLERSHKSSKGGSSRDTKGSKDKNSRSDRKRSISESSRSGKRSSRSERDRKSDRKDKRR

SEQ ID NO: 55513 - protein, 14 aa, Homo sapiens
INEAKDLLEGQAKK

SEQ ID NO: 55514 - protein, 10 aa, Homo sapiens
VSALSSASIW

SEQ ID NO: 55515 - protein, 446 aa, Homo sapiens
RFRIYKRKVLILTLVVAACGFVLWSSNGRQRKNEALAPPLLDAEPARGAGGRGGDHPSVAVGIRRVSNVSAASLVPAVPQPEADNLTLRYRSLVYQLNFDQTLRNVDKAGTWAPRELVLVVQVHNRPEYLRLLLDSLRKAQGIDNVLVIFSHDFWSTEINQLIAGVNFCPVLQVFFPFSIQLYPNEFPGSDPRDCPRDLPKNAALKLGCINAEYPDSFGHYREAKFSQTKHHWWWKLHFVWERVKILRDYAGLILFLEEDHYLAPDFYHVFKKMWKLKQQECPECDVLSLGTYSASRSFYGMADKVDVKTWKSTEHNMGLALTRNAYQKLIECTDTFCTYDDYNWDWTLQYLTVSCLPKFWKVLVPQIPRIFHAGDCGMHHKKTCRPSTQSAQIESLLNNNKQYMFPETLTISEKFTVVAISPPRKNGGWGDIRDHELCKSYRRLQ

SEQ ID NO: 55516 - protein, 30 aa, Homo sapiens
RCYPKSSGTRKCGSSCWAWTRPARQQSCTS

SEQ ID NO: 55517 - protein, 423 aa, Homo sapiens
LRLLQSGRRVHSVAGPSQWLGKPLTTRLLFPAAPCCCRPHYLFLAASGPRSLSTSAISFAEVQVQAPPVVAATPSPTAVPEVASGETADVVQTAAEQSFAELGLGSYTPVGLIQNLLEFMHVDLGLPWWGAIAACTVFARCLIFPLIVTGQREAARIHNHLPEIQKFSSRIREAKLAGDHIEYYKASSEMALYQKKHGIKLYKPLILPVTQAPIFISFFIALREMANLPVPSLQTGGLWWFQDLTVSDPIYILPLAVTATMWAVLELGAETGVQSSDLQWMRNVIRMMPLITLPITMHFPTAVFMYWLSSNLFSLVQVSCLRIPAVRTVLKIPQRVVHDLDKLPPREGFLESFKKGWKNAEMTRQLREREQRMRNQLELAARGPLRQTFTHNPLLQPGKDNPPNIPSSSSKPKSKYPWHDTLG

SEQ ID NO: 55518 - protein, 838 aa, Homo sapiens
RKWSQTPAGGDQARPGALAACGRAVGEGAPQCRDPGLQEPAPGEKSAAADGENNSKVGERHRPYSRAAAASPPPALASRVRVEPGPWSPPGEAAPGSLGARGSAATPSGRPQKLRDPSGTSGQPRMLLATLLLLLLGGALAHPDRIIFPNHACEDPPAVLLEVQGTLQRPLVRDSRTSPANCTWLILGSKEQTVTIRFQKLHLACGSERLTLRSPLQPLISLCEAPPSPLQLPGGNVTITYSYAGARAPMGQGFLLSYSQDWLMCLQEEFQCLNHRCVSAVQRCDGVDACGDGSDEAGCSSDPFPGLTPRPVPSLPCNVTLEDFYGVFSSPGYTHLASVSHPQSCHWLLDPHDGRRLAVRFTALDLGFGDAVHVYDGPGPPESSRLLRSLTHFSNGKAVTVETLSGQAVVSYHTVAWSNGRGFNATYHVRGYCLPWDRPCGLGSGLGAGEGLGERCYSEAQRCDGSWDCADGTDEEDCPGCPPGHFPCGAAGTSGATACYLPADRCNYQTFCADGADERRCRHCQPGNFRCRDEKCVYETWVCDGQPDCADGSDEWDCSYVLPRKVITAAVIGSLVCGLLLVIALGCTCKLYAIRTQEYSIFAPLSRMEAEIVQQQAPPSYGQLIAQGAIPPVEDFPTENPNDNSVLGNLRSLLQILRQDMTPGGGPGARRRQRGRLMRRLVRRLRRWGLLPRTNTPARASEARSQVTPSAAPLEALDGGTGPAREGGAVGGQDGEQAPPLPIKAPLPSASTSPAPTTVPEAPGPLPSLPLEPSLLSGVVQALRGRLLPSLGPPGPTRSPPGPHTAVLALEDEDDVLLVPLAEPGVWVAEAEDEPLLT

SEQ ID NO: 55519 - protein, 111 aa, Homo sapiens
TEKTTPKLAKGTAPTPGLPPPPRPQPWHPEYGSSPGHGAPLGRRHQGAWAPGAPPRPHRVDHRSSGTLPAPLDSPGCCWPPSSSSSLEALWPIQTGLFFQIMLVRTPQQCS

SEQ ID NO: 55520 - protein, 4 aa, Homo sapiens
INPS

SEQ ID NO: 55521 - protein, 23 aa, Homo sapiens
MRRRAWLWSAGNLRNCQGPRAQP

SEQ ID NO: 55522 - protein, 92 aa, Homo sapiens
KLDMHKKMFRRGYIAMLAVDSKYRRNGIGTNLVKKAIYAMVEGDCDEVVLETEITNKSALKLYENLGFVRDKRLFRYYLNGVDALRLKLWLR

SEQ ID NO: 55523 - protein, 23 aa, Homo sapiens
IDSKTHYKSGSRYEKELGKKRTT

SEQ ID NO: 55524 - protein, 1362 aa, Homo sapiens
IDKSTMEFYESAYFIVLIPSIVITVIFLFFWLFMKETLYDEVLAKQKREQKLIPTKTDKKKAEKKKNKKKEIQNGNLHESDSESVPRDFKLSDALAVEDDQVAPVPLNVVETSSSVRERKKKEKKQKPVLEEQVIKESDASKIPGKKVEPVPVTKQPTPPSEAAASKKKPGQKKSKNGSDDQDKKVETLMVPSKRQEALPLHQETKQESGSGKKKASSKKQKTENVFVDEPLIHATTYIPLMDNADSSPVVDKREVIDLLKPDQVEGIQKSGTKKLKTETDKENAEVKFKDFLLSLKTMMFSEDEALCVVDLLKEKSGVIQDALKKSSKGELTTLIHQLQEKDKLLAAVKEDAAATKDRCKQLTQEMMTEKERSNVVITRMKDRIGTLEKEHNVFQNKIHVSYQETQQMQMKFQQVREQMEAEIAHLKQENGILRDAVSNTTNQLESKQSAELNKLRQDYARLVNELTEKTGKLQQEEVQKKNAEQAATQLKVQLQEAERRWEEVQSYIRKRTAEHEAAQQDLQSKFVAKENEVQSLHSKLTDTLVSKQQLEQRLMQLMESEQKRVNKEESLQMQVQDILEQNEALKAQIQQFHSQIAAQTSASVLAEELHKVIAEKDKQIKQTEDSLASERDRLTSKEEELKDIQNMNFLLKAEVQKLQALANEQAAAAHELEKMQQSVYVKDDKIRLLEEQLQHEISNKMEEFKILNDQNKALKSEVQKLQTLVSEQPNKDVVEQMEKCIQEKDEKLKTVEELLETGLIQVATKEEELNAIRTENSSLTKEVQDLKAKQNDQVSFASLVEELKKVIHEKDGKIKSVEELLEAELLKVANKEKTVQDLKQEIKALKEEIGNVQLEKAQQLSITSKVQELQNLLKGKEEQMNTMKAVLEEKEKDLANTGKWLQDLQEENESLKAHVQEVAQHNLKEASSASQFEELEIVLKEKENELKRLEAMLKERESDLSSKTQLLQDVQDENKLFKSQIEQLKQQNYQQASSFPPHEELLKVISEREKEISGLWNELDSLKDAVEHQRKKNNDLREKNWEAMEALASTEKMLQDKVNKTSKERQQQVEAVELEAKEVLKKLFPKVSVPSNLSYGEWLHGFEKKAKECMAGTSGSEEVKVLEHKLKEADEMHTLLQLECEKYKSVLAETEGILQKLQRSVEQEENKWKVKVDESHKTIKQMQSSFTSSEQELERLRSENKDIENLRREREHLEMELEKAEMERSTYVTEVRELKDLLTELQKKLDDSYSEAVRQNEELNLLKAQLNETLTKLRTEQNERQKVAGDLHKAQQSLELIQSKIVKAAGDTTVIENSDVSPETESSEKETMSVSLNQTVTQLQQLLQAVNQQLTKEKEHYQVLE

SEQ ID NO: 55525 - protein, 240 aa, Homo sapiens
KLTALDYHNPAGFNCKDETEFRNFIVWLEDQKIRHYKIEDRGNLRNIHSSDWPKFFEKYLRDVNCPFKIQDRQEAIDWLLGLAVRLEYGDNAEKYKDLVPDNSKTADNATKNAEPLINLDVNNPDFKAGVMALANLLQIQRHDDYLVMLKAIRILVQERLTQDAVAKANQTKEGLPVALDKHILGFDTGDAVLNEAAQILRLLHIEELRELQTKINEAIVAVQAIIADPKTDHRLGKVGR

SEQ ID NO: 55526 - protein, 20 aa, Homo sapiens
LRSGRSSSVVCSPVTSVCGA

SEQ ID NO: 55527 - protein, 34 aa, Homo sapiens
IRMLSRSFWAHDGRYIQKVPRRNFLLEKMKKQYL

SEQ ID NO: 55528 - protein, 9 aa, Homo sapiens
IDLARAYCS

SEQ ID NO: 55529 - protein, 97 aa, Homo sapiens
IHKRIHGVGFKKRAPWALKEIRKFAMKEMGTPDVRIDTRLNKAVWAKGIRNVLYRIHVRLSRKRNEDEDSPNKLYTLVTYVTVTTFKNLQTVNVDEN

SEQ ID NO: 55530 - protein, 307 aa, Homo sapiens
IQPACLGLYCGKTLLFKNGSTEIYGECGVCPRGQRTNAQKYCQPCTESPELYDWLYLGFMAMLPLVLHWFFIEWYSGKKSSSALFQHITALFECSMAAIITLLVSDPVGVLYIRSCRVLMLSDWYTMLYNPSPDYVTTVHCTHEAVYPLYTIVFIYYAFCLVLMMLLRPLLVKKIACGLGKSDRFKSIYAALYFFPILTVLQAVGGGLLYYAFPYIILVLSLVTLAVYMSASEIENCYDLLVRKKRLIVLFSHWLLHAYGIISISRVDKLEQDLPLLALVPTPALFYLFTAKFTEPSRILSEGANGH

SEQ ID NO: 55531 - protein, 272 aa, Homo sapiens
TNAQKYCQPCTESPELYDWLYLGFMAMLPLVLHWFFIEWYSGKKSSSALFQHITALFECSMAAIITLLVSDPVGVLYIRSCRVLMLSDWYTMLYNPSPDYVTTVHCTHEAVYPLYTIVFIYYAFCLVLMMLLRPLLVKKIACGLGKSDRFKSIYAALYFFPILTVLQAVGGGLLYYAFPYIILVLSLVTLAVYMSASEIENCYDLLVRKKRLIVLFSHWLLHAYGIISISRVDKLEQDLPLLALVPTPALFYLFTAKFTEPSRILSEGANGH

SEQ ID NO: 55532 - protein, 41 aa, Homo sapiens
VAGTIIIQNIGAMSSYLLIIKTELPAAIAEFLTGDYSRHIK

SEQ ID NO: 55533 - protein, 76 aa, Homo sapiens
IVLLAIYVPDIRNVFGVVGASTSTCLIFIFPGLFYLKLSREDFLSWKKLGAFVLLIFGILVGNFSLALIIFDWINK

SEQ ID NO: 55534 - protein, 28 aa, Homo sapiens
IYIQFSNHKGLKTDSSPNQARDPAALRP

SEQ ID NO: 55535 - protein, 16 aa, Homo sapiens
KDRVTGQHQGYDFVNS

SEQ ID NO: 55536 - protein, 898 aa, Homo sapiens
LAILQVGNRDDSNLYINVKLKAAEEIGIKATHIKLPRTTTESEVMKYITSLNEDSTVHGFLVQLPLDSENSINTEEVINAIAPEKDVDGLTSINAGKLARGDLNDCFIPCTPKGCLELIKETGVPIAGRHAVVVGRSKIVGAPMHDLLLWNNATVTTCHSKTAHLDEEVNKGDILVVATGQPEMVKGEWIKPGAIVIDCGINYVPDDKKPNGRKVVGDVAYDEAKERASFITPVPGGVGPMTVAMLMQSTVESAKRFLEKFKPGKWMIQYNNLNLKTPVPSDIDISRSCKPKPIGKLAREIGLLSEEVELYGETKAKVLLSALERLKHRPDGKYVVVTGITPTPLGEGKSTTTIGLVQALGAHLYQNVFACVRQPSQGPTFGIKGGAAGGGYSQVIPMEEFNLHLTGDIHAITAANNLVAAAIDARIFHELTQTDKALFNRLVPSVNGVRRFSDIQIRRLKRLGIEKTDPTTLTDEEINRFARLDIDPETITWQRVLDTNDRFLRKITIGQAPTEKGHTRTAQFDISVASEIMAVLALTTSLEDMRERLGKMVVASSKKGEPVSAEDLGVSGALTVLMKDAIKPNLMQTLEGTPVFVHAGPFANIAHGNSSIIADRIALKLVGPEGFVVTEAGFGADIGMEKFFNIKCRYSGLCPHVVVLVATVRALKMHGGGPTVTAGLPLPKAYIQENLELVEKGFSNLKKQIENARMFGIPVVVAVNAFKTDTESELDLISRLSREHGAFDAVKCTHWAEGGKGALALAQAVQRAAQAPSSFQLLYDLKLPVEDKIRIIAQKIYGADDIELLPEAQHKAEVYTKQGFGNLPICMAKTHLSLSHNPEQKGVPTGFILPIRDIRASVGAGFLYPLVGTMSTMPGLPTRPCFYDIDLDPETEQVNGLF

SEQ ID NO: 55537 - protein, 342 aa, Homo sapiens
TSITRARFEELNADLFRGTLEPVEKALRDAKLDKGQIQEIVLVGGSTRIPKIQKLLQDFFNGKELNKSINPDEAVAYGAAVQAAILIGDKSENVQDLLLLDVTPLSLGIETAGGVMTPLIKRNTTIPTKQTQTFTTYSDNQSSVLVQVYEGERAMTKDNNLLGKFDLTGIPPAPRGVPQIEVTFDIDANGILNVTAADKSTGKENKITITNDKGRLSKDDIDRMVQEAERYKSEDEANRDRVAAKNALESYTYNIKQTVEDEKLRGKISEQDKNKILDKCQEVINWLDRNQMAEKDEYEHKQKELERVCNPIISKLYQGGPGGGSGGGGSGASGGPTIEEVD

SEQ ID NO: 55538 - protein, 106 aa, Homo sapiens
KEYPNRGNTCLENGSFLLNFTGCAVCSKRDFMLITNKSLKEEDGEEIVTYDPDLCKNCHHVIARHEYTFSIMDEFQEYTMLCLLCGKAEDTISILPDDPRQMTLLF

SEQ ID NO: 55539 - protein, 66 aa, Homo sapiens
IAQHFGSGAMLHDVVLGVPENALQPTHPVYNIGPDKVIQATTYFLQKPVPGFEELKDETSAEPATD

SEQ ID NO: 55540 - protein, 294 aa, Homo sapiens
LNRPPMGIPALPPGIPPPQFPGFPPPVPPGTPMIPVPMSIMAPAPTVLVPTVSMVGKHLGARKDHPGLKAKENDENCGPTTTVFVGNISEKASDMLIRQLLAKCGLVLSWKRVQGASGKLQAFGFCEYKEPESTLRALRLLHDLQIGEKKLLVKVDAKTKAQLDEWKAKKKASNGNARPETVTNDDEEALDEETKRRDQMIKGAIEVLIREYSSELNAPSQESDSHPRKKKKEKKEDIFRRFPVAPLIPYPLITKEDINAIEMEEDKRDLISREISKFRDTHKVVFLSFHLIPI

SEQ ID NO: 55541 - protein, 226 aa, Homo sapiens
RPISSAPSVSSASGNATPNTPGDESPCGIIIPHENSPDQQQPEEHRPKIGLSLKLGASNSPGQPNSVKRKKLPVDSVFNKFEDEDSDDVPRKRKLVPLDYGEDDKNATKGTVNTEEKRKHIKSLIEKIPTAKPELFAYPLDWSIVDSILMERRIRPWINKKIIEYIGEEEATLVDFVCSKVMAHSSPQSILDDVAMVLDEEAEVFIVKMWRLLIYETEAKKIGLVK

SEQ ID NO: 55542 - protein, 473 aa, Homo sapiens
VKQYFYTVAPMTELPAPLSYFQNAQMSEDNHLSNTNDNRERQEHNDRRSLGHPEPLSNGRPQGNSRQVVEQDEEEDEELTLKYGAKHVIMLFVPVTLCMVVVVATIKSVSFYTRKDGQLIYTPFTEDTETVGQRALHSILNAAIMISVIVVMTILLVVLYKYRCYKVIHAWLIISSLLLLFFFSFIYLGEVFKTYNVAVDYITVALLIWNFGVVGMISIHWKGPLRLQQAYLIMISALMALVFIKYLPEWTAWLILAVISVYDLVAVLCPKGPLRMLVETAQERNETLFPALIYSSTMVWLVNMAEGDPEAQRRVSKNSKYNAESTERESQDTVAENDDGGFSEEWEAQRDSHLGPHRSTPESRAAVQELSSSILAGEDPEERGVKLGLGDFIFYSVLVGKASATASGDWNTTIACFVAILIGLCLTLLLLAIFKKALPALPISITFGLVFYFATDYLVQPFMDQLAFHQFYI

SEQ ID NO: 55543 - protein, 55 aa, Homo sapiens
IYPQQADAMELLLGSYPEFVRVGDLPCDSVEDQLSLATTLYDKGLLLTKMPLALN

SEQ ID NO: 55544 - protein, 434 aa, Homo sapiens
LRQFGRIIWVPARMAATLILEPAGRCCWDEPVRIAVRGLAPEQPVTLRASLRDEKGALFQAHARYRADTLGELDLERAPALGGSFAGLEPMGLLWALEPEKPLVRLVKRDVRTPLAVELEVLDGHDPDPGRLLCRVRHERYFLPPGVRREPVRAGRVRGTLFLPPEPGPFPGIVDMFGTGGGLLEYRASLLAGKGFAVMALAYYNYEDLPKTMETLHLEYFEEAVNYLLSHPEVKGPGVGLLGISKGGELCLSMASFLKGITAAVVINGSVANVGGTLRYKGETLPPVGVNRNRIKVTKDGYADIVDVLNSPLEGPDQKSFIPVERAESTFLFLVGQDDHNWKSEFYANEACKRLQAHGRRKPQIICYPETGHYIEPPYFPLCRASLHALVGSPIIWGGEPRAHAMAQVDAWKQLQTFFHKHLGGHEGTIPSKV

SEQ ID NO: 55545 - protein, 480 aa, Homo sapiens
KLLSPHPHSVVLRSEFKMASSPAVLRASRLYQWSLKSSAQFLGSPQLRQVGQIIRVPARMAATLILEPAGRCCWDEPVRIAVRGLAPEQPVTLRASLRDEKGALFQAHARYRADTLGELDLERAPALGGSFAGLEPMGLLWALEPEKPLVRLVKRDVRTPLAVELEVLDGHDPDPGRLLCQTRHERYFLPPGVRREPVRVGRVRGTLFLPPEPGPFPGIVDMFGTGGGLLEYRASLLAGKGFAVMALAYYNYEDLPKTMETLHLEYFEEAMNYLLSHPEVKGPGVGLLGISKGGELCLSMASFLKGITAAVVINGSVANVGGTLHYKGETLPPVGVNRNRIKVTKDGYADIVDVLNSPLEGPDQKSFIPVERAESTFLFLVGQDDHNWKSEFYANEACKRLQAHGRRKPQIICYPETGHYIEPPYFPLCRASLHALVGSPIIWGGEPRAHAMAQVDAWKQLQTFFHKHLGGHEGTIPSKV

SEQ ID NO: 55546 - protein, 123 aa, Homo sapiens
KQGVNCLESQGQNTAGDFLLGMGICRGSAKNPQPAQAWLFSDHLIQQQGKCLAATSTLMSSPGSPVILQMCNPREGKQKWRRKGSFIQHSVSGLCLETKPAQLVTSKCQADAQAQQWQLLPHT

SEQ ID NO: 55547 - protein, 52 aa, Homo sapiens
VHQATTSSWVAGSGNRQLAHKETADSENSDIQSLLSLTSEEYTDDIPLLKEA

SEQ ID NO: 55548 - protein, 204 aa, Homo sapiens
IEHARARSRGGRGRGRYSDRFSSRRPRNDRRNAPPVRTENRLIVENLSSRVSWQDLKDFMRQAGEVTFADAHRPKLNEGVVEFASYGDLKNAIEKLSGKEINGRKIKLIEGSKRHSRSRSRSRSRTRSSSRSRSRSRSRSRKSYSRSRSRSRSRSRSKSRSVSRSPVPEKSQKRGSSSRSKSPASVDRQRSRSRSRSRSVDSGN

SEQ ID NO: 55549 - protein, 45 aa, Homo sapiens
IHRWVPCSRDPGTRSHIDKAVLLVQIDDKYVTVIETGVLELGAEV

SEQ ID NO: 55550 - protein, 56 aa, Homo sapiens
KMLREDLKKEKEDKAHLQAEVQHLREDNLRLQEESQNASDKLKKFTEWVFNTIDMS

SEQ ID NO: 55551 - protein, 169 aa, Homo sapiens
KNSSLTLTGETSSAKLPRCRQGGWAGDSVKASKFRRKASEEIEDFRLRPQSLNGSDYGGDIPIIPDLEEVQEEDFVLQVAAPPSIQIKRVMTYRDLDNDLMKYSAIQTLDGEIDLKLLTKVLAPEHEVREDDVGWDWDHLFTEVSSEVLTEWDPLQTEKEDPAGQARHT

SEQ ID NO: 55552 - protein, 68 aa, Homo sapiens
KRKPVATASLSSPSAVHMDAVEPTTPASQAPKSPSSEWLVRTSAAEKATDATTATFFKMPQEKSPGYS

SEQ ID NO: 55553 - protein, 33 aa, Homo sapiens
RAPQAWAKLQASLTPGSSNTGSDLEAFSDHPAI

SEQ ID NO: 55554 - protein, 117 aa, Homo sapiens
IAPLHFLEVKLGKRPQPVKSELDEEEERRKRRREKNKVAAARCRNKKKERTEFLQRESERLELMNAELKTQIEELKQERQQLILMLNRHRPTCIVRTDSVKTPESEGNPLLEQLEKK

SEQ ID NO: 55555 - protein, 336 aa, Homo sapiens
KWGEGDPRWIVEERADATNVNNWHWTERDASNWSTDKLKTLFLAVQVQNEEGKCEVTEVSKLDGEASINNRKGKLIFFYEWSVKLNWTGTSKSGVQYKGHVEIPNLSDENSVDEVEISVSLAKDEPDTNLVALMKEEGVKLLREAMGIYISTLKTEFTQGMILPTMNGESVDPVGQPALKTEERKAKPAPSKTQARPVGVKIPTCKITLKETFLTSPEELYRVFTTQELVQAFTHAPATLEADRGGKFHMVDGNVSGEFTDLVPEKHIVMKWRFKSWPEGHFATITLTFIDKNGETELCMEGRGIPAPEEERTRQGWQRYYFEGIKQTFGYGARLF

SEQ ID NO: 55556 - protein, 44 aa, Homo sapiens
MSEGQGDWLSQRFGLGSVFFRRRTSECTTTGKSYYRWSKGPGSH

SEQ ID NO: 55557 - protein, 196 aa, Homo sapiens
KQKKTRKYATMKRMLSLRDQRLKEKDRLKPKKKEKKDPSALKEREVPQHPSCLFFQYNTQLGPPYHILVDTNFINFSIKAKLDLVQSMMDCLYAKCIPCITDCVMAEIEKLGQKYRVALRIAKDPRFERLPCTHKGTYADDCLVQRVTQHKCYIVATVDRDLKRRIRKIPGVPIMYISNHRYNIERMPDDYGAPRF

SEQ ID NO: 55558 - protein, 40 aa, Homo sapiens
VFDYVPPELITLFISNIGGNAPSYIYRLMSELYHPDDHVL

SEQ ID NO: 55559 - protein, 44 aa, Homo sapiens
IMLPEKSQGKVLQATVVAVGSGSKGKGGEIQPVRVKVGDKVLLP

SEQ ID NO: 55560 - protein, 20 aa, Homo sapiens
IPNNMRYCNSSVPDLEHCHT

SEQ ID NO: 55561 - protein, 146 aa, Homo sapiens
VAQKPEKLLERCKYWPACKNGDECAYHHPISPCKAFPNCKFAEKCLFVHPNCKYDAKCTKPDCPFTHVSRRIPVLSPKPVAPPAPPSSSQLCRYFPACKKMECPFYHPKHCRFNTQCTRPDCTFYHPTINVPPRHALKWIRPQTSE

SEQ ID NO: 55562 - protein, 72 aa, Homo sapiens
KGHVEQARALLQTASSLAPHMYEPHFNFATISDKIGDLQRSYVAAQKSEAAFPDHVDTQHLIKQLRQHFAML

SEQ ID NO: 55563 - protein, 23 aa, Homo sapiens
LVLYKELYYRHIYAKVSGGPSLE

SEQ ID NO: 55564 - protein, 20 aa, Homo sapiens
IAGTDSPWRAPAARTTRKIG

SEQ ID NO: 55565 - protein, 817 aa, Homo sapiens
KKKISSERRKEKSRDAARSRRSKESEVFYELAHQLPLPHNVSSHLDKASVMRLTISYLRVRKLLDAGDLDIEDDMKAQMNCFYLKALDGFVMVLTDDGDMIYISDNVNKYMGLTQFELTGHSVFDFTHPCDHEEMREMLTHRNGLVKKGKEQNTQRSFFLRMKCTLTSRGRTMNIKSATWKVLHCTGHIHVYDTNSNQPQCGYKKPPMTCLVLICEPIPHPSNIEIPLDSKTFLSRHSLDMKFSYCDERITELMGYEPEELLGRSIYEYYHALDSDHLTKTHHDMFTKGQVTTGQYRMLAKRGGYVWVETQATVIYNTKNSQPQCIVCVNYVVSGIIQHDLIFSLQQTECVLKPVESSDMKMTQLFTKVESEDTSSLFDKLKKEPDALTLLAPAAGDTIISLDFGSNDTETDDQQLEEVPLYNDVMLPSPNEKLQNINLAMSPLPTAETPKPLRSSADPALNQEVALKLEPNPESLELSFTMPQIQDQTPSPSDGSTRQSSPEPNSPSEYCFYVDSDMVNEFKLELVEKLFAEDTEAKNPFSTQDTDLDLEMLAPYIPMDDDFQLRSFDQLSPLESSSASPESASPQSTVTVFQQTQIQEPTANATTTTATTDELKTVTKDRMEDIKILIASPSPTHIHKETTSATSSPYRDTQSRTASPNRAGKGVIEQTEKSHPRSPNVLSVALSQRTTVPEEELNPKILALQNAQRKRKMEHDGSLFQAVGIGTLLQQPDDHAATTSLSWKRVKGCKSSEQNGMEQKTIILIPSDLACRLLGQSMDESGLPQLTSYDCEVNAPIQGSRNLLQGEELLRALDQVN

SEQ ID NO: 55566 - protein, 30 aa, Homo sapiens
IISENKIKGLFSCHTGIQIKKASSSQTRLF

SEQ ID NO: 55567 - protein, 4 aa, Homo sapiens
MRVS

SEQ ID NO: 55568 - protein, 21 aa, Homo sapiens
IFHPKKKKKRCSEGHSCCSII

SEQ ID NO: 55569 - protein, 113 aa, Homo sapiens
LCTCQDCMKMYGDLDVLFLTDEYDTVLAYENKGKIAQATDRSDPLMDTLSSMNRVQQVELICEYNDLKTELKDYLKRFADEGTVVKREDIQQFFEEFQSKKRRRVDGMQYYCS

SEQ ID NO: 55570 - protein, 103 aa, Homo sapiens
VASGSAVVLPLARIATVVIGGVVAMAAVPMVLSAMGFTAAGIASSSIAAKMMSAAAIANGGGVASGSLVATLQSLGATGLSGLTKFILGSIGSAIAAVIARFY

SEQ ID NO: 55571 - protein, 42 aa, Homo sapiens
RAPSHIYGGHSSHVTNVDFLCEDSHLISTGGKDTSIMQWRVI

SEQ ID NO: 55572 - protein, 269 aa, Homo sapiens
IEQTLVTVAAAGKSGGGGSSSSGGGRVKKGGGKKSGKKSYLSGGAGAAGGGGADPGNKKWEQKQVQIKTLEGEFSVTMWSSDEKKDIDHETVVEEQIIGENSPPDYSEYMTGKKLPPGGIPGIDLSDPKQLAEFARMKPRKIKEDDAPRTIACPHKGCTKMFRDNSAMRKHLHTHGPRVHVCAECGKAFVESSKLKRHQLVHTGEKPFQCTFEGCGKRFSLDFNLRTHVRIHTGDRPYVCPFDGCNKKFAQSTNLKSHILTHAKAKNNQ

SEQ ID NO: 55573 - protein, 781 aa, Homo sapiens
TSIIKLTTLSGVQEESALCYLLQVDEFRFLLDCGWDEHFSMDIIDSLRKHVHQIDAVLLSHPDPLHLGALPYAVGKLGLNCAIYATIPVYKMGQMFMYDLYQSRHNTEDFTLFTLDDVDAAFDKIQQLKFSQIVNLKGKGHGLSITPLPAGHMIGGTIWKIVKDGEEEIVYAVDFNHKREIHLNGCSLEMLSRPSLLITDSFNATYVQPRRKQRDEQLLTNVLETLRGDGNVLIAVDTAGRVLELAQLLDQIWRTKDAGLGVYSLALLNNVSYNVVEFSKSQVEWMSDKLMRCFEDKRNNPFQFRHLSLCHGLSDLARVPSPKVVLASQPDLECGFSRDLFIQWCQDPKNSIILTYRTTPGTLARFLIDNPSEKITEIELRKRVKLEGKELEEYLEKEKLKKEAAKKLEQSKEADIDSSDESDIEEDIDQPSAHKTKHDLMMKGEGSRKGSFFKQAKKSYPMFPAPEERIKWDEYGEIIKPEDFLVPELQATEEEKSKLESGLTNGDEPMDQDLSDVPTKCISTTESIEIKARVTYIDYEGRSDGDSIKKIINQMKPRQLIIVHGPPEASQDLAECCRAFGGKDIKVYMPKLHETVDATSETHIYQVRLKDSLVSSLQFCKAKDAELAWIDGVLDMRVSKVDTGVILEEGELKDDGEDSEMQVEAPSDSSVIAQQKAMKSLFGDDEKETGEESEIIPTLEPLPPHEVPGHQSVFMNEPRLSDFKQVLLREGIQAEFVGGVLVCNNQVAVRRTETGRIGLEGCLCQDFYRIRDLLYEQYAIV

SEQ ID NO: 55574 - protein, 66 aa, Homo sapiens [sequence omitted]

SEQ ID NO: 55575 - protein, 127 aa, Homo sapiens [sequence omitted]

SEQ ID NO: 55576 - protein, 26 aa, Homo sapiens
IFGFVFLSLASNLGFWLRRLLNNDLS

SEQ ID NO: 55577 - protein, 53 aa, Homo sapiens
VENGGLKAKTITKKRKKEIEESKEPGVEDTEWSNTQTEEAIQTRSRTRKRVQK

SEQ ID NO: 55578 - protein, 13 aa, Homo sapiens
LAESLFPDSASLR

SEQ ID NO: 55579 - protein, 110 aa, Homo sapiens
LVKKDKVVVFLKGTPEQPQCGFSNAVVQILRLHGVRDYAAYNVLDDPELRQGIKDYSNWPTIPQVYLNGEFVGGCDILLQMHQNGDLVEELKKLGIHSALLDEKKDQDSK

SEQ ID NO: 55580 - protein, 19 aa, Homo sapiens
VLPSVLATCSWGGDMKIWH

SEQ ID NO: 55581 - protein, 342 aa, Homo sapiens
IFFSPVSISMSLAMLSLGAGSSTKMQILEGLGLNLQKSSEKELHRGFQQLLQELNQPRDGFQLSLGNALFTDLVVDLQDTFVSAMKTLYLADTFPTNFRDSAGAMKQINDYVAKQTKGKIVDLLKNLDSNAVVIMVNYIFFKAKWETSFNHKGTQEQDFYVTSETVVRVPMMSREDQYHYLLDRNLSCRVVGVPYQGNATALFILPSEGKMQQVENGLSEKTLRKWLKMFKKRQLELYLPKFSIEGSYQLEKVLPSLGISNVFTSHADLSGISNHSNIQVSEMVHKAVVEVDESGTRAAAATGTIFTFRSARLNSQRLVFNRPFLMFIVDNNILFLGKVNRP

SEQ ID NO: 55582 - protein, 542 aa, Homo sapiens
VSEEELVRRQSKVEALYELLRDQVLGVLRRPLEAPPERLRQALAVVAEQEREDRQAAAAGPGTSGLAATRPRRWLQLWRRGVAEAAEERMGQRPAAGAEVPESVFLHLGRTMKEDLEAVVERLKPLFPAEFGVVAAYAESYHQHFAAHLAAVAQFELCERDTYMLLLWVQNLYPNDIINSPKLVGELQGMGLGSLLPPRQIRLLEATFLSSEAANVRELMDRALELEARRWAEDVPPQRLDGHCHSELAIDIIQITSQAQAKAESITLDLGSQIKRVLLVELPAFLRSYQRAFNEFLERGKQLTNYRANVIANINNCLSFRMSMEQNWQVPQDTLSLLLGPLGELKSHGFDTLLQNLHEDLKPLFKRFTHTRWAAPVETLENIIATVDTRLPEFSELQGCFREELMEALHLHLVKEYIIQLSKGRLVLKTAEQQQQLAGYILANADTIQHFCTQHGSPATWLQPALPTLAEIIRLQDPSAIKIEVATYATCYPDFSKGHLSAILAIKGNLSNSEVKRIRSILDVSMGAQEPSRPLFSLIKVG

SEQ ID NO: 55583 - protein, 27 aa, Homo sapiens
LRSTSFTSSSASSFSGAAGGAVWRPAS

SEQ ID NO: 55584 - protein, 137 aa, Homo sapiens
LSQTRSRGSTNLFSKLTSKLTRSRNVSAEQKDENKEAKPRSLRFTWSMKTTSSMDPGDMMREIRKVLDANNCDYEQRERFLLFCVHGDGHAENLVQWEMEVCKLPRLSLNGVRFKRISGTSIAFKNIASKIANELKL

SEQ ID NO: 55585 - protein, 71 aa, Homo sapiens
LDANNCDYEQRERFLLFCVHGDGHAENLVQWEMEVCKLPRLSLNGVRFKRISGTSIAFKNIASKIANELKL

SEQ ID NO: 55586 - protein, 24 aa, Homo sapiens
LAAQWSSHVKHFPICIFGHSKATF

SEQ ID NO: 55587 - protein, 69 aa, Homo sapiens
KEVYFAERVTSLGKDWHRPCLKCEKCGKTLTSGGHAEHEGKPYCNHPCYAAMFGPKGFGRGGAESHTFK

SEQ ID NO: 55588 - protein, 586 aa, Homo sapiens
LNAEEMADFYKEFLSKNFQKHMYYNRMYDNMSTMVYIKEDKLEKLTQDEIISKTKQVIQGLEALKNEHNSILQSLLETLKCLKKDDESNLVEEKSNMIRKSLEMLELGLSEAQVMMALSNHLNAVESEKQKLRAQVRRLCQENQWLRDELANTQQKLQKSEQSVAQLEEEKKHLEFMNQLKKYDDDISPSEDKDTDSTKEPLDDLFPNDEDDPGQGIQQQHSSAAAAAQQGGYEIPARLRTLHNLVIQYASQGRYEVAVPLCKQALEDLEKTSGHDHPDVATMLNILALVYRDQNKYKDAANLLNDALAIREKTLGKDHPAVAATLNNLAVLYGKRGKYKEAEPLCKRALEIREKVLGKDHPDVAKQLNNLALLCQNQGKYEEVEYYYQRALEIYQTKLGPDDPNVAKTKNNLASCYLKQGKFKQAETLYKEILTRAHEREFGSVDDENKPIWMHAEEREECKGKQKDGTSFGEYGGWYKACKVDSPTVTTTLKNLGALYRRQGKFEAAETLEEAAMRSRKQGLDNVHKQRVAEVLNDPENMEKRRSRESLNVDVVKYESGPDGGEEVSMSVEWNGMRKMKLGLVN

SEQ ID NO: 55589 - protein, 237 aa, Homo sapiens
LGPDDPNVAKTKNNLASCYLKQGKFKQAETLYKEILTRAHEREFGSVDDENKPIWMHAEEREECKGKQKDGTSFGEYGGWYKACKVDSPTVTTTLKNLGALYRRQGKFEAAETLEEAAMRSRKQGLDNVHKQRVAEVLNDPENMEKRRSRESLNVDVVKYESGPDGGEEDGTGSLKRSGSFSKLRASIRRSSEKLVRKLKGGSSRESEPKNPGASLAEPLFVENDSSSSGLEDATAN

SEQ ID NO: 55590 - protein, 179 aa, Homo sapiens
KFDFLTRKHHCRRCGKCFCDRCCSQKVPLRRMCFVDPVRQCAECALVSLKEAEFYDKQLKVLLSGATFLVTFGNSEKPETMTCRLSNNQRYLFLDGDSHYEIEIVHISTVQILTEGFPPGGGNARATGMFLQYTVPGTEGVTQLKLTVVEDVTVGRRQAVAWLVAMHKAAKLLYESRDQ

SEQ ID NO: 55591 - protein, 117 aa, Homo sapiens
ILSNQGYVRQLSQALDTSNVMVKKQVFELLAALCIYSPEGHVLTLDALDHYKTVCSQQYRFSIVMNELSGSDNVPYVVTLLSVINAVILGPEDLRARTQLRNEFIGLQLLDVLARLR

SEQ ID NO: 55592 - protein, 26 aa, Homo sapiens
KRPSRSQEEVPPDSDDNKTKKLCVIQ

SEQ ID NO: 55593 - protein, 78 aa, Homo sapiens
ISDVIGNKSVVQVKNFFVNYRRRFNIDEVLQEWEAEHGKEETNGPSNQKPVKSPDNSIKMPEEEDEAPVLDVRYASAS

SEQ ID NO: 55594 - protein, 49 aa, Homo sapiens
MKFNPFVTSHRSKNRKRHFNAPSHIRRKITSSPLSKELRQKYNVQSMPI

SEQ ID NO: 55595 - protein, 15 aa, Homo sapiens
LSSPSQASSPGGTVV

SEQ ID NO: 55596 - protein, 181 aa, Homo sapiens [sequence omitted]

SEQ ID NO: 55597 - protein, 28 aa, Homo sapiens
TTVKNKDIRKFLDGIYVSEKGTVQPADE

SEQ ID NO: 55598 - protein, 68 aa, Homo sapiens
LFFKWQQGHQLAIVNRFPGSKLTFQRILSYDTVVQTTGDSWHIPYDEDLVERCSCEVPTKWLCLHQKT

SEQ ID NO: 55599 - protein, 68 aa, Homo sapiens
LYPSLIPSETASTSPAASGFFMWLQMAGFPKGFWLKHIPWCICTAVSSSLQLCLNRFNSMAPKDEISF

SEQ ID NO: 55600 - protein, 187 aa, Homo sapiens
INVEGKMHQHVVKCGVCNEATPIKNAPPGKKYVRCPCNCLLICKVTSQRIACPRPYCKRIINLGPVHPGPLSPEPQPMGVRVICGHCKNTFLWTEFTDRTLARCPHCRKVSSIGRRYPRKRCICCFLLGLLLAVTATGLAFGTWKHARRYGGIYAAWAFVILLAVLCLGRALYWACMKVSHPVQNFS

SEQ ID NO: 55601 - protein, 50 aa, Homo sapiens
MGQLFQCAVGHPGSRHLHSWEAPGLGPDYHHGDCTDMQRRVLLAGAKECI

SEQ ID NO: 55602 - protein, 17 aa, Homo sapiens
LAGQALQFTTLLTSLAP

SEQ ID NO: 55603 - skipped

SEQ ID NO: 55604 - protein, 26 aa, Homo sapiens
KAGRPDDKAIAAEHRVLDNFSDIVEG

SEQ ID NO: 55605 - protein, 60 aa, Homo sapiens
IERLSPGTRKIELFGRPHNVQPNWITLGNQLDGIHLLDPDVVARFKQRYPDGIISKPKNL

SEQ ID NO: 55606 - protein, 313 aa, Homo sapiens
RSPPLATGYRYGHSKSPHFREKSPVREPVDNLSPEERDARTVFCMQLAARIRPRDLEDFFSAVGKVRDVRIISDRNSRRSKGIAYVEFCEIQSVPLAIGLTGQRLLGVPIIVQASQAEKNRLAAMANNLQKGNGGPMRLYVGSLHFNITEDMLRGIFEPFGKIDNIVLMKDSDTGRSKGYGFITFSDSECARRALEQLNGFELAGRPMRVGHVTERLDGGTDITFPDGDQELDLGSAGGRFQLMAKLAEGAGIQLPSTAAAAAAAAAQAAALQLNGAVPLGALNPAALTALSPALNLASQCFQLSSLFTPQTM

SEQ ID NO: 55607 - protein, 116 aa, Homo sapiens
LNGFELAGRPMRVGHVTERLDGGTDITFPDGDQELDLGSAGGRFQLMAKLAEGAGIQLPSTAAAAAAAAAQAAALQLNGAVPLGALNPAALTALSPALNLASQCFQLSSLFTPQTM

SEQ ID NO: 55608 - protein, 148 aa, Homo sapiens
KDRDPEAQFEMPYVVRLHNFHQLSAPQPCFTFSHPNRDPMIDNNRYCTLEFPVEVNTVLHGFAGYFETVLYQDITLSIRPETHSPGMFSWFPILFPIKQPITVREGQTICVRFWRCSNSKKVWYEWAVTAPVCSAIHNPTGRSYTIGL

SEQ ID NO: 55609 - protein, 104 aa, Homo sapiens
KEQAQAWKEVRLHKTTWLRSEILHRVIQELLVDYYVKIQDTNVTSEDKKFHETLEQRLLVTELMRLLGPSQEREIPPLLGLEKADLLELMPLSEVGGEILEPNK

SEQ ID NO: 55610 - protein, 157 aa, Homo sapiens
VGEQQQCQDAKSQQKEQMLLLEKKSAAYSQVLLRCLTLLQRLLQEHRLKTQSELDRINAQYLEVKCGAMILKLRMEELKILSDTYTVEKVEVHRLIRDRLEGAIHLQEQDMENSRQVLNSYEVLGEEFDRLVKEYTVLKQATENKRWALQEFSKVYR

SEQ ID NO: 55611 - protein, 23 aa, Homo sapiens
KKPSISITTESLKVRWEEPGKGG

SEQ ID NO: 55612 - protein, 874 aa, Homo sapiens
LAPVAAPVGGISFHLQIGLSREPVLLLQDSSGDYSLAHVREMACSIVDQKFPECGFYGMYDKILLFRHDPTSENILQLVKAASDIQEGDLIEVVLSASATFEDFQIRPHALFVHSYRAPAFCDHCGEMLWGLVRQGLKCEGCGLNYHKRCAFKIPNNCSGVRRRRLSNVSLTGVSTIRTSSAELSTSAPDEPLLQKSPSESFIGREKRSNSQSYIGRPIHLDKILMSKVKVPHTFVIHSYTRPTVCQYCKKLLKGLFRQGLQCKDCRFNCHKRCAPKVPNNCLGEVTINGDLLSPGAESDVVMEEGSDDNDSERNSGLMDDMEEAMVQDAEMAMAECQNDSGEMQDPDPDHEDANRTISPSTSNNIPLMRVVQSVKHTKRKSSTVMKEGWMVHYTSKDTLRKRHYWRLDSKCITLFQNDTGSRYYKEIPLSEILSLEPVKTSALIPNGANPHCFEITTANVVYYVGENVVNPSSPSPNNSVLTSGVGADVARMWEIAIQHALMPVIPKGSSVGTGTNLHRDISVSISVSNCQIQENVDISTVYQIFPDEVLGSGQFGIVYGGKHRKTGRDVAIKIIDKLRFPTKQESQLRNEVAILQNLHHPGVVNLECMFETPERVFVVMEKLHGDMLEMILSSEKGRLPEHITKFLITQILVALRHLHFKNIVHCDLKPENVLLASADPFPQVKLCDFGFARIIGEKSFRRSVVGTPAYLAPEVLRNKGYNRSLDMWSVGVIIYVSLSGTFPFNEDEDIHDQIQNAAFMYPPNPWKEISHEAIDLINNLLQVKMRKRYSVDKTLSHPWLQDYQTWLDLRELECKIGERYITHESDDLRWEKYAGEQGLQYPTHLINPSASHSDTPETEETEMKALGERVSIL

SEQ ID NO: 55613 - protein, 657 aa, Homo sapiens
LSRPQQYTIPGILHYIQHEWARFEMERAHWEVERAELQARIAFLQGERKGQENLKKDLVRRIKMLEYALKQERAKYHKLKYGTELNQGDLKMPTFESEETKDTEAPTAPQNSQLTWKQGRQLLRQYLQEVGYTDTILDVRSQRVRSLLGLSNSEPNGSVETKNLEQILNGGESPKQKGQEIKRSSGDVLETFNFLENADDSDEDEENDMIEGIPEGKDKHRMNKHKIGNEGLAADLTDDPDTEEALKEFDFLVTAEDGEGAGEARSSGDGTEWAEPITFPSGGGKSFIMGSDDVLLSVLGLGDLADLTVTNDADYSYDLPANKDAFRKTWNPKYTLRSHFDGVRALAFHPVEPVLVTASEDHTLKLWNLQKTVPAKKSASLDVEPIYTFRAHIGPVLSLAISSNGEQCFSGGIDATIQWWNMPSPSVDPYDTYEPNVLAGTLVGHTDAVWGLAYSGIKNQLLSCSADGTVRLWNPQEKLPCICTYNGDKKHGIPTSVDFIGCDPAHMVTSFNTGSAVIYDLETSQSLVILSSQVDSGLQSNNHINRVVSHPTLPVTITAHEDRHIKFFDNKTGKMIHSMVAHLDAVTSLAVDPNGIYLMSGSHDCSIRLWNLDSKTCVQEITAHRKKLDESIYDVAFHSSKAYIASAGADALAKVFV

SEQ ID NO: 55614 - protein, 107 aa, Homo sapiens
THPEPLAGRHFNLAPLGRRRVQSQWASTRGGHKERPTVMLFPFRNLGSPTQVISKPESKEEHAIYTADLAMGTRAASTGKSKSPCQTLGGRALKENPVDLPATEQKE

SEQ ID NO: 55615 - protein, 13 aa, Homo sapiens
LAELLPSVSSVLT

SEQ ID NO: 55616 - protein, 103 aa, Homo sapiens
LQDPVLKQFKSAFSSAETTELSGKCVVALATDPNILSLSGKVLPSCDLARRYGLRDVDGRPVQDYLSLSSVLSHVSGLGWLASYLPSFLRVPKWIIALYTSKF

SEQ ID NO: 55617 - protein, 86 aa, Homo sapiens
KAEGDAKGDKAKVKDEPQRRSARLSAKPAPPKPEPKPRKSPVKKGEKVPKGKKGKADAGKEGNNPAENGDAKTDQAQKAEGAGDAK

SEQ ID NO: 55618 - protein, 305 aa, Homo sapiens [sequence omitted]

SEQ ID NO: 55619 - protein, 206 aa, Homo sapiens
VKKTQIHFDPEVVQIKAGKAEIDRRISAFIERKQAEINENNVREFCNVIDCNQENSCARTDAIFTPYPGFKSHVKVSRVVNTYGPQTRPEGIPGSGHKPNSMLRDCGNQAVEERLQNIEAHLRLQTGGPVPRDIYQRIKKLEDKILELEGISPEYFQSVSFSGKRRKVQPPQNYSLAELDEKISALKQALLRKSREAESMATHHLP

SEQ ID NO: 55620 - protein, 171 aa, Homo sapiens
INENNVREFCNVIDCNQENSCARTDAIFTPYPGFKSHVKVSRVVNTYGPQTRPEGIPGSGHKPNSMLRDCGNQAVEERLQNIEAHLRLQTGGPVPRDIYQRIKKLEDKILELEGISPEYFQSVSFSGKRRKVQPPQQNYSLAELDEKISALKQALLRKSREAESMATHHLP

SEQ ID NO: 55621 - protein, 61 aa, Homo sapiens
KQMSWFYYQYLLVTALYMLEPWERTVFNSMLVSIVGMALYTGYVFMPQHIMAILHYFEIVQ

SEQ ID NO: 55622 - protein, 63 aa, Homo sapiens
LETQYQQSMDSKLSGRYRRHCGLGFSEVEDYDGEGDVAGDDDDDDDDSPDPESLDDSESDSEP

SEQ ID NO: 55623 - protein, 21 aa, Homo sapiens
LGQIGDNAKGPPTNVEPPTLF

SEQ ID NO: 55624 - protein, 45 aa, Homo sapiens
RRSGNGTHILEKVIASVCTNISANYAAFNKESKSCSNSKNDSFLL

SEQ ID NO: 55625 - protein, 328 aa, Homo sapiens
MSKLIYESRGDRDLHCTESQSEASTEEGHDSLSVGSFEEDSKSEFILDPPKPKPPAWFNGILTWEDFELVNPHRARFLKEIKDLAIKRRQILSNKGLSEDEKNTKLQELVLKNPSGSGPPLSIEDLGLNFQFCPSSRIYGFTAVDLKPSGEDEMITMDNAEEYVDLMFDFCMHTGIQKQMEAFRDGFNKVFPMEKLSSFSHEEVQMILCGNQSPSWAAEDIINYTEPKLGYTRDSPGFLRFVRVLCGMSSDERKAFLQFTTGCSTLPPGGLANLHPRLTVVRKVDATDASYPSVNTCVHYLKLPEYSSEEIMRERLLAATMEKGFHLN

SEQ ID NO: 55626 - protein, 24 aa, Homo sapiens
IYVCFFKGADKELLPKMDLRLWLH

SEQ ID NO: 55627 - protein, 68 aa, Homo sapiens
REKQKTLVEQLLSLLNSSPGPPTRKLLAKNLAILYSIGDTFSVHEAIDKCNDLIRSKDDSPSYLPTKL

SEQ ID NO: 55628 - protein, 60 aa, Homo sapiens
IGPQYSSVFKSLVASSPALKARLEAAIKGNQESVKVKIPTSKYTKSPGKNSSIQLKTSFL

SEQ ID NO: 55629 - protein, 51 aa, Homo sapiens
LYWSHPRKFGQGSRSCRVCSNRHGLIRKYGLNMCRQCFRQYAKDIGFIKLD

SEQ ID NO: 55630 - protein, 46 aa, Homo sapiens
LEPPAKIRPGFSLLSCLFKPARSDPEIWPQYVPPVFPSVREGYRFH

SEQ ID NO: 55631 - protein, 4 aa, Homo sapiens
KSSN

SEQ ID NO: 55632 - protein, 44 aa, Homo sapiens
TVHNIPGFDSIKETNMQDGSVQVIKDHVTNCAFSFQNSLLYDLD

SEQ ID NO: 55633 - protein, 202 aa, Homo sapiens
KDIIKFLQEHGSDSFLAEHKLLGNIKNVAKTANKDHLVTAYNHLFETKRFKGTESISKVSEQVKNVKLNEDKPKETKSEETLDEGPPKYTKSVLKKGDKTNFPKKGDVVHCWYTGTLQDGTVFDTNIQTSAKKKKNAKPLSFKVGVGKVIRGWDEALLTMSKGEKARLEIEPEWAYGKKGQPDAKIPPNAKLTFEVELVDID

SEQ ID NO: 55634 - protein, 151 aa, Homo sapiens
LLLHNEMVSGVYKSAEQGEVENGRCITKLENMGFRVGQGLIERFTKDTARFKDELDIMKFICKDFWTTVFKKQIDNLRTNHQGIYVLQDNKFRLLTQMSAGKQYLEHASKYLAFTCGLIRGGLSNLGIKSIVTAEVSSMPACKFQVMIQKL

SEQ ID NO: 55635 - protein, 58 aa, Homo sapiens
VQKKGKAAKTALNSFMHSKEATAREKDLFRSVKDTDLSRNIPGKVKVSAPNLLNVKRK

SEQ ID NO: 55636 - protein, 10 aa, Homo sapiens
VSALSSASIW

SEQ ID NO: 55637 - protein, 247 aa, Homo sapiens
RFPDRILPRKFALTTKIPDTKGCHKCCIVRNPYTGHKYLCGALQSGIVLLQWYEPMQKFMLIKHFDFPLPSPLNVFEMLVIPEQEYPMVCVAISKGTESNQVVQFETINLNSASSWFTEIGAGSQQLDSIHVTQLERDTVLVCLDKFVKIVNLQGKLKSSKKLASELSFDFRIESVVCLQDSVLAFWKHGMQGKSFKSDEVTQEISDETRVFRLLGSDRVVVLESRPTENPTAHSNLYILAGHENSY

SEQ ID NO: 55638 - protein, 205 aa, Homo sapiens
VENVAELKKSFNRHLHFTLVKDRNVATTRDYYFALAHTVRDHLVGRWIRTQQHYYDKCPKRVYYLSLEFYMGRTLQNTMINLGLQNACDEAIYQLGLDIEELEEIEEDAGLGNGGLGRLAACFLDSMATLGLAAYGYGIRYEYGIFNQKIRDGWQVEEADDWLRYGNPWEKSRPEFMLPVHFYGKVEHTNTGTKWIDTQVFRVLV

SEQ ID NO: 55639 - protein, 826 aa, Homo sapiens
VENVAELKKSFNRHLHFTLVKDRNVATTRDYYFALAHTVRDHLVGRWIRTQQHYYDKCPKRVYYLSLEFYMGRTLQNTMINLGLQNACDEAIYQLGLDIEELEEIEEDAGLGNGGLGRLAACFLDSMATLGLAAYGYGIRYEYGIFNQKIRDGWQVEEADDWLRYGNPWEKSRPEFMLPVHFYGKVEHTNTGTKWIDTQVVLALPYDTPVPGYMNNTVNTMRLWSARAPNDFNLRDFNVGDYIQAVLDRNLAENISRVLYPNDNFFEGKELRLKQEYFVVAATLQDIIRRFKASKFGSTRGAGTVFDAFPDQVAIQLNDTHPALAIPELMRIFVDIEKLPWSKAWELTQKTFAYTNHTVLPEALERWPVDLVEKLLPRHLEIIYEINQKHLDRIVALFPKDVDRLRRMSLIEEEGSKRINMAHLCIVGSHAVNGVAKIHSDIVKTKVFKDFSELEPDKFQNKTNGITPRRWLLLCNPGLAELIAEKIGEDYVKDLSQLTKLHSFLGDDVFLRELAKVKQENKLKFSQFLETEYKVKINPSSMFDVQVKRIHEYKRQLLNCLHVITMYNRIKKDPKKLFVPRTVIIGGKAAPGYHMAKMIIKLITSVADVVNNDPMVGSKLKVIFLENYRVSLAEKVIPATDLSEQISTAGTEASGTGNMKFMLNGALTIGTMDGANVEMAEEAGEENLFIFGMRIDDVAALDKKGYEAKEYYEALPELKLVIDQIDNGFFSPKQPDLFKDIINMLFYHDRFKVFADYEAYVKCQDKVSQLYMNPKAWNTMVLKNIAASGKFSSDRTIKEYAQNIWNVEPSDLKISLSNESNKVNGN

SEQ ID NO: 55640 - protein, 1364 aa, Homo sapiens
LSSLPVLLLLPLLMLRAAALHPDELFPHGESWGDQLLQEGDDESSAVVKLANPLHFYEARFSNLYVGTNGIISTQDFPRETQYVDYDFPTDFPAIAPFLADIDTSHGRGRVLYREDTSPAVLGLAARYVRAGFPRSARFTPTHAFLATWEQVGAYEEVKRGALPSGELNTFQAVLASDGSDSYALFLYPANGLQFLGTRPKESYNVQLQLPARVGFCRGEADDLKSEGPYFSLTSTEQSVKNLYQLSNLGIPGVWAFHIGSTSPLDNVRPAAVGDLSAAHSSVPLGRSFSHATALESDYNEDNLDYYDVNEEEAEYLPGEPEEALNGHSSIDVSFQSKVDTKPLEESSTLDPHTKEGTSLGEVGGPDLKGQVEPWDERETRSPAPPEVDRDSLAPSWETPPPYPENGSIQPYPDGGPVPSEMDVPPAHPEEEIVLRSYPASGHTTPLSRGTYEVGLEDNIGSNTEVFTYNAANKETCEHNHRQCSRHAFCTDYATGFCCHCQSKFYGNGKHCLPEGAPHRVNGKVSGHLHVGHTPVHFTDVDLHAYIVGNDGRAYTAISHIPQPAAQALLPLTPIGGLFGWLFALEKPGSENGFSLAGAAFTHDMEVTFYPGEETVRITQTAEGLDPENYLSIKTNIQGQVPYVSANFTAHISPYKELYHYSDSTVTSTSSRDYSLTFGAINQTWSYRIHQNITYQVCRHAPRHPSFPTTQQLNVDRVFALYNDEERVLRFAVTNQIGPVKEDSDPTPGNPCYDGSHMCDTTARCHPGTGVDYTCECASGYQGDGRNCVDENECATGFHRCGPNSVCINLPGSYRCECRSGYEFADDRHTCILITPPANPCEDGSHTCAPAGQARCVHHGGSTFSCACLPGYAGDGHQCTDVDECSENRCHPAATCYNTPGSFSCRCQPGYYGDGFQCIPDSTSSLTPCEQQQRHAQAQYAYPGARFHIPQCDEQGNFLPLQCHGSTGFCWCVDPDGHEVPGTQTPPGSTPPHCGPSPEPTQRPPTICERWRENLLEHYGGTPRDDQYVPQCDDLGHFIPLQCHGKSDFCWCVDKDGREVQGTRSQPGTTPACIPTVAPPMVRPTPRPDVTPPSVGTFLLYTQGQQIGYLPLNGTRLQKDAAKTLLSLHGSIIVGIDYDCRERMVYWTDVAGRTISRAGLELGAEPETIVNSGLISPEGLAIDHIRRTMYWTDSVLDKIESALLDGSERKVLFYTDLVNPRAIAVDPIRGNLYWTDWNREAPKIETSSLDGENRRILINTDIGLPNGLTFDPFSKLLCWADAGTKKLECTLPDGTGRRVIQNNLKYPFSIVSYADHFYHTDWRRDGVVSVNKHSGQFTDEYLPEQRSHLYGITAVYPYCPTGRK

SEQ ID NO: 55641 - protein, 209 aa, Homo sapiens
VACEDGRSHGPVRFHSVPAFVLATDLMVDVPGHGKVMVDIAYGGAFYAFVTAEKLGLDICSAKTRDLVDAASAVTEAVKAQFKINHPDSEDLAFLYGTILTDGKDAYTKEPTTNICVFADEQVDRSPTGSGVTARIALQYHKGLLELNQMRAFKSSATGSVFTGKAVREAKCGDFKAVIVEVSGQAHYTGTASFIIEDDDPLRDGFLLK

SEQ ID NO: 55642 - protein, 330 aa, Homo sapiens
LVLCALLLLLVQLLRFLRADGDLTLLWAEWQGRRPEWELTDMVVWVTGASSGIGEELAYQLSKLGVSLVLSARRVHELERVKRRCLENGNLKEKDILVLPLDLTDTGSHEAATKAVLQEFGRIDILVNNGGMSQRSLCMDTSLDVYRKLIELNYLGTVSLTKCVLPHMIERKQGKIVTVNSILGIISVPLSIGYCASKHALRGFFNGLRTELATYPGIIVSNICPGPVQSNIVENSLAGEVTKTIGNNGDQSHKMTTSRCVRLMLISMANDLKEVWISEQPFLLVTYLWQYMPTWAWWITNKMGKKRIENFKSGVDADSSYFKIFKTKHD

SEQ ID NO: 55643 - protein, 461 aa, Homo sapiens
LFGLLGAVWLLSSGHGEEQPPETAAQRCFCQVSGYLDDCTCDVETIDRFNNYRLFPRLQKLLESDYFRYYKVNLKRPCPFWNDISQCGRRDCAVKPCQSDEVPDGIKSASYKYSEEANNLIEECEQAERLGAVDESLSEETQKAVLQWTKHDDSSDNFCEADDIQSPEAEYVDLLLNPERYTGYKGPDAWKIWNVIYEENCFKPQTIKRPLNPLASGQGTSEENTFYSWLEGLCVEKRAFYRLISGLHASINVHLSARYLLQETWLEKKWGHNITEFQQRFDGILTEGEGPRRLKNLYFLYLIELRALSKVLPFFERPDFQLFTGNKIQDEENKMLLLEILHEIKSFPLHFDENSFFAGDKKEAHKLKEDFRLHFRNISRIMDCVGCFKCRLWGKLQTQGLGTALKILFSEKLIANMPESGPSYEFHLTRQEIVSLFNAFGRISTSVKELENFRNLLQNIH

SEQ ID NO: 55644 - protein, 190 aa, Homo sapiens
TDLTRKMKPDETPMFDPSLLKEVDWSQNTATFSPAISPTHPGEGLVLRPLCTADLNRGFFKVLGQLTETGVVSPEQFMKSFEHMKKSGDYYVTVVEDVTLGQIVATATLIIEHKFIHSCAKRGRVEDVVVSDECRGKQLGKLLLSTLTLLSKKLNCYKITLECLPQNVGFYKKFGYTVSEENYMCRRFLK

SEQ ID NO: 55645 - protein, 36 aa, Homo sapiens
TSHTAYWSSLDVALFLLTFMYKHEHDDDAKPNLDPI

SEQ ID NO: 55646 - protein, 412 aa, Homo sapiens
KSDAEQYLKNLYDLYTRTTNLSSKLMEFNLGTDKQTFLSKLIKSIFISYLENYIEVETGYLKSRSAMILQRYYDSKNHQKRSIGTGGIQDLKERIRQRTNLPLGPSIDTHGETFLSQEVVVNLLQETKQAFERCHRLSDPSDLPRNAFRIFTILVEFLCIEHIDYALETGLAGIPSSDSRNANLYFLDVVQQANTIFHLFDKQFNDHLMPLISSSPKLSECLQKKKEIIEQMEMKLDTGIDRTLNCMIGQMKHILAAEQKKTDFKPEDENNVLIQYTNACVKVCAYVRKQVEKIKNSMDGKNVDTVLMELGVRFHRLIYEHLQQYSYSCMGGMLAICDVAEYRKCAKDFKIPMVLHLFDTLHALCNLLVVAPDNLKQVCSGEQLANLDKNILHSFVQLRADYRSARLARHFS

SEQ ID NO: 55647 - protein, 15 aa, Homo sapiens
IKMIYGNKVLSLCLK

SEQ ID NO: 55648 - protein, 49 aa, Homo sapiens
LFILGALYSIKVMNRRRRNGFKRHKRKQREFNSMQDRVMLLADSSEDEF

SEQ ID NO: 55649 - protein, 91 aa, Homo sapiens
KNMAAQIPESDQIKQFKEFLGTYNKLTETCFLDCVKDFTTREVKPEETTCSEHCLQKYLKMTQRISMRFQEYHIQQNEALAAKAGLLGQPR

SEQ ID NO: 55650 - protein, 42 aa, Homo sapiens
LDSKSKYVLDGMVDTVCEDLETDKKELAKLQTVQLDEDMQDL

SEQ ID NO: 55651 - protein, 38 aa, Homo sapiens
KPEPKPKKAPAKKGEKVPKGKKRKADAGKEREGAGDPK

SEQ ID NO: 55652 - protein, 187 aa, Homo sapiens
IANSLFNDSFSLWHQRQPGGPYVEVPLDRSGIAWWTDYHVKFRNPPLVNGSLALAFQGTAPPPNWRRPVYELSPDPNNTGFINQDFVVWMRTAALPTFRKLYARIRQGNYSAGLPRGAYRVNITYNYPVRAFGGHKLLIFSSISWMGGKNPFLGIAYLVVGSLCILTGFVMLVVYIRYQDQDDDDEE

SEQ ID NO: 55653 - protein, 93 aa, Homo sapiens
LPTFRKLYARIRQGNYSAGLPRGAYRVNITYNYPVRAFGGHKLLIFSSISWMGGKNPFLGIAYLVVGSLCILTGFVMLVVYIRYQDQDDDDEE

SEQ ID NO: 55654 - protein, 22 aa, Homo sapiens
IINKIVMNTCTGVCTDISCHFS

SEQ ID NO: 55655 - protein, 319 aa, Homo sapiens
VSNWPLYCLFCFGTELGNELFYILFFPFWIWNLDPLVGRRLVVIWVLVMYLGQCTKDIIRWPRPASPPVVKLEVFYNSEYSMPSTHAMSGTAIPISMVLLTYGRWQYPLIYGLILIPCWCSLVCLSRIYMGMHSILDIIAGFLYTILILAVFYPFVDLIDNFNQTHKYAPFIIIGLHLALGIFSFTLDTWSTSRGDTAEILGSGAGIACGSHVTYNMGLVLDPSLDTLPLAGPPITVTLFGKAILRILIGMVFVLIIRDVMKKITIPLACKIFNIPCDDIRKARQHMEVELPYRYITYGMVGFSITFFVPYIFFFIGIS

SEQ ID NO: 55656 - protein, 7 aa, Homo sapiens
MGVPAAS

SEQ ID NO: 55657 - protein, 250 aa, Homo sapiens
IVRMSGKDRIEIFPSRMAQTIMKARLKGAQTGRNLLKKKSDALTLRFRQILKKIIETKMLMGEVMREAAFSLAEAKFTAGDFSTTVIQNVNKAQVKIRAKKDNVAGVTLPVFEHYHEGTDSYELTGLARGGEQLAKLKRNYAKAVELLVELASLQTSFVTLDEAIKITNRRVNAIEHVIIPRIERTLAYIITELDEREREEFYRLKKIQEKKKILKEKSEKDLEQRRAAGEVLEPANLLAEEKDEDLLFE

SEQ ID NO: 55658 - protein, 266 aa, Homo sapiens
MPKGKKAKGKKVAPAPAVVKKQEAKKVVNPLFEKRPKNFGIGQDIQPKRDLTRFVKWPRYIRLQRQRAILYKRLKVPPAINQFTQALDRQTATQLLKLAHKYRPETKQEKKQRLLARAEKKAAGKGDVPKKRPPVLRAGVNTVTTLVENKKAQLVVISHDMDPIELVVFLPALCRKMGVPYCIIKGKARLGRLVHRKTCTTVAFTQVNSEDKGALAKLVEAIRTNYNDRYDEIRRHWGGNVLGPKSVARIAKRKKAKAKELATKLG

SEQ ID NO: 55659 - protein, 110 aa, Homo sapiens
KSSLMFAPAVMRAFRKNKTLGYGVPMLLLIVGGSFGLREFSQIRYDAVKSKMDPELEKKLKENKISLESEYEKIKDSKFDDWKNIRGPRPWEDPDLLQGRNPESLKTKTT

SEQ ID NO: 55660 - protein, 234 aa, Homo sapiens
ISWVDSSWIPILNSGSVLDYFSERSNPFYDRTCNNEVVKMQRLTLEHLNQMVGIEYILLHAQEPILFIIRKQQRQSPAQVIPLADYYIIAGVIYQAPDLGSVINSRVLTAVHGIQSAFDEAMSYCRYHPSKGYWWHFKDHEEQDKVRPKAKRKEEPSSIFQRQRVDALLLDLRQKFPPKFVQLKPGEKPVPVDQTKKEAEPIPETVKPEEKETTKNVQQTVSAKGPPEKRMRLQ

SEQ ID NO: 55661 - protein, 60 aa, Homo sapiens
ILHCHNCRKEFSIKLSKHHCRACGQGFCDECSHDRRAVPSRGWDHPVRVCFNCNKKPGDL

SEQ ID NO: 55662 - protein, 629 aa, Homo sapiens
KLRNLSKITQLVKGTAKIQSQAVKIKMNKLRQSFRRKKDVYVPEASRPHQWQTDEEGVRTGKCSFPVKYLGHVEVDESRGMHICEDAVKRLKAERKFFKGFFGKTGKKAVKAVLWVSADGLRVVDEKTKDLIVDQTIEKVSFCAPDRNFDRAFSYICRDGTTRRWICHCFMAVKDTGERLSHAVGCAFAACLERKQKREKECGVTATFDASRTTFTREGSFRVTTATEQAEREEIMKQMQDAKKAETDKIVVGSSVAPGNTAPSPSSPTSPTSDATTSLEMNNPHAIPRRHAPIEQLARQGSFRGFPALSQKMSPFKRQLSLRINELPSTMQRKTDFPIKNAVPEVEGEAESISSLCSQITNAFSTPEDPFSSAPMTKPVTVVAPQSPTFQGTEWGQSSGAASPGLFQAGHRRTPSEADRWLEEVSKSVRAQQPQASAAPLQPVLQPPPPTAISQPASPFQGNAFLTSQPVPVGVVPALQPAFVPAQSYPVANGMPYPAPNVPVVGITPSQMVANVFGTAGHPQAAHPHQSPSLVRQQTFPHYEASSATTSPFFKPPAQHLNGSAAFNGVDDGRLASADRHTEVPTGTCPVDPFEAQWAALENKSKQRTNPSPTNPFSSDLQKTFEIEL

SEQ ID NO: 55663 - protein, 370 aa, Homo sapiens
TVSHSLLVEFGVLIVEKMAMTLLEDWCRGMDVNSQRALLVWGIPVNCDEAEIEETLQAAMPQVSYRMLGRMFWREENAKAALLELTGAVDYAAIPREMPGKGGVWKVLFKPPTSDAEFLERLHLFLAREGWTVQDVARVLGFQNPTPTPGPEMPAEMLNYILDNVIQPLVESIWYKRLTLFSGRDIPGPGEETFDPWLEHTNEVLEEWQVSDVEKRRRLMESLRGPAADVIRILKSNNPAITTAECLKALEQVFGSVESSRDAQIKFLNTYQNPGEKLSAYVIRLEPLLQKVVEKGAIDKDNVNQARLEQVIAGANHSGAIRRQLWLTGAGEGPAPNLFQLLVQIREEEAKEEEEEAEATLLQLGLEGHF

SEQ ID NO: 55664 - protein, 24 aa, Homo sapiens
VNNIETGWALGATFHLLQSLGISH

SEQ ID NO: 55665 - protein, 515 aa, Homo sapiens
VKSSPTWYSASSFSSSVPTVKLFIGGKFVESKSDKWIDIHNPATNEVIGRVPQATKAEMDAAIASCKRAFPAWADTSVLSRQQVLLRYQQLIKENLKEIAKLITLEQGKTLADAEGDVFRGLQVVEHACSVTSLMMGETMPSITKDMDLYSYRLPLGVCAGIAPFNFPAMIPLWMFPMAMVCGNTFLMKPSERVPGATMLLAKLLQDSGAPDGTLNIIHGQHEAVNFICDHPDIKAISFVGSNKAGEYIFERGSRHGKRVQANMGAKNHGVVMPDANKENTLNQLVGAAFGAAGQRCMALSTAVLVGEAKKWLPELVEHAKNLRVNAGDQPGADLGPLITPQAKERVCNLIDSGTKEGASILLDGRKIKVKGYENGNFVGPTIISNVKPNMTCYKEEIFGPVLVVLETETLDEAIQIVNNNPYGNGTAIFTTNGATARKYAHLVDVGQVGVNVPIPVPLPMFSFTGSRSSFRGDTNFYGKQGIQFYTQLKTITSQWKEEDATLSSPAVVMPTMGR

SEQ ID NO: 55666 - protein, 32 aa, Homo sapiens
LQILKVLFPSWSSQNALMFLTLLCLTLLAEEL

SEQ ID NO: 55667 - protein, 100 aa, Homo sapiens
ILLVQPTKRPEGRTYADYESVNECMEGVCKMYEEHLKRMNPNSPSITYDISQLFDFIDDLADLSCLVYRADTQTYQPYNKDWIKEKIYVLLRRQAQQAGK

SEQ ID NO: 55668 - protein, 172 aa, Homo sapiens
LGELVCGSGCCCHCCAGGPVARQKALPRLRGVMSRFLNVLRSWLVMVSIIAMGNTLQSFRDHTFLYEKLYTGKPNLVNGLQARTFGIWTLLSSVIRCLCAIDIHNKTLYHITLWTFLLALGHFLSELFVYGTAAPTIGVLAPLMVASFSILGMLVGLRYLEVEPVSRQKKRN

SEQ ID NO: 55669 - protein, 252 aa, Homo sapiens
KASPEPPDSAEGALKLGEEQQRQQWMANQSEALKLTMSAGGFAAPGHAAGGPPPPPPPLGPHSNRTTPPESAPQNGPSPMAALMSVADTLGTAHSPKDGSSVHSTTASARRNSSSPVSPASVPGQRRLASRNGDLNLQVAPPPPSAHPGMDQVHPQNIPDSPMANSGPLCCTICHERLEDTHFVQCPSVPSHKFCFPCSRESIKAQGATGEVYCPSGEKCPLVGSNVPWAFMQGEIATILAGDVKVKKERDP

SEQ ID NO: 55670 - protein, 4 aa, Homo sapiens
LTSQ

SEQ ID NO: 55671 - protein, 518 aa, Homo sapiens
IHHVTQNGGLYKRPFNEAFEETPMLVAVLTYVGYGVLTLFGYLRDFLRYWRIEKCHHATEREEQKDFVSLYQDFENFYTRNLYMRIRDNWNRPICSVPGARVDIMERQSHDYNWSFKYTGNIIKGVINMGSYNYLGFARNTGSCQEAAAKVLEEYGAGVCSTRQEIGNLDKHEELEELVARFLGVEAAMAYGMGFATNSMNIPALVGKGCLILSDELNHASLVLGARLSGATIRIFKHNNMQSLEKLLKDAIVYGQPRTRRPWKKILILVEGIYSMEGSIVRLPEVIALKKKYKAYLYLDEAHSIGALGPTGRGVVEYFGLDPEDVDVMMGTFTKSFGASGGYIGGKKELIDYLRTHSHSAVYATSLSPPVVEQIITSMKCIMGQDGTSLGKECVQQLAENTRYFRRRLKEMGFIIYGNEDSPVVPLMLYMPAKIGAFGREMLKRNIGVVVVGFPATPIIESRARFCLSAAHTKEILDTALKEIDEVGDLLQLKYSRHRLVPLLDRPFDETTYEETED

SEQ ID NO: 55672 - protein, 514 aa, Homo sapiens
KARSQRSRQTSLVSSRREPPPYGYRKGWIPRLLEDFGDGGAFPEIHVAQYPLDMGRKKKMSNALAIQVDSEGKIKYDAIARQGQSKDKVIYSKYTDLVPKEVMNADDPDLQRPDEEAIKEITEKTRVALEKSVSQKVAAAMPVRAADKLAPAQYIRYTPSQQGVAFNSGAKQRVIRMVEMQKDPMEPPRFKINKKIPRGPPSPPAPVMHSPSRKMTVKEQQEWKIPPCISNWKNAKGYTIPLDKRLAADGRGLQTVHINENFAKLAEALYIADRKAREAVEMRAQVERKMAQKEKEKHEEKLREMAQKARERRAGIKTHVEKEDGEARERDEIRHDRRKERQHDRNLSRAAPDKRSKLQRNENRDISEVIALGVPNPRTSNEVQYDQRLFNQSKGMDSGFAGGEDEIYNVYDQAWRGGKDMAQSIYRPSKNLDKDMYGDDLEARIKTNRFVPDKEFSGSDRRQRGREGPVQFEEDPFGLDKFLEEAKQHGGSKRPSDSSRPKEHEHEGKKRRKE

SEQ ID NO: 55673 - protein, 147 aa, Homo sapiens
ITWAADASNTISIIGDYNWTNLTIKCDVYIETPDTGGVFIAGRVNKGGILIRSARGIFFWIFANGSYRVTGDLAGWIIYALGRVEVTAKKWYTLTLTIKGHFTSGMLNDKSLWTDIPVNFPKNGWAAIGTHSFEFAQFDNFLVEATR

SEQ ID NO: 55674 - protein, 790 aa, Homo sapiens
IGLTLLLCAVLLSLASASSDEEGSQDESLDSKTTLTSDESVKDHTTAGRVVAGQIFLDSEESELESSIQEEEDSLKSQEGESVTEDISFLESPNPENKDYEEPKKVRKPALTAIEGTAHGEPCHFPFLFLDKEYDECTSDGREDGRLWCATTYDYKADEKWGFCETEEEAAKRRQMQEAEMMYQTGMKILNGSNKKSQKREAYRYLQKAASMNHTKALERVSYALLFGDYLPQNIQAAREMFEKLTEEGSPKGQTALGFLYASGLGVNSSQAKALVYYTFGALGGNLIAHMVLGYRYWAGIGVLQSCESALTHYRLVANHVASDISLTGGSVVQRIRLPDEVENPGMNSGMLEEDLIQYYQFLAEKGDVQAQVGLGQLHLHGGRGVEQNHQRAFDYFNLAANAGNSHAMAFLGKMYSEGSDIVPQSNETALHYFKKAADMGNPVGQSGLGMAYLYGRGVQVNYDLALKYFQKAAEQGWVDGQLQLGSMYYNGIGVKRDYKQALKYFNLASQGGHILAFYNLAQMHASGTGVMRSCHTAVELFKNVCERGRWSERLMTAYNSYKDGDYNAAVIQYLLLAEQGYEVAQSNAAFILDQREASIVGENETYPRALLHWNRAASQGYTVARIKLGDYHFYGFGTDVDYETAFIHYRLASEQQHSAQAMFNLGYMHEKGLGIKQDIHLAKRFYDMAAEASPDAQVPVFLALCKLGVVYFLQYIRETNIRDMFTQLDMDQLLGPEWDLYLMTIIALLLGTVIAYRQRQHQDMPAPRPPGPRPAPPQQEGPPEQQPPQ

SEQ ID NO: 55675 - protein, 12 aa, Homo sapiens
ITAIKMAITMLQ

SEQ ID NO: 55676 - protein, 42 aa, Homo sapiens
KAEADAGGTAKLPHQRLGCNAGVSPSFQQHCVASLATKASSQ

SEQ ID NO: 55677 - protein, 45 aa, Homo sapiens
IRRELNLPEDGPAPGFLQLLVLIKDYEAAEEEEALLQAILEGNFT

SEQ ID NO: 55678 - protein, 19 aa, Homo sapiens
IDNRTNFDGPSAKRPKTPS

SEQ ID NO: 55679 - protein, 4 aa, Homo sapiens
KSAL

SEQ ID NO: 55680 - protein, 75 aa, Homo sapiens
KYPDVGTREQLARKVHLREEKVEVWFKNRRAKWRRQKRSSSEESENAEKWNKTSSSKASPEKREEEGKSDLDSDS

SEQ ID NO: 55681 - protein, 489 aa, Homo sapiens
MESSRLKELLTMLQLKKDLLIGIFGQERATALLEQVAGSMRDRDLLHNSLLQRKSKLQSLLAQHKDFGAAFEPLQRKLLDLQVRVQAEKGLQRDLPGKQAQLSRLQGLQEEGLDLGAQMEAARPLVQENPNHQHKMDQLSSDFQALQRSLEDLVDRCRQSVQEHCTFSHQLLELRQWIVVTTQKLEAHRGEAGPGDAESQEAEFERLVAEFPEKEAQLSLVEAQGWLVMEKSSPEGAAVVQEELRELAESWRALRLLEESLLSLIRNWHLQRMEVDSGKKMVFTNNIPKSGFLINPMDPIPRHRRRANLLQEEEGSHEDFSQLLRNFGQWLQVENSKLVRIIAMRTSTAEDLRTRKSKLQELEARVPEGQHLFENLLRLGPARGTSDELEDLRYQWMLYKSKLKDSGHLLTQSSPGEPTGFQKTRRWRGLGSLFRRACCVALPLQLLLLLFLLLLFLLPIREEDRSCTLANNFARSFTLMLRYNGPPPT

SEQ ID NO: 55682 - protein, 544 aa, Homo sapiens
VQIRTLVEKIRKKQKGLSVTFDGKREDYFPDLMKWASENGASVEGFEMVNFKEEGFGLRATRDIKAEELFLWVPRKLLMTVESAKNSVLGPLYSQDRILQAMGNIALAFHLLCERASPNSFWQPYIQTLPSEYDTPLYFEEDEVRYLQSTQAIHDVFSQYKNTARQYAYFYKVIQTHPHANKLPLKDSFTYEDYRWAVSSVMTRQNQIPTEDGSRVTLALIPLWDMCNHTNGLITTGYNLEDDRCECVALQDFRAGEQIYIFYGTRSNAEFVIHSGFFFDNNSHDRVKIKLGVSKSDRLYAMKAEVLARAGIPTSSVFALHFTEPPISAQLLAFLRVFCMTEEELKEHLLGDSAIDRIFTLGNSEFPVSWDNEVKLWTFLEDRASLLLKTYKTTIEEDKSVLKNHDLSVRAKMAIKLRLGEKEILEKAVKSAAVNREYYRQQMEEKAPLPKYEESNLGLLESSVGDSRLPLVLRNLEEEAGVQDALNIREAISKAKATENGLVNGENSIPNGTRSENESLNQESKRAVEDAKGSSSDSTAGVKE

SEQ ID NO: 55683 - protein, 1804 aa, Homo sapiens
LAAGRGRENSPRASSVPTTKLFAVPARTTLQPPRAMRPRTKARSPGRALRNPWRGFLPLTLALFVGAGHAQRDPVGRYEPAGGDANRLRRPGGSYPAAAAAKVYSLFREQDAPVAGLQPVERAQPGWGSPRRPTEAEARRPSRAQQSRRVQPPAQTRRSTPLGQQQPAPRTRAAPALPRLGTPQRSGAAPPTPPRGRLTGRNVCGGQCCPGWTTANSTNHCIKPVCEPPCQNRGSCSRPQLCVCRSGFRGARCEEVIPDEEFDPQNSRLAPRRWAERSPNLRRSSAAGEGTLARAQPPAPQSPPAPQSPPAGTLSGLSQTHPSQQHVGLSRTVRLHPTATASSQLSSNALPPGPGLEQRDGTQQAVPLEHPSSPWGLNLTEKIKKIKIVFTPTICKQTCARGHCANSCERGDTTTLYSQGGHGHDPKSGFRIYFCQIPCLNGGRCIGRDECWCPANSTGKFCHLPIPQPDREPPGRGSRPRALLEAPLKQSTFTLPLSNQLASVNPSLVKVHIHHPPEASVQIHQVAQVRGGVEEALVENSVETRPPPWLPASPGHSLWDSNNIPARSGEPPRPLPPAAPRPRGLLGRCYLNTVNGQCANPLLELTTQEDCCGSVGAFWGVTLCAPCPPRPASPVIENGQLECPQGYKRLNLTHCQDINECLTLGLCKDAECVNTRGSYLCTCRPGLMLDPSRSRCVSDKAISMLQGLCYRSLGPGTCTLPLAQRITKQICCCSRVGKAWGSECEKCPLPGTEAFREICPAGHGYTYASSDIRLSMRKAEEEELARPPREQGQRSSGALPGPAERQPLRVVTDTWLEAGTIPDKGDSQAGQVTTSVTHAPAWVTGNATTPPMPEQGIAEIQEEQVTPSTDVLVTLSTPGIDRCAAGATNVCGPGTCVNLPDGYRCVCSPGYQLHPSQAYCTDDNECLRDPCKGKGRCINRVGSYSCFCYPGYTLATSGATQECQDINECEQPGVCSGGQCTNTEGSYHCECDQGYIMVRKGHCQDINECRHPGTCPDGRCVNSPGSYTCLACEEGYRGQSGSCVDVNECLTPGVCAHGKCTNLEGSFRCSCEQGYEVTSDEKGCQDVDECASRASCPTGLCLNTEGSFACSACENGYWVNEDGTACEDLDECAFPGVCPSGVCTNTAGSFSCKDCDGGYRPSPLGDSCEDVDECEDPQSSCLGGECKNTVGSYQCLCPQGFQLANGTVCEDVNECMGEEHCAPHGECLNSHGSFFCLCAPGFVSAEGGTSCQDVDECATTDPCVGGHCVNTEGSFNCLCETGFQPSPESGECVDIDECEDYGDPVCGTWKCENSPGSYRCVLGCQPGFHMAPNGDCIDIDECANDTMCGSHGFCDNTDGSFRCLCDQGFEISPSGWDCVDVNECELMLAVCGAALCENVEGSFLCLCASDLEEYDAQEGHCRPRGAGGQSMSEAPTGDHAPAPTRMDCYSGQKGHAPCSSVLGRNTTQAECCCTQGASWGDACDLCPSEDSAEFSEICPSGKGYIPVEGAWTFGQTMYTDADECVIFGPGLCPNGRCLNTVPGYVCLCNPGFHYDASHKKCEDHDECQDLACENGECVNTEGSFHCFCSPPLTLDLSQQRCMNSTSSTEDLPDHDIHMDICWKKVTNDVCSEPLRGHRTTYTECCCQDGEAWSQQCALCPPRSSEVYAQLCNVARIEAEREAGVHFRPGYEYGPGPDDLHYSIYGPDGAPFYNYLGPEDTVPEPAFPNTAGHSADRTPILESPLQPSELQPHYVASHPGLCCCKTGEEVGTKAVSLPSPPPASHIASRSPQPASKGFRRRSAAS

SEQ ID NO: 55684 - protein, 10 aa, Homo sapiens
VKGAKSYLLW

SEQ ID NO: 55685 - protein, 52 aa, Homo sapiens
ISSSRVLDMPGIKRILTVTILALCLPSPGNAQAQCTNGFDLDRQSGQCLASL

SEQ ID NO: 55686 - protein, 463 aa, Homo sapiens
VWDSHRSFKPMRSGNCRQRYMILTVTILALCLPSPGNAQAQCTNGFDLDRQSGQCLDIDECRTIPEACRGDMMCVNQNGGYLCIPRTNPVYRGPYSNPYSTPYSGPYPAAAPPLSAPNYPTISRPLICRFGYQMDESNQCVDVDECATDSHQCNPTQICINTEGGYTCSCTDGYWLLEGQCLDIDECRYGYCQQLCANVPGSYSCTCNPGFTLNEDGRSCQDVNECATENPCVQTCVNTYGSFICRCDPGYELEEDGVHCSDMDECSFSEFLCQHECVNQPGTYFCSCPPGYILLDDNRSCQDINECEHRNHTCNLQQTCYNLQGGFKCIDPIRCEEPYLRISDNRCMCPAENPGCRDQPFTILYRDMDVVSGRSVPADIFQMQATTRYPGAYYIFQIKSGNEGREFYMRQTGPISATLVMTRPIKGPREIQLDLEMITVNTVINFRGSSVIRLRIYVSQYPF

SEQ ID NO: 55687 - protein, 51 aa, Homo sapiens
VRDHWVHVLVPMGFVIGCYLDRKSDERLTAFRNKSMLFKRELQPSEEVTWK

SEQ ID NO: 55688 - protein, 31 aa, Homo sapiens
RPGQCGRADGYVLEGKELEFYLRKIKAQKGK

SEQ ID NO: 55689 - protein, 371 aa, Homo sapiens
KLRFPAEDEFPDLSAHNNHMAKVLTPELYAELRAKSTPSGFTLDDVIQTGVDNPGHPYIMTVGCVAGDEESYEVFKDLFDPIIEDRHGGYKPSDEHKTDLNPDNLQGGDDLDPNYVLSSRVRTGRSIRGFCLPPHCSRGERRAIEKLAVEALSSLDGDLAGRYYALKSMTEAEQQQLIDDHFLFDKPVSPLLLASGMARDWPDARGIWHNDNKTFLVWVNEEDHLRVISMQKGGNMKEVFTRFCTGLTQIETLFKSKDYEFMWNPHLGYILTCPSNLGTGLRAGVHIKLPNLGKHEKFSEVLKRLRLQKRGTGGVDTAAVGGVFDVSNADRLGFSEVELVQMVVDGVKLLIEMEQRLEQGQAIDDLMPAQK

SEQ ID NO: 55690 - protein, 244 aa, Homo sapiens
LMGVNNNETCRHLSCVLSGLIADLDALDVCGRTEIRNYRREVVEDINKLLKYLDLEEEADTTKAFDLRQNHSILKIEKVLKRMREIKNELLQAQNPSELYLSSKTELQGLIGQLDEVSLEKNPCIREARRRAVIEVQTLITYIDLKEALEKRKLFACEEHPSHKAVWNVLGNLSEIQGEVLSFDGNRTDKNYIRLEELLTKQLLALDAVDPQGEEKCKAARKQAVRLAQNILSYLDLKSDEWEY

SEQ ID NO: 55691 - protein, 21 aa, Homo sapiens
VESDSRLHLESMLLETGHRAL

SEQ ID NO: 55692 - protein, 375 aa, Homo sapiens
VADGLKKQEEEEMDFRSGSPSDNSGAEEMEVSLAKPKHRVTMNEFEYLKLLGKGTFGKVILVKEKATGRYYAMKILKKEVIVAKDEVAHTLTENRVLQNSRHPFLTALKYSFQTHDRLCFVMEYANGGELFFHLSRERVFSEDRARFYGAEIVSALDYLHSEKNVVYRDLKLENLMLDKDGHIKITDFGLCKEGIKDGATMKTFCGTPEYLAPEVLEDNDYGRAVDWWGLGVVMYEMMCGRLPFYNQDHEKLFELILMEEIRFPRTLGPEAKSLLSGLLKKDPKQRLGGGSEDAKEIMQHRFFAGIVWQHVYEKKLSPPFKPQVTSETDTRYFDEEFTAQMITITPPDQDDSMECVDSERRPHFPQFSYSASGTA

SEQ ID NO: 55693 - protein, 148 aa, Homo sapiens
MTNVFLDRVFQECLTYDGEMDYKTYLDFVLALENRKEPAALQYIFKLLDIENKGYLNVFSLNYFFRAIQELMKIHGQDPVSFQDVKDEIFDMVKPKDPLKISLQDLINSNQGDTVTTILIDLNGFWTYENREALVANDSENSADLDDT

SEQ ID NO: 55694 - protein, 263 aa, Homo sapiens
LSSSEDEVDVLLHGTPDQKRKLIRECLTGESESSSEDEFEKEMEAELNSTMKTMEDKLSSLGTGSSSGNGKVATAPTRYYDDIYFDSDSEDEDRAVQVTKKKKKKQHKIPTNDELLYDPEKDNRDQAWVDAQRRGYHGLGPQRSRQQQPVPNSDAVLNCPACMTTLCLDCQRHESYKTQYRAMFVMNCSINKEEVLRYKASENRKKRRVHKKMRSNREDAAEKAETDVEEIYHPVMCTECSTEVAVYDKDEVFHFFNVLASHS

SEQ ID NO: 55695 - protein, 405 aa, Homo sapiens [sequence omitted]

SEQ ID NO: 55696 - protein, 48 aa, Homo sapiens
ICFRNSGFYRYMQKIEARVSADEDLKLSDLLKYYLRESQAAKVILIFF

SEQ ID NO: 55697 - protein, 31 aa, Homo sapiens
IFKLFEDCFILPLVPAVSLFCDQCDSQELLK

SEQ ID NO: 55698 - protein, 20 aa, Homo sapiens
RKKRMRRLKRKRRKMRQRSK

SEQ ID NO: 55699 - protein, 226 aa, Homo sapiens
VHGRRVTLGPADPAPSPGGSGRGRTQRHASKAQAPRTRRTDSMSRTAYTVGALLLLLGTLLPAAEGKKKGSQGAIPPPDKAQHNDSEQTQSPQQPGSRNRGRGQGRGTAMPGEEVLESSQEALHVTERKYLKRDWCKTQPLKQTIHEEGCNSRTIINRFCYGQCNSFYIPRHIRKEEGSFQSCSFCKPKKFTTMMVTLNCPELQPPTKKKRVTRVKQCRCISIDLD

SEQ ID NO: 55700 - protein, 21 aa, Homo sapiens
LRSIEAIGRSCCHDGPGGPGG

SEQ ID NO: 55701 - protein, 24 aa, Homo sapiens
RTAFVNMRKQRLVPMYLGLIYILL

SEQ ID NO: 55702 - protein, 73 aa, Homo sapiens
IIHWIESKASFGDECSHHAYLHDQFWSYWNRFGPGLVIYWYGFIQELDCNRERGILLKACFPTNIVTLCHSIA

SEQ ID NO: 55703 - protein, 69 aa, Homo sapiens
LYHCMSDSEGDFSDPCSCDTSDDKFCLRWLALVALSFIVPCMCCYVPLRMCHRCGEACGCCGGKHKAAG

SEQ ID NO: 55704 - protein, 37 aa, Homo sapiens
RKGRGETRICKIYDSPCLPEAEAMFAINADGVGDAKD

SEQ ID NO: 55705 - protein, 36 aa, Homo sapiens
RILRILKRRRRLQVPRICQRLGSYSFHSGATGTPGG

SEQ ID NO: 55706 - protein, 64 aa, Homo sapiens
KGSARAKEAEGGAATAGPSREQLKADLDELVAAECVYCGELMIRSIDRPFIDPQRYEEEQLSWL

SEQ ID NO: 55707 - protein, 187 aa, Homo sapiens
LRDEELEEIKKETGFSHSQITRLYSRFTSLDKGENGTLSREDFQRIPELAINPLGDRIINAFFPEGEDQVNFRGFMRTLAHFRPIEDNEKSKDVNGPEPLNSRSNKLHFAFRLYDLDKDEKISRDELLQVLRMMVGVNISDEQLGSIADRTIQEADQDGDSAISFTEFVKVLEKVDVEQKMSIRFLH

SEQ ID NO: 55708 - protein, 352 aa, Homo sapiens
LNRVRLSRHKLERWCHMPFFAKTVTGCFVRIGIGNHNSKPVYRVAEITGVVETAKVYQLGGTRTNKGLQLRHGNDQRVFRLEFVSNQEFTESEFMKWKEAMFSAGMQLPTLDEINKKELSIKEALNYKFNDQDIEEIVKEKERFRKAPPNYAMKKTQLLKEKAMAEDLGDQDKAKQIQDQLNELEERAEALDRQRTKNISAISYINQRNREWNIVESEKALVAESHNMKNQQMDPFTRRQCKPTIVSNSRDPAVQAAILAQLNAKYGSGVLPDAPKEMSKGQGKDKDLNSKSASDLSEDLFKVHDFDVKIDLQVPSSESKALAITSKAPPAKDGAPRRSLNLEDYKKRRGLI

SEQ ID NO: 55709 - protein, 62 aa, Homo sapiens
LRRTTEQHVPEVEVQVKRRRTASLSNQECQLYPRRSQQQQVPVVDFQAELRQAFLAETPRGG

SEQ ID NO: 55710 - protein, 201 aa, Homo sapiens
LILCDCDEFRKIKPKNAKQPEREEKRVLGLVLLRGENLVSMTVEGPPPKDTGIARVPLAGAAGGPGVGRAAGRGVPAGVPIPQAPAGLAGPVRGVGGPSQQVMTPQGRGTVAAAAVAATASIAGAPTQYPPGRGTPPPPVGRATPPPGIMAPPPGMRPPMGPPIGLPPARGTPIGMPPPGMRPPPPGIRGPPPPGMRPPRP

SEQ ID NO: 55711 - protein, 49 aa, Homo sapiens
ITAQKCHTLQSMNNHLEAVLKEKRSLRQRLLKPMCQENLPIEAVYHRLD

SEQ ID NO: 55712 - protein, 35 aa, Homo sapiens
IPKILAEESYLYKHDIIMPPLPFTSKVHVQTINAK

SEQ ID NO: 55713 - protein, 24 aa, Homo sapiens
ISNVFAMFDQSQIQEFKEAFNMID

SEQ ID NO: 55714 - protein, 40 aa, Homo sapiens
LEKYKYVENFGLIDGRLTICTISCFFAIVALIWDYMHPFP

SEQ ID NO: 55715 - protein, 333 aa, Homo sapiens
LRLLLPRVRVGEAQETTEEFNREMFWRRLNEAAVTVSREATTLTIVFSQLPLPSPQETQKFCEQVHAAIKAFIAVYYLLPKDQGITLRKLVRGATLDIVDGMAQLMEVLSVTPTQSPENNDLISYNSVWVACQQMPQIPRDNKAAALLMLTKNVDFVKDAHEEMEQAVEECDPYSGLLNDTEENNSDNHNHEDDVLGFPSNQDLYWSEDDQELIIPCLALVRASKACLKKIRMLVAENGKKDQVAQLDDIVDISDEISPSVDDLALSIYPPMCHLTVRINSAKLVSVLKKALEITKASHVTPQPEDSWIPLLINAIDHCMNRIKELTQSELEL

SEQ ID NO: 55716 - protein, 138 aa, Homo sapiens [sequence omitted]

SEQ ID NO: 55717 - protein, 231 aa, Homo sapiens
VGGGGTAGGDRWEGEDEDEDVKDNWDDDDDEKKEEAEVKPEVKISEKKKIAEKIKEKERQQKKRQEEIKKRLEEPEEPKVLTPEEQLADKLRLKKLQEESDLELAKETFGVNNAVYGIDAMNPSSRDDFTEFGKLLKDKITQYEKSLYYASFLEVLVRDVCISLEIDDLKKITNSLTVLCSEKQKQEKQSKAKKKKKGVVPGGGLKATMKDDLADYGGYDGGYVQDYEDFM

SEQ ID NO: 55718 - protein, 355 aa, Homo sapiens
LSSSGRPTASVIPSGVEWIKARVTELNPDKNCIHTDDDEKISYRYLIIALGIQLDYEKIKGLPEGFAHPKIGSNYSVKTVEKTWKALQDFKEGNAIFTFPNTPVKCAGAPQKIMYLSEAYFRKTGKRSKANIIFNTSLGAIFGVKKYADALQEIIQERNLTVNYKKNLIEVRADKQEAVFENLDKPGETQVISYEMLHVTPPMSPPDVLKTSPVADAAGWVDVDKETLQHRRYPNVFGIGDCTNLPTSKTAAAVAAQSGILDRTISVIMKNQTPTKKYDGYTSCPLVTGYNRVILAEFDYKAEPLETFPFDQSKERLSMYLMKADLMPFLYWNMMLRGYWGGPAFLRKLFHLGMS

SEQ ID NO: 55719 - protein, 13 aa, Homo sapiens
RCRGPNQPKLWGK

SEQ ID NO: 55720 - protein, 210 aa, Homo sapiens
IHFHYVIHEHPEHYTIMHKWILTWILPTLLYRSCFHIICLVGTISLACNDMTPEQMATNVNCSSPERHTRSYDYMEGGDIRVRRLFCRTQWYLRIDKRGKVKGTQEMKNNYNIMEIRTVAVGIVAIKGVESEFYLAMNKEGKLYAKKECNEDCNFKELILENHYNTYASAKWTHNGGEMFVALNQKGIPVRGKKTKKEQKTAHFLPMAIT

SEQ ID NO: 55721 - protein, 15 aa, Homo sapiens
TRGRNGGRLEPLPSP

SEQ ID NO: 55722 - protein, 115 aa, Homo sapiens
VELELETETSGPERPPEKPRKHDSGAADLERVTDYAEEKEIQSSNLETAMSVIGDRRSREQKAKQEREKELAKVTIKKEDLELIMTEMEISRAAAERSLREHMGNVVEALIALTN

SEQ ID NO: 55723 - protein, 285 aa, Homo sapiens
VETKQSQTTSIASEDPLQNLCLASQEVLQKAQQSGRSKCLKCGGSRMFYCYTCYVPVENVPIEQIPLVKLPLKIDIIKHPNETDGKSTAIHAKLLAPEFVNIYTYPCIPEYEEKDHEVALIFPGPQSISIKDISFHLQKRIQNNVRGKNDDPDKPSFKRKRTEEQEFCDLNDSKCKGTTLKKIIFIDSTWNQTNKIFTDERLQGLLQVELKTRKTCFWRHQKGKPDTFLSTIEAIYYFLVDYHTDILKEKYRGQYDNLLFFYSFMYQLIKNAKCSGDKETGKLTH

SEQ ID NO: 55724 - protein, 472 aa, Homo sapiens
IVPGLPSGWAKFLDPITGTFRYYHSPTNTVHMYPPEMAPSSAPPSTPPTHKAKPQIPAERDREPSKLKRSYSSPDITQAIQEEEKRKPTVTPTVNRENKPTCYPKAEISRLSASQIRNLNPVFGGSGPALTGLRNLGNTCYMNSILQCLCNAPHLADYFNRNCYQDDINRSNLLGHKGEVAEEFGIIMKALWTGQYRYISPKDFKITIGKINDQFAGYSQQDSQELLLFLMDGLHEDLNKADNRKRYKEENNDHLDDFKAAEHAWQKHKQLNESIIVALFQGQFKSTVQCLTCHKKSRTFEAFMYLSLPLASTSKCTLQDCLRLFSKEEKLTDNNRFYCSHCRARRDSLKKIEIWKLPPVLLVHLKRFSYDGRWKQKLQTSVDFPLENLDLSQYVIGPKNNLKKYNLFSVSNHYGGLDGGHYTAYCKNAARQRWFKFDDHEVSDISVSSVKSSAAYILFYTSLGPRVTDVAT

SEQ ID NO: 55725 - protein, 353 aa, Homo sapiens
IMALPFRKDLEKYKDLDEDELLGNLSETELKQLETVLDDLDPENALLPAGFRQKNQTSKSTTGPFDREHLLSYLEKEALEHKDREDYVPYTGEKKGKIFIPKQKPVQTFTEEKVSLDPELEEALTSASDTELCDLAAILGMHNLITNTKFCNIMGSSNGVDQEHFSNVVKGEKILPVFDEPPNPTNVEESLKRTKENDAHLVEVNLNNIKNIPIPTLKDFAKALETNTHVKCFSLAATRSNDPVATAFAEMLKVNKTLKSLNVESNFITGVGILALIDALRDNETLAELKIDNQRQQLGTAVELEMAKMLEENTNILKFGYQFTQQGPRTRAANAITKNNDLVRKRRVEGDHQ

SEQ ID NO: 55726 - protein, 672 aa, Homo sapiens
IGTDKELSDLLDFSAMFSPPVNSGKTRPTTLGSSQFSGSGIDERGGTTSWGTSGQPSPSYDSSRGFTDSPHYSDHLNDSRLGAHEGLSPTPFMNSNLMGKTSERGSFSLYSRDTGLPGCQSSLLRQDLGLGSPAQLSSSGKPGTAYYSFSATSSRRRPLHDSAALDPLQAKKVRKVPPGLPSSVYAPSPNSDDFNRESPSYPSPKPPTSMFASTFFMQDGTHNSSDLWSSSNGMSQPGFGGILGTSTSHMSQSSSYGNLHSHDRLSYPPHSVSPTDINTSLPPMSSFHRGSTSSSPYVAASHTPPINGSDSILGTRGNAAGSSQTGDALGKALASIYSPDHTSSSFPSNPSTPVGSPSPLTGTSQWPRPGGQAPSSPSYENSLHSLQSRMEDRLDRLDDAIHVLRNHAVGPSTSLPAGHSDIHSLLGPSHNAPIGSLNSNYGGSSLVASSRSASMVGTHREDSVSLNGNHSVLSSTVTTSSTDLNHKTQENYRGGLQSQSGTVVTTEIKTENKEKDENLHEPPSSDDMKSDDESSQKDIKVSSRGRTSSTNEDEDLNPEQKIEREKERRMANNARERLRVRDINEAFKELGRMCQLHLKSEKPQTKLLILHQAVAVILSLEQQVRERNLNPKAACLKRREEEKVSAVSAEPPTTLPGTHPGLSETTNPMGHM

SEQ ID NO: 55727 - protein, 47 aa, Homo sapiens
VLAAPRLRAPSSRGLGAAEFGGAAGNVEAPGETFAQRKIHLQIARQR

SEQ ID NO: 55728 - protein, 34 aa, Homo sapiens
MHLFHQVCVDQWLITNKKCPICRVDIEAQLPSES

SEQ ID NO: 55729 - protein, 75 aa, Homo sapiens
KNVPNLHVMKAMQSLKSRGYMKEQFAWRHFYWYLTNEGIHHLRDYLHLPPEIVPATLCHSRPETGRPRPKGLEGE

SEQ ID NO: 55730 - protein, 183 aa, Homo sapiens
LFRFSEDAFNTTFISTIGIDFKIRTIELDGKKIKLQIWDTAGQERFRTITTAYYRGAMGIMLVYDITNEKSFDNIKNWIRNIEEHASSDVERMILGNKCDMNDKRQVSKERGEKLAIDYGIKFLETSAKSSANVEEAFFTLARDIMTKLNRKMNDSNSAGAGGPVKITENRSKKTSFFRCSLL

SEQ ID NO: 55731 - protein, 27 aa, Homo sapiens
RWTSENNRKPIKEDQFLSLLATLMNSF

SEQ ID NO: 55732 - protein, 7 aa, Homo sapiens
LEDYAKL

SEQ ID NO: 55733 - protein, 19 aa, Homo sapiens
KAYILFYVEHQAKAGSDKL

SEQ ID NO: 55734 - protein, 509 aa, Homo sapiens
LPPPFPGLEPESEGAAGGSEPEAGDSDTEGEDIFTGAAVVSKHQSPKITTSLLPINNGSKENGIHEEQDQEPQDLFADATVELSLDSTQNNQKKVLAKTLISLPPQEATNSSKPQPTYEELEEEEQEDQFDLTVGITDPEKIGDGMNAYVAYKVTTQTSLPLFRSKQFAVKRRFSDFLGLYEKLSEKHSQNGFIVPPPPEKSLIGMTKVKVGKEDSSSAEFLEKRRAALERYLQRIVNHPTMLQDPDVREFLEKEELPRAVGTQTLSGAGLLKMFNKATDAVSKMTIKMNESDIWFEEKLQEVECEEQRLRKLHAVVETLVNHRKELALNTAQFAKSLAMLGSSEDNTALSRALSQLAEVEEKIEQLHQEQANNDFFLLAELLSDYIRLLAIVRAAFDQRMKTWQRWQDAQATLQKKREAEARLLWANKPDKLQQAKDEILEWESRVTQYERDFERISTVVRKEVIRFEKEKSKDFKNHVIKYLETLLYSQQQLAKYWEAFLPEAKAIS

SEQ ID NO: 55735 - protein, 281 aa, Homo sapiens
IKKKMQMLKLDKENALDRAEQAEADKKAAEDRSKQLEDELVSLQKKLKGTEDELDKYSEALKDAQEKLELAEKKATDAEADVASLNRRIQLVEEELDRAQERLATALQKLEEAEKAADESERGMKVIESRAQKDEEKMEIQEIQLKEAKHIAEDADRKYEEVARKLVIIESDLERAEERAELSEGKCAELEEELKTVTNNLKSLEAQAEKYSQKEDRYEEEIKVLSDKLKEAETRAEFAERSVTKLEKSIDDLEEKVAHAKEENLSMHQMLDQTLLELNNM

SEQ ID NO: 55736 - protein, 120 aa, Homo sapiens
VARKLVIIESDLERAEERAELSEGQVRQLEEQLRIMDQTLKALMAAEDKYSQKEDRYEEEIKVLSDKLKEAETRAEFAERSVTKLEKSIDDLEEKVAHAKEENLSMHQMLDQTLLELNNM

SEQ ID NO: 55737 - protein, 492 aa, Homo sapiens
LAGGLRGAAPAQSPAAPDPEASPLAEPPQEQSLAPWSPQTPAPPCSRCFARAIESSRDLLHRIKDEVGAPGIVVGVSVDGKEVWSEGLGYADVENRVPCKPETVMRIASISKSLTMVALAKLWEAGKLDLDIPVQHYVPEFPEKEYEGEKVSVTTRLLISHLSGIRHYEKDIKKVKEEKAYKALKMMKENVAFEQEKEGKSNEKNDFTKFKTEQENEAKCRNSKPGKKKNDFEQGELYLREKFENSIESLRLFKNDPLFFKPGSQFLYSTFGYTLLAAIVERASGCKYLDYMQKIFHDLDMLTTVQEENEPVIYNRARFYVYNKKKRLVNTPYVDNSYKWAGGGFLSTVGDLLKFGNAMLYGYQVGLFKNSNENLLPGYLKPETMVMMWTPVPNTEMSWDKEGKYAMAWGVVERKQTYGSCRKQRHYASHTGGAVGASSVLLVLPEELDTETINNKVPPRGIIVSIICNMQSVGLNSTALKIALEFDKDRSD

SEQ ID NO: 55738 - protein, 40 aa, Homo sapiens
TSTTTSLKLSLLEILVLERVISCLDLLEMSLIWKARAPLE

SEQ ID NO: 55739 - protein, 26 aa, Homo sapiens
TSTTTSLKLSLLEILVLERVISHMKM

SEQ ID NO: 55740 - protein, 49 aa, Homo sapiens
KTVWQLSDSSPIDHLNFHKPDFSELTLNGSLEERIFFTNMVTCSQVHFK

SEQ ID NO: 55741 - protein, 42 aa, Homo sapiens
RPAPEELMGHPFIVQFNDGNAAVVSMWVCRALEERRSQQGPP

SEQ ID NO: 55742 - protein, 644 aa, Homo sapiens
KQMVMSLRVSELQVLLGYAGRNKHGRKHELLTKALHLLKAGCSPAVQMKIKELYRRRFPQKIMTPADLSIPNVHSSPMPATLSPSTIPQLTYDGHPASSPLLPVSLLGPKHELELPHLTSALHPVHPDIKLQKLPFYDLLDELIKPTSLASDNSQRFRETCFAFALTPQQVQQISSSMDISGTKCDFTVQVQLRFCLSETSCPQEDHFPPNLCVKVNTKPCSLPGYLPPTKNGVEPKRPSRPINITSLVRLSTTVPNTIVVSWTAEIGRNYSMAVYLVKQLSSTVLLQRLRAKGIRNPDHSRALIKEKLTADPDSEIATTSLRVSLLCPLGKMRLTIPCRALTCSHLQCFDATLYIQMNEKKPTWVCPVCDKKAPYEHLIIDGLFMEILKYCTDCDEIQFKEDGTWAPMRSKKEVQEVSASYNGVDGCLSSTLEHQVASHHQSSNKNKKVEVIDLTIDSSSDEEEEEPSAKRTCPSLSPTSPLNNKGILSLPHQASPVSRTPSLPAVDTSYINTSLIQDYRHPFHMTPMPYDLQGLDFFPFLSGDNQHYNTSLLAAAAAAVSDDQDLLHSSRFFPYTSSQMFLDQLSAGGSTSLPTTNGSSSGSNSSLVSSNSLRESHSHTVTNRSSTDTASIFGIIPDIISLD

SEQ ID NO: 55743 - protein, 514 aa, Homo sapiens
VNHTTVTNSTPLRAACFDGRLDIVKYLVENNANISIANKYDNTCLMIAAYKGHTDVVRYLLEQRADPNAKAHCGATALHFAAEAGHIDIVKELIKWRAAIVVNGHGMTPLKVAAESCKADVVELLLSHADCDRRSRIEALELLGASFANDRENYDIIKTYHYLYLAMLERFQDGDNILEKEVLPPIHAYGNRTECRNPQELESIRQDRDALHMEGLIVRERILGADNIDVSHPIIYRGAVYADNMEFEQCIKLWLHALHLRQKGNRNTHKDLLRFAQVFSQMIHLNETVKAPDIECVLRCSVLEIEQSMNRVKNISDADVHNAMDNYECNLYTFLYLVCISTKTQCSEEDQCKINKQIYNLIHLDPRTREGFTLLHLAVNSNTPVDDFHTNDVCSFPNALVTKLLLDCGAEVNAVDNEGNSALHIIVQYNRPISDFLTLHSIIISLVEAGAHTDMTNKQNKTPLDKSTTGVSEILLKTQMKMSLKCLAARAVRANDINYQDQIPRTLEEFVGFH

SEQ ID NO: 55744 - protein, 149 aa, Homo sapiens
VSACEVFRFYKLVTLKGLIEPISMIVPRRSDSYQEDIYPMTPGTEPALTPDEWLGGINRDPVLMSLKEGYKKSSKMVFKAPIKEKKSVVVNGIDLLENVPPRTENELLRMFFRQQDEIRRLKEELAQKDIRIRQLQLELKNLRNSPKNC

SEQ ID NO: 55745 - protein, 455 aa, Homo sapiens
VLTAEQILQHMVECIREVNEVIQNPATITRILLSHFNWDKEKLMERYFDGNLEKLFAECHVINPSKKSRTRQMNTRSSAQDMPCQICYLNYPNSYFTGLECGHKFCMQCWSEYLTTKIMEEGMGQTISCPAHGCDILVDDNTVMRLITDSKVKLKYQHLITNSFVECNRLLKWCPAPDCHHVVKVQYPDAKPVRCKCGRQFCFNCGENWHDPVKCKWLKKWIKKCDDDSETSNWIAANTKECPKCHVTIEKDGGCNHMVCRNQNCKAEFCWVCLGPWEPHGSAWYNCNRYNEDDAKAARDAQERSRAALQRYLFYCNRYMNHMQSLRFEHKLYAQVKQKMEEMQQHNMSWIEVQFLKKAVDVLCQCRATLMYTYVFAFYLKKNNQSIIFENNQADLENATEVLSGYLERDISQDSLQDIKQKVQDKYRYCESRRRVLLQHVHEGYEKDLWEYIED

SEQ ID NO: 55746 - protein, 33 aa, Homo sapiens
LEDSESSYEPDELTKEMAHLEGLMKDLNAITTA

SEQ ID NO: 55747 - protein, 51 aa, Homo sapiens
LEHVQLFDLMRRMLEFDPAQRITLAEALLHPFFAGLTPEERSFHTSRNPSR

SEQ ID NO: 55748 - protein, 82 aa, Homo sapiens
VWSFGILLWEIYSFGRVPYPRIPLKDVVPRVEKGYKMDAPDGCPPAVYEVMKNCWHLDAAMRPSFLQLREQLEHIKTHELHL

SEQ ID NO: 55749 - protein, 521 aa, Homo sapiens
VGAALGALWFCLTGALEVQVPEDPVVALVGTDATLCCSFSPEPGFSLAQLNLIWQLTDTKQLVHSFAEGQDQGSAYANRTALFPDLLAQGNASLRLQRVRVADEGSFTCFVSIRDFGSAAVSLQVAAPYSKPSMTLEPNKDLRPGDTVTITCSSYQGYPEAEVFWQDGQGVPLTGNVTTSQMANEQGLFDVHSILRVVLGANGTYSCLVRNPVLQQDAHSSVTITPQRSPTGAVEVQVPEDPVVALVGTDATLRCSFSPEPGFSLAQLNLIWQLTDTKQLVHSFTEGRDQGSAYANRTALFPDLLAQGNASLRLQRVRVADEGSFTCFVSIRDFGSAAVSLQVAAPYSKPSMTLEPNKDLRPGDTVTITCSSYRGYPEAEVFWQDGQGVPLTGNVTTSQMANEQGLFDVHSVLRVVLGANGTYSCLVRNPVLQQDAHGSVTITGQPMTFPPEALWVTVGLSVCLIALLVALAFVCWRKIKQSCEEENAGAEDQDGEGEGSKTALQPLKHSDSKEDDGQEIA

SEQ ID NO: 55750 - protein, 30 aa, Homo sapiens
LEASPITFPPPCAPERPPISPVPGARQAGL

SEQ ID NO: 55751 - protein, 154 aa, Homo sapiens
LAQTYLARNMSERSAMAAVLAMRDLCRLLEVSPGPQLAQHVYPFSSLQCFASLQPLVQAAVLPRAEARLLALHNVSFMELLSAHRRDRQGGLKKYSRYLSLQTTTLPPAQPAFNLQALGTYFEGLLEGPALARAEGVSTPLAGRGLAERASQQS

SEQ ID NO: 55752 - protein, 55 aa, Homo sapiens
MVPGTLSGAGRAQACTSKVGWDQAAPRPSIQVLPWAPVALQTLRAKVLCCFLVPP

SEQ ID NO: 55753 - protein, 198 aa, Homo sapiens
RFRFCGDLDCPDWVLAEISTLAKMSSVKLRLLCSQVLKELLGQGIDYEKILKLTADAKFESGDVKATVAVLSFILSSAAKHSVDGESLSSELQQLGLPKEHAASLCRCYEEKQSPLQKHLRVCSLRMNRLAGVGWRVDYTLSSSLLQSVEEPMVHLRLEVAAAPGTPAQPVAMSLSADKFQVLLAELKQAQTLMSSLG

SEQ ID NO: 55754 - protein, 44 aa, Homo sapiens
MNHFHQRRELDFKHMMQNYLRQQILFYQRVGQQLEKTLRMYDNL

SEQ ID NO: 55755 - protein, 258 aa, Homo sapiens
LERLEDTKNNNLNGTTEEVTSEEEEEEEEMAEDIEDLDHYEMKEEEPISGKKSEDEGIEKENLAILEKIRKTQRQDHLNGAVSGSVQASDRLMKELRDIYRSQSYKTGIYSVELINDSLYDWHVKLQKVDPDSPLHSDLQILKEKEGIEYILLNFSFKDNFPFDPPFVRVVLPVLSGGYVLGGGALCMELLTKQGWSSAYSIESVIMQINATLVKGKARVQFGANKNQYNLARAQQSYNSIVQIHEKNGWYTPPKEDG

SEQ ID NO: 55756 - protein, 201 aa, Homo sapiens
IEKENLAILEKIRKTQRQDHLNGAVSGSVQASDRLMKELRDIYRSQSYKTGIYSVELINDSLYDWHVKLQKVDPDSPLHSDLQILKEKEGIEYILLNFSFKDNFPFDPPFVRVVLPVLSGGYVLGGGALCMELLTKQGWSSAYSIESVIMQINATLVKGKARVQFGANKNQYNLARAQQSYNSIVQIHEKNGWYTPPKEDG

SEQ ID NO: 55757 - protein, 312 aa, Homo sapiens
KAEELHYPLGERRSDYDREALLGVQEDVDEYVKLGHEEQQKRLQAIIKKIDLDSDGFLTESELSSWIQMSFKHYAMQEAKQQFVEYDKNSDDTVTWDEYNIQMYDRVIDFDENTALDDAEEESFRKEFAICKKQSFCFWLLRFNLHLKDKKRFEKANQDSGPGLSLEEFIAFEHPEEVDYMTEFVIQEALEEHDKNGDGFVSLEEFLGDYRWDPTANEDPEWILVEKDRFVNDYDKDNDGRLDPQELLPWVVPNNQGIAQEEALHLIDEMDLNGDKKLSEEEILENPDLFLTSEATDYGRQLHDDYFYHDEL

SEQ ID NO: 55758 - protein, 49 aa, Homo sapiens
MPLPGSGETPTVDTIDSYMNRLHSIILANPQDNENFIATVREVVNRLDR

SEQ ID NO: 55759 - protein, 104 aa, Homo sapiens
KSNFKYMYWTMLQQLTHHSVNGCNLRPGDLLASGTISGPEPENFGSMLELSWKGTKPIDLGNGQTRKFLLDGDEVIITGYCQGDGYRIGFGQCAGKVLPALLPS

SEQ ID NO: 55760 - protein, 353 aa, Homo sapiens
LGAFHNPKQVTRGFTGGVQTVTLIPGDGIGPEISAAVMKIFDAAKAPIQWEERNVTAIQGPGGKWMIPSEAKESMDKNKMGLKGPLKTPIAAGHPSMNLLLRKTFDLYANVRPCVSIEGYKTPYTDVNIVTIRENTEGEYSGIEHVIVDGVVQSIKLITEGASKRIAEFAFEYARNNHRSNVTAVHKANIMRMSDGLFLQKCREVAESCKDIKFNEMYLDTVCLNMVQDPSQFDVLVMPNLYGDILSDLCAGLIGGLGVTPSGNIGANGVAIFESVHGTAPDIAGKDMANPTALLLSAVMMLRHMGLFDHAARIEAACFATIKDGKSLTKDLGGNAKCSDFTEEICRRVKDLD

SEQ ID NO: 55761 - protein, 4 aa, Homo sapiens
RIRL

SEQ ID NO: 55762 - protein, 170 aa, Homo sapiens [sequence omitted]

SEQ ID NO: 55763 - protein, 95 aa, Homo sapiens
LMSGLRVAFPDTRKTYCFDAFPSIDKISKVTSPVLVIHGTEDEVIDFSHGLAMYERCPRAVEPLWVEGAGHNDIELYAQYLERLKQFISHELPNS

SEQ ID NO: 55764 - protein, 24 aa, Homo sapiens
LDTEDHKAKIFQVVPIPVVKKKKL

SEQ ID NO: 55765 - protein, 38 aa, Homo sapiens
TLNEVYTILSHCDPGPVPIIVSRHPDPQKEEMEAQEVK

SEQ ID NO: 55766 - protein, 121 aa, Homo sapiens
IFRMTDTAEAVPKFEEMFASRFTENDKEYQEYLKRPPESPPIVEEWNSRAGGNQRNRGNRLQDNRQFRGRDNRWGWPSDNRSNQWHGRSWGNNYPQHRQEPYYPQQYGHYGYNQRPPYGYY

SEQ ID NO: 55767 - protein, 330 aa, Homo sapiens
ISITENVLHFKAQGHGAKGDNVYEFHLEFLDLVKPEPVYKLTQRQVNITVQKKVSQWWERLTKQEKRPLFLAPDFDRWLDESDAEMELRAKEEERLNKLRLESEGSPETLTNLRKGYLFMYNLVQFLGFSWIFVNLTVRFCILGKESFYDTFHTVADMMYFCQMLAVVETINAAIGVTTSPVLPSLIQLLGRNFILFIIFGTMEEMQNKAVVFFVFYLWSAIEIFRYSFYMLTCIDMDWKVLTWLRYTLWIPLYPLGCLAEAVSVIQSIPIFNETGRFSFTLPYPVKIKVRFSFFLQIYLIMIFLGLYINFRHLYKQRRRRYGQKKKKIH

SEQ ID NO: 55768 - protein, 24 aa, Homo sapiens
LEDYDKAETEASKGRGMVGPGVEL

SEQ ID NO: 55769 - protein, 73 aa, Homo sapiens
LSSNQELQHRGAVVVLNMVEASREIASTLMESEMMEILSVLAKGDHSPVTRAAAACLDKAVEYGLIQPNQDGE

SEQ ID NO: 55770 - protein, 23 aa, Homo sapiens
RSPLERSLEQKNNPDYNWNVRKT

SEQ ID NO: 55771 - protein, 30 aa, Homo sapiens
KAEEPDNFSSKVVQRGREFFDSNGNFLYRI

SEQ ID NO: 55772 - protein, 1637 aa, Homo sapiens
LDNERLTAEEMDERRRQNVAYEYLCHLEEAKRWMEACLGEDLPPTTELEEGLRNGVYLAKLGNFFSPKVVSLKKIYDREQTRYKATGLHFRHTDNVIQWLNAMDEIGLPKIFYPETTDIYDRKNMPRCIYCIHALSLYLFKLGLAPQIQDLYGKVDFTEEEINNMKTELEKYGIQMPAFSKIGGILANELSVDEAALHAAVIAINEAIDRRIPADTFAALKNPNAMLVNLEEPLASTYQDILYQAKQDKMTNAKNRTENSERERDVYEELLTQAEIQGNINKVNTFSALANIDLALEQGDALALFRALQSPALGLRGLQQQNSDWYLKQLLSDKQQKRQSGQTDPLQKEELQSGVDAANSAAQQYQRRLAAVALINAAIQKGVAEKTVLELMNPEAQLPQVYPFAADLYQKELATLQRQSPEHNLTHPELSVAVEMLSSVALINRALESGDVNTVWKQLSSSVTGLTNIEEENCQRYLDELMKLKAQAHAENNEFITWNDIQACVDHVNLVVQEEHERILAIGLINEALDEGDAQKTLQALQIPAAKLEGVLAEVAQHYQDTLIRAKREKAQEIQDESAVLWLDEIQGGIWQSNKDTQEAQKFALGIFAINEAVESGDVGKTLSALRSPDVGLYGVIPECGETYHSDLAEAKKKKLAVGDNNSKWVKHWVKGGYYYYHNLETQEGGWDEPPNFVQNSMQLSREEIQSSISGVTAAYNREQLWLANEGLITRLQARCRGYLVRQEFRSRMNFLKKQIPAITCIQSQWRGYKQKKAYQDRLAYLRSHKDEVVKIQSLARMHQARKRYRDRLQYFRDHINDIIKIQAFIRANKARDDYKTLINAEDPPMVVVRKFVHLLDQSDQDFQEELDLMKMREEVITLIRSNQQLENDLNLMDIKIGLLVKNKITLQDVVSHSKKLTKKNKEQLSDMMMINKQKGGLKALSKEKREKLEAYQHLFYLLQTNPTYLAKLIFQMPQNKSTKFMDSVIFTLYNYASNQREEYLLLRLFKTALQEEIKSKVDQIQEIVTGNPTVIKMVVSFNRGARGQNALRQILAPVVKEIMDDKSLNIKTDPVDIYKSWVNQMESQTGEASKLPYDVTPEQALAHEEVKTRLDSSIRNMRAVTDKFLSAIVSSVDKIPYGMRFIAKVLKDSLHEKFPDAGEDELLKIIGNLLYYRYMNPAIVAPDAFDIIDLSAGGQLTTDQRRNLGSIAKMLQHAASNKMFLGDNAHLSIINEYLSQSYQKFRRFFQTACDVPELQDKFNVDEYSDLVTLTKPVIYISIGEIINTHTLLLDHQDAIAPEHNDPIHELLDDLGEVPTIESLIGESSGNLNDPNKEALAKTEVSLTLTNKFDVPGDENAEMDARTILLNTKRLIVDVIRFQPGETLTEILETPATSEQEAEHQRAMQRRAIRDAKTPDKMKKSKSVKEDSNLTLQEKKEKIQTGLKKLTELGTVDPKNKYQELINDIARDIRNQRRYRQRRKAELVKLQQTYAALNSKATFYGEQVDYYKSYIKTCLDNLASKGKVSKKPREMKGKKSKKISLKYTAARLHEKGVLLEIEDLQVNQFKNVIFEISPTEEVGDFEVKAKFMGVQMETFMLHYQDLLQLQYEGVAVMKLFDRAKVNVNLLIFLLNKKFYGK

SEQ ID NO: 55773 - protein, 78 aa, Homo sapiens
RQQPPWKDEKHPGFRLTSALNRTNSDSALHTSALSTKPQDPYGGGGQSAWPAPYMGFCDGENNGHGEDSVPVRTPSIL

SEQ ID NO: 55774 - protein, 45 aa, Homo sapiens
VDTPFPLEEELQIEPLSLDGLNMLSDSSMGLLDPSVEETFRADRL

SEQ ID NO: 55775 - protein, 470 aa, Homo sapiens
KAGWIKKSSGGLLGFWKDRYLLLCQAQLLVYENEDDQKCVETVELGSYEKCQDLRALLKRKHRFILLRSPGNKVSDIKFQAPTGEEKESWIKALNEGINRGKNKAFDEVKVDKSCALEHVTRDRVRGGQRRRPPTRVHLKEVASAASDGLLRLDLDVPDSGPPVFAPSNHVSEAQPRETPRPLMPPTKPFLAPETTSPGDRVETPVGERAPTPVSASSEVSPESQEDSETPAEEDSGSEQPPNSVLPDKLKVSWENPSPQEAPAAESAEPSQAPCSETSEAAPREGGKPPTPPPKILSEKLKASMGEMQASGPPAPGTVQVSVNGMDDSPEPAKPSQAEGTPGTPPKDATTSTALPPWDLPPQFHPRCSSLGDLLGEGPRHPLQPRERLYRAQLEVKVASEQTEKLLNKVLGSEPAPVSAETLLSQAVEQLRQATQVLQEMRDLGELSQEAPGLREKRKELVTLYRRSAP

SEQ ID NO: 55776 - protein, 37 aa, Homo sapiens
ILSLRLFLPPLRTKDVLLGGDLPSSLSFIISPPPPAS

SEQ ID NO: 55777 - protein, 338 aa, Homo sapiens
IECVVCGDKSSGKHYGQFTCEGCKSFFKRSVRRNLSYTCRANRNCPIDQHHRNQCQYCRLKKCLKVGMRREAVQRGRMPPTQPTHGQFALTNGDPLNCHSYLSGYISLLLRAEPYPTSRFGSQCMQPNNIMGIENICELAARMLFSAVEWARNIPFFPDLQITDQVALLRLTWSELFVLNAAQCSMPLHVAPLLAAAGLHASPMSADRVVAFMDHIRIFQEQVEKLKALHVDSAEYSCLKAIVLFTSDACGLSDVAHVESLQEKSQCALEEYVRSQYPNQPTRFGKLLLRLPSLRTVSSSVIEQLFFVRLVGKTPIETLIRDMLLSGSSFNWPYMAIQ

SEQ ID NO: 55778 - protein, 38 aa, Homo sapiens
LCRIKIRQCIGLQNLKLLDELPIAKVMKDYLKHKFDDI

SEQ ID NO: 55779 - protein, 483 aa, Homo sapiens
KFTKIFINNEWHESKSGKKFATCNPSTREQICEVEEGDKPDVDKAVEAAQVAFQRGSPWRRLDALSRGRLLHQLADLVERDRATLAALETMDTGKPFLHAFFIDLEGCIRTLRYFAGWADKIQGKTIPTDDNVVCFTRHEPIGVCGAITPWNFPLLMLVWKLAPALCCGNTMVLKPAEQTPLTALYLGSLIKEAGFPPGVVNIVPGFGPTVGAAISSHPQINKIAFTGSTEVGKLVKEAASRSNLKRVTLELGGKNPCIVCADADLDLAVECAHQGVFFNQGQCCTAASRVFVEEQVYSEFVRRSVEYAKKRPVGDPFDVKTEQGPQIDQKQFDKILELIESGKKEGAKLECGGSAMEDKGLFIKPTVFSEVTDNMRIAKEEIFGPVQPILKFKSIEEVIKRANSTDYGLTAAVFTKNLDKALKLASALESGTVWINCYNALYAQAPFGGFKMSGNGRELGEYALAEYTEVKTVTIKLGDKNP

SEQ ID NO: 55780 - protein, 4 aa, Homo sapiens
VDEN

SEQ ID NO: 55781 - protein, 381 aa, Homo sapiens
VAGHVLLEASEPVALRALRLEAQGRATAAWGPSTCPRASASTAALAVFSEVEYLNVRLSLREPPAGEGIILLQPGKHEFPFRFQLPSEPLVTSFTGKYGSIQYCVRAVLERPKVPDQSVKRELQVVSHVDVNTPALLTPVLKTQEKMVGCWFFTSGPVSLSAKIERKGYCNGEAIPIYAEIENCSSRLIVPKAAIFQTQTYLASGKTKTIRHMVANVRGNHIASGSTDTWNGKTLKIPPVTPSILDCCIIRVDYSLAVYIHIPGAKKLMLELPLVIGTIPYNGFGSRNSSIASQFSMDMSWLTLTLPEQPEAPPNYADVVSEEEFSRHIPPYPQPPNCEGEVCCPVFACIQEFRFQPPPLYSEVDPHPSDVEESQPVSFIL

SEQ ID NO: 55782 - protein, 63 aa, Homo sapiens
LDPSASSSSLPLPDRHSGHKAENGPGPGVLVLRASFDERQPYAHMNGGRKNERALPLPQSSTC

SEQ ID NO: 55783 - protein, 25 aa, Homo sapiens
MKEKQDKICLMAGSSRKEAESSPFV

SEQ ID NO: 55784 - protein, 43 aa, Homo sapiens
KKTFEINPRHPLIRDMLRRIKEDEDDKTVLDLAVVLFETAMQQ

SEQ ID NO: 55785 - protein, 21 aa, Homo sapiens
LVFLCRHVYDFRHGRILKNPQ

SEQ ID NO: 55786 - protein, 114 aa, Homo sapiens
VLAPEKLSASTRRRYETQVQTRLQTSLANLHQKSSEIEILAVDLPKETILQFLSLEWDADEQAFNTTVKQLLSRLPKQRYLKLVCDEIYNIKVEKKVSVLFLYSYRDDYYRILF

SEQ ID NO: 55787 - protein, 71 aa, Homo sapiens [sequence omitted]

SEQ ID NO: 55788 - protein, 1254 aa, Homo sapiens
RMAAQVTLEDALSNVDLLEELPLPDQQPCIEPPPSSLLYQPNFNTNFEDRNAFVTGIARYIEQATVHSSMNEMLEEGQEYAVMLYTWRSCSRAIPQVKCNEQPNRVEIYEKTVEVLEPEVTKLMNFMYFQRNAIERFCGEVRRLCHAERRKDFVSEAYLITLGKFINMFAVLDELKNMKCSVKNDHSAYKRAAQFLRKMADPQSIQESQNLSMFLANHNKITQSLQQQLEVISGYEELLADIVNLCVDYYENRMYLTPSEKHMLLKVMGFGLYLMDGSVSNIYKLDAKKRINLSKIDKYFKQLQVVPLFGDMQIELARYIKTSAHYEENKSRWTCTSSGSSPQYNICEQMIQIREDHMRFISELARYSNSEVVTGSGRQEAQKTDAEYRKLFDLALQGLQLLSQWSAHVMEVYSWKLVHPTDKYSNKDCPDSAEEYERATRYNYTSEEKFALVEVIAMIKGLQVLMGRMESVFNHAIRHTVYAALQDFSQVTLREPLRQAIKKKKNVIQSVLQAIRKTVCDWETGHEPFNDPALRGEKDPKSGFDIKVPRRAVGPSSTQLYMVRTMLESLIADKSGSKKTLRSSLEGPTILDIEKFHRESFFYTHLINFSETLQQCCDLSQLWFREFFLELTMGRRIQFPIEMSMPWILTDHILETKEASMMEYVLYSLDLYNDSAHYALTRFNKQFLYDEIEAEVNLCFDQFVYKLADQIFAYYKVMAGSLLLDKRLRSECKNQGATIHLPPSNRYETLLKQRHVQLLGRSIDLNRLITQRVSAAMYKSLELAIGRFESEDLTSIVELDGLLEINRMTHKLLSRYLTLDGFDAMFREANHNVSAPYGRITLHVFWELNYDFLPNYCYNGSTNRFVRTVLPFSQEFQRDKQPNAQPQYLHGSKALNLAYSSIYGSYRNFVGPPHFQVICRLLGYQGIAVVMEELLKVVKSLLQGTILQYVKTLMEVMPKICRLPRHEYGSPGILEFFHHQLKDIVEYAELKTVCFQNLREVGNAILFCLLIEQSLSLEEVCDLLHAAPFQNILPRVHVKEGERLDAKMKRLESKYAPLHLVPLIERLGTPQQIAIAREGDLLTKERLCCGLSMFEVILTRIRSFLDDPIWRGPLPSNGVMHVDECVEFHRLWSAMQFVYCIPVGTHEFTVEQCFGDGLHWAGCMIIVLLGQQRRFAVLDFCYHLLKVQKHDGKDEIIKNVPLKKMVERIRKFQILNDEIITILDKYLKSGDGEGTPVEHVRCFQPPIHQSLASS

SEQ ID NO: 55789 - protein, 48 aa, Homo sapiens
MESIEKMESDFKNCHMFLVTILNKAVCRGSFPHLESLALSLMAGMEQS

SEQ ID NO: 55790 - protein, 119 aa, Homo sapiens
LKSVAAGCPVLLGKDNPSPGPSRDSQKPTSPLQSAGDHLEEELDLLLNLDAPIKEGDNILPDQTSQDLKSKEDGEVVQEEEVCAKPSVTEEKNMEPEQPSTSKNVTEEELEDWLDSMIS

SEQ ID NO: 55791 - protein, 683 aa, Homo sapiens
KEKAACSAAAMEEDSEASSSRIGDSSQGDNNLQKLGPDDVSVDIDAIRRVYTRLLSNEKIETAFLNALVYLSPNVECDLTYHNVYSRDPNYLNLFIIVMENRNLHSPEYLEMALPLFCKAMSKLPLAAQGKLIRLWSKYNADQIRRMMETFQQLITYKVISNEFNSRNLVNDDDAIVAASKCLKMVYYANVVGGEVDTNHNEEDDEEPIPESSELTLQELLGEERRNKKGPRVDPLETELGVKTLDCRKPLIPFEEFINEPLNEVLEMDKDYTFFKVETENKFSFMTCPFILNAVTKNLGLYYDNRIRMYSERRITVLYSLVQGQQLNPYLRLKVRRDHIIDDALVRLEMIAMENPADLKKQLYVEFEGEQGVDEGGVSKEFFQLVVEEIFNPDIGMFTYDESTKLFWFNPSSFETEGQFTLIGIVLGLAIYNNCILDVHFPMVVYRKLMGKKGTFRDLGDSHPVLYQSLKDLLEYEGNVEDDMMITFQISQTDLFGNPMMYDLKENGDKIPITNENRKEFVNLYSDYILNKSVEKQFKAFRRGFHMVTNESPLKYLFRPEEIELLICGSRNLDFQALEETTEYDGGYTRDSVLIREFWEIVHSFTDEQKRLFLQFTTGTDRAPVGGLGKLKMIIAKNGPDTERLPTSHTCFNVLLLPEYSSKEKLKERLLKAITYAKGFGML

SEQ ID NO: 55792 - protein, 68 aa, Homo sapiens
LPTFSLLNWISSWSLVSRLGSVLQFSRTEQLADGQAGRGLPVQPHSGRSGLQGPDHRLLIGASSRRSQ

SEQ ID NO: 55793 - protein, 12 aa, Homo sapiens
KDPKVCNIRYQE

SEQ ID NO: 55794 - protein, 225 aa, Homo sapiens
RSQKQLELKVSELVQFLLIKDQKKIPIKRADILKHVIGDYKDIFPDLFKRAAERLQYVFGYKLVELEPKSNTYILINTLEPVEEDAEMRGDQGTPTTGLLMIVLGLIFMKGNTIKETEAWDFLRRLGVYPTKKHLIFGDPKKLITEDFVRQRYLEYRRIPHTDPVDYEFQWGPRTNLETSKMKVLKFVAKVHNQDPKDWPAQYCEALADEENRARPQPSGPAPSS

SEQ ID NO: 55795 - protein, 1673 aa, Homo sapiens
RKSGKNAKITIRRKKKVQIPVSRPDPEPVSDNEEDSYDEEIHDPRSGRSGVVNRRSEKIWPRDRSASRERSLSPRSDRRSVASSQPAKPTKVTLVKSRKNEEYGLRLASHIFVKEISQDSLAARDGNIQEGDVVLKINGTVTENMSLTDAKTLIERSKGKLKMVVQRDERATLLNVPDLSDSIHSANASERDDISEIQSLASDHSGRSHDRPPRRSRSRSPDQRSEPSDHSRHSPQQPSNGSLRSRDEERISKPGAVSTPVKHADDHTPKTVEEVTVERNEKQTPSLPEPKPVYAQVGQPDVDLPVSPSDGVLPNSTHEDGILRPSMKLVKFRKGDSVGLRLAGGNDVGIFVAGVLEDSPAAKEGLEEGDQILRVNNVDFTNIIREEAVLFLLDLPKGEEVTILAQKKKDVYRRIVESDVGDSFYIRTHFEYEKESPYGLSFNKGEVFRVVDTLYNGKLGSWLAIRIGKNHKEVERGIIPNKNRAEQLASVQYTLPKTAGGDRADFWRFRGLRSSKRNLRKSREDLSAQPVQTKFPAYERVVLREAGFLRPVTIFGPIADVAREKLAREEPDIYQIAKSEPRDAGTDQRSSGIIRLHTIKQIIDQDKHALLDVTPNAVDRLNYAQWYPIVVFLNPDSKQGVKTMRMRLCPESRKSARKLYERSHKLRKNNHHLFTTTINLNSMNDGWYGALKEAIQQQQNQLVWVSEGKADGATSDDLDLHDDRLSYLSAPGSEYSMYSTDSRHTSDYEDTDTEGGAYTDQELDETLNDEVGTPPESAITRSSEPVREDSSGMHHENQTYPPYSPQAQPQPIHRIDSPGFKPASQQKAEASSPVPYLSPETNPASSTSAVNHNVNLTNVRLEEPTPAPSTSYSPQADSLRTPSTEAAHIMLRDQEPSLSSHVDPTKVYRKDPYPEEMMRQNHVLKQPAVSHPGHRPDKEPNLTYEPQLPYVEKQASRDLEQPTYRYESSSYTDQFSRNYEHRLRYEDRVPMYEEQWSYYDDKQPYPSRPPFDNQHSQDLDSRQHPEESSERGYFPRFEEPAPLSYDSRPRYEQAPRASALRHEEQPAPGYDTHGRLRPEAQPHPSAGPKPAESKQYFEQYSRSYEQVPPQGFTSRAGHFEPLHGAAAVPPLIPSSQHKPEALPSNTKPLPPPPTQTEEEEDPAMKPQSVLTRVKMFENKRSASLETKKDVNDTGSFKPPEVASKPSGAPIIGPKPTSQNQFSEHDKTLYRIPEPQKPQLKPPEDIVRSNHYDPEEDEEYYRKQLSYFDRRSFENKPPAHIAASHLSEPAKPAHSQNQSNFSSYSSKGKPPEADGVDRSFGEKRYEPIQATPPPPPLPSQYAQPSQPVTSASLHIHSKGAHGEGNSVSLDFQNSLVSKPDPPPSQNKPATFRPPNREDTAQAAFYPQKSFPDKAPVNGTEQTQKTVTPAYNRFTPKPYTSSARPFERKFESPKFNHNLLPSETAHKPDLSSKTPTSPKTLVKSHSLAQPPEFDSGVETFSIHAEKPKYQINNISTVPKAIPVSPSAVEEDEDEDGHTVVATARGIFNSNGGVLSSIETGVSIIIPQGAIPEGVEQEIYFKVCRDNSILPPLDKEKGETLLSPLVMCGPHGLKFLKPVELRLPHCASMTPDGWSFALKSSDSSSGDPKTWQNKCLPGDPNYLVGANCVSVLIDHF

SEQ ID NO: 55796 - protein, 142 aa, Homo sapiens
ITHLNNNFMFGQKLNVCVSKQPAIMPGQSYGLEDGSCSYKDFSESRNNRFSTPEQAAKNRIQHPSNVLHFFNAPLEATEENFFEIYDELGVKRPSSVKVFSGESERSSSGLLEWESKSDALETPGFLNHYLMKNPMVHTLTL

SEQ ID NO: 55797 - protein, 156 aa, Homo sapiens
LHIIPTEPFPTTRKNGERPSHEVQIIKNMPQMANFVYNMYMHLIQTTHHYHQTLLQLPPAMVEEGEEVQNQETELETEEEAMTVQADIIPSPTDTSCRQETPAFQTDTTPSETGATSTPEAIPALSETTPTVVGAVSAPAEANTPQDATSAPEETK

SEQ ID NO: 55798 - protein, 17 aa, Homo sapiens
IVLMVLVKTRKSTGFQP

SEQ ID NO: 55799 - protein, 11 aa, Homo sapiens
KNSMELIRVYH

SEQ ID NO: 55800 - protein, 693 aa, Homo sapiens
KNMMAENNLKMLKIQQCVVANKLPRNRPYVCNICFKHFETPSKLARHYLIHTGQKPFECDVCHKTFRQLVHLERHQLTHSLPFKCSICQRHFKNLKTFVKHQQLHNETYQNNVKQVRRLLEAKQEKSMYGVYNTFTTEERWALHPCSKSDPMYSMKRRKNIHACTICGKMFPSQSKLDRHVLIHTGQRPFKCVLCTKSFRQSTHLKIHQLTHSEERPFQCCFCQKGFKIQSKLLKHKQIHTRNKAFRALLLKKRRTESRPLPNKLNANQGGFENGEIGESEENNPLDVHSIYIVPFQCPKCEKCFESEQILNEHSCFAARSGKIPSRFKRSYNYKTIVKKILAKLKRARSKKLDNFQSEKKVFKKSFLRNCDLISGEQSSEQTQRTFVGSLGKHGTYKTIGNRKKKTLTLPFSWQNMGKNLKGILTTENILSIDNSVNKKDLSICGSSGEEFFNNCEVLQCGFSVPRENIRTRHKICPCDKCEKVFPSISKLKRHYLIHTGQRPFGCNICGKSFRQSAHLKRHEQTHNEKSPYASLCQVEFGNFNNLSNHSGNNVNYNASQQCQAPGVQKYEVSESDQMSGVKAESQDFIPGSTGQPCLPNVLLESEQSNPFCSYSEHQEKNDVFLYRCSVCAKSFRSPSKLERHYLIHAGQKPFECSVCGKTFRQAPHWKRHQLTHFKERPQGKVVALDSVM

SEQ ID NO: 55801 - protein, 14 aa, Homo sapiens
KQSFLQLFRASGEK

SEQ ID NO: 55802 - protein, 47 aa, Homo sapiens
VDSSEVVIHSADAFAPVAYLRFLELHLEDKVSSVPDNYRTSNYIYNF

SEQ ID NO: 55803 - protein, 4 aa, Homo sapiens
MKGF

SEQ ID NO: 55804 - protein, 113 aa, Homo sapiens
IFPKVATNIMRAWLFQHLTHPYPSEEQKKQLAQDTGLTILQVNNWFINARRRIVQPMIDQSNRAVSQGAAYSPEGQPMGSFVLDGQQHMGIRPAGPMSGMGMNMGMDGQWHYM

SEQ ID NO: 55805 - protein, 67 aa, Homo sapiens
INARRRIVQPMIDQSNRAVSQGAAYSPEGQPMGSFVLDGQQHMGIRPAGPMSGMGMNMGMDGQWHYM

SEQ ID NO: 55806 - protein, 66 aa, Homo sapiens
MTPHPTQLRHGPPMHSYLPSHPHHPAMMMHGGPPTHPGMTMSAQSPTMLNSVDPNVGGQVMDIHAQ

SEQ ID NO: 55807 - protein, 76 aa, Homo sapiens
VEPETFPDKYSLQFGFGPFELPPQWLSETRNSKKRLLPPLGNTPEELIQTKVPKVGRVERKMSRNNKVSIFPKVDS

SEQ ID NO: 55808 - protein, 76 aa, Homo sapiens
TELTRLFQKCRTSGSVYITLKKYDGRTKPIPKKGTVEGFEPADNKCLLRATDGKKKISTVNPGRKPNATFLRDFKR

SEQ ID NO: 55809 - protein, 160 aa, Homo sapiens
LPNPEQEDGANNAFSDSFVDSCPEGEGQREVADFAVQPAVKPWAPLQDSEVYLASLEKKLRRIKGLNQEVTSKDMLRTLAQAKKECWDRFLQEKLASEFFVDGLDSDESTLEHFKRWLQPDKVAVSTEEVQYLIPPESQVEKPVAEDEPAAGDKPAAAEQ

SEQ ID NO: 55810 - protein, 92 aa, Homo sapiens
LSWLEKKTATALLESPLSATVEDALQSFLKAEELQPGFSKAGRVYISKCYRELGKNSEARWWMKLALELPDVTKEDLAIQKDLEELEVILRD

SEQ ID NO: 55811 - protein, 6 aa, Homo sapiens
VLLKGL

SEQ ID NO: 55812 - protein, 96 aa, Homo sapiens
LPANTQINDIRIFLEKVLEENAQKKRFNQVLKNLLHAEFLRVQEERILHQQVKCIITEEKVCMVCKKKIGNSAFARYPNGVVVHYFCSKEVNPADT

SEQ ID NO: 55813 - protein, 461 aa, Homo sapiens
LEVLEIPNPQLEVVAIDSSESGEEKPDSPSKKDIWNSTEQNPLETSRSGCDEVSSTSEIGTRYKDGIPVSVAETQTVISSIKGSKNSSEISSEPGDDDEPTEGSFEGHQAAVNAIQIFGNLLYTCSADKTVRVYNLVSRKCIGVFEGHTSKVNCLLVTQTSGKNAALYTGSSDHTIRCYNVKSRECVEQLQLEDRVLCLHSRWRILYAGLANGTVVTFNIKNNKRLEIFECHGPRAVSCLATAQEGARKLLVVGSYDCTISVRDARNGLLLRTLEGHSKTILCMKVVNDLVFSGSSDQSVHAHNIHTGELVRIYKGHNHAVTVVNILGKVMVTACLDKFVRVYELQSHDRLQVYGGHKDMIMCMTIHKSMIYTGCYDGSIQAVRLNLMQNYRCWWHGCSLIFGVVDHLKQHLLTDHTNPNFQTLKCRWKNCDAFFTARKGSKQDAAGHIERHAEDDSKIDS

SEQ ID NO: 55814 - protein, 203 aa, Homo sapiens
TSNLRTIDLSNNKIESLPPLLIGKFTLLKSLSLNNNKLTVLPDEICNLKKLETLSLNNNHLRELPSTFGQLSALKTLSLSGNQLGALPPQLCSLRHLDVMDLSKNQIRSIPDSVGELQVIELNLNQNQISQISVKISCCPRLKILRLEENCLELSMLPQSILSDSQICLLAVEGNLFEIKKLRELEGYDKYMERFTATKKKFA

SEQ ID NO: 55815 - protein, 289 aa, Homo sapiens
MMRQRAQERKNEEMEVMEVEDEGRSGEESESESEYEEYTDSEDEMEPRLKPVFIRKKDRVTVQEREAEALKQKELEQEAKRMAEERRKYTLKIVEEETKKELEENKRSLAALDALNTDDENDEEEYEAWKVRELKRIKRDREDREALEKEKAEIERMRNLTEEERRAELRANGKVITNKAVKGKYKFLQKYYHRGAFFMDEDEEVYKRDFSAPTLEDHFNKTILPKVMQVKNFGRSGRTKYTHLVDQDTTSFDSAWGQESAQNTKFFKQKAAGVRDVFERPSAKKRKTT

SEQ ID NO: 55816 - protein, 90 aa, Homo sapiens
LPSDITIYHLIQSLSPFDPSRLFGWQSANTLAIGDAWSHLPHFSSPDLVNKYAIVERLNFAYYLHNGRPSFAFGTFLVQELIKSKTPKQL

SEQ ID NO: 55817 - protein, 47 aa, Homo sapiens
MCSPSWPNFDYTMVVIFVIAVFTVALGGYWSGLVELENLKAVTTEDR

SEQ ID NO: 55818 - protein, 6 aa, Homo sapiens
VFSIVA

SEQ ID NO: 55819 - protein, 46 aa, Homo sapiens
IAEETVISEEPPAKRQCIEIIENRVESAEIEVRSLLPGVLCRSHPK

SEQ ID NO: 55820 - protein, 492 aa, Homo sapiens
ILHASGNGTTKDYCMLYNPYWTALPSTLENATSISLMNLTSTPLCNLSDIPPVGIKSKAVVVPWGSCHFLEKARIAQKGGAEAMLVVNNSVLFPPSGNRSEFPDVKILIAFISYKDFRDMNQTLGDNITVKMYSPSWPNFDYTMVVIFVIAVFTVALGGYWSGLVELENLKAVTTEDREMRKKKEEYLTFSPLTVVIFVVICCVMMVLLYFFYKWLVYVMIAIFCIASAMSLYNCLAALIHKIPYGQCTIACRGKNMEVRLIFLSGLCIAVAVVWAVFRNEDRWAWILQDILGIAFCLNLIKTLKLPNFKSCVILLGLLLLYDVFFVFITPFITKNGESIMVELAAGPFGNNEKLPVVIRVPKLIYFSVMSVCLMPVSILGFGDIIVPGLLIAYCRRFDVQTGSSYIYYVSSTVAYAIGMILTFVVLVLMKKGQPALLYLVPCTLITASVVAWRRKEMKKFWKGNSYQMMDHLDCATNEENPVISGEQIVQQ

SEQ ID NO: 55821 - protein, 35 aa, Homo sapiens
IIQGNRLFSCGADGTLKTRVLPNAFNIPNRILDIL

SEQ ID NO: 55822 - protein, 378 aa, Homo sapiens
KNAIASDSEADSDTEVPKDNSGTMDLFGGADDISSGSDGEDKPPTPGQPVDENGLPQDQQEEEPIPETRIEVEIPKVNTDLGNDLYFVKLPNFLSVEPRPFDPQYYEDEFEDEEMLDEEGRTRLKLKVENTIRWRIRRDEEGNEIKESNARIVKWSDGSMSLHLGNEVFDVYKAPLQGDHNHLFIRQGTGLQGQAVFKTKLTFRPHSTDSATHRKMTLSLADRCSKTQKIRILPMAGRDPECQRTEMIKKEEERLRASIRRESQQRRMREKQHQRGLSASYLEPDRYDEEEEGEESISLAAIKNRYKGGIREERARIYSSDSDEGSEEDKAQRLLKAKKLTSDEEGEPSGKRKAEDDDKANKKHKKYVISDEEEEDDD

SEQ ID NO: 55823 - protein, 52 aa, Homo sapiens
RRLTFAQLLFATVLGIAGGVYIFQPVFEQYAKDQKELKEKMQLVQESEEKKS

SEQ ID NO: 55824 - protein, 204 aa, Homo sapiens
RKGSITEYTAAEEKEDGRRWRMFRIGEQDHRVDMKAIEPYKKVISHGGYYGDGLNAIVVFAVCFMPESSQPNYRYLMDNLFKYVIGTLELLVAENYMIVYLNGATTRRKMPSLGWLRKCYQQIDRRLRKNLKSLIIVHPSWFIRTLLAVTRPFISSKFSQKIRYVFNLAELAELVPMEYVGIPECIKQVDQELNGKQDEPKNEQ

SEQ ID NO: 55825 - protein, 192 aa, Homo sapiens
IGEQDHRVDMKAIEPYKKVISHGGYYGDGLNAIVVFAVCFMPESSQPNYRYLMDNLFKYVIGTLELLVAENYMIVYLNGATTRRKMPSLGWLRKCYQQIDRRLRKNLKSLIIVHPSWFIRTLLAVTRPFISSKFSQKIRYVFNLAELAELVPMEYVGIPECIKQYEEEKFKKKQKRVDQELNGKQDEPKNEQ

SEQ ID NO: 55826 - protein, 58 aa, Homo sapiens
KQRMVNIENSRHRKQEQKHLQPQPYKREGKWHKYGRTNGRQMANLEIELGQLPFDPQY

SEQ ID NO: 55827 - protein, 91 aa, Homo sapiens
KAVLMMDSEKRIRLLQFVTGTSRVPMNGFAELYGSNGPQSFTVEQWGTPEKLPRAHTCFNRLDLPPYESFEELWDKLQMAIENTQGFDGVD

SEQ ID NO: 55828 - protein, 12 aa, Homo sapiens
KERVAWSTLSRA

SEQ ID NO: 55829 - protein, 41 aa, Homo sapiens
ITQHSSNASPINRIVQISGNSMPRGSGSGFKPFKGGPPRRF

SEQ ID NO: 55830 - protein, 5 aa, Homo sapiens
MRPAC

SEQ ID NO: 55831 - protein, 338 aa, Homo sapiens
LHAAAVLLLVILKEQPSSPAPVNGSKWTYFGPDGENSWSKKYPSCGGLLQSPIDLHSDILQYDASLTPLEFQGYNLSANKQFLLTNNGHSVKLNLPSDMHIQGLQSRYSATQLHLHWGNPNDPHGSEHTVSGQHFAAELHIVHYNSDLYPDASTASNKSEGLAVLAVLIEMGSFNPSYDKIFSHLQHVKYKGQEAFVPGFNIEELLPERTAEYYRYRGSLTTPPCNPTVLWTVFRNPVQISQEQLLALETALYCTHMDDPSPREMINNFRQVQKFDERLVYTSFSQGIILSLALAGILGICIVVVVSIWLFRRKSIKKGDNKGVIYKPATKMETEAHA

SEQ ID NO: 55832 - protein, 617 aa, Homo sapiens
ITSSLASAQRGISGGRIHMSVLGRLGTFETQILQRAPLRSFTETPAYFASKDGISKDGSGDGNKKSASEGSSKKSGSGNSGKGGNQLRCPKCGDLCTHVETFVSSTRFVKCEKCHHFFVVLSEADSKKSIIKEPESAAEAVKLAFQQKPPPPPKKIYNYLDKYVVGQSFAKKVLSVAVYNHYKRIYNNIPANLRQQAEVEKQTSLTPRELEIRRREDEYRFTKLLQIAGISPHGNALGASMQQQVNQQIPQEKRGGEVLDSSHDDIKLEKSNILLLGPTGSGKTLLAQTLAKCLDVPFAICDCTTLTQAGYVGEDIESVIAKLLQDANYNVEKAQQGIVFLDEVDKIGSVPGIHQLRDVGGEGVQQGLLKLLEGTIVNVPEKNSRKLRGETVQVDTTNILFVASGAFNGLDRIISRRKNEKYLGFGTPSNLGKGRRAAAAADLANRSGESNTHQDIEEKDRLLRHVEARDLIEFGMIPEFVGRLPVVVPLHSLDEKTLVQILTEPRNAVIPQYQALFSMDKCELNVTEDALKAIARLALERKTGARGLRSIMEKLLLEPMFEVPNSDIVCVEVDKEVVEGKKEPGYIRAPTKESSEEEYDSGVEEEGWPRQADAANS

SEQ ID NO: 55833 - protein, 1177 aa, Homo sapiens
VFSFLVLEVTSVLGRQTMLTQSVRRVQPGKKNPSIFAKPADTLESPGEWTTWFNIDYPGGKGDYERLDAIRFYYGDRVCARPLRLEARTTDWTPAGSTGQVVHGSPREGFWCLNREQRPGQNCSNYTVRFLCPPGSLRRDTERIWSPWSPWSKCSAACGQTGVQTRTRICLAEMVSLCSEASEEGQHCMGQDCTACDLTCPMGQVNADCDACMCQDFMLHGAVSLPGGAPASGAAIYLLTKTPKLLTQTDSDGRFRIPGLCPDGKSILKITKVKFAPIVLTMPKTSLKAATIKAEFVRAETPYMVMNPETKARRAGQSVSLCCKATGKPRPDKYFWYHNDTLLDPSLYKHESKLVLRKLQQHQAGEYFCKAQSDAGAVKSKVAQLIVIASDETPCNPVPESYLIRLPHDCFQNATNSFYYDVGRCPVKTCAGQQDNGIRCRDAVQNCCGISKTEEREIQCSGYTLPTKVAKECSCQRCTETRSIVRGRVSAADNGEPMRFGHVYMGNSRVSMTGYKGTFTLHVPQDTERLVLTFVDRLQKFVNTTKVLPFNKKGSAVFHEIKMLRRKKPITLEAMETNIIPLGEVVGEDPMAELEIPSRSFYRQNGEPYIGKVKASVTFLDPRNISTATAAQTDLNFINDEGDTFPLRTYGMFSVDFRDEVTSEPLNAGKVKVHLDSTQVKMPEHISTVKLWSLNPDTGLWEEEGDFKFENQRRNKREDRTFLVGNLEIRERRLFNLDVPESRRCFVKVRAYRSERFLPSEQIQGVVISVINLEPRTGFLSNPRAWGRFDSVITGPNGACVPAFCDDQSPDAYSAYVLASLAGEELQAVESSPKFNPNAIGVPQPYLNKLNYRRTDHEDPRVKKTAFQISMAKPRPNSAEESNGPIYAFENLRACEEAPPSAAHFRFYQIEGDRYDYNTVPFNEDDPMSWTEDYLAWWPKPMEFRACYIKVKIVGPLEVNVRSRNMGGTHRQTVGKLYGIRDVRSTRDRDQPNVSAACLEFKCSGMLYDQDRVDRTLVKVIPQGSCRRASVNPMLHEYLVNHLPLAVNNDTSEYTMLAPLDPLGHNYGIYTVTDQDPRTAKEIALGRCFDGTSDGSSRIMKSNVGVALTFNCVERQVGRQSAFQYLQSTPAQSPAAGTVQGRVPSRRQQRASRGGQRQGGVVASLRFPRVAQQPLIN

SEQ ID NO: 55834 - protein, 86 aa, Homo sapiens
MQAEKFPSEPNRLLLLHGFLDENVHFAHTSILLSFLVRAGKPYDLQIYPQERHSIRVPESGEHYELHLLHYLQENLGSRIAALKVI

SEQ ID NO: 55835 - protein, 73 aa, Homo sapiens
LKKAYRKLALKFHPDKNHAPGATDAFKKVGNAYAVLSNPEKRKQYDLTGNEEQACNHQNNGRFNFHRGFVKLI

SEQ ID NO: 55836 - protein, 32 aa, Homo sapiens
IATSDFTLPGEFPAWLNTLASGRVKMFAIKLT

SEQ ID NO: 55837 - protein, 50 aa, Homo sapiens
VSTLRALCGRHTEKLMAFKAIYPDIVRLHFPPLYKELFTSEFEPAMQIDG

SEQ ID NO: 55838 - protein, 80 aa, Homo sapiens
ILFIFTFFAMLALVLHQKRKRLFLDSNGLFLFSSFALTLLLVALWVAWLWNDPVLRKKYPGVIYVPEPWAFYTLHVSSRH

SEQ ID NO: 55839 - protein, 265 aa, Homo sapiens
IEFRRRGSLCRERAREMEMGRRIHLELRNRTPSDVKELVLDNSRSNEGKLEGLTDEFEELEFLSTINVGLTSIANLPKLNKLKKLELSDNRVSGGLEVLAEKCPNLTHLNLSGNKIKDLSTIEPLKKLENLKSLDLFNCEVTNLNDYRENVFKLLPQLTYLDGYDRDDKEAPDSDAEGYVEGLDDEEEDEDEEEYDEDAQVVEDEEDEDEEEEGEEEDVSGEEEEDEEGYNDGEVDDEEDEEELGEEERGQKRKREPEDEGEDDD

SEQ ID NO: 55840 - protein, 134 aa, Homo sapiens
LRRDFNHINVELSLLGKKKKEALVDKWWGNRKELATVRTICSHVQNMIKGVTLGFRYKMRSVYAYFPIIVVIPENGSVVEIRNFLGEKYIRRVRMRPGVACSVSQAQKDELIFEGNDIELVSNSAALIQQATTV

SEQ ID NO: 55841 - protein, 38 aa, Homo sapiens
RNDAPTPGTSTTPGLRSMPGKPPGMDPIGIMGRHHGLG

SEQ ID NO: 55842 - protein, 83 aa, Homo sapiens
KPDKYQLHLHESCVLSLKFAYCGKWFVSTGKDNLLNAWRTPYGASIFQSKESSSVLSCDISADDKYIVTGSGDKKATVYEVIY

SEQ ID NO: 55843 - protein, 63 aa, Homo sapiens
LEDEEEGAETRGAGDPARYLSPGWGSASEEEPSRGHRNRSSVNSRTMLASFIVSSAPSTAPST

SEQ ID NO: 55844 - protein, 75 aa, Homo sapiens
MDYSSDSSVTPSGSPWVRRRRQAEMGTQEKSPGTSPLLSRKMQTADGLPVGVLRLPRGPDNTRGFHGHERSRACV

SEQ ID NO: 55845 - protein, 60 aa, Homo sapiens [sequence omitted]

SEQ ID NO: 55846 - protein, 74 aa, Homo sapiens
VDGGLSIPHGTKRFPGYDSESKEFNAEVHWKHIMGQNVADYTCYLMQEDEDAYKKQFSQYIKNSITPDMMEEMC

SEQ ID NO: 55847 - protein, 189 aa, Homo sapiens
IRRSTQMLQSTSQEFSKKCSERWKTISAKDKGKFQDMAKVDKAHYEREMKTYIPPKGETKKKFKDPNAPKRPPSAFFLFCSEYRPKIKGEHPGLSIGDVAKKLGEMWNNTAADDKQPYEKKAAKLKEKYEKDIAAYRAKGKPDAAKKGVVKAEKSKKKKEEEEDEEDEEDEEEEEDEEDEDEEEDDDDE

SEQ ID NO: 55848 - protein, 294 aa, Homo sapiens
LVQHILGTEDLIVEVTSNDAVRFYPWTIDNKYYSADINLCVVPNKFLVTAEIAESVQAFVVYFDSTQKSGLDSVSSWLPLAKAWLPEVMILVCDRVSEDGINRQKAQEWCIKHGFELVELSPEELPEEDDDFPESTGVKRIVQALNANVWSNVVMKNDRNQGFSLLNSLTGTNHSIGSADPCHPEQPHLPAADSTESLSDHRGGASNTTDAQVDSIVDPMLDLDIQELASLTTGGGDVENFERLFSKLKEMKDKAATLPHEQRKVHAEKVAKAFWMAIGGDRDEIEGLSSDEEH

SEQ ID NO: 55849 - protein, 35 aa, Homo sapiens
LPGQVLPGSLGAVAWVLTMLLKLVQNSSQSLTSAS

SEQ ID NO: 55850 - protein, 277 aa, Homo sapiens
LPSALALSLLLVSGSLLPGPGAAQNEPRIVTSEEVIIRDSPVLPVTLQCNLTSSSHTLTYSYWTKNGVELSATRKNASNMEYRINKPRAEDSGEYHCVYHFVSAPKANATIEVKAAPDITGHKRSENKNEGQDATMYCKSVGYPHPDWIWRKKENGMPMDIVNTSGRFFIINKENYTELNIVNLQITEDPGEYECNATNAIGSASVVTVLRVRSHLAPLWPFLGILAEIIILVVIIVVYEKRKRPDEVPDDDEPAGPMKTNSTNNHKDKNLRQRNTN

SEQ ID NO: 55851 - protein, 261 aa, Homo sapiens
LHSSSSYREAVFKMLSNKESLDQIIVATPGLSSDPIALGVLQDKDLFSVFADPNMLDTLVPAHPALVNAIVLVLHSVAGSAPMPGTDSSSRSMPSSSYRDMPGGFLFEGLSDDEDDFHPNTRSTPSSSTPSSRPASLGYSGAAGPRPITQSELATALALASTPESSSHTPTPGTQGHSSGTSPMSSGVQSGTPITNDLFSQALQHALQASGQPSLQSQWQPQLQQLRDMGIQDDELSLRALQATGGDIQAALELIFAGGAP

SEQ ID NO: 55852 - protein, 87 aa, Homo sapiens
TRAPSIQAKLQKHRDLAKAVLRRKGMLGASPNRPDSSGKRSVKFNKGYTALSQSPDENLVSLDSDRPFMYIPGPFSSEQYPFPGWLG

SEQ ID NO: 55853 - protein, 7 aa, Homo sapiens
KGQVIQF

SEQ ID NO: 55854 - protein, 127 aa, Homo sapiens
RRIHLELRNWTPSAVRELVLDNCKSNDGKIEGLTAEFVNLEFLSLINVGLISVSNLPKLPKLKKLELSENRIFGGLDMLAEKLPNLTRLNLSGNKLKDISTLEPLKKLECLKSLDLFNCEVTNMNDY

SEQ ID NO: 55855 - protein, 66 aa, Homo sapiens
RLYEAHGSHVDCWLHLSLPVQEAILCDLLERPDPAGHLTLRDNRLKLTFSPFQVLSLLLVLQPPPH

SEQ ID NO: 55856 - protein, 183 aa, Homo sapiens
VRKLKFHEQKLLKQVDFLNWEVTDHNLHELRVLRRYRLQRREDYTRYNQLSRAVRELARRLRDLPERDQFRVRASAALLDKLYALGLVPTRGSLELCDFVTASSFCRRRLPTVLLKLRMAQHLQAAVAFVEQGHVRVGPDVVTDPAFLVTRSMEDFVTWVDSSKIKRHVLEYNEERDDFDLEA

SEQ ID NO: 55857 - protein, 101 aa, Homo sapiens
LALAVGCVFLLEPELPGSALRSLWSSLCLGPAPAPPGPVSPEGRLAAAWDALIVRPVRRWRRVAVGFFFAVQLVQSYMSFLMTMSLFHQSHCRKWMSSTSF

SEQ ID NO: 55858 - protein, 388 aa, Homo sapiens
LHSRNDLEEAFIHFMGKGAAAERFFSDKETFHDIAQVASEFPGAQHYVGGNAALIGQKFAANSDLKVLLCGPVGPKLHELLDDNVFVPPESLQEVDEFHLILEYQAGEEWGQLKAPHANRFIFSHDLSNGAMNMLEVFVSSLEEFQPDLVVLSGLHMMEGQSKELQRKRLLEVVTSISDIPTGIPVHLELASMTNRELMSSIVHQVFPAVTSLGLNEQELLFLTQSASGPHSSLSSWNGVPDVGMVSDILFWILKEHGRSKSRASDLTRIHFHTLVYHILATVDGHWANQLAAVAAGARVAGTQACATETIDTSRVSLRAPQEFMTSHSEAGSRIVLNPNKPVVEWHREGISFHFTPVLVCKDPIRTVGLGDAISAEGLFYSEVHPHY

SEQ ID NO: 55859 - protein, 70 aa, Homo sapiens
MPGLGFDKHGNRLGRGKGYYDAYLKRCLQHQEVKPYTLALAFKEQICLQVPVNENDMKVDEVLYEDSSTA

SEQ ID NO: 55860 - protein, 224 aa, Homo sapiens
VVLLCASDLLLLLLLLPPPGSCAAEGSPGTPDESTPPPRKKKKDIRDYNDADMARLLEQWEKDDDIEEGDLPEHKRPSAPVDFSKIDPSKPESILKMTKKGKTLMMFVTVSGSPTEKETEEITSLWQGSLFNANYDVQRFIVGSDRAIFMLRDGSYAWEIKDFLVGQDRCADVTLEGQVYPGKGGGSKEKNKTKQDKGKKKKEGDLKSRSSKEENRAGNKREDL

SEQ ID NO: 55861 - protein, 318 aa, Homo sapiens
LLRFQSTLVIAEHANDSLAPITLNTITAATRLGGEVSCLVAGTKCDKVAQDLCKVAGIAKVLVAQHDVYKGLLPEELTPLILATQKQFNYTHICAGASAFGKNLLPRVAAKLEVAPISDIIAIKSPDTFVRTIYAGNALCTVKCDEKVKVFSVRGTSFDAAATSGGSASSEKASSTSPVEISEWLDQKLTKSDRPELTGAKVVVSGGRGLKSGENFKLLYDLADQLHAAVGASRAAVDAGFVPNDMQVGQTGKIVAPELYIAVGISGAIQHLAGMKDSKTIVAINKDPEAPIFQVADYGIVADLFKVVPEMTEILKKK

SEQ ID NO: 55862 - protein, 242 aa, Homo sapiens
VLVFLNLIFWGAAGILCYVGAYVFITYDDYDHFFEDVYTLIPAVVIIAVGALLFIIGLIGCCATIRESRCGLATFVIILLLVFVTEVVVVVLGYVYRAKVENEVDRSIQKVYKTYNGTNPDAASRAIDYVQRQLHCCGIHNYSDWENTDWFKETKNQSVPLSCCRETASNCNGSLAHPSDLYAEGCEALVVKKLQEIMMHVIWAALAFAAIQLLGMLCACIVLCRRSRDPAYELLITGGTYA

SEQ ID NO: 55863 - protein, 5 aa, Homo sapiens
IYYPC

SEQ ID NO: 55864 - protein, 536 aa, Homo sapiens
RTSAAMSKPHSEAGTAFIQTQQLHAAMADTFLEHMCRLDIDSPPITARNTGIICTIGPASRSVETLKEMIKSGMNVARLNFSHGTHEYHAETIKNVRTATESFASDPILYRPVAVALDTKGPEIRTGLIKGSGTAEVELKKGATLKITLDNAYMEKCDENILWLDYKNICKVVEVGSKIYVDDGLISLQVKQKGADFLVTEVENGGSLGSKKGVNLPGAAVDLPAVSEKDIQDLKFGVEQDVDMVFASFIRKASDVHEVRKVLGEKGKNIKIISKIENHEGVRRFDEILEASDGIMVARGDLGIEIPAEKVFLAQKMMIGRCNRAGKPVICATQMLESMIKKPRPTRAEGSDVANAVLDGADCIMLSGETAKGDYPLEAVRMQHLIAREAEAAIYHLQLFEELRRLAPITSDPTEATAVGAVEASFKCCSGAIIVLTKSGRSAHQVARYRPRAPIIAVTRNPQTARQAHLYRGIFPVLCKDPVQEAWAEDVDLRVNFAMNVGKARGFFKKGDVVIVLTGWRPGSGFTNTMRVVPVP

SEQ ID NO: 55865 - protein, 525 aa, Homo sapiens
RLWFSLLLAAAFAGRATALWPWPQNFQTSDQRYVLYPNNFQFQYDVSSAAQPGCSVLDEAFQRYRDLLFGSGSWPRPYLTGKRHTLEKNVLVVSVVTPGCNQLPTLESVENYTLTINDDQCLLLSETVWGALRGLETFSQLVWKSAEGTFFINKTEIEDFPRFPHRGLLLDTSRHYLPLSSILDTLDVMAYNKLNVFHWHLVDDPSFPYESFTFPELMRKGSYNPVTHIYTAQDVKEVIEYARLRGIRVLAEFDTPGHTLSWGPGIPGLLTPCYSGSEPSGTFGPVNPSLNNTYEFMSTFFLEVSSVFPDFYLHLGGDEVDFTCWKSNPEIQDFMRKKGFGEDFKQLESFYIQTLLDIVSSYGKGYVVWQEVFDNKVKIQPDTIIQVWREDIPVNYMKELELVTKAGFRALLSAPWYLNRISYGPDWKDFYIVEPLAFEGTPEQKALVIGGEACMWGEYVDNTNLVPRLWPRAGAVAERLWSNKLTSDLTFAYERLSHFRCELLRRGVQAQPLNVGFCEQEFEQT

SEQ ID NO: 55866 - protein, 99 aa, Homo sapiens
VAVDPKGCVTIAIHAKPGSKQNAVTDLTAEAVNVAIAAPPSEGEANAELCRYLSKVLELRKSDVVLDKGGKSREKVVKLLASTTPEEILEKLKKEAKKT

SEQ ID NO: 55867 - protein, 431 aa, Homo sapiens
KASLKERFAFLFNSELLSDVRFVLGKGRGAAAAGGPQRIPAHRFVLAAGSAVFDAMFNGGMATTSAEIELPDVEPAAFLALLRFLYSDEVQIGPETVMTTLYTAKKYAVPALEAHCVEFLTKHLRADNAFMLLTQARLFDEPQLASLCLDTIDKSTMDAISAEGFTDIDIDTLCAVLERDTLSIRESRLFGAVVRWAEAECQRQQLPVTFGNKQKVLGKALSLIRFPLMTIEEFAAGPAQSGILSDREVVNLFLHFTVNPKPRVEYIDRPRCCLRGKECCINRFQQVESRWGYSGTSDRIRFTVNRRISIVGFGLYGSIHGPTDYQVNIQIIEYEKKQTLGQNDTGFSCDGTANTFRVMFKEPIEILPNVCYTACATLKGPDSHYGTKGLKKVVHETPAASKTVFFFFSSPGNNNGTSIEDGQIPEIIFYT

SEQ ID NO: 55868 - protein, 4 aa, Homo sapiens
TRRW

SEQ ID NO: 55869 - protein, 66 aa, Homo sapiens
KNEKAGSKRKKSYTSKKSSKQSRKSPGDEDDKDCKEEENKSSSEGGDAGNDTRNTTSDLQKTSEGT

SEQ ID NO: 55870 - protein, 46 aa, Homo sapiens
LSFGFCETLRLLGRCQLPTIRTQCCRSCSPPSHGAPSRGHQRVARR

SEQ ID NO: 55871 - protein, 165 aa, Homo sapiens
KRQLYYQVLNFGMIVSSALMIWKGLMVITGSESPIVVVLSGSMEPAFHRGDLLFLTNRVEDPIRVGEIVVFRIEGREIPIVHRVLKIHEKQNGHIKFLTKGDNNAVDDRGLYKQGQHWLEKKDVVGRARGFVPYIGIVTILMNDYPKFKYAVLFLLGLFVLVHRE

SEQ ID NO: 55872 - protein, 8 aa, Homo sapiens
IMPRVGAN

SEQ ID NO: 55873 - protein, 5 aa, Homo sapiens
MTTAI

SEQ ID NO: 55874 - protein, 6 aa, Homo sapiens
IAIFRN

SEQ ID NO: 55875 - protein, 1758 aa, Homo sapiens
KKSIVCEVLFLKMSACNTFTEHVWKPGECKNCFKPKSLHQLPPDPEKAPITHGNVKTNANHSNNHRIRNTGNFRPPVAKKPTIAVKPTMIVADGQSICGELSIQEHCENKPVIIGWNRNRAALSQKPLNNNNEDDEGISHVPKPYGNNDSAKKMSDNNNGLTEVLKEIAGLDTAPQIRGNETNSRETFLGRINDCYKRSLERKLPPSCMIGGIKETQGKHVILSGSTEVISNEGGRFCYPEFSSGEESEEDVLFSNMEEEHESWDESDEELLAMEIRMRGQPRFANFRANTLSPVRFFVDKKWNTIPLRNKSLQRICAVDYDDSYDEILNGYEENSVVSYGQGSIQSMVSSDSTSPDSSLTEESRSETASSLSQKICNGGLSPGNPGDSKDMKEIEPNYESPSSNNQDKDSSQASKSSIKVPETHKAVLALRLEEKDGKIAVQTEKEESKASTDVAGQAVTINLVPTEEQAKPYRVVNLEQPLCKPYTVVDVSAAMASEHLEGPVNSPKTKSSSSTPNSPVTSSSLTPGQISAHFQKSSAIRYQEVWTSSTSPRQKIPKVELITSGTGPNVPPRKNCHKSAPTSPTATNISSKTIPVKSPNLSEIKFNSYNNAGMPPFPIIIHDEPTYARSSKNAIKVPIVINPNAYDNLAIYKSFLGTSGELSVKEKTTSVISHTYEEIETESKVPDNTTSKTTDCLQTKGFSNSTEHKRGSVAQKVQEFNNCLNRGQSSPQRSYSSSHSSPAKIQRATQEPVAKIEGTQESQMVGSSSTREKASTVLSQIVASIQPPQSPPETPQSGPKACSVEELYAIPPDADVAKSTPKSTPVRPKSLFTSQPSGEAEAPQTTDSPTTKVQKDPSIKPVTPSPSKLVTSPQSEPPAPFPPPRSTSSPYHAGNLLQRHFTNWTKPTSPTRSTEAESVLHSEGSRRAADAKPKRWISFKSFFRRRKTDEEDDKEKEREKGKLVGLDGTVIHMLPPPPVQRHHWFTEAKGESSEKPAIVFMYRCDPAQGQLSVDQSKARTDQAAVMEKGRAENALLQDSEKKRSHSSPSQIPKKILSHMTHEVTEDFSPRDPRTVVGKQDGRGCTSVTTALSLPELEREDGKEDISDPMDPNPCSATYSNLGQSRAAMIPPKQPRQPKGAVDDAIAFGGKTDQEAPNASQPTPPPLPKKMIIRANTEPISKDLQKSMESSLCVMANPTYDIDPNWDASSAGSSISYELKGLDIESYDSLERPLRKERPVPSAANSISSLTTLSIKDRFSNSMESLSSRRGPSCRQGRGIQKPQRQALYRGLENREEVVGKIRSLHTDALKKLAVKCEDLFMAGQKDQLRFGVDSWSDFRLTSDKPCCEAGDAVYYTASYAKDPLNNYAVKICKSKAKESQQYYHSLAVRQSLAVHFNIQQDCGHFLAEVPNRLLPWEDPDDPEKDEDDMEETEEDAKGETDGKNPKPCSEAASSQKENQGVMSKKQRSHVVVITREVPCLTVADFVRDSLAQHGKSPDLYERQVCLLLLQLCSGLEHLKPYHVTHCDLRLENLLLVHYQPGGTAQGFGPAEPSPTSSYPTRLIVSNFSQAKQKSHLVDPEILRDQSRLAPEIITATQYKKCDEFQTGILIYEMLHLPNPFDENPELKEREYTRADLPRIPFRSPYSRGLQQLASCLLNPNPSERILISDAKGILQCLLWGPREDLFQTFTACPSLVQRNTLLQNWLDIKRTLLMIKFAEKSLDREGGISLEDWLCAQYLAFATTDSLSCIVKILQHR

SEQ ID NO: 55876 - protein, 613 aa, Homo sapiens
LEQLKKDLSSQKELVRLLQQTVRSSQYDKYFTSSRLCEGVPKDTLELLHQKDDQILGLTSQLERFSLEKESLQQEVRTLKSKVGELNEQLGMLMETIQAKDEVIIKLSEGEGNGPPPTVAPSSPSVVPVARDQLELDRLKDNLQGYKTQNKFLNKEILELSALRRNAERRERDLMAKYSSLEAKLCQIESKYLILLQEMKTPVCSEDQGPTREVIAQLLEDALQVESQEQPEQAFVKPHLVSEYDIYGFRTVPEDDEEEKLVAKVRALDLKTLYLTENQEVSTGVKWENYFASTVNREMMCSPELKNLIRAGIPHEHRSKVWKWCVDRHTRKFKDNTEPGHFQTLLQKALEKQNPASKQIELDLLRTLPNNKHYSCPTSEGIQKLRNVLLAFSWRNPDIGYCQGLNRLVAVALLYLEQEDAFWCLVTIVEVFMPRDYYTKTLLGSQVDQRVFRDLMSEKLPRLHGHFEQYKVDYTLITFNWFLVVFVDSVVSDILFKIWDSFLYEGPKVIFRFALALFKYKEEEILKLQDSMSIFKYLRYFTRTILDARKLISISFGDLNPFPLRQIRNRRAYHLEKVRLELTELEAIREDFLRERDTSPDKGELVSDEEEDT

SEQ ID NO: 55877 - protein, 345 aa, Homo sapiens
LDTHGRKERYYVLYIRPSHIHRRKFDAKGNEIEPNFSATRKVNTGFLMSSYKVEAKGDTDRLTPEALKGLVNKPELLALTESLTPDHTVAFWMPESEMEVMELELGAGVRLKTRGDGPFLDSLAKLEAGTVTKCNFTGDGKTGASWTDNIMAQKCSKGAAAEIREQGDGAEDEEWPEEIQQQIVRETFHLVLKRDDNICNFLEGGSLIGGSDYKLIYRHYATLYFVFCVDSSESELGILDLIQVFVETLDKCFENVCELDLIFHMDKVHYILQEVVMGGMVLETNMNEIVAQIEAQNRLEKSEGGLSAAPARAVSAVKNINLPEIPRNINIGDLNIKVPNLSQFV

SEQ ID NO: 55878 - protein, 392 aa, Homo sapiens
IIWQFIKEKLILPHVDIQLKYFDLGLPNRDQTDDQVTIDSALATQKYSVAVKCATITPDEARVEEFKLKKMWKSPNGTIRNILGGTVFREPIICKNIPRLVPGWTKPITIGRHAHGDQYKATDFVADRAGTFKMVFTPKDGSGVKEWEVYNFPAGGVGMGMYNTDESISGFAHSCFQYAIQKKWPLYMSTKNTILKAYDGRFKDIFQEIFDKHYKTDFDKNKIWYEHRLIDDMVAQVLKSSGGFVWACKNYDGDVQSDILAQGFGSLGLMTSVLVCPDGKTIEAEAAHGTVTRHYREHQKGRPTSTNPIASIFAWTRGLEHRGKLDGNQDLIRFAQMLEKVCVETVESGAMTKDLAGCIHGLSNVKLNEHFLNTTDFLDTIKSNLDRALGRQ

SEQ ID NO: 55879 - protein, 184 aa, Homo sapiens
LSKELLAEYQDLTFLTKQEILLAHRRFCELLPQEQRSVESSLRAQVPFEQILSLPELKANPFKERICRVFSTSPAKDSLSFEDFLDLLSVFSDTATPDIKSHYAFRIFDFDDDGTLNREDLSRLVNCLTGEGEDTRLSASEMKQLIDNILEESDIDRDGTINLSEFQHVISRSPDFASSFKIVL

SEQ ID NO: 55880 - protein, 21 aa, Homo sapiens
ISCVKEEIQETQTPTHSQKKR

SEQ ID NO: 55881 - protein, 88 aa, Homo sapiens
LATLSENNMEAKFLGNAPCGHYTFKFPQAMRTESNLGAKVFFFKALLLTGDFSQAGNKGHHVWVTKDELGDYLKPKYLAQVRRFVSDL

SEQ ID NO: 55882 - protein, 41 aa, Homo sapiens
RPNSGIIDPGSTVTVSVMLQPFDYDPNEKSKHKFMVQFLLH

SEQ ID NO: 55883 - protein, 19 aa, Homo sapiens
VQPAAGGRALLLDQPAVAG

SEQ ID NO: 55884 - protein, 969 aa, Homo sapiens
ITMAKGFYISKSLGILGILLGVAAVCTIIALSVVYSQEKNKNANSSPVASTTPSASATTNPASATTLDQSKAWNRYRLPNTLKPDSYRVTLRPYLTPNDRGLYVFKGSSTVRFTCKEATDVIIIHSKKLNYTLSQGHRVVLRGVGGSQPPDIDKTELVEPTEYLVVHLKGSLVKDSQYEMDSEFEGELADDLAGFYRSEYMEGNVRKVVATTQMQAADARKSFPCFDEPAMKAEFNITLIHPKDLTALSNMLPKGPSTPLPEDPNWNVTEFHTTPKMSTYLLAFIVSEFDYVEKQASNGVLIRIWARPSAIAAGHGDYALNVTGPILNFFAGHYDTPYPLPKSDQIGLPDFNAGAMENWGLVTYRENSLLFDPLSSSSSNKERVVTVIAHELAHQWFGNLVTIEWWNDLWLNEGFASYVEYLGADYAEPTWNLKDLMVLNDVYRVMAVDALASSHPLSTPASEINTPAQISELFDAISYSKGASVLRMLSSFLSEDVFKQGLASYLHTFAYQNTIYLNLWDHLQEAVNNRSIQLPTTVRDIMNRWTLQMGFPVITVDTSTGTLSQEHFLLDPDSNVTRPSEFNYVWIVPITSIRDGRQQQDYWLIDVRAQNDLFSTSGNEWVLLNLNVTGYYRVNYDEENWRKIQTQLQRDHSAIPVINRAQIINDAFNLASAHKVPVTLALNNTLFLIEERQYMPWEAALSSLSYFKLMFDRSEVYGPMKNYLKKQVTPLFIHFRNNTNNWREIPENLMDQYSEVNAISTACSNGVPECEEMVSGLFKQWMENPNNNPIHPNLRSTVYCNAIAQGGEEEWDFAWEQFRNATLVNEADKLRAALACSKELWILNRYLSYTLNPDLIRKQDATSTIISITNNVIGQGLVWDFVQSNWKKLFNDYGGGSFSFSNLIQAVTRRFSTEYELQQLEQFKKDNEETGFGSGTRALEQALEKTKANIKWVKENKEVVLQWFTENSK

SEQ ID NO: 55885 - protein, 32 aa, Homo sapiens
KNRICFKFDHLRKEATDPRPCEVENAIESWRT

SEQ ID NO: 55886 - protein, 80 aa, Homo sapiens
RRSKTFNPGAGLPTDKKKGGPSPGDVEAIKNAIANASTLAEVERLKGLLQSGQIPGRERRSGPTDDGEEEMEEDTVTNGS

SEQ ID NO: 55887 - protein, 230 aa, Homo sapiens
LLFLSQFCILSGGEQSQALAQSIKDPGPTRTFTVVPRAAESTEIPPYVMKCPSNGLCSRLPADCIDCTTNFSCTYGKPVTFDCAVKPSVTCVDQDFKSQKNFIINMTCRFCWQLPETDYECTNSTSCMTVSCPRQRYPANCTVRDHVHCLGNRTFPKMLYCNWTGGYKWSTALALSITLGGFGADRFYLGQWREGLGKLFSFGGLGIWTLIDVLLIGVGYVGPADGSLYI

SEQ ID NO: 55888 - protein, 43 aa, Homo sapiens
LEPGMDSEAWTADQQASPGQQKSSNCSSLNKEHSDSNYTTQTT

SEQ ID NO: 55889 - protein, 2872 aa, Homo sapiens
IMRRGRLLEIALGFTVLLASYTSHGADANLEAGNVKETRASRAKRRGGGGHDALKGPNVCGSRYNAYCCPGWKTLPGGNQCIVPICRHSCGDGFCSRPNMCTCPSGQIAPSCGSRSIQHCNIRCMNGGSCSDDHCLCQKGYIGTHCGQPVCESGCLNGGRCVAPNRCACTYGFTGPQCERDYRTGPCFTVISNQMCQGQLSGIVCTKTLCCATVGRAWGHPCEMCPAQPHPCRRGFIPNIRTGACQDVDECQAIPGLCQGGNCINTVGSFECKCPAGHKLNEVSQKCEDIDECSTIPGICEGGECTNTVSSYFCKCPPGFYTSPDGTRCIDVRPGYCYTALTNGRCSNQLPQSITKMQCCCDAGRCWSPGVTVAPEMCPIRATEDFNKLCSVPMVIPGRPEYPPPPLGPIPPVLPVPPGFPPGPQIPVPRPPVEYLYPSREPPRVLPVNVTDYCQLVRYLCQNGRCIPTPGSYRCECNKGFQLDLRGECIDVDECEKNPCAGGECINNQGSYTCQCRAGYQSTLTRTECRDIDECLQNGRICNNGRCINTDGSFHCVCNAGFHVTRDGKNCEDMDECSIRNMCLNGMCINEDGSFKCICKPGFQLASDGRYCKDINECETPGICMNGRCVNTDGSYRCECFPGLAVGLDGRVCVDTHMRSTCYGGYKRGQCIKPLFGAVTKSECCCASTEYAFGEPCQPCPAQNSAEYQALCSSGPGMTSAGSDINECALDPDICPNGICENLRGTYKCICNSGYEVDSTGKNCVDINECVLNSLLCDNGQCRNTPGSFVCTCPKGFIYKPDLKTCEDIDECESSPCINGVCKNSPGSFICECSSESTLDPTKTICIETIKGTCWQTVIDGRCEININGATLKSQCCSSLGAAWGSPCTLCQVDPICGKGYSRIKGTQCEDIDECEVFPGVCKNGLCVNTRGSFKCQCPSGMTLDATGRICLDIRLETCFLRYEDEECTLPIAGRHRMDACCCSVGAAWGTEECEECPMRNTPEYEELCPRGPGFATKEITNGKPFFKDINECKMIPSLCTHGKCRNTIGSFKCRCDSGFALDSEERNCTDIDECRISPDLCGRGQCVNTPGDFECKCDEGYESGFMMMKNCMDIDECQRDPLLCRGGVCHNTEGSYRCECPPGHQLSPNISACIDINECELSAHLCPNGRCVNLIGKYQCACNPGYHSTPDRLFCVDIDECSIMNGGCETFCTNSEGSYECSCQPGFALMPDQRSCTDIDECEDNPNICDGGQCTNIPGEYRCLCYDGFMASEDMKTCVDVNECDLNPNICLSGTCENTKGSFICHCDMGYSGKKGKTGCTDINECEIGAHNCGKHAVCTNTAGSFKCSCSPGWIGDGIKCTDLDECSNGTHMCSQHADCKNTMGSYRCLCKEGYTGDGFTCTDLDECSENLNLCGNGQCLNAPGGYRCECDMGFVPSADGKACEDIDECSLPNICVFGTCHNLPGLFRCECEIGYELDRSGGNCTDVNECLDPTTCISGNCVNTPGSYICDCPPDFELNPTRVGCVDTRSGNCYLDIRPRGDNGDTACSNEIGVGVSKASCCCSLGKAWGTPCEMCPAVNTSEYKILCPGGEGFRPNPITVILEDIDECQELPGLCQGGKCINTFGSFQCRCPTGYYLNEDTRVCDDVNECETPGICGPGTCYNTVGNYTCICPPDYMQVNGGNNCMDMRRSLCYRNYYADNQTCDGELLFNMTKKMCCCSYNIGRAWNKPCEQCPIPSTDEFATLCGSQRPGFVIDIYTGLPVDIDECREIPGVCENGVCINMVGSFRCECPVGFFYNDKLLVCEDIDECQNGPVCQRNAECINTAGSYRCDCKPGYRFTSTGQCNDRNECQEIPNICSHGQCIDTVGSFYCLCHTGFKTNDDQTMCLDINECERDACGNGTCRNTIGSFNCRCNHGFILSHNNDCIDVDECASGNGNLCRNGQCINTVGSFQCQCNEGYEVAPDGRTCVDINECLLEPRKCAPGTCQNLDGSYRCICPPGYSLQNEKCEDIDECVEEPEICALGTCSNTEGSFKCLCPEGFSLSSSGRRCQDLRMSYCYAKFEGGKCSSPKSRNHSKQECCCALKGEGWGDPCELCPTEPDEAFRQICPYGSGIIVGPDDSAVDMDECKEPDVCKHGQCINTDGSYRCECPFGYILAGNECVDTDECSVGNPCGNGTCKNVIGGFECTCEEGFEPGPMMTCEDINECAQNPLLCAFRCVNTYGSYECKCPVGYVLREDRRMCKDEDECEEGKHDCTEKQMECKNLIGTYMCICGPGYQRRPDGEGCVDENECQTKPGICENGRCLNTRGSYTCECNDGFTASPNQDECLDNREGYCFTEVLQNMCQIGSSNRNPVTKSECCCDGGRGWGPHCEICPFQGTVAFKKLCPHGRGFMTNGADIDECKVIHDVCRNGECVNDRGSYHCICKTGYTPDITGTSCVDLNECNQAPKPCNFICKNTEGSYQCSCPKGYILQEDGRSCKDLDECATKQHNCQFLCVNTIGGFTCKCPPGFTQHHTSCIDNNECTSDINLCGSKGICQNTPGSFTCECQRGFSLDQTGSSCEDVDECEGNHRCQHGCQNIIGGYRCSCPQGYLQHYQWNQCVDENECLSAHICGGASCHNTLGSYKCMCPAGFQYEQFSGGCQDINECGSAQAPCSYGCSNTEGGYLCGCPPGYFRIGQGHCVSGMGMGRGNPEPPVSGEMDDNSLSPEACYECKINGYPKRGRKRRSTNETDASNIEDQSETEANVSLASWDVEKTAIFAFNISHVSNKVRILELLPALTTLTNHNRYLIESGNEDGFFKINQKEGISYLHFTKKKPVAGTYSLQISSTPLYKKKELNQLEDKYDKDYLSGELGDNLKMKIQVLLH

SEQ ID NO: 55890 - protein, 19 aa, Homo sapiens
MYLQTWIPAGIRWTLLQRH

SEQ ID NO: 55891 - protein, 23 aa, Homo sapiens
KKLRDYGIRNRDEVSFIKKLRQK

SEQ ID NO: 55892 - protein, 153 aa, Homo sapiens
LDLGTGAVLCSLALPSLPGGPLSASLPTADHRSAFFFWGLHELGSTSETETGEARHSLYMFHPTLPRVLLELANVSTHIVAFDAVLFEPSRHAAYILLTGPADSEAPGLVSVIKHKVRDLVPSSRVVRLGEGGPDSDQAIRDRFSRLRYQSEA

SEQ ID NO: 55893 - protein, 87 aa, Homo sapiens
MSSGPVVAMVWEGYNVVRASRAMIGHTDSAEAAPGTIRGDFSVHISRNVIHASDSVEGAQREIQLWFQSSELVSWADGGQHSSIHPA

SEQ ID NO: 55894 - protein, 48 aa, Homo sapiens
IAHSVLYLASPLASYVTGAVLVADGGAWLTFPNGVKGLPDFASFSAKL

SEQ ID NO: 55895 - protein, 209 aa, Homo sapiens
KAHFFLGQCQLEMESYDEAIANLQRAYSLAKEQRLNFGDDIPSALRIAKKKRWNSIEERRIHQESELHSYLSRLIAAERERELEECQRNHEGDEDDSHVRAQQACIEAKHDKYMADMDELFSQVDEKRKKRDIPDYLCGKISFELMREPCITPSGITYDRKDIEEHLQRVGHFDPVTRSPLTQEQLIPNLAMKEVIDAFISENGWVEDY

SEQ ID NO: 55896 - protein, 175 aa, Homo sapiens
LEMESYDEAIANLQRAYSLAKEQRLNFGDDIPSALRIAKKKRWNSIEERRIHQESELHSYLSRLIAAERERELEECQRNHEGDEDDSHVRAQQACIEAKHDKYMADMDELFSQVDEKRKKRDIPDYLCGKISFELMREPCITPSGITYDRKDIEEHLQVRPAAGGAGPVAWSWAP

SEQ ID NO: 55897 - protein, 52 aa, Homo sapiens
VTAVGEGLDRVWAYDVPEGGQAGEAASSRIPIQAAPGPSSAPIPGGLISQAS

SEQ ID NO: 55898 - protein, 155 aa, Homo sapiens
IALSRLAQERKAWRKDHPFGFVAVPTKNPDGTMNLMNWECAIPGKKGTPWEGGLFKLRMLFKDDYPSSPPKCKFEPPLFHPNVYPSGTVCLSILEEDKDWRPAITIKQILLGIQELLNEPNIQDPAQAEAYTIYCQNRVEYEKRVRAQAKKFAPS

SEQ ID NO: 55899 - protein, 297 aa, Homo sapiens
LLLLGLSAGGPAPAGAAKMKVVEEPNAFGVNNPFLPQASRLQAKRDPSPVSGPVHLFRLSGKCFSLVESTYKYEFCPFHNVTQHEQTFRWNAYSGILGIWHEWEIANNTFTGMWMRDGDACRSRSRQSKVELACGKSNRLAHVSEPSTCVYALTFETPLVCHPHALLVYPTLPEALQRQWDQVEQDLADELITPQGHEKLLRTLFEDAGYLKTPEENEPTQLEGGPDSLGFETLENCRKAHKELSKEIKRLKGLLTQHGIPYTRPTETSNLEHLGHETPRAKSPEQLRGDPGLRGSL

SEQ ID NO: 55900 - protein, 60 aa, Homo sapiens
LALGSCCCPPSAPWDGPRGEQLQHRPGPAPGAGRRIRPGREAAHLDHPMGLRPRRPEDEW

SEQ ID NO: 55901 - protein, 83 aa, Homo sapiens
LASFVLVIGLVTFYRIGPYTNLSWSCYLNIGACLLATLAAAMLIWNILHKREDCMAPRVIVISRSLTARFRRGLDNDYVESPC

SEQ ID NO: 55902 - protein, 152 aa, Homo sapiens
RPNRMASNIFGPTEEPQNIPKRTNPPGGKGSGIFDESTPVQTRQHLNPPGGKTSDIFGSPVTATSRLAHPNKPKDHVFLCEGEEPKSDLKAARSIPAGAEPGEKGSARKAGPAKEQEPMPTVDSHEPRLGPRPRSHNKVLNPPGGKSSISFY

SEQ ID NO: 55903 - protein, 81 aa, Homo sapiens
MSGFTCPHCTECTSVFSRGGGEELAQLAGVPFLGSVPLDPALMRTLEEGHDFIQEFPGSPAFAALTSIAQKILDATPACLP

SEQ ID NO: 55904 - protein, 164 aa, Homo sapiens
MPAYTRNLHHELELGVVMGKRCRAVPEAAAMDYVGGYALCLDMTARDVQDECKKKGLPWTLAKSFTASCPVSAFVPKEKIPDPHKLKLWLKVNGELRQEGETSSMIFSIPYIISYVSKIITLEEGDIILTGTPKGVGPVKENDEIEAGIHGLVSMTFKVEKPEY

SEQ ID NO: 55905 - protein, 73 aa, Homo sapiens
IYPSKWIARLRHIKRLRQRICEEAAYSNPSLPLVHPPSHSKAPAQTPAEPTPGYEVGQRKRLISSVEDFTEFV

SEQ ID NO: 55906 - protein, 69 aa, Homo sapiens
VYALAVISTPDQTKVFSASYDRSLRVWSMDNMICTQTLLRHQGSVTALAVSRGRLFSGAVDSTVKVWTC

SEQ ID NO: 55907 - protein, 15 aa, Homo sapiens
VPDLLWAAHHACPRD

SEQ ID NO: 55908 - protein, 120 aa, Homo sapiens
KSGTGIAAMSVMRPEQIMKSIIPVVMAGIIAIYGLVVAVLIANSLNDDISLYKSFLQLGAGLSVGLSGLAAGFAIGIVGDAGVRGTAQQPRLFVGMILILIFAEVLGLYGLIVALILSTK

SEQ ID NO: 55909 - protein, 104 aa, Homo sapiens
ITSLIKLVKDKIRERDSKTSQVPVKHVYRVLQCQEEELTQMVSTMSDGWKFEQLVSIGSSYNYGNEDQAEFLCVVSKELHNTPYGTASEPSEKAKILQERGSRM

SEQ ID NO: 55910 - protein, 560 aa, Homo sapiens
IQANSAYRYPPKSGNYFASHFFMGGEKFDTPHPEGYLFGENMDLNFLGSRPVQFPYVTPAPHEPVKTLRSLVNIRKDSLRLVRYKDDADSPTEDGDKPRVLYSLEFTFDADARVAITIYCQASEEFLNGRAVYSPKSPSLQSETVHYKRGVSQQFSLPSFKIDFSEWKDDELNFDLDRGVFPVVIQAVVDEGDVVEVTGHAHVLLAAFEKHMDGSFSVKPLKQKQIVDRVSYLLQEIYGIENKNNQETKPSDDENSDNSNECVVCLSDLRDTLILPCRHLCLCTSCADTLRYQANNCPICRLPFRALLQIRAVRKKPGALSPVSFSPVLAQSLEHDEHSCPFKKSKPHPASLASKKPKRETNSDSVPPGYEPISLLEALNGLRAVSPAIPSAPLYEEITYSGISDGLSQASCPLAAIDHILDSSRQKGRPQSKAPDSTLRSPSSPIHEEDEEKLSEDVDAPPPLGGAELALRESSSPESFITEEVDESSSPQQGTRAASIENVLQDSSPEHCGRGPPADIYLPGRPTSMETAHGLATTSPTWPPLGGPSPDPSAAELTPL

SEQ ID NO: 55911 - protein, 141 aa, Homo sapiens
MQMRFDGLLGFPGGFVDRRFWSLEDGLNRVLGLGLGCLRLTEADYLSSHLTEGPHRVVAHLYARQLTLEQLHAVEISAVHSRDHGLEVGPPPGPRPPPRGLALAPWKAPMGAGPRAGPAVHPEGPSRRLPQLPEQRLREHG

SEQ ID NO: 55912 - protein, 65 aa, Homo sapiens
KDAIVTGPAPGSFHHGLGHSLLAGLHSSPPHAAPLPHAAVPTHIPQSLPGASQLHGKGPAVPRKL

SEQ ID NO: 55913 - protein, 59 aa, Homo sapiens
IQIVGLTELQSLAVGPRVFQYGVKVVLQAMYLLWKLMWREPGAYIFLQSLSFLEPPRSA

SEQ ID NO: 55914 - protein, 169 aa, Homo sapiens
LPSIAVCWFVGCLCGSKLVIDWHNYGYSIMGLVHGPNHPLVLLAKWYEKFFGRLSHLNLCVTNAMREDLADNWHIRAVTVYDKPASFFKETPLDLQHRLFMKLGSMHSPFRARSEPEDPVTERSAFTERDAGSGLVTRLRERPALLVSSTSWTEDEDFSILLAALESRV

SEQ ID NO: 55915 - protein, 68 aa, Homo sapiens
VRGRGTFCSFDTPDDSIRNKLILIARNKGVVLGGCGDKSIRFRPTLVFRDHHAHLFLNIFSDILADFK

SEQ ID NO: 55916 - protein, 223 aa, Homo sapiens
ITKEMDDFLQKLRQKIKIGVVGGSDFEKVQEQLGNDVVEKYDYVFPENGLVAYKDGKLLCRQNIQSHLGEALIQDLINYCLSYIAKIKLPKKRGTFIEFRNGMLNVSPIGRSCSQEERIEFYELDKKENIRQKFVADLRKEFAGKGLTFSIGGQISFDVFPDGWDKRYCLRHVENDGYKTIYFFGDKTMPGGNDHEIFTDPRTMGYSVTAPEDTRRICELLFS

SEQ ID NO: 55917 - protein, 322 aa, Homo sapiens
RPGPLKGEGAVGRQALPPGRLTTTLPRGPRLRRTRRRWRRGRGRPRRMEERKEEGEAEIQEHGPEHWFSKWERQCLAEAEQDEQLPPELQEEAAAAAQPEHKQQKLWHLFQNSATAVAQLYKDRVCQQPGLSLWVPFQNAATAVTNLYKESVDTHQRSFDIGIQIGYQRRNKDVLAWVKKRRRTIRREDLISFLCGKVPPPRNSRAPPRLTVVSPNRATSTETSSSVETDLQPFREAIALHGLSGAMASISVRSSTPGSPTHVSSGSNASRRRNGLHDVDLNTFISEEMALHLDNGGTRKRTSAQCGDVITDSPTHKRNRMI

SEQ ID NO: 55918 - protein, 129 aa, Homo sapiens
IDGAVIITTPQEVSLQDVRKEINFCRKVKLPIIGVVENMSGFICPKCKKESQIFPPTTGGAELMCQDLEVPLLGRVPLDPLIGKNCDKGQSFFIDAPDSPATLAYRSIIQRIQEFCNLHQSKEENLISS

SEQ ID NO: 55919 - protein, 52 aa, Homo sapiens
KETLIQLMPFFVDITPPGEPVNSRPKAASRFPKLSRGQPRETRNVEPQSGDL

SEQ ID NO: 55920 - protein, 2748 aa, Homo sapiens
IGLPTPRGSGTNGYVQRNLSLVRGRRGERPDYKGEEELRRLEAALVKRPNPDILDHERKRRVELRCLELEEMMEEQGYEEQQIQEKVATFRLMLLEKDVNPGGKEETPGQRPAVTETHQLAELNEKKNERLRAAFGISDSYVDGSSFDPQRRAREAKQPAPEPPKPYSLVRESSSSRSPTPKQKKKKKKKDRGRRSESSSPRRERKKSSKKKKHRSESESKKRKHRSPTPKSKRKSKDKKRKRSRSTTPAPKSRRAHRSTSADSASSSDTSRSRSRSAAAKTHTTALAGRSPSPASGRRGEGDAPFSEPGTTSTQRPSSPETATKQPSSPYEDKDKDKKEKSATRPSPSPERSSTGPEPPAPTPLLAERHGGSPQPLATTPLSQEPVNPPSEASPTRDRSPPKSPEKLPQSSSSESSPPSPQPTKVSRHASSSPESPKPAPAPGSHREISSSPTSKNRSHGRAKRDKSHSHTPSRRMGRSRSPATAKRGRSRSRTPTKRGHSRSRSPQWRRSRSAQRWGRSRSPQRRGRSRSPQRPGWSRSRNTQRRGRSRSARRGRSHSRSPATRGRSRSRTPARRGRSRSRTPARRRSRSRTPTRRRSRSRTPARRGRSRSRTPARRRSRTRSPVRRRSRSRSPARRSGRSRSRTPARRGRSRSRTPARRGRSRSRTPARRSGRSRSRTPARRGRSRSRTPRRGRSRSRSLVRRGRSHSRTPQRRGRSGSSSERKNKSRTSQRRSRSNSSPEMKKSRISSRRSRSLSSPRSKAKSRLSLRRSLSGSSPCPKQKSQTPPRRSRSGSSQPKAKSRTPPRRSRSSSSPPPKQKSKTPSRQSHSSSSPHPKVKSGTPPRQGSITSPQANEQSVTPQRRSCFESSPDPELKSRTPSRHSCSGSSPPRVKSSTPPRQSPSRSSSPQPKVKAIISPRQRSHSGSSSPSPSRVTSRTTPRRSRSVSPCSNVESRLLPRYSHSGSSSPDTKVKPETPPRQSHSGSISPYPKVKAQTPPGPSLSGSKSPCPQEKSKDSLVQSCPGSLSLCAGVKSSTPPGESYFGVSSLQLKGQSQTSPDHRSDTSSPEVRQSHSESPSLQSKSQTSPKGGRSRSSSPVTELASRSPIRQDRGEFSASPMLKSGMSPEQSRFQSDSSSYPTVDSNSLLGQSRLETAESKEKMALPPQEDATASPPRQKDKFSPFPVQDRPESSLVFKDTLRTPPRERSGAGSSPETKEQNSALPTSSQDEELMEVVEKSEEPAGQILSHLSSELKEMSTSNFESSPEVEERPAVSLTLDQSQSQASLEAVEVPSMASSWGGPHFSPEHKELSNSPLRENSFGSPLEFRNSGPLGTEMNTGFSSEVKEDLNGPFLNQLETDPSLDMKEQSTRSSGHSSSELSPDAVEKAGMSSNQSISSPVLDAVPRTPSRERSSSASSPEMKDGLPRTPSRRSRSGSSPGLRDGSGTPSRHSLSGSSPGMKDIPRTPSRGRSECDSSPEPKALPQTPRPRSRSPSSPELNNKCLTPQRERSGSESSVDQKTVARTPLGQRSRSGSSQELDVKPSASPQERSESDSSPDSKAKTRTPLRQRSRSGSSPEVDSKSRLSPRRSRSGSSPEVKDKPRAAPRAQSGSDSSPEPKAPAPRALPRRSRSGSSSKGRGPSPEGSSSTESSPEHPPKSRTARRGSRSSPEPKTKSRTPPRRRSSRSSPELTRKARLSRRSRSASSSPETRSRTPPRHRRSPSVSSPEPAEKSRSSRRRRSASSPRTKTTSRRGRSPSPKPRGLQRSRSRSRREKTRTTRRRDRSGSSQSTSRRRQRSRSRSRVTRRRRGGSGYHSRSPARQESSRTSSRRRRGRSRTPPTSRKRSRSRTSPAPWKRSRSRASPATHRRSRSRTPLISRRRSRSRTSPVSRRRSRSRTSVTRRRSRSRASPVSRRRSRSRTPPVTRRRSRSRTPTTRRRSRSRTPPVTRRRSRSRTPPVTRRRSRSRTSPITRRRSRSRTSPVTRRRSRSRTSPVTRRRSRSRTSPVTRRRSRSRTPPAIRRRSRSRTPLLPRKRSRSRSPLAIRRRSRSRTPRTARGKRSLTRSPPAIRRRSASGSSSDRSRSATPPATRNHSGSRTPPVALNSSRMSCFSRPSMSPTPLDRCRSPGMLEPLGSSRTPMSVLQQAGGSMMDGPGPRIPDHQRTSVPENHAQSRIALALTAISLGTARPPPSMSAAGLAARMSQVPAPVPLMSLRTAPAANLASRIPAASAAAMNLASARTPAIPTAVNLADSRTPAAAAAMNLASPRTAVAPSAVNLADPRTPTAPAVNLAGARTPAALAALSLTGSGTPPTAANYPSSSRTPQAPASANLVGPRSAHATAPVNIAGSRTAAALAPASLTSARMAPALSGANLTSPRVPLSAYERVSGRTSPPLLDRARSRTPPSAPSQSRMTSERAPSPSSRMGQAPSQSLLPPAQDQPRSPVPSAFSDQSRCLIAQTTPVAGSQSLSSGAVATTTSSAGDHNGMLSVPAPGVPHSDVGEPPASTGAQQPSALAALQPAKERRSSSSSSSSSSSSSSSSSSSSSSSSSGSSSSDSEGSSLPVQPEVALKRVPSPTPAPKEAVREGRPPEPTPAKRKRRSSSSSSSSSSSSSSSSSSSSSSSSSSSSSSSSSSSSSSSSSSPSPAKPGPQALPKPASPKKPPPGERRSRSPRKPIDSLRDSRSLSYSPVERRRPSPQPSPRDQQSSSSERGSRRGQRGDSRSPSHKRRRETPSPRPMRHRSSRSP

SEQ ID NO: 55921 - protein, 144 aa, Homo sapiens
LGPGMPLPEPSEQEGESVKASQEPSPKPGTEVIPAAPRKPRKFSKLVLLTASKDSTKVAGAKRKGVHCVMSLGVPGPATLAKALLQTHPEAQRAIEAAPQEPEQKRSRQDPGTDRTEDSGLAAGPPEAAGENFAPCSVAPGKSL

SEQ ID NO: 55922 - protein, 14 aa, Homo sapiens
ISYFCKQKNTFKQE

SEQ ID NO: 55923 - protein, 37 aa, Homo sapiens
LDLSTGVNSAASSPEALAPGWVVIPPGSVLLKPAVVN

SEQ ID NO: 55924 - protein, 180 aa, Homo sapiens
LLYALKSSPRLSLLYLYLFDYTDTFLPFIHTICPLQEDSSGEDIVTKLLDLKEPTWKQWREFLVKYSFLPYQLIAEFAWDWLEVHYWTSRFLIINAMLLSVLELFSFWRIWSRSELKTVPQRMWSHFWKVSTQGLFVAMFWPLIPQFVCNCLFYWALYFNPIINIDLVVKELRRLETQVL

SEQ ID NO: 55925 - protein, 30 aa, Homo sapiens
TGERPYKCSECGESFSRSSRLMSHQRTHTG

SEQ ID NO: 55926 - protein, 315 aa, Homo sapiens
LAGWLCLSLASVWLARRMWTLRSPLTRSLYVNMTSGPGGPAAAAGGRKENHQWYVCNREKLCESLQAVFVQSYLDQGTQIFLNNSIEKSGWLFIQLYHSFVSSVFSLFMSRTSINGLLGRGSMFVFSPDQFQRLLKINPDWKTHRLLDLGAGDGEVTKIMSPHFEEIYATELSETMIWQLQKKKYRVLGINEWQNTGFQYDVISCLNLLDRCDQPLTLLKDIRSVLEPTRGRVILALVLPFHPYVENVGGKWEKPSEILEIKGQNWEEQVNSLPEVFRKAGFVIEAFTRLPYLCEGDMYNDYYVLDDAVFVLKPV

SEQ ID NO: 55927 - protein, 81 aa, Homo sapiens
LEMTDCDEGGEYDGMQDEPRYMMLAREAEMLFTGGYGLEKDPQRSGDLYTQAAEAAMEAMKGRLANQYYQKAEEAWAQMEE

SEQ ID NO: 55928 - protein, 1200 aa, Homo sapiens
LSGVGPAHGSEDIVVGCGGFVKSDVEINYSLIEIKLYTKHGTLKYQTDCAPNNGYFMIPLYDKGDFILKIEPPLGWSFEPTTVELHVDGVSDICTKGGDINFVFTGFSVNGKVLSKGQPLGPAGVQVSLRNTGTEAKIQSTVTQPGGKFAFFKVLPGDYEILATHPTWALKEASTTVRVTNSNANAASPLIVAGYNVSGSVRSDGEPMKGVKFLLFSSLVTKEDVLGCNVSPVPGFQPQDESLVYLCYTVSREDGSFSFYSLPSGGYTVIPFYRGERITFDVAPSRLDFTVEHDSLKIEPVFHVMGFSVTGRVLNGPEGDGVPEAVVTLNNQIKVKTKADGSFRLENITTGTYTIHAQKEHLYFETVTIKIAPNTPQLADIIATGFSVCGQISIIRFPDTVKQMNKYKVVLSSQDKDKSLVTVETDAHGSFCFKAKPGTYKVQVMVPEAETRAGLTLKPQTFPLTVTNRPMMDVAFVQFLASVSGKVSCLDTCGDLLVTLQSLSRQGEKRSLQLSGKVNAMTFTFDNVLPGKYKISIMHEDWCWKNKSLEVEVLEDDMSAVEFRQTGYMLRCSLSHAITLEFYQDGNGRENVGIYNLSKGVNRFCLSKPGVYKVTPRSCHRFEQAFYTYDTSSPSILTLTAIRHHVLGTITTDKMMDVTVTIKSSIDSEPALVLGPLKSVQELRREQQLAEIEARRQEREKNGNEEGEERMTKPPVQEMVDELQGPFSYDFSYWARSGEKITVTPSSKELLFYPPSMEAVVSGESCPGKLIEIHGKAGLFLEGQIHPELEGVEIVISEKGASSPLITVFTDDKGAYSVGPLHSDLEYTVTSQKEGYVLTAVEGTIGDFKAYALAGVSFEIKAEDDQPLPGVLLSLSGGLFRSNLLTQDNGILTFSNLSPGQYYFKPMMKEFRFEPSSQMIEVQEGQNLKITITGYRTAYSCYGTVSSLNGEPEQGVAMEAVGQNDCSIYGEDTVTDEEGKFRLRGLLPGCVYHVQLKAEGNDHIERALPHHRVIEVGNNDIDDVNIIVFRQINQFDLSGNVITSSEYLPTLWVKLYKSENLDNPIQTVSLGQSLFFHFPPLLRDGENYVVLLDSTLPRSQYDYILPQVSFTAVGYHKHITLIFNPTRKLPEQDIAQGSYIALPLTLLVLLAGYNHDKLIPLLLQLTSRLQGVRALGQAASDNSGPEDAKRQAKKQKTRRT

SEQ ID NO: 55929 - protein, 777 aa, Homo sapiens
TLAEMGKNLKEAVKMLEDSQRRTEEENGKKLISGDIPGPLQGSGQDMVSILQLVQNLMHGDEDEEPQSPRIQNIGEQGHMALLGHSLGAYISTLDKEKLRKLTTRILSDTTLWLCRIFRYENGCAYFHEEEREGLAKICRLAIHSRYEDFVVDGFNVLYNKKPVIYLSAAARPGLGQYLCNQLGLPFPCLCRVPCNTVFGSQHQMDVAFLEKLIKDDIERGRLPLLLVANAGTAAVGHTDKIGRLKELCEQYGIWLHVEGVNLATLALGYVSSSVLAAAKCDSMTMTPGPWLGLPAVPAVTLYKHDDPALTLVAGLTSNKPTDKLRALPLWLSLQYLGLDGFVERIKHACQLSQRLQESLKKVNYIKILVEDELSSPVVVFRFFQELPGSDPVFKAVPVPNMTPSGVGRERHSCDALNRWLGEQLKQLVPASGLTVMDLEAEGTCLRFSPLMTAAVLGTRGEDVDQLVACIESKLPVLCCTLQLREEFKQEVEATAGLLYVDDPNWSGIGVVRYEHANDDKSSLKSDPEGENIHAGLLKKLNELESDLTFKIGPEYKSMKSCLYVGMASDNVDAAELVETIAATAREIEENSRLLENMTEVVRKGIQEAQVELQKASEERLLEEGVLRQIPVVGSVLNWFSPVQALQKGRTFNLTAGSLESTEPIYVYKAQGAGVTLPPTPSGSRTKQRLPGQKPFKRSLRGSDALSETSSVSHIEDLEKVERLSSGPEQITLEASSTEGHPGAPSPQHTDQTEAFQKGVPHPEDDHSQVEGPESLR

SEQ ID NO: 55930 - protein, 1511 aa, Homo sapiens
TWNTSNPDFTKCFQNTVLVWVPCFYLWACFPFYFLYLSRHDRGYIQMTPLNKTKTALGFLLWIVCWADLFYSFWERSRGIFLAPVFLVSPTLLGITMLLATFLIQLERRKGVQSSGIMLTFWLVALVCALAILRSKIMTALKEDAQVDLFRDITFYVYFSLLLIQLVLSCFSDRSPLFSETIHDPNPCPESSASFLSRITFWWITGLIVRGYRQPLEGSDLWSLNKEDTSEQVVPVLVKNWKKECAKTRKQPVKVVYSSKDPAQPKESSKVDANEEVEALIVKSPQKEWNPSLFKVLYKTFGPYFLMSFFFKAIHDLMMFSGPQILKLLIKFVNDTKAPDWQGYFYTVLLFVTACLQTLVLHQYFHICFVSGMRIKTAVIGAVYRKALVITNSARKSSTVGEIVNLMSVDAQRFMDLATYINMIWSAPLQVILALYLLWLNLGPSVLAGVAVMVLMVPVNAVMAMKTKTYQVAHMKSKDNRIKLMNEILNGIKVLKLYAWELAFKDKVLAIRQEELKVLKKSAYLSAVGTFTWVCTPFLVALCTFAVYVTIDENNILDAQTAFVSLALFNILRFPLNILPMVISSIVQASVSLKRLRIFLSHEELEPDSIERRPVKDGGGTNSITVRNATFTWARSDPPTLNGITFSIPEGALVAVVGQVGCGKSSLLSALLAEMDKVEGHVAIKGSVAYVPQQAWIQNDSLRENILFGCQLEEPYYRSVIQACALLPDLEILPSGDRTEIGEKGVNLSGGQKQRVSLARAVYSNADIYLFDDPLSAVDAHVGKHIFENVIGPKGMLKNKTRILVTHSMSYLPQVDVIIVMSGGKISEMGSYQELLARDGAFAEFLRTYASTEQEQDAEENGVTGVSGPGKEAKQMENGMLVTDSAGKQLQRQLSSSSSYSGDISRHHNSTAELQKAEAKKEETWKLMEADKAQTGQVKLSVYWDYMKAIGLFISFLSIFLFMCNHVSALASNYWLSLWTDDPIVNGTQEHTKVRLSVYGALGISQGIAVFGYSMAVSIGGILASRCLHVDLLHSILRSPMSFFERTPSGNLVNRFSKELDTVDSMIPEVIKMFMGSLFNVIGACIVILLATPIAAIIIPPLGLIYFFVQRFYVASSRQLKRLESVSRSPVYSHFNETLLGVSVIRAFEEQERFIHQSDLKVDENQKAYYPSIVANRWLAVRLECVGNCIVLFAALFAVISRHSLSAGLVGLSVSYSLQVTTYLNWLVRMSSEMETNIVAVERLKEYSETEKEAPWQIQETAPPSSWPQVGRVEFRNYCLRYREDLDFVLRHINVTINGGEKVGIVGRTGAGKSSLTLGLFRINESAEGEIIIDGINIAKIGLHDLRFKITIIPQDPVLFSGSLRMNLDPFSQYSDEEVWTSLELAHLKDFVSALPDKLDHECAEGGENLSVGQRQLVCLARALLRKTKILVLDEATAAVDLETDDLIQSTIRTQFEDCTVLTIAHRLNTIMDYTRVIVLDKGEIQEYGAPSDLLQQRGLFYSMAKDAGLV

SEQ ID NO: 55931 - protein, 1200 aa, Homo sapiens
LSGVGPAHGSEDIVVGCGGFVKSDVEINYSLIEIKLYTKHGTLKYQTDCAPNNGYFMIPLYDKGDFILKIEPPLGWSFEPTTVELHVDGVSDICTKGGDINFVFTGFSVNGKVLSKGQPLGPAGVQVSLRNTGTEAKIQSTVTQPGGKFAFFKVLPGDYEILATHPTWALKEASTTVRVTNSNANAASPLIVAGYNVSGSVRSDGEPMKGVKFLLFSSLVTKEDVLGCNVSPVPGFQPQDESLVYLCYTVSREDGSFSFYSLPSGGYTVIPFYRGERITFDVAPSRLDFTVEHDSLKIEPVFHVMGFSVTGRVLNGPEGDGVPEAVVTLNNQIKVKTKADGSFRLENITTGTYTIHAQKEHLYFETVTIKIAPNTPQLADIVATGFSVCGQISIIRFPDTVKQMNKYKVVLSSQDKDKSLVTVETDAHGSFCFKANPGTYKVQVMVPEAETRAGLTLKPQTFPLTVTDRPVMDVAFVQFLASVSGKVSCLDTCGDLLVTLQSLSRQGEKRSLQLSGKVNAMTFTFDNVLPGKYKISIMHEDWCWKNKSLEVEVLEDDVSAVEFRQTGYMLRCSLSHAITLEFYQDGNGRENVGIYNLSKGVNRFCLSKPGVYKVTPRSCHRFEQAFYTYDTSSPSILTLTAIRHHVLGTITTDKMMDVTVTIKSSIDSEPALVLGPLKSVQELRREQQLAEIEARRQEREKNGNEEGEERMTKPPVQEMVDELQGPFSYDFSYWARSGEKITVTPSSKELLFYPPSMEAVVSGESCPGKLIEIHGKAGLFLEGQIHPELEGVEIVISEKGASSPLITVFTDDKGAYSVGPLHSDLEYTVTSQKEGYVLTAVEGTIGDFKAYALAGVSFEIKAEDDQPLPGVLLSLSGGLFRSNLLTQDNGILTFSNLSPGQYYFKPMMKEFRFEPSSQMIEVQEGQNLKITITGYRTAYSCYGTVSSLNGEPEQGVAMEAVGQNDCSIYGEDTVTDEEGKFRLRGLLPGCVYHVQLKAEGNDHIERALPHHRVIEVGNNDIDDVNIIVFRQINQFDLSGNVITSSEYLPTLWVKLYKSENLDNPIQTVSLGQSLFFHFPPLLRDGENYVVLLDSTLPRSQYDYILPQVSFTAVGYHKHITLIFNPTRKLPEQDIAQGSYIALPLTLLVLLAGYNHDKLIPLLLQLTSRLQGVGALGQAASDNSGPEDAKRQAKKQKTRRT

SEQ ID NO: 55932 - protein, 95 aa, Homo sapiens
TVPLSGMYNKSGGKVRLTFKLEQDQLWIGTKERTEKLPMGSIKNVVSEPIEGHEDYHMMAFQLGPTEASYYWVYWVPTQYVDAIKDTVLGKWQYF

SEQ ID NO: 55933 - protein, 20 aa, Homo sapiens
VKCKMEDDAVPAAKMKIPSS

SEQ ID NO: 55934 - protein, 301 aa, Homo sapiens
LDRQIEQLRRCELIKESEVKALCAKAREILVEESNVQRVDSPVTVCGDIHGQFYDLKELFRVGGDVPETNYLFMGDFVDRGFYSVETFLLLLALKVRYPDRITLIRGNHESRQITQVYGFYDECLRKYGSVTVWRYCTEIFDYLSLSAIIDGKIFCVHGGLSPSIQTLDQIRTIDRKQEVPHDGPMCDLLWSDPEDTTGWGVSPRGAGYLFGSDVVAQFNAANDIDMICRAHQLVMEGYKWHFNETVLTVWSAPNYCYRCGNVAAILELDEHLQKDFIIFEAAPQETRGIPSKKPVADYFL

SEQ ID NO: 55935 - protein, 11 aa, Homo sapiens
RTLDSLKGWPL

SEQ ID NO: 55936 - protein, 56 aa, Homo sapiens
LTCPCCNTRKKDAVLTKCFHVFCFECVRGRYEARQRKCPKCNAAFGAHDFHRIYIS

SEQ ID NO: 55937 - protein, 74 aa, Homo sapiens
VAFSACTTVLVAVHLFALMVSTCLLPHIEAVSNIHNLNSVHQSPHQRLHRYVELAWGFSTALGTFLFLAEVVLR

SEQ ID NO: 55938 - protein, 97 aa, Homo sapiens
MEFLGPCGLRLVGARPLLPYWLLVFLAALNALLQWLLRPLVLYAPLLNPYTLAVANTTFTVSTDKAQRHFGYEPLFSWEDSRTRTILWVQAATGSAQ

SEQ ID NO: 55939 - protein, 197 aa, Homo sapiens
LKAIEPQKEEADENYNSVNTRMRKTQHGVLSQQFVELINKCNSMQSEYREKNVERIRRQLKITNAGMVSDEELEQMLDSGQSEVFVSNILKDTQVTRQALNEISARHSEIQQLERSIRELHDIFTFLATEVEMQGEMINRIEKNILSSADYVERGQEHVKTALENQKKARKKKVLIAICVSITVVLLAVIIGVTVVG

SEQ ID NO: 55940 - protein, 4 aa, Homo sapiens
IILW

SEQ ID NO: 55941 - protein, 278 aa, Homo sapiens
LKSARYLQQELPVRIAHRIKGFRCLPFIIGCNPTILHVHELYIRAFQKLTDFPPIKDQADEAQYCQLVRQLLDDHKDVVTLLAEGLRESRKHIEDEKLVRYFLDKTLTSRLGIRMLATHHLALHEDKPDFVGIICTRLSPKKIIEKWVDFARRLCEHKYGNAPRVRINGHVAARFPFIPMPLDYILPELLKNAMRATMESHLDTPYNVPDVVITIANNDVDLIIRISDRGGGIAHKDLDRVMDYHFTTAEASTQDPRISPLFGHLDMHSGAQSGPMHG

SEQ ID NO: 55942 - protein, 84 aa, Homo sapiens
LDEWVDKNRLALTKTVKDAVQKNSEKYLSELAEQPERKITRNQKRKHDEINHVQKVRIPSHPRAQEAQLLCQFPWVSRAPVPKP

SEQ ID NO: 55943 - protein, 44 aa, Homo sapiens
ICVTPKLVEEHLKSAQYKKPPITVDSVCLKWAPPKHKQVKLSKK

SEQ ID NO: 55944 - protein, 1003 aa, Homo sapiens
LATSAAPPGPPAAASPCLGPVAAAGSGLRRGAEGILAPQPPPPQQHQERPGAAAIGSARGQSTGKGPPQSPVFEGVYNNSRMLHFLTAVVGSTCDVKVKNGTTYEGIFKTLSSKFELAVDAVHRKASEPAGGPRREDIVDTMVFKPSDVMLVHFRNVDFNYATKDKFTDSAIAMNSKVNGEHKEKVLQRWEGGDSNSDDYDLESDMSNGWDPNEMFKFNEENYGVKTTYDSSLSSYTVPLEKDNSEEFRQRELRAAQLAREIESSPQYRLRIAMENDDGRTEEEKHSAVQRQGSGRESPSLASREGKYIPLPQRVREGPRGGVRCSSSRGGRPGLSSLPPRGPHHLDNSSPGPGSEARGINGGPSRMSPKAQRPLRGAKTLSSPSNRPSGETSVPPPPAVGRMYPPRSPKSAAPAPISASCPEPPIGSAVPTSSASIPVTSSVSDPGVGSISPASPKISLAPTDVKELSTKEPGRTLEPQELARIAGKVPGLQNEQKRFQLEELRKFGAQFKLQPSSSPENSLDPFPPRILKEEPKGKEKEVDGLLTSEPMGSPVSSKTESVSDKEDKPPLAPSGGTEGPEQPPPPCPSQTGSPPVGLIKGEDKDEGPVAEQVKKSTLNPNAKEFNPTKPLLSVNKSTSTPTSPGPRTHSTPSIPVLTAGQSGLYSPQYISYIPQIHMGPAVQAPQMYPYPVSNSVPGQQGKYRGAKGSLPPQRSDQHQPASAPPMMQAAAAAGPPLVAATPYSSYIPYNPQQFPGQPAMMQPMAHYPSQPVFAPMLQSNPRMLTSGSHPQAIVSSSTPQYPSAEQPTPQALYATVHQSYPHHATQLHAHQPQPATTPTGSQPQSQHAAPSPVQHQAGQAPHLGSGQPQQNLYHPGALTGTPPSLPPGPSAQSPQSSFPQPAAVYAIHHQQLPHGFTNMAHVTQAHVQTGITAAPPPHPGAPHPPQVMLLHPPQSHGGPPQGAVPQSGVPALSASTPSPYPYIGHPQVQSHPSQQLPFHPPGN

SEQ ID NO: 55945 - protein, 131 aa, Homo sapiens
VYAIHHQQLPHGFTNMAHVTQAHVQTGITAAPPPHPGAPHPPQVMLLHPPQSHGGPPQGAVPQSGVPALSASTPSPYPYIGHPQGEQPGQAPGFPGGADDRIREFSLAGGIWHGRAEGLQVGQDARVLGGE

SEQ ID NO: 55946 - protein, 77 aa, Homo sapiens
LDALFDVFADGKEAERASIQIKLLSALKEFQPVFKMKIRKEGRGNYSTDQLCVLDNVKMNLRRFIAYQETVEKRLTS

SEQ ID NO: 55947 - protein, 162 aa, Homo sapiens
KWRGSHVVGLLTTLNFGDGPDRNKTRTFQATVLGSQMGLKGSSAGQLVLITARVTTERTAGTCLYFSAVPGILPSSQPPISCSEEGAGNATLSPRMGEECVSVWSHEGLVLTKLLTSEELALCGSRLLVLGSFLLLFCGLLCCVTAMCFHPRRESHWSRTRL

SEQ ID NO: 55948 - protein, 52 aa, Homo sapiens
KLSDTPAPKRKRSPPLGGAPSPSSLSLPPSTGFPLQASGVPSPYLSSERGQA

SEQ ID NO: 55949 - protein, 318 aa, Homo sapiens
KSESPKEPEQLRKLFIGGLSFETTDESLRSHFEQWGTLTDCVVMRDPNTKRSRGFGFVTYATVEEVDAAMNARPHKVDGRVVEPKRAVSREDSQRPDAHLTVKKIFVGGIKEDTEEHHLRDYFEQYGKIEVIEIMTDRGSGKKRGFAFVTFDDHDSVDKIVIQKYHTVNGHNCEVRKALSKQEMASASSSQRGRSGSGNFGGGRGGGFGGNDNFGRGGNFSGRGGFGGSRGGGGYGGSGDGYNGFGNDGSNFGGGGSYNDFGNYNNQSSNFGPMKGGNFEGRSSGPHGGGGQYFAKPRNQGGYGGSSSSSSYGSGRRF

SEQ ID NO: 55950 - protein, 6 aa, Homo sapiens
RWFRWE

SEQ ID NO: 55951 - protein, 149 aa, Homo sapiens
VWQILERTPNGIIVAGKHLPQQPTLSDMTMYEMNFSLLVEDTLGNIDQPQYRQIVVELLMVVSIVLERNPELEFQDKVDLDRLVKEAFNEFQKDQSRLKEIEKQDDMTSFYNTPPLGKRGTCSYLTKAVMNLLLEGEVKPNNDDPCLIS

SEQ ID NO: 55952 - protein, 820 aa, Homo sapiens
VDSARNLQLVRSRLLKGTSLQSTILGVIPNTPDPASDAQDLPPLHRIGTAALAVQVVGSNWPKPHYTLLITGLCRFQIVQVLKEKPYPIAEVEQLDRLEEFPNTCKMREELGELSEQFYKYAVQLVEMLDMSVPAVAKLRRLLDSLPREALPDILTSIIRTSNKEKLQILDAVSLEERFKMTIPLLVRQIEGLKLLQKTRKPKQDDDKRVIAIRPIRRITHISGTLEDEDEDEDNDDIVMLEKKIRTSSMPEQAHKVCVKEIKRLKKMPQSMPEYALTRNYLELMVELPWNKSTTDRLDIRAARILLDNDHYAMEKLKKRVLEYLAVRQLKNNLKGPILCFVGPPGVGKTSVGRSVAKTLGREFHRIALGGVCDQSDIRGHRRTYVGSMPGRIINGLKTVGVNNPVFLLDEVDKLGKSLQGDPAAALLEVLDPEQNHNFTDHYLNVAFDLSQVLFIATANTTATIPAALLDRMEIIQVPGYTQEEKIEIAHRHLIPKQLEQHGLTPQQIQIPQVTTLDIITRYTREAGVRSLDRKLGAICRAVAVKVAEGQHKEAKLDRSDVTEREGCREHILEDEKPESISDTTDLALPPEMPILIDFHALKDILGPPMYEMEVSQRLSQPGVAIGLAWTPLGGEIMFVEASRMDGEGQLTLTGQLGDVMKESAHLAISWLRSNAKKYQLTNAFGSFDLLDNTDIHLHFPAGAVTKDGPSAGVTIVTCLASLFSGRLVRSDVAMTGEITLRGLVLPVGGIKDKVLAAHRAGLKQVIIPRRNEKDLEGIPGNVRQDLSFVTASCLDEVLNAAFDGGFTVKTRPGLLNSKL

SEQ ID NO: 55953 - protein, 5 aa, Homo sapiens
VPKIH

SEQ ID NO: 55954 - protein, 5 aa, Homo sapiens
TALQM

SEQ ID NO: 55955 - protein, 899 aa, Homo sapiens
LGLGVTMATEEFIIRIPPYHYIHVLDQNSNVSRVEVGPKTYIRQDNERVLFAPMRMVTVPPRHYCTVANPVSRDAQGLVLFDVTGQVRLRHADLEIRLAQDPFPLYPGEVLEKDITPLQVVLPNTALHLKALLDFEDKDGDKVVAGDEWLFEGPGTYIPRKEVEVVEIIQATIIRQNQALRLRARKECWDRDGKERVTGEEWLVTTVGAYLPAVFEEVLDLVDAVILTEKTALHLRARRNFRDFRGVSRRTGEEWLVTVQDTEAHVPDVHEEVLGVVPITTLGPHNYCVILDPVGPDGKNQLGQKRVVKGEKSFFLQPGEQLEQGIQDVYVLSEQQGLLLRALQPLEEGEDEEKVSHQAGDHWLIRGPLEYVPSAKVEVVEERQAIPLDENEGIYVQDVKTGKVRAVIGSTYMLTQDEVLWEKELPPGVEELLNKGQDPLADRGEKDTAKSLQPLAPRNKTRVVSYRVPHNAAVQVYDYREKRARVVFGPELVSLGPEEQFTVLSLSAGRPKRPHARRALCLLLGPDFFTDVITIETADHARLQLQLAYNWHFEVNDRKDPQETAKLFSVPDFVGDACKAIASRVRGAVASVTFDDFHKNSARIIRTAVFGFETSEAKGPDGMALPRPRDQAVFPQNGLVVSSVDVQSVEPVDQRTRDALQRSVQLAIEITTNSQEAAAKHEAQRLEQEARGRLERQKILDQSEAEKARKELLELEALSMAVESTGTAKAEAESRAEAARIEGEGSVLQAKLKAQALAIETEAELQRVQKVRELELVYARAQLELEVSKAQQLAEVEVKKFKQMTEAIGPSTIRDLAVAGPEMQVKLLQSLGLKSTLITDGSTPINLFNTAFGLLGMGPEGQPLGRRVASGPSPGEGISPQSAQAPQAPGDNHVVPVLR

SEQ ID NO: 55956 - protein, 38 aa, Homo sapiens
LDDVSLTHLTFGKEFTEAVEAKQVAQQEAEGQICGGKG

SEQ ID NO: 55957 - protein, 6 aa, Homo sapiens
KCSCCD

SEQ ID NO: 55958 - protein, 19 aa, Homo sapiens
KCAQGCICKGASEKCSCCA

SEQ ID NO: 55959 - protein, 92 aa, Homo sapiens
ISQRLESLSAATTFEPLEPVKDTDIQGFLKNEKDNALLSAIEESRKRTFGMAEEYHRESMLVEWEQVKQRILHTLLASGEDALDFTQESEVA

SEQ ID NO: 55960 - protein, 47 aa, Homo sapiens
RPQRVIEDRDSQLRSQARTLITFAGMIPYRTSGDTNARLVQMEVLMN

SEQ ID NO: 55961 - protein, 17 aa, Homo sapiens
VGPGGREKLPLDVQNPL

SEQ ID NO: 55962 - protein, 69 aa, Homo sapiens
IYNTTELVMMQDSSPDFEDTWRFLENRVNDAMNMGHTAKQVKSTGEALVQGLMGAAVTLKNLTGLNQRR

SEQ ID NO: 55963 - protein, 145 aa, Homo sapiens
IKHRPFCFSVKGHVKMLRLALTVTSMTFFIIAQAPEPYIVITGFEVTVILFFILLYVLRLDRLMKWLFWPLLDIINSLVTTVFMLIVSVLALIPETTTLTVGGGVFALVTAVCCLADGALIYRKLLFNPSGPYQKKPVHEKKEVL

SEQ ID NO: 55964 - protein, 7 aa, Homo sapiens
VVILAFA

SEQ ID NO: 55965 - protein, 55 aa, Homo sapiens
IRHAIGNNEYGEMEAERLAAMLTLPEDLARMYRDDITVTVVYFNSESIGAYYKGG

SEQ ID NO: 55966 - protein, 284 aa, Homo sapiens
IPQDHEILYDWINPTYLDMDYQVQIQEEFEESSEILLKEFLKPEKFTKVCEALEHGHVEWSSRGPPNKRFYEKAEESKLPEILKECMKLFRSEALFLLLSNFTGLKLHFLAPSEEDEMNDKKEAETTDITEEGTSHSPPEPENNQMAISNNSQQSNEQTDPEPEENETKKESSVPMCQGELRHWKTGHYTLIHDHSKAEFALDLILYCGCEGWEPEYGGFTSYIAKGEDEELLTVNPESNSLALVYRDRETLKFVKHINHRSLEQKKTFPNRTGFWDFSFIYYE

SEQ ID NO: 55967 - protein, 31 aa, Homo sapiens
KSCCSCCPMGCAKCAQGCVCKGASEKCSCCA

SEQ ID NO: 55968 - protein, 27 aa, Homo sapiens
TCAGSCKCKECKCTSCKKSCCFCCPMG

SEQ ID NO: 55969 - protein, 6 aa, Homo sapiens
KCSCCA

SEQ ID NO: 55970 - protein, 76 aa, Homo sapiens
IKADPTGVLELPKELSEIFDPTRECMSSELLEELMSSEVFAPLLRLSPPPGDHDYIYNLDESEGVCDLFDVPVLNL

SEQ ID NO: 55971 - protein, 170 aa, Homo sapiens
LQPNLVSASAAVLLTLQATVDSSQAPGSVQPAPITPTGEDVKPIDLTVQVEFAAAEGAAAAAAASELQAATAGLEAAECPMGPQLVVVGEEGFPDTGSDHSYSLSSGTTEEELLRKLNEQRDILALMEVKMKEMKGSIRHLRLTEAKLREELREKDRLLAMAVIRKKHGM

SEQ ID NO: 55972 - protein, 58 aa, Homo sapiens
VMHLDHSDPITRDHMGSVMAQVRQKLFQFLQAEPHNSLGKAARRLSLMLHGLVTPSLP

SEQ ID NO: 55973 - protein, 50 aa, Homo sapiens
VNLKSALQCQAWQSRQEHQVLLQELPGSEHIEMLANATTLAYLKRVLLGP

SEQ ID NO: 55974 - protein, 256 aa, Homo sapiens
IKNPERNLPLAIGISMPIVTLIYILTNVAYYTVLNISDVLSSDAVAVTFADQTFGMFSWTIPIAVALSCFGGLNASIFASSRLFFVGSREGHLPDLLSMIHIERFTPIPALLFNCTMALIYLIVEDVFQLINYFSFSYWFFVGLSVVGQLYLRWKEPKRPRPLKLSVFFPIVFCICSVFLVIVPLFTDTINSLIGIGIALSGVPFYFMGVYLPESRRPLFIRNVLAAITRGTQQLCFCVLTELDVAEEKKDERKTD

SEQ ID NO: 55975 - protein, 31 aa, Homo sapiens
LGGPRTVSYAVEFHPDTGDIIMEFRHADTPD

SEQ ID NO: 55976 - protein, 118 aa, Homo sapiens
KQGFHHLWLQRDTPITHISFHPKRPMHILLHDAYMFCIIDKSLPLPNDKTLLYNPFPPTNESDVIRRRTAHAFKISKIYKPLLFMDLLDERTLVAVERPLDDIIAQLPPPIKKKKFGT

SEQ ID NO: 55977 - protein, 415 aa, Homo sapiens
LGISIKGGRENRMPILISKIFPGLAADQSRALRLGDAILSVNGTDLRQATHDQAVQALKRAGKEVLLEVKFIREVTPYIKKPSLVSDLPWEGAAPQSPSFSGSEDSGSPKHQNSTKDRKIIPLKMCFAARNLSMPDLENRLIELHSPDSRNTLILRCKDTATAHSWFVAIHTNIMALLPQVLAELNAMLGATSTAGGSKEVKHIAWLAEQAKLDGGRQQWRPVLMAVTEKDLLLYDCMPWTRDAWASPCHSYPLVATRLVHSGSGCRSPSLGSDLTFATRTGSRQGIEMHLFRVETHRDLSSWTRILVQGCHAAAELIKEVSLGCMLNGQEVRLTIHYENGFTISRENGGSSSILYRYPFERLKMSADDGIRNLYLDFGGPEGELTMDLHSCPKPIVFVLHTFLSAKVTRMGLLV

SEQ ID NO: 55978 - protein, 30 aa, Homo sapiens
MRWSTSSTLSSMRPTATRPRRAFEPSACST

SEQ ID NO: 55979 - protein, 329 aa, Homo sapiens
LQEQLMGAVVMEKPNIRWNDVAGLEGAKEALKEAVILPIKFPHLFTGKRTPWRGILLFGPPGTGKSYLAKAVATEANNSTFFSVSSSDLMSKWLGESEKLVKNLFELARQHKPSIIFIDEVDSLCGSRNENESEAARRIKTEFLVQMQGVGNNNDGTLVLGATNIPWVLDSAIRRRFEKRIYIPLPEEAARAQMFRLHLGSTPHNLTDANIHELARKTEGYSGADISIIVRDSLMQPVRKVQSATHFKKVCGPSRTNPSMMIDDLLTPCSPGDPGAMEMTWMDVPGDKLLEPVVCMSDMLRSLATTRPTVNADDLLKVKKFSEDFGQES

SEQ ID NO: 55980 - protein, 119 aa, Homo sapiens
VAKRNSLKELWLVIHGRVYDVTRFLNEHPGGEEVLLEQAGVDASESFEDVGHSSDAREMLKQYYIGDIHPSDLKPESGSKDPSKNDTCKSCWAYWILPIIGAVLLGFLYRYYTSESKSS

SEQ ID NO: 55981 - protein, 460 aa, Homo sapiens
LSNLHLKEEKIKPDTNGAVVKTNANAEKTDEEEKEDRAAQSLLNKLIRSNLVDNTNQVEVLQRDPNSPLYSVKSFEELRLKPQLLQGVYAMGFNRPSKIQENALPLMLAEPPQNLIAQSQSGTGKTAAFVLAMLSQVEPANKYPQCLCLSPTYELALQTGKVIEQMGKFYPELKLAYAVRGNKLERGQKISEQIVIGTPGTVLDWCSKLKFIDPKKIKVFVLDEADVMIATQGHQDQSIRIQRMLPRNCQMLLFSATFEDSVWKFAQKVVPDPNVIKLKREEETLDTIKQYYVLCSSRDEKFQALCNLYGAITIAQAMIFCHTRKTASWLAAELSKEGHQVALLSGEMMVEQRAAVIERFREGKEKVLVTTNVCARGIDVEQVSVVINFDLPVDKDGNPDNETYLHRIGRTGRFGKRGLAVNMVDSKHSMNILNRIQEHFNKKIERLDTDDLDEIEKIAN

SEQ ID NO: 55982 - protein, 482 aa, Homo sapiens
LSGTMATDSWALAVDEQEAAVKSMTNLQIKEEKVKADTNGIIKTSTTAEKTDEEEKEDRAAQSLLNKLIRSNLVDNTNQVEVLQRDPNSPLYSVKSFEELRLKPQLLQGVYAMGFNRPSKIQENALPMMLAEPPQNLIAQSQSGTGKTAAFVLAMLSRVEPSDRYPQCLCLSPTYELALQTGKVIEQMGKFYPELKLAYAVRGNKLERGQKISEQIVIGTPGTVLDWCSKLKFIDPKKIKVFVLDEADVMIATQGHQDQSIRIQRMLPRNCQMLLFSATFEDSVWKFAQKVVPDPNVIKLKREEETLDTIKQYYVLCSSRDEKFQALCNLYGAITIAQAMIFCHTRKTASWLAAELSKEGHQVALLSGEMMVEQRAAVIERFREGKEKVLVTTNVCARGIDVEQVSVVINFDLPVDKDGNPDNETYLHRIGRTGRFGKRGLAVNMVDSKHSMNILNRIQEHFNKKIERLDTDDLDEIEKIAN

SEQ ID NO: 55983 - protein, 45 aa, Homo sapiens
LYEKNKKEMNIQQLTNYRKSVMSLAEAGKLYRKDLEIVLCSEPPM

SEQ ID NO: 55984 - protein, 348 aa, Homo sapiens
INRLKLLEKKKTELAQKARKEIADYLAAGKDERARIRVEHIIREDYLVEAMEILELYCDLLLARFGLIQSMKELDSGLAESVSTLIWAAPRLQSEVAELKIVADQLCAKYSKEYGKLCRTNQIGTVNDRLMHKLSVEAPPKILVERYLIEIAKNYNVPYEPDSVVMAEAPPGVETDLIDVGFTDDVKKGGPGRGGSGGFTAPVGGPDGTVPMPMPMPMPMPSANTPFSYPLPKGPSDFNGLPMGTYQAFPNIHPPQIPATPPSYESVDDINADKNISSAQIVGPGPKPEASAKLPSRPADNYDNFVLPELPSVPDTLPTASAGASTSASEDIDFDDLSRRFEELKKKT

SEQ ID NO: 55985 - protein, 396 aa, Homo sapiens
LLWGQLFAVDSGNDVTDIADDGCPKPPEIAHGYVEHSVRYQCKNYYKLRTEGDGVYTLNDKKQWINKAVGDKLPECEADDGCPKPPEIAHGYVEHSVRYQCKNYYKLRTEGDGVYTLNNEKQWINKAVGDKLPECEAVCGKPKNPANPVQRILGGHLDAKGSFPWQAKMVSHHNLTTGATLINEQWLLTTAKNLFLNHSENATAKDIAPTLTLYVGKKQLVEIEKVVLHPNYSQVDIGLIKLKQKVSVNERVMPICLPSKDYAEVGRVGYVSGWGRNANFKFTDHLKYVMLPVADQDQCIRHYEGSTVPEKKTPKSPVGVQPILNEHTFCAGMSKYQEDTCYGDAGSAFAVHDLEEDTWYATGILSFDKSCAVAEYGVYVKVTSIQDWVQKTIAEN

SEQ ID NO: 55986 - protein, 4 aa, Homo sapiens
ILAP

SEQ ID NO: 55987 - protein, 104 aa, Homo sapiens
LADALPLHIAPRWFSSHSGFKCPICSKSVASDEMEMHFIMCLSKPRLSYNDDVLTKDAGECVICLEELLQGDTIARLPCLCIYHKSCIDSWFEVNRSCPEHPAD

SEQ ID NO: 55988 - protein, 172 aa, Homo sapiens
KRTPDLPEEEYVKEEIQENEEAVKKMLVEATREFEEVVVDESPPDFEIHITMCDDDPPTPEEDSETQPDEEEEEEEEKVSQPEVGAAIKIIRQLMEKFNLDLSTVTQAFLKNSGELEATSAFLASGQRADGYPIWSRQDDIDLQKDDEDTREALVKKFGAQNVARRIEFRKK

SEQ ID NO: 55989 - protein, 4 aa, Homo sapiens
RGHP

SEQ ID NO: 55990 - protein, 39 aa, Homo sapiens
KPTTRQRYDGSTTAMEILQGRDFTGKVVVVTGANSGIAF

SEQ ID NO: 55991 - protein, 56 aa, Homo sapiens
LCETPVTDAGLLALSSMKSLCSLNMNSTKLSADTYEDLKAKLPNLKEVDVRYTEAW

SEQ ID NO: 55992 - protein, 696 aa, Homo sapiens
LLTSAEDLDCTPGFQQKVFHINQPAEFIEDQSILNLTFSDCKGNDKLRYEVSSPYFKVNSDGGLVALRNITAVGKTLFVHARTPHAEDMAELVIVGGKDIQGSLQDIFKFARTSPVPRQKRSIVVSPILIPENQRQPFPRDVGKVVDSDRPERSKFRLTGKGVDQEPKGIFRINENTGSVSVTRTLDREVIAVYQLFVETTDVNGKTLEGPVPLEVIVIDQNDNRPIFREGPYIGHVMEGSPTGTTVMRMTAFDADDPATDNALLRYNIRQQTPDKPSPNMFYIDPEKGDIVTVVSPALLDRETLENPKYELIIEAQDMAGLDVGLTGTATATIMIDDKNDHSPKFTKKEFQATVEEGAVGVIVNLTVEDKDDPTTGAWRAAYTIINGNPGQSFEIHTNPQTNEGMLSVVKPLDYEISAFHTLLIKVENEDPLVPDVSYGPSSTATVHITVLDVNEGPVFYPDPMMVTRQEDLSVGSVLLTVNATDPDSLQHQTIRYSVYKDPAGWLNINPINGTVDTTAVLDRESPFVDNSVYTALFLAIDSGNPPATGTGTLLITLEDVNDNAPFIYPTVAEVCDDAKNLSVVILGASDKDLHPNTDPFKFEIHKQAVPDKVWKISKINNTHALVSLLQNLNKANYNLPIMVTDSGKPPMTNITDLRVQVCSCRNSKVDCNAAGALRFSLPSVLLLSLFSLACL

SEQ ID NO: 55993 - protein, 131 aa, Homo sapiens
KENYPLYIRSTPTENELKFHYMVHTSLDVVDEKISAMGKALVDQRELYLGLLYPTEDYKVYGYVTNSKVKFVMVVDSSNTALRDNEIRSMFRKLHNSYTDVMCNPFYNPGDRIQSSRAFDNMVTSMMIQVC

SEQ ID NO: 55994 - protein, 36 aa, Homo sapiens
LAPYAVPSELVLVEEIPRNQMGKIDKKALIRHFHPS

SEQ ID NO: 55995 - protein, 571 aa, Homo sapiens
TDGDDTETVPSEQSHASGKLRKKKKKQKNKKSSTGEASENGLEDIDRILERIEDSTGLNRPGPAPLSSRKHVLYVEHRHLNPDTELKRYFGARAILGEQRPRQRQRVYPKCTWLTTPKSTWPRYSKPGLSMRLLESKKGLSFFAFEHSEEYQQAQHKFLVAVESMEPNNIVVLLQTSPYHVDSLLQLSDACRFQEDQEMARDLVERALYSMECAFHPLFSLTSGACRLDYRRPENRSFYLALYKQMSFLEKRGCPRTALEYCKLILSLEPDEDPLCMLLLIDHLALRARNYEYLIRLFQEWEAHRNLSQLPNFAFSVPLAYFLLSQQTDLPECEQSSARQKASLLIQQALTMFPGVLLPLLESCSVRPDASVSSHRFFGPNAEISQPPALSQLVNLYLGRSHFLWKEPATMSWLEENVHEVLQAVDAGDPAVEACENRRKVLYQRAPRNIHRHVILSEIKEAVAALPPDVTTQSVMGFDPLPPSDTIYSYVRPERLSPISHGNTIALFFRSLLPNYTMEGERPEEGVAGGLNRNQGLNRLMLAVRDMMANFHLNDLEAPHEDDAEGEGEWD

SEQ ID NO: 55996 - protein, 14 aa, Homo sapiens
KQSLFQEPGPDVEA

SEQ ID NO: 55997 - protein, 82 aa, Homo sapiens
KLGIGEMAETDPKTVQDLTSVVQTLLQQMQDKFQTMSDQIIGRIDDMSSRIDDLEKNIADLMTQAGVEELESENKIPATQKS

SEQ ID NO: 55998 - protein, 74 aa, Homo sapiens
LDKLQALANALLEKEVINYEDIEALIGPPPHGPKKMIAPQRWIDAQREKQDLGEEETEETQQPPLGGEEPTWPK

SEQ ID NO: 55999 - protein, 116 aa, Homo sapiens
VLHLKRFVYEKTGGCQKLIKNIEYPVDLEISKELLSPGVKNKNFKCHRTYRLFAVVYHHGNSATGGHYTTDVFQIGLNGWLRIDDQTVKVINQYQVVKPTAERTAYLLYYRRVDLL

SEQ ID NO: 56000 - protein, 10 aa, Homo sapiens
MYMQISGASS

SEQ ID NO: 56001 - protein, 18 aa, Homo sapiens
ITALSTSTQRQSFLASLL

SEQ ID NO: 56002 - protein, 25 aa, Homo sapiens
LDHLRKCLALPAMHWPRGYLKGYPR

SEQ ID NO: 56003 - protein, 134 aa, Homo sapiens
IQFYNNIYIKQIKTFAMKYSQANMDAPPLSPYPFVRTGSPRRIQLSQNHPVYISPHKNETMLSPREKIFYYFSNSPSKRLREINSMIRTGETPTKKRGILLEDGSESPAKRICPENHSALLRRLQDVANDRGSH

SEQ ID NO: 56004 - protein, 15 aa, Homo sapiens
MACQVPVTNCPNITC

SEQ ID NO: 56005 - protein, 87 aa, Homo sapiens
VLSRPLYYTAPFYPGYTNYGSFGHLHGHPGPGPGPTTGPGSHFNGLNQTVLNRADALAKDPKMLRSQSQLDLCKDSPYELKKGMSDI

SEQ ID NO: 56006 - protein, 627 aa, Homo sapiens
IIKFPGDVAPKTDKELAVQYLNTFYGCPKESCNLFVLKDTLKKMQKFFGLPQTGDLDQNTIETMRKPRCGNPDVANYNFFPRKPKWDKNQITYRIIGYTPDLDPETVDDAFARAFQVWSDVTPLRFSRIHDGEADIMINFGRWEHGDGYPFDGKDGLLAHAFAPGTGVGGDSHFDDDELWTLGEGQVVRVKYGNADGEYCKFPFLFNGKEYNSCTDTGRSDGFLWCSTTYNFEKDGKYGFCPHEALFTMGGNAEGQPCKFPFRFQGTSYDSCTTEGRTDGYRWCGTTEDYDRDKKYGFCPETAMSTVGGNSEGAPCVFPFTFLGNKYESCTSAGRSDGKMWCATTANYDDDRKWGFCPDQGYSLFLVAAHEFGHAMGLEHSQDPGALMAPIYTYTKNFRLSQDDIKGIQELYGASPDIDLGTGPTPTLGPVTPEICKQDIVFDGIAQIRGEIFFFKDRFIWRTVTPRDKPMGPLLVATFWPELPEKIDAVYEAPQEEKAVFFAGNEYWIYSASTLERGYPKPLTSLGLPPDVQRVDAAFNWSKNKKTYIFAGDKFWRYNEVKKKMDPGFPKLIADAWNAIPDNLDAVVDLQGGGHSYFFKGAYYLKLENQSLKSVKFGSIKSDWLGC

SEQ ID NO: 56007 - protein, 10 aa, Homo sapiens
RVMGWTDRLQ

SEQ ID NO: 56008 - protein, 36 aa, Homo sapiens
LYTHWLQGTDSECAGRLLHTQYHAVEKASTGLGIRW

SEQ ID NO: 56009 - protein, 176 aa, Homo sapiens [sequence omitted]

SEQ ID NO: 56010 - protein, 9 aa, Homo sapiens
LPCSARNHE

SEQ ID NO: 56011 - protein, 130 aa, Homo sapiens
ILACLFVELFQSWQILARPWRAFFKLLAVVLFLFTFGLLPWIDNFAHISGFISGLFLSFAFLPYISFGKFDLYRKRCQIIIFQVVFLGLLAGLVVLFYVYPVRCEWCEFLTCIPFTDKFCEKYELDAQLH

SEQ ID NO: 56012 - skipped

SEQ ID NO: 56013 - protein, 252 aa, Homo sapiens
KYPVWLWKRLQLREGICSRLPGHYLRSLEEERTPTPVHYRPHGAKFKINPKNGQRERVEDVPIPIYFPPESQRGLWGGEGWILGQIYANNDKLSKRLKKVWKPQLFEREFYSEILDKKFTVTVTMRTLDLIDEAYGLDFYILKTPKEDLCSKFGMDLKRGMLLRLARQDPQLHPEDPERRAAIYDKYKEFAIPEEEAEWVGLTLEEAIEKQRLLEEKDPVPLFKIYVAELIQQLQQQALSEPAVVQKRASGQ

SEQ ID NO: 56014 - protein, 179 aa, Homo sapiens
LLASFGDRVVRLSTANTYSYHKVDLPFQEYVEQLLHPQDPTSLGNDTLYFFGDNNFTEWASLFRHYSPPPFGLLGTAPAYSFGIAGAGSGVPFHWHGPGYSEVIYGRKRWFLYPPEKTPEFHPNKTTLAWLRDTYPALPPSARPLECTIRAGEVLYFPDRWWHATLNLDTSVFISTFLG

SEQ ID NO: 56015 - protein, 15 aa, Homo sapiens
RTPLRAKNKVHPSST

SEQ ID NO: 56016 - protein, 22 aa, Homo sapiens
KKKMVPDFYVDSIADLLPALQG

SEQ ID NO: 56017 - protein, 29 aa, Homo sapiens
VQNFVSFISKDSIQKSLQMYLERLKEEKG

SEQ ID NO: 56018 - protein, 295 aa, Homo sapiens
LLGVKENNKKSSTRAPSPTKRKDRSDEKSKDRSKDKGATKESSEKDRGRDKTRKRRSASSGSSSTRSRSSSTSSSGSSTSTGSSSGSSSSSASSRSGSSSTSRSSSSSSSSGSPSPSRRRHDNRRRSRSKSKPPKRDEKERKRRSPSPKPTKVHIGRLTRNVTKDHIMEIFSTYGKIKMIDMPVERMHPHLSKGYAYVEFENPDEAEKALKHMDGGQIDGQEITATAVLAPWPRPPPRRFSPPRRMLPPPPMWRRSPPRMRRRSRSPRRRSPVRRRSRSPGRRRHRSRSSSNSSR

SEQ ID NO: 56019 - protein, 121 aa, Homo sapiens
IVLLKHKVFVERSNLGLVQRRLRLKDFRDAYPRFPPIQSIHVSQDERECTMDLSEFMNPSPYTVPQEASLPRVFKLFRALGLRHLVVVDNRNQVVGLVTRKDLARYRLGKRGLEELSLAQT

SEQ ID NO: 56020 - protein, 214 aa, Homo sapiens
KVRPRLIAELARRVRALREQLNRPRDSQLYAVDYETLTRPFSGRRLPVRAWADVRRESRLLQLLGRLPLFGLGRLVTRKSWLWQHDEPCYWRLTRVRPDYTAQNLDHGKAWGILTFKGKTESEAREIEHVMYHDWRLVPKHEEEAFTAFTPAPEDSLASVPYPPLLRAMIIAERQKNGDTSTEEPMLNVQRIRMEPWDYPAKQEDKGRAKGTPV

SEQ ID NO: 56021 - protein, 119 aa, Homo sapiens
RKCIGVAATKLQNKRFYPMVCSTAARSSMKVTRSCASATSLQYLCCHRLRQLRPDSGDTLEGLPLPPGLKQVLHNKLGWVLSMSCSRRKAPVSDPQAATSAHPSSREPRPCQRKRCRRT

SEQ ID NO: 56022 - protein, 99 aa, Homo sapiens
LTTVLTTHHHWDHAGGNEKLVKLESGLKVYGGDDRIGALTHKITHLSTLQVGSLNVKCLATPCHTSGHICYFVSKPGGSEPPAVFTGACSSVGGGGGSS

SEQ ID NO: 56023 - protein, 46 aa, Homo sapiens
LAEEFTYNPFMRVREKTVQQHAGETDPVTTMRAVRREKDQFKMPRD

SEQ ID NO: 56024 - protein, 70 aa, Homo sapiens
KCGYELFSSRSKYAHSSPWPAFTETIHADSVAKRPEHNRSEALKVSCGKCGNGLGHEFLNDGPKPGQSRF

SEQ ID NO: 56025 - protein, 33 aa, Homo sapiens
RGRFGKAIEKDDCDETGIEEANELTKLNVSKSV

SEQ ID NO: 56026 - protein, 102 aa, Homo sapiens
LRQEFAASRAAADARGRAGHRSAAASNLSGLSLQEAQQILNVSKLSPEEVQKNYEHLFKVNDKSVGGSFYLQSKVVRAKERLDEELKIQAQEDREKGQMPHT

SEQ ID NO: 56027 - protein, 56 aa, Homo sapiens
ISYEIGLMNFVLGFFCCFMGCDLGCCLIPCLINDFKDVTHTCPSCKAYIYTYKRLC

SEQ ID NO: 56028 - protein, 10 aa, Homo sapiens
RAHPAMEAER

SEQ ID NO: 56029 - protein, 61 aa, Homo sapiens
INPRHALIKKLNQLRASEPGLAQLLVDQIYENAMIAAGLVDDPRAMVGRLNELLVKALERH

SEQ ID NO: 56030 - protein, 17 aa, Homo sapiens
LDRERFTQVFGVHQMLK

SEQ ID NO: 56031 - protein, 127 aa, Homo sapiens
LDTPRSRERSPSPLRGNVVPSPLPTRRTRTFSATVRASQGPVYKGVCKCFCRSKGHGFITPADGGPDIFLHISDVEGEYVPVEGDEVTYKMCSIPPKNEKLQAVEVVITHLAPGTKHETWSGHVISS

SEQ ID NO: 56032 - protein, 153 aa, Homo sapiens
IGVHQEDELLECLSPATSRTFRIEEIPLDQVDIDKENEMLVTVAHFHKEVFGTFGIPFLLRIHQGEHFREVMKRIQSLLDIQEKEFEKFKFAIVMMGRHQYINEDEYEVNLKDFEPQPGNMSHPRPWLGLDHFNKAPKRSRYTYLEKAIKIHN

SEQ ID NO: 56033 - protein, 169 aa, Homo sapiens
VKMLVLLAFIIAFHITSAALLFIATVDNAWWVGDEFFADVWRICTNNTNCTVINDSFQEYSTLQAVQATMILSTILCCIAFFIFVLQLFRLKQGERFVLTSIIQLMSCLCVMIAASIYTDRREDIHDKNAKFYPVTREGSYGYSYILAWVAFACTFISGMMYLILRKRK

SEQ ID NO: 56034 - protein, 21 aa, Homo sapiens
MDFLLFQFGLCTFKYDYTDSK

SEQ ID NO: 56035 - protein, 318 aa, Homo sapiens
LNDAVGFSRVIHAIANSGKLVIGHNMLLDVMHTVHQFYCPLPADIINNTSLAELEKRLKETPFNPPKVESAEGFPSYDTASEQLHEAGYDAYITGLCFISMANYLGSFLSPPKIHVSARSKLIEPFFNKLFLMRVMDIPYLNLEGPDCNIQISWIDDTSAFVSLSQPEQVKIAVNTSKYAESYRIQTYAEYMGRKQEEKQIKRKWTEDSWKEADSKRLNPQCIPYTLQNHYYRNNSFTAPSTVGKRNLSPSQEEAGLEDGVSGEISDTELEQTDSCAEPLSEGRKKAKKLKRMKKELSPAGSISKNSPATLFEVPDTW

SEQ ID NO: 56036 - protein, 62 aa, Homo sapiens
LEDGVSGEISDTELEQTDSCAEPLSEGRKKAKKLKRMKKELSPAGSISKNSPATLFEVPDTW

SEQ ID NO: 56037 - protein, 103 aa, Homo sapiens
VELTSAPTGHTFSVMVTQPITPLLYISTDLTHLQDLRHTLHLKAILAHDEHMAQQDPGLPFLFWFSLASLITLFHLFLFKLIYNEYCGPGAKPLCRSKEDPSV

SEQ ID NO: 56038 - protein, 11 aa, Homo sapiens
VNLTGKKMTFT

SEQ ID NO: 56039 - protein, 84 aa, Homo sapiens
VTEVLLKYKKGETNDFELLKNQLLDPDIKDDQIINWLLEFRSSVMYLTKDFEQLISIILRLPWLNRSQTVVEEYLAFLGNLVSA

SEQ ID NO: 56040 - protein, 112 aa, Homo sapiens
ISLLHEVDTQYSALKVKYEELLKKCQEEQDSLSHKAVQTSRAAAKDLTGVNAQSEPVASGWELASVNPEPVSSPTTPPEYKALFKEIFSCIKKTKQEIDEQRTKYRSLSSHS

SEQ ID NO: 56041 - protein, 564 aa, Homo sapiens
KPFVPNVHAAEFVPSFLRGPAAPPPPVGGAANNHGAGSGAGGRAAPVESSQEEQSLCEGSNSAVSMELSEPIVENGETEMSPEESWEHKEEISEAEPGGGSLGDGRPPEESAHEMMEEEEEIPKPKSVVAPPGAPKKEHVNVVFIGHVDAGKSTIGGQIMYLTGMVDKRTLEKYEREAKEKNRETWYLSWALDTNQEERDKGKTVEVGRAYFETEKKHFTILDAPGHKSFVPNMIGGASQADLAVLVISARKGEFETGFEKGGQTREHAMLAKTAGVKHLIVLINKMDDPTVNWSNERYEECKEKLVPFLKKVGFNPKKDIHFMPCSGLTGANLKEQSDFCPWYIGLPFIPYLDNLPNFNRSVDGPIRLPIVDKYKDMGTVVLGKLESGSICKGQQLVMMPNKHNVEVLGILSDDVETDTVAPGENLKIRLKGIEEEEILPGFILCDPNNLCHSGRTFDAQIVIIEHKSIICPGYNAVLHIHTCIEEVEITALICLVDKKSGEKSKTRPRFVKQDQVCIARLRTAGTICLETFKDFPQMGRFTLRDEGKTIAIGKVLKLVPEKD

SEQ ID NO: 56042 - protein, 43 aa, Homo sapiens
LLDNPHKEPIRLRYKLTFNQGGQPFSEVGEVKDFPDLAVLGAA

SEQ ID NO: 56043 - protein, 103 aa, Homo sapiens
LAGGNPETAQPHAGTLPRPRPVPKPRNRPSVPPPPQPPGVHSAGDSSLTNTAPTASKIVTDSNSRVSEPHRSIFPEMHSDSASKDVPGRILLDIDNDTESTAL

SEQ ID NO: 56044 - protein, 17 aa, Homo sapiens
MEDLGKILMVGSRWGKS

SEQ ID NO: 56045 - protein, 22 aa, Homo sapiens
IFDLSALTTIGNAKNSLIGVSL

SEQ ID NO: 56046 - protein, 15 aa, Homo sapiens
MSSGWEFCCNNTCMS

SEQ ID NO: 56047 - protein, 43 aa, Homo sapiens
KLEGRDVDPNRRMSVAEQVDYVIKEATNLDNLAQLYEGWTAWV

SEQ ID NO: 56048 - protein, 321 aa, Homo sapiens
LGPFSFLLLVLLLVTRSPVNACLLTGSLFVLLRVFSFEPVPSCRALQVLKPRDRISAIAHRGGSHDAPENTLAAIRQAAKNGATGVELDIEFTSDGIPVLMHDNTVDRTTDGTGRLCDLTFEQIRKLNPAANHRLRNDFPDEKIPTLREAVAECLNHNLTIFFDVKGHAHKATEALKKMYMEFPQLYNNSVVCSFLPEVIYKMRQTDRDVITALTHRPWSLSHTGDGKPRYDTFWKHFIFVMMDILLDWSMHNILWYLCGISAFLMQKDFVSPAYLKKWSAKGIQVVGWTVNTFDEKSYYESHLGSSYITDSMVEDCEPHF

SEQ ID NO: 56049 - protein, 13 aa, Homo sapiens
IDRNASKSVKLED

SEQ ID NO: 56050 - protein, 339 aa, Homo sapiens
KRKGKAQYVLAKRARRCDAGGPRQLEPGLQGILITCNMNERKCVEEAYSLLNEYGDDMYGPEKFTDKDQQPSGSEGEDDDAEAALKKEVGDIKASTEMRLRRFQSVESGANNVVFIRTLGIEPEKLVHHILQDMYKTKKKKTRVILRMLPISGTCKAFLEDMKKYAETFLEPWFKAPNKGTFQIVYKSRNNSHVNREEVIRELAGIVCTLNSENKVDLTNPQYTVVVEIIKAVCCLSVVKDYMLFRKYNLQEVVKSPKDPSQLNSKQGNGKEAKLESADKSDQNNTAEGKNNQQVPENTEELGQTKPTSNPQVVNEGGAKPELASQATEGSKSNENDFS

SEQ ID NO: 56051 - protein, 53 aa, Homo sapiens
MVGGLDPPGRRRFQKGFDWRNLWSSCWLAPLADGMLRYMGQRQRGHPIQRGPL

SEQ ID NO: 56052 - protein, 319 aa, Homo sapiens
IQSRGVHSRGQATSTMGQCVTKCKNPSSTLGSKNGDREPSNKSHSRRGAGHREEQVPPCGKPGGDILVNGTKKAEAATEACQLPTSSGDAGRESKSNAEESSLQRLEELFRRYKDEREDAILEEGMERFCNDLCVDPTEFRVLLLAWKFQAATMCKFTRKEFFDGCKAISADSIDGICARFPSLLTEAKQEDKFKDLYRFTFQFGLDSEEGQRSLHREIAIALWKLVFTQNNPPVLDQWLNFLTENPSGIKGISRDTWNMFLNFTQVIGPDLSNYSEDEAWPSLFDTFVEWEMERRKREGEGRGALSSGPEGLCPEEQT

SEQ ID NO: 56053 - protein, 163 aa, Homo sapiens
KDTLEKKGVLGHLKARIRAEVFNALDDDREPRPSLSHENLLINELIREYLEFNKYKYTASVLIAESGQPVVPLDRQFLIHELNAFEESKDNTIPLLYGILAHFLRGTKDGIQNAFLKGPSLQPSDPSLGRQPSRRKPMDDHLRKEEQKSTNIEDLHVSQAVNR

SEQ ID NO: 56054 - protein, 62 aa, Homo sapiens
TGTALEGWLDSLVGGMWTAMDICATGPTACPVMQTCSQTAWSSFSPDPKSELGAVKPDGRLR

SEQ ID NO: 56055 - protein, 1200 aa, Homo sapiens
LSGVGPAHGSEDIVVGCGGFVKSDVEINYSLIEIKLYTKHGTLKYQTDCAPNNGYFMIPLYDKGDFILKIEPPLGWSFEPTTVELHVDGVSDICTKGGDINFVFTGFSVNGKVLSKGQPLGPAGVQVSLRNTGTEAKIQSTVTQPGGKFAFFKVLPGDYEILATHPTWALKEASTTVRVTNSNANAASPLIVAGYNVSGSVRSDGEPMKGVKFLLFSSLVTKEDVLGCNVSPVPGFQPQDESLVYLCYTVSREDGSFSFYSLPSGGYTVIPFYRGERITFDVAPSRLDFTVEHDSLKIEPVFHVMGFSVTGRVLNGPEGDGVPEAVVTLNNQIKVKTKADGSFRLENITTGTYTIHAQKEHLYFETVTIKIAPNTPQLADIVATGFSVCGRISIIRFPDTVKQMNKYKVVLSSQDKDKSLVTVETDAHGSFCFKAKPGTYKVQVMVPEAETRAGLTLKPQTFPLTVTDRPVMDVAFVQFLASVSGKVSCLDTCGDLLVTLQSLSRQGEKRSLQLSGKVNAMTFTFDNVLPGKYKISIMHEDWCWKNKSLEVEVLEDDVSAVEFRQTGYMLRCSLSHAITLEFYQDGNGRENVGIYNLSKGVNRFCLSKPGVYKVTPRSCHRFEQAFYTYDTSSPSILTLTAIRHHVLGTITTDKMMDVTVTIKSSIDSEPALVLGPLKSVQELRREQQLAEIEARRQEREKNGNEEGEERMTKPPVQEMVDELQGPFSYDFSYWARSGEKITVTPSSKELLFYPPSMEAVVSGESCPGKLIEIHGKAGLFLEGQIHPELEGVEIVISEKGASSPLITVFTDDKGAYSVGPLHSDLEYTVTSQKEGYVLTAVEGTIGDFKAYALAGVSFEIKAEDDQPLPGVLLSLSGGLFRSNLLTQDNGILTFSNLSPGQYYFKPMMKEFRFEPSSQMIEVQEGQNLKITITGYRTAYSCYGTVSSLNGEPEQGVAMEAVGQNDCSIYGEDTVTDEEGKFRLRGLLPGCVYHVQLKAEGNDHIERALPHHRVIEVGNNDIDDVNIIVFRQINQFDLSGNVITSSEYLPTLWVKLYKSENLDNPIQTVSLGQSLFFHFPPLLRDGENYVVLLDSTLPRSQYDYILPQVSFTAVGYHKHITLIFNPTRKLPEQDIAQGSYIALPLTLLVLLAGYNHDKLIPLLLQLTSRLQGVGALGQAASDNSGPEDAKRQAKKQKTRRT

SEQ ID NO: 56056 - protein, 1200 aa, Homo sapiens; identical to SEQ ID NO: 56055

SEQ ID NO: 56057 - protein, 83 aa, Homo sapiens
TMATFPPATSAPQQPPGPEDEDSSLDESDLYSLAHSYLGGGGRKGRTKREAAANTNRPSPGGHERKLVTKLQNSERKKRGARR

SEQ ID NO: 56058 - protein, 36 aa, Homo sapiens
KREAAANTNRPSPGGHERKLVTKLQNSERKKRGARR

SEQ ID NO: 56059 - protein, 443 aa, Homo sapiens
TPHFSGLAAGRTFLLQGLLRLLKAPALPLLCRGLAVEAKKTYVRDKPHVNVGTIGHVDHGKTTLTAAITKILAEGGGAKFKKYEEIDNAPEERARGITINAAHVEYSTAARHYAHTDCPGHADYVKNMITGTAPLDGCILVVAANDGPMPQTREHLLLARQIGVEHVVVYVNKADAVQDSEMVELVELEIRELLTEFGYKGEETPVIVGSALCALEGRDPELGLKSVQKLLDAVDTYIPVPARDLEKPFLLPVEAVYSVPGRGTVVTGTLERGILKKGDECELLGHSKNIRTVVTGIEMFHKSLERAEAGDNLGALVRGLKREDLRRGLVMVKPGSIKPHQKVEAQVYILSKEEGGRHKPFVSHFMPVMFSLTWDMACRIILPPEKELAMPGEDLKFNLILRQPMILEKGQRFTLRDGNRTIGTGLVTNTLAMTEEEKNIKWG

SEQ ID NO: 56060 - protein, 76 aa, Homo sapiens
KLQRDLEAEHVEVEDTTLNRCSCSFRVLVVSAKFEGKPLLQRHRLVNACLAEELPHIHAFEQKTLTPDQWARERQK

SEQ ID NO: 56061 - protein, 117 aa, Homo sapiens
TKLPSSFVEKLFIPSSKLLFLRYHKEKEVVAVAHAVYQAMLSLKNIPVLETAYKLILGEMTCALNNLLHSLQLPEACSEIKHEAFKNHVFNVDNAKFVVKFDLSALTTIGNAKNSSL

SEQ ID NO: 56062 - protein, 17 aa, Homo sapiens
MEDLGKILMVGSRWGKS

SEQ ID NO: 56063 - protein, 173 aa, Homo sapiens
LMADKVLRWERAWFPPAIMGVVSLVFLIIYYLDPSVLSGVSCFVMFLCLADYLVPILAPRIFGSNKWTTEQQQRFHEICSNLVKTRRRAVGWWKRLFTLKEEKPKMYFMTMIVSLAAVAWVGQQVHNLLLTYLIVTSLLLLPGLNQHGIILKYIGMAKREINKLLKQKEKKNE

SEQ ID NO: 56064 - protein, 137 aa, Homo sapiens
IRRLHAEFAAERDWEQFHQPRNLLLALVGEVGELAELFQWKTDGEPGPQGWSPRERAALQEELSDVLIYLVALAARCRVDLPLAVLSKMDINRRRYPAHLARSSSRKYTELPHGAISEDQAVGPADIPCDSTGQTST

SEQ ID NO: 56065 - protein, 65 aa, Homo sapiens
RARTAWSARPMTTCARLAWPSRRSAPSNIRPTASARSGRSRSCCASAMRMSSASETFCGRPPWKP

SEQ ID NO: 56066 - protein, 76 aa, Homo sapiens; identical to SEQ ID NO: 56060

SEQ ID NO: 56067 - protein, 17 aa, Homo sapiens
MEDLGKILMVGSRWGKS

SEQ ID NO: 56068 - protein, 117 aa, Homo sapiens; identical to SEQ ID NO: 56061

SEQ ID NO: 56069 - protein, 338 aa, Homo sapiens
RKVTFQGVGDEEDEDEIIVPKKKLVDPVAGSGGPGSRFKGKHSLDSDEEEDDDDGGSSKYDILASEDVEGQEAATLPSEGGVRITPFNLQEEMEEGHFDADGNYFLNRDAQIRDSWLDNIDWVKIRERPPGQRQASDSEEEDSLGQTSMSAQALLEGLLELLLPRETVAGALRRLGARGGGKGRKGPGQPSSPQRLDRLSGLADQMVARGNLGVYQETRERLAMRLKGLGCQTLGPHNPTPPPSLDMFAEELAEEELETPTPTQRGEAESRGDGLVDVMWEYKWENTGDAELYGPFTSAQMQTWVSEGYFPDGVYCRKLDPPGGQFYNSKRIDFDLYT

SEQ ID NO: 56070 - protein, 36 aa, Homo sapiens
KAQGRKLSLRRKADGPPGPHDGGDRPSAEARQDAYF

SEQ ID NO: 56071 - protein, 420 aa, Homo sapiens
TVKPEGRDAGEVGASGAPSPPLSGLQAVFLPQGFPDSVSPDYLPYQLWDSVQAFASSLSGSLATQAVLLGIGVGNAKATVSAATATWLVKDSTGMLGRIVFAWWKGSKLDCNAKQWRLFADILNDVAMFLEIMAPVYPICFTMTVSTSNLAKCIVSVAGGATRAALTVHQARRNNMADVSAKDSSQETLVNLAGLLVSLLMLPLVSGCPGFSLGCFFFLTALHIYANYRAVRALVMETLNEGRLRLVLKHYLQRGEVLDPTAANRMEPLWTGFWPAPSLSLGVPLHRLVSSVFELQQLVEGHQESYLLCWDQSQNQVQVVLNQKAGPKTILRAATHGLMLGALQGDGPLPAELEELRNRVRAGPKKESWVVVKETHEVLDMLFPKFLKGLQDAGWKTEKHQLEVDEWRATWLLSPEKKVL

SEQ ID NO: 56072 - protein, 24 aa, Homo sapiens
IKKNNPQKYLRSVGDGETVEFDVV

SEQ ID NO: 56073 - protein, 164 aa, Homo sapiens
IMGSTWGSPGWVRLALCLTGLVLSLYALHVKAARARDRDYRALCDVGTAISCSRVFSSRWGRGFGLVEHVLGQDSILNQSNSIFGCIFYTLQLLLGCLRTRWASVLMLLSSLVSLAGSVYLAWILFFVLYDFCIVCITTYAINVSLMWLSFRKVQEPQGKAKRH

SEQ ID NO: 56074 - protein, 123 aa, Homo sapiens
LRDMGLQEMAGQLQAATHQGSGAAPAGIQAPPQSAAKPGLHFIDQHRAALIARVTNVEWLLDALYGKVLTDEQYQAVRAEPTNPSKMRKLFSFTPAWNWTCKDLLLQALRESQSYLVEDLERS

SEQ ID NO: 56075 - protein, 34 aa, Homo sapiens
KIFPDSEQRLKIDQILVAHPYMKDLNALSAMVLD

SEQ ID NO: 56076 - protein, 640 aa, Homo sapiens
IATPPSQSSSCSDAPMLSTVHSAKNTPSQHSHSIQHSPERSGSGSVGNGSSRYSPSQNSPIHHIPSRRSPAKTIAPQNAPRDESRGRSSFYPDGGDQETAKTGKFLKRFTDEESRVFLLDRGNTRDKEASKEKGSEKGRAEGEWEDQEALDYFSDKESGKQKFNDSEGDDTEETEDYRQFRKSVLADQGKSFATASHRNTEEEGLKYKSKVSLKGNRESDGFREEKNDKHKETGYVVERPSTTKDKHKEEDKNSERITVKKETQSPEQVKSEKLKDLFDYSPPLHKNLDAREKSTFREESPLRIKMIASDSHRPEVKLKMAPVPLDDSNRPASLTKDRLLASTLVHSVKKEQEFRSIFDHIKLPQASKSTSESFIQHIVSLVHHVKEQYFKSAAMTLSERFTSYQKATEEHSTRQKSPEIHRRIDISPSTLRKDTRLAGEERVFKEENQKGDKKLRCDSADLRHDIDHRRKERSKERGDSKGSRESRGSRKQEKTPKDYKEYKSYKDDSKHKREQDHSLSSSSSASPSSPSSREEKESKKEREEEFKTHHEMKEYSGFAGVSRPRGTFHDDRDDGVDYWAKRGRGRGTFQRGRGRFNFKKSGSSPKWNHDKYQGDGIVEDEEETMENNEEKKDRCKEEKE

SEQ ID NO: 56077 - protein, 12 aa, Homo sapiens
KLFSLKQQKKEE

SEQ ID NO: 56078 - protein, 242 aa, Homo sapiens
KPTSPAPAAQSTNGTHASYGPFYLEYSLLAEFTLVVKQKLPGVYVQPSYRSALMWFGVIFIRHGLYQDGVFKFTVYIPDNYPDGDCPRLVFDIPVFHPLVDPTSGELDVKRAFAKWRRNHNHIWQVLMYARRVFYKIDTASPLNPEAAVLYEKDIQLFKSKVVDSVKVCTARLFDQPKIEDPYAISFSPWNPSVHDEAREKMLTQKKKPEEQHNKSVHVAGLSWVKPGSVQPFSKEEKTVAT

SEQ ID NO: 56079 - protein, 75 aa, Homo sapiens
LLGSAPPHLLGLPGAAGHPAAAAAFARPAEPEGGTDRCSALEVEKKLLKTAFQPVPRRPQNHLDAALVLSALSSS

SEQ ID NO: 56080 - protein, 44 aa, Homo sapiens
IKNMITGTSQADCAVLIVAAGVGEFEAGISKYGQTCEHARWLTH

SEQ ID NO: 56081 - protein, 13 aa, Homo sapiens
KVTKSAQKAQKAK

SEQ ID NO: 56082 - protein, 81 aa, Homo sapiens
LQPVAVLELLQGLESLGCIRKRWLRKPRPVSLFSTPVVEEVEVPSSLDESPMAFYEPTLDCTLRLGRVFPHEVNWNKWIHL

SEQ ID NO: 56083 - protein, 114 aa, Homo sapiens
LYHKKIFRTAMLFQFVNVLLQVLVHKSHDLLQEEIGIAIYNMASVDFDGFFAAFLPEFLTSCDGVDANQKSVLGRNFKMDRDLPSFTQNVHRLVNDLRYYRLCNDSLPPGTVKL

SEQ ID NO: 56084 - protein, 21 aa, Homo sapiens
TTTVHAITATQKTVDGPSRKL

SEQ ID NO: 56085 - protein, 80 aa, Homo sapiens
LLADVWFGFLPSIYLVFLIILYEGLLGGAAYVNTFHNIALETSDEHREFAMAATCISDTLGISLSGLLALPLHDFLCQLS

SEQ ID NO: 56086 - protein, 439 aa, Homo sapiens
LPTALLRSTMALLHSGRVLPGIAAAFHPGLAAAASARASSWWTHVEMGPPDPILGVTEAFKRDTNSKKMNLGVGAYRDDNGKPYVLPSVRKAEAQIAAKNLDKEYLPIGGLAEFCKASAELALGENSEVLKSGRFVTVQTISGTGALRIGASFLQRFFKFSRDVFLPKPTWGNHTPIFRDAGMQLQGYRYYDPKTCGFDFTGAVEDISKIPEQSVLLLHACAHNPTGVDPRPEQWKEIATVVKKRNLFAFFDMAYQGFASGDGDKDAWAVRHFIEQGINVCLCQSYAKNMGLYGERVGAFTMVCKDADEAKRVESQLKILIRPMYSNPPLNGARIAAAILNTPDLRKQWLQEVKVMADRIIGMRTQLVSNLKKEGSTHNWQHITDQIGMFCFTGLKPEQVERLIKEFSIYMTKDGRISVAGVTSSNVGYLAHAIHQVTK

SEQ ID NO: 56087 - protein, 49 aa, Homo sapiens
VDENGKISRLRRECPSDECGAGVFMASHFDRHYCGKCCLTYCFNKPEDK

SEQ ID NO: 56088 - protein, 35 aa, Homo sapiens
TELIMRHGGPLFSEKSPDHIQLNSKDIGEGWGCGC

SEQ ID NO: 56089 - protein, 30 aa, Homo sapiens
LDEAIQAVKVQSFQMKRCLSLIIIKRYGHF

SEQ ID NO: 56090 - protein, 781 aa, Homo sapiens
LDEAIQAVKVQSFQMKRCLDKNKLMDALKHASNMLGELRTSMLSPKSYYELYMAISDELHYLEVYLTDEFAKGRKVADLYELVQYAGNIIPRLYLLITVGVVYVKSFPQSRKDILKDLVEMCRGVQHPLRGLFLRNYLLQCTRNILPDEGEPTDEETTGDISDSMDFVLLNFAEMNKLWVRMQHQGHSRDREKRERERQELRILVGTNLVRLSQLEGVNVERYKQIVLTGILEQVVNCRDALAQEYLMECIIQVFPDEFHLQTLNPFLRACAELHQNVNVKNIIIALIDRLALFAHREDGPGIPADIKLFDIFSQQVATVIQSRQDMPSEDVVSLQVSLINLAMKCYPDRVDYVDKVLETTVEIFNKLNLEHIATSSAVSKELTRLLKIPVDTYNNILTVLKLKHFHPLFEYFDYESRKSMSCYVLSNVLDYNTEIVSQDQVDSIMNLVSTLIQDQPDQPVEDPDPEDFADEQSLVGRFIHLLRSEDPDQQYLILNTARKHFGAGGNQRIRFTLPPLVFAAYQLAFRYKENSKVDDKWEKKCQKIFSFAHQTISALIKAELAELPLRLFLQGALAAGEIGFENHETVAYEFMSQAFSLYEDEISDSKAQLAAITLIIGTFERMKCFSEENHEPLRTQCALAASKLLKKPDQGRAVSTCAHLFWSGRNTDKNGEELHGGKRVMECLKKALKIANQCMDPSLQVQLFIEILNRYIYFYEKENDAVTIQVLNQLIQKIREDLPNLESSEETEQINKHFHNTLEHLRLRRESPESEGPIYEGLIL

SEQ ID NO: 56091 - protein, 575 aa, Homo sapiens
TAELFGAEAWGTLAAFGDLNSDKQTDLFVLRERNDLIVFLADQNAPYFKPKVKVSFKNHSALITSVVPGDYDGDSQMDVLLTYLPKNYAKSELGAVIFWGQNQTLDPNNMTILNRTFQDEPLIMDFNGDLIPDIFGITNESNQPQILLGGNLSWHPALTTTSKMRIPHSHAFIDLTEDFTADLFLTTLNATTSTFQFEIWENLDGNFSVSTILEKPQNMMVVGQSAFADFDGDGHMDHLLPGCEDKNCQKSTIYLVRSGMKQWVPVLQDFSNKGTLWGFVPFVDEQQPTEIPIPITLHIGDYNMDGYPDALVILKNTSGSNQQAFLLENVPCNNASCEEARRMFKVYWELTDLNQIKDAMVATFFDIYEDGILDIVVLSKGYTKNDFAIHTLKNNFEADAYFVKVIVLSGLCSNDCPRKITPFGVNQPGPYIMYTTVDANGYLKNGSAGQLSQSAHLALQLPYNVLGLGRSANFLDHLYVGIPRPSGEKSIRKQEWTAIIPNSQLIVIPYPHNVPRSWSAKLYLTPSNIVLLTAIALIGVCVFILAIIGILHWQEKKADDREKRQEAHRFHFDAM

SEQ ID NO: 56092 - protein, 77 aa, Homo sapiens
KKTTGLVGLAVCNTPHERLRILYTKILDVLEEIPKNAAYRKYTEQITNEKLAMVKAEPDVKKLEDQLQGSQLEEVIL

SEQ ID NO: 56093 - protein, 614 aa, Homo sapiens
ISAYRALSQPEAGPGEPDQLTASLQPEPPAPARPSAGGPRARDVAQYLLSDSLFVWVLVNTACCVLMLVAKLIQCIVFGPLRVSERQHLKDKFWNFIFYKFIFIFGVLNVQTVEEVVMWCLWFAGLVFLHLMVQLCKDRFEYLSFSPTTPMSSHGRVLSLLVAMLLSCCGLAAVCSITGYTHGMHTLAFMAAESLLVTVRTAHVILRYVIHLWDLNHEGTWEGKGTYVYYTDFVMELTLLSLDLMHHIHMLLFGNIWLSMASLVIFMQLRYLFHEVQRRIRRHKNYLRVVGNMEARFAVATPEELAVNNDDCAICWDSMQAARKLPCGHLFHNSCLRSWLEQDTSCPTCRMSLNIADNNRVREEHQGENLDENLVPVAAAEGRPRLNQHNHFFHFDGSRIASWLPSFSVEVMHTTNILGITQASNSQLNAMAHQIQEMFPQVPYHLVLQDLQLTRSVEITTDNILEGRIQVPFPTQRSDSIRPALNSPVERPSSDQEEGETSAQTERVPLDLSPRLEETLDFGEVEVEPSEVEDFEARGSRFSKSADERQRMLVQRKDELLQQARKRFLNKSSEDDAASESFLPSEGASSDPVTLRRRMLAAAAERRLQKQQTS

SEQ ID NO: 56094 - protein, 454 aa, Homo sapiens
KVDARSDRTGEVIFKDNFSSAIAGVVEGDYRMDGHIQLICCSVDGEIRGYLPGTAEMRGNLMDTSAEQDLIRELSQKKQNLLLELRNYEENAKAELASPLNEADGHRGIIPANTRLHTTLSVSLGNETQTAHTELRISTSNDTIIRAVLIFAEGIFTGESHVVHPSIHNLSSSICIPIVPPKDVPVDLHLKAFVGYRSSTQFHVFESTRQLPRFSMYALTSLDPASEPISYVNFTIAERAQRVVVWLGQNFLLPEDTHIQNAPFQVCFTSLRNGGHLHIKIKLSGEITINTDDIDLAGDIIQSMASFFAIEDLQVEADFPVYFEELRKVLVKVDEYHSVHQKLSADMADHSNLIRSLLVGAEDARLMRDMKTMKSRYMELYDLNRDLLNGYKIRCNNHTELLGNLKAVNQAIQRAGRLRVGKPKNQVITACRDAIRSNNINTLFKIMRVGTASS

SEQ ID NO: 56095 - protein, 42 aa, Homo sapiens
KCKECKCTSCKKSCCSCCPVGCAKCAQGCICKGASEKCSCCA

SEQ ID NO: 56096 - protein, 119 aa, Homo sapiens
LTVKPIETKNKFSQAKLLAGAVKHKSSESGNSVKRLKPDPEPDDKNQEPSSCKSLGNTSLSGPSIHCPSAAVCIGILPGLGAYSGSSDSESSSDSEGTINATGKIVSSIFRTNTFLEAP

SEQ ID NO: 56097 - protein, 291 aa, Homo sapiens
ITNNERVVVKILKPVKKKKIKREVKILENLRGGTNIIKLIDTVKDPVSKTPALVFEYINNTDFKQLYQILTDFDIRFYMYELLKALDYCHSKGIMHRDVKPHNVMIDHQQKKLRLIDWGLAEFYHPAQEYNVRVASRYFKGPELLVDYQMYDYSLDMWSLGCMLASMIFRREPFFHGQDNYDQLVRIAKVLGTEELYGYLKKYHIDLDPHFNDILGQHSRKRWENFIHSENRHLVSPEALDLLDKLLRYDHQQRLTAKEAMEHPYFYPVVKEQSQPCADNAVLSSGLTAAR

SEQ ID NO: 56098 - protein, 13 aa, Homo sapiens
MFQNRVRPLVKKN

SEQ ID NO: 56099 - protein, 51 aa, Homo sapiens
LCLIQAKLSEMEEVKPASWWVLVSYGVLLVTLGAFIFGQTTANAIFVDLLA

SEQ ID NO: 56100 - protein, 214 aa, Homo sapiens
VQRRAWPPDKEQEKEKKSVICVEGNIASGKTTCLEFFSNATDVEGLMYHDASRWGLTLQTYVQLTMLDRHTRPQVSSVRLMERSIHSARYIFVENLYRSGKMPEVDYVVLSEWFDWILRNMDVSVDLIVYLRTNPETCYQRLKKRCREEEKVIPLEYLEAIHHLHEEWLIKGSLFPMAAPVLVIEADHHMERMLELFEQNRDRILTPENRKHCP

SEQ ID NO: 56101 - protein, 199 aa, Homo sapiens
LEFFSNATDVEVLTEPVSKWRNVRGHNPLGLMYHDASRWGLTLQTYVQLTMLDRHTRPQVSSVRLMERSIHSARYIFVENLYRSGKMPEVDYVVLSEWFDWILRNMDVSVDLIVYLRTNPETCYQRLKKRCREEEKVIPLEYLEAIHHLHEEWLIKGSLFPMAAPVLVIEADHHMERMLELFEQNRDRILTPENRKHCP

SEQ ID NO: 56102 - protein, 523 aa, Homo sapiens
KYDRQLRLWGDHGQEALESAHVCLINATATGTEILKNLVLPGIGSFTIIDGNQVSGEDAGNNFFLQRSSIGKNRAEAAMEFLQELNSDVSGSFVEESPENLLDNDPSFFCRFTVVVATQLPESTSLRLADVLWNSQIPLLICRTYGLVGYMRIIIKEHPVIESHPDNALEDLRLDKPFPELREHFQSYDLDHMEKKDHSHTPWIVIIAKYLAQWYSETNGRIPKTYKEKEDFRDLIRQGILKNENGAPEDEENFEEAIKNVNTALNTTQIPSSIEDIFNDDRCINITKQTPSFWILARALKEFVAKEGQGNLPVRGTIPDMIADSGKYIKLQNVYREKAKKDAAAVGNHVAKLLQSIGQAPESISEKELKLLCSNSAFLRVVRCRSLAEEYGLDTINKDEIISSMDNPDNEIVLYLMLRAVDRFHKQQGRYPGVSNYQVEEDIGKLKSCLTGFLQEYGLSVMVKDDYVHEFCRYGAAEPHTIAAFLGGAAAQEVIKIITKQFVIFNNTYIYSGMSQTSATFQL

SEQ ID NO: 56103 - protein, 152 aa, Homo sapiens
LENANPLIYQRSGERPVTAGEEDEQVPDSIDAREIFDLIRSINDPEHPLTLEELNVVEQVRVQVSDPESTVAVAFTPTIPHCSMATLIGLSIKVKLLRSLPQRFKMDVHITPGTHASEHAVNKQLADKERVAAALENTHLLEVVNQCLSARS

SEQ ID NO: 56104 - protein, 89 aa, Homo sapiens
IDDVFLGMCLQRLRLTPEPHPAFRTFGIPQPSAAPHLSTFDPCFYRELVVVHGLSAADIWLMWRLLHGPHGPACAHPQPVAAGPFQWDS

SEQ ID NO: 56105 - protein, 38 aa, Homo sapiens
LVTDQVSLHVLVERHLPLEYRQLLIPCAYSGNSVFPAQ

SEQ ID NO: 56106 - protein, 46 aa, Homo sapiens
VPGTVISFVTHPWDVSLVQKIELAARRRRSLPGLASSVKEPLPQAT

SEQ ID NO: 56107 - protein, 14 aa, Homo sapiens
KLMVQIVISRESLC

SEQ ID NO: 56108 - protein, 63 aa, Homo sapiens
LYGKIIHLEKPFAVLVKHTPGDQDCDELGRETGTRYLVTALIKDKILFKTRPKPIITSVPKKV

SEQ ID NO: 56109 - protein, 70 aa, Homo sapiens
LEDALAKVTKIILAFHRAEEAAFSSGEQELFVQFCTVFLEDLVPYLNRCLQVLFPPAQIAQTLGKRMKIL

SEQ ID NO: 56110 - protein, 27 aa, Homo sapiens
RGYLDKLEPSKITKFENAFLSHVVSQR

SEQ ID NO: 56111 - protein, 87 aa, Homo sapiens
VDQTAVYTQYFDISYIPSTVFFFNGQHMKVDYGSPDHTKFVGSFKTKQDFIDLIEVIYRGAMRGKLIVQSPIDPKNIPKYDLLYQDI

SEQ ID NO: 56112 - protein, 225 aa, Homo sapiens
LKKTLESDCTKLFSQGIGGEQAQAKFDSCLSDLAAVSNKFRDLLQEGLTELNSTAIKPQVQPWINSFFSVSHNIEEEEFNDYEANDPWVQQFILNLEQQMAEFKASLSPVIYDSLTGLMTSLVAVELEKVVLKSTFNRLGGLQFDKELRSLIAYLTTVTTWTIRDKFARLSQMATILNLERVTEILDYWGPNSGPLTWRLTPAEVRQVLALRIDFRSEDIKRLRL

SEQ ID NO: 56113 - protein, 73 aa, Homo sapiens
VEKLGELVAGAHALGEGQFPFPTALSATPTEETPTPPPAATSDPPAEDMLVAIRRGVRLRRTVTNDRSAPRIL

SEQ ID NO: 56114 - protein, 32 aa, Homo sapiens
LWDLNAAIAKRHLHFIIQREREEIINSLQLQN

SEQ ID NO: 56115 - protein, 832 aa, Homo sapiens
IRGFGPRMPAPIRLRELIRTIRTARTQAEEREMIQKECAAIRSSFREEDNTYRCRNVAKLLYMHMLGYPAHFGQLECLKLIASQKFTDKRIGYLGAMLLLDERQDVHLLMTNCIKNDLNHSTQFVQGLALCTLGCMGSSEMCRDLAGEVEKLLKTSNSYLRKKAALCAVHVIRKVPELMEMFLPATKNLLNEKNHGVLHTSVVLLTEMCERSPDMLAHFRKNEKLVPQLVRILKNLIMSGYSPEHDVSGISDPFLQVRILRLLRILGRNDDDSSEAMNDILAQVATNTETSKNVGNAILYETVLTIMDIKSESGLRVLAINILGRFLLNNDKNIRYVALTSLLKTVQTDHNAVQRHRSTIVDCLKDLDVSIKRRAMELSFALVNGNNIRGMMKELLYFLDSCEPEFKADCASGIFLAAEKYAPSKRWHIDTIMRVLTTAGSYVRDDAVPNLIQLITNSVEMHAYTVQRLYKAILGDYSQQPLVQVAAWCIGEYGDLLVSGQCEEEEPIQVTEDEVLDILESVLISNMSTSVTRGYALTAIMKLSTRFTCTVNRIKKVVSIYGSSIDVELQQRAVEYNALFKKYDHMRSALLERMPVMEKVTTNGPTEIVQTNGETEPAPLETKPPPSGPQPTSQANDLLDLLGGNDITPVIPTAPTSKPSSAGGELLDLLGDINLTGAPAAAPAPASVPQISQPPFLLDGLSSQPLFNDIAAGIPSITAYSKNGLKIEFTFERSNTNPSVTVITIQASNSTELDMTDFVFQAAVPKTFQLQLLSPSSSIVPAFNTGTITQVIKVLNPQKQQLRMRIKLTYNHKGSAMQDLAEVNNFPPQSWQ

SEQ ID NO: 56116 - protein, 50 aa, Homo sapiens
RPWQLGVGAVRTLRTGPALLSVRKFTEKHEWVTTENGIGTVGISNFAQVG

SEQ ID NO: 56117 - protein, 80 aa, Homo sapiens; identical to SEQ ID NO: 51745

SEQ ID NO: 56118 - protein, 12 aa, Homo sapiens
MQQVHPPKTPSV

SEQ ID NO: 56119 - protein, 116 aa, Homo sapiens
LTTLTNAVDAFFTAVATNQPPKIFVAHSKFVILSAHKLVFIGDTLSRQAKAADVRSQVTHYSNLLCDLLRGIVATTKAAALQYPSPSAAQDMVERVKELGHSTQQFRRVLGQLAAA

SEQ ID NO: 56120 - protein, 52 aa, Homo sapiens
LCDLLRGIVATTKAAALQYPSPSAAQDMVERVKELGHSTQQFRRVLGQLAAA

SEQ ID NO: 56121 - protein, 238 aa, Homo sapiens
KRRQGGLSLEEEEEEDANSESEGSSSEEEDDAAEQEKGIGSEDARKKKEDELWASFLNDVGPKSKVPPSTQVKKGEETEETSSSKLLVKAEELEKPKETEKVKITKVFDFAGEEVRVTKEVDATSKEAKSFFKQNEKEKPQANVPSALPSLPAGSGLKRSSGMSSLLGKIGAKKQKMSTLEKSKLDWESFKEEEGIGEELAIHNRGKEGYIERKAFLDRVDHRQFEIERDLRLSKMKP

SEQ ID NO: 56122 - protein, 562 aa, Homo sapiens
KEAKQKELSEKQLSQATAAATNHTTDNGVGPEEESVDPNQYYKIRSQAIHQLKVNGEDPYPHKFHVDISLTDFIQKYSHLQPGDHLTDITLKVAGRIHAKRASGGKLIFYDLRGEGVKLQVMANSRNYKSEEEFIHINNKLRRGDIIGVQGNPGKTKKGELSIIPYEITLLSPCLHMLPHLHFGLKDKETRYRQRYLDLILNDFVRQKFIIRSKIITYIRSFLDELGFLEIETPMMNIIPGGAVAKPFITYHNELDMNLYMRIAPELYHKMLVVGGIDRVYEIGRQFRNEGIDLTHNPEFTTCEFYMAYADYHDLMEITEKMVSGMVKHITGSYKVTYHPDGPEGQAYDVDFTPPFRRINMVEELEKALGMKLPETNLFETEETRKILDDICVAKAVECPPPRTTARLLDKLVGEFLEVTCINPTFICDHPQIMSPLAKWHRSKEGLTERFELFVMKKEICNAYTELNDPMRQRQLFEEQAKAKAAGDDEAMFIDENFCTALEYGLPPTAGWGMGIDRVAMFLTDSNNIKEVLLFPAMKPEDKKENVATTDTLESTTVGTSV

SEQ ID NO: 56123 - protein, 158 aa, Homo sapiens
LHPHHAAGGLHFDDRFSDEQLVTMSVRELNRQLRGVSKEEVIRLKQKRRTLKNRGYAQSCRFKRVQQRHVLESEKNQLLQQVDHLKQEISRLVRERDAYKEKYEKLVSSGFRENGSSSDNPSSPEFFITEPTRKLEPSVGYATFWKPQHRVLTSVFTK

SEQ ID NO: 56124 - protein, 196 aa, Homo sapiens
VLHGAKYPHCAVNGLLVAEKQKPRKEHLPLGGPGAHHTLFVDCIPLFHGTLALAPMLEVALTLIDSWCKDHSYVIAGYYQANERVKDASPNQVAEKVASRIAEGFSDTALIMVDNTKFTMDCVAPTIHVYEHHENRWRCRDPHHDYCEDWPEAQRISASLLDSRSYETLVDFDNHLDDIRNDWTNPEINKAVLHLC

SEQ ID NO: 56125 - protein, 32 aa, Homo sapiens
LYSRVQATFRNADAPSPQAFDEMLKNIQSLTS

SEQ ID NO: 56126 - protein, 48 aa, Homo sapiens
KSGNLSCYNCGATGHRAQDCKQPSMDFNRPGTFRLKYAPPAESLDSTD

SEQ ID NO: 56127 - protein, 149 aa, Homo sapiens
LPSILSMIHPQLLTPVPSLVFTCVMTLLYAFSKDIFSVINFFSFFNWLCVALAIIGMIWLRHRKPELERPIKVNLALPVFFILACLFLIAVSFWKTPVECGIGFTIILSGLPVYFFGVWWKNKPKWLLQGIFSTTVLCQKLMQVVPQET

SEQ ID NO: 56128 - protein, 409 aa, Homo sapiens
VEHVVADAGAFLRHAALQDIGKNIYTIREVVTEIRDKATRRRLAVLPYELRFKEPLPEYVRLVTEFSKKTGDYPSLSATDIQVLALTYQLEAEFVGVSHLKQEPQKVKVSSSIQHPETPLHISGFHLPYKPKPPQETEKGHSACEPENLEFSSFMFWRNPLPNIDHELQELLIDRGEDVPSEEEEEEENGFEDRKDDSDDDGGGWITPSNIKQIQQELEQCDVPEDVRVGCLTTDFAMQNVLLQMGLHVLAVNGMLIREARSYILRCHGCFKTTSDMSRVFCSHCGNKTLKKVSVTVSDDGTLHMHFSRNPKVLNPRGLRYSLPTPKGGKYAINPHLTEDQRFPQLRLSQKARQKTNVFAPDYIAGVSPFVENDISSRSATLQVRDSTLGAGRRRLNPNASRKKFVKKR

SEQ ID NO: 56129 - protein, 41 aa, Homo sapiens
KTFTQRSRLFVGNLPPDITEEEMRKLFEKYGKAGEVFIHKD

SEQ ID NO: 56130 - protein, 170 aa, Homo sapiens
KAEQAKVKKALLQKNVECARVYAENAIRKKNEGVNWLRMASRVDAVASKVQTAVTMKGVTKNMAQVTKALDKALSTMDLQKVSSVMDRFEQQVQNLDVHTSVMEDSMSSATTLTTPQEQVDSLIMQIAEENGLEVLDQLSQLPEGASAVGESSVRSQEDQLSRRLAALRN

SEQ ID NO: 56131 - protein, 32 aa, Homo sapiens
MNSAAPSNKDMYTEMLKSIIEEGEYTPQVSLT

SEQ ID NO: 56132 - protein, 177 aa, Homo sapiens
LILITGGIVATAGRFTQWYFGAYSIVAGVFVCLLEYPRGKRKKGSTMERWGQKYMTAVVKLFGPFTRNYYVRAVLHLLLSVPAGFLLATILGTACLAIASGIYLLAAVRGEQWTPIEPKPRERPQIGGTIKQPPSNPPPRPPAEARKKPSEEEAAVAAGGPPGGPQVNPIPVTDEVV

SEQ ID NO: 56133 - protein, 54 aa, Homo sapiens
ICSAMPWGDPSYKSANFLQHLLHRHKFSYDTFVDYSIDEEAAFQAALALSLSEN

SEQ ID NO: 56134 - protein, 29 aa, Homo sapiens
MNWAPPGCEKLGKCLTPPESIPKKCLWSH

SEQ ID NO: 56135 - protein, 65 aa, Homo sapiens
ILLFPFMYWSYGRQQGLSLLQVPFSIPFYCNVANAFLVAPQIYWFCLLCRKAVRLFDTPQAKKDG

SEQ ID NO: 56136 - protein, 153 aa, Homo sapiens
LEPGSLGGIPSPAKSEEQKMIEKAMESCAFKAALACVGGFVLGGAFGVFTAGIDTNVGFDPKDPYRTPTAKEVLKDMGQRGMSYAKNFAIVGAMFSCTECLIESYRGTSDWKNSVISGCITGGAIGFRAGLKAGAIGCGGFAAFSAAIDYYLR

SEQ ID NO: 56137 - protein, 122 aa, Homo sapiens
IPRVIMATYSLANERLRALEDIEREIGAILQNAGTVILELSKEKTNERLLDRQAAAFTASVQHVEAELSAQIRYLTQVATGQPHEGSSYSSRKDCQMALKRVDYARLKLSDVARTCEQMLEN

SEQ ID NO: 56138 - protein, 31 aa, Homo sapiens
LVHFPLKFLEDESLLPPLGSKEGMIPLEVWT

SEQ ID NO: 56139 - protein, 292 aa, Homo sapiens
VEAHPDNACSPIAPPPPAPVNGSVFIALLRRFDCNFDLKVLNAQKAGYGAAVVHNVNSNELLNMVWNSEEIQQQIWIPSVFIGERSSEYLRALFVYEKGARVLLVPDNTFPLGYYLIPFTGIVGLLVLAMGAVMIARCIQHRKRLQRNRLTKEQLKQIPTHDYQKGDQYDVCAICLDEYEDGDKLRVLPCAHAYHSRCVDPWLTQTRKTCPICKQPVHRGPGDEDQEEETQGQEEGDEGEPRDHPASERTPLLGSSPTLPTSFGSLAPAPLVFPGPSTDPPLSPPSSPVILV

SEQ ID NO: 56140 - protein, 42 aa, Homo sapiens
LGGDCTVYPVFVNEAAYYEKKEAFAKTTKLTLNAKSIRCCLH

SEQ ID NO: 56141 - protein, 52 aa, Homo sapiens [sequence omitted]

SEQ ID NO: 56142 - skipped

SEQ ID NO: 56143 - protein, 64 aa, Homo sapiens
IGVPRKLYKPGAKEPRCVCVRTTGPPSGQMPDNPPHRNRGDLDHPNLAEYTGCPPLAITCSFPL

SEQ ID NO: 56144 - protein, 79 aa, Homo sapiens
KKETAAKATVEQLMFEEKNKAQRLQTELDVSEQVQRDFVKLSQTLQVQLERIRQADSLERIRAILNDTKLTDINQLPET

SEQ ID NO: 56145 - protein, 91 aa, Homo sapiens
VGSPPWKEAFRQRCLERMRNSRDRLLNRYRQAGSSGPGNSQNSFLVQEVMEEEWNALQSVENCPEDLAQLEELIDMAVLEEIQQELINQGL

SEQ ID NO: 56146 - protein, 28 aa, Homo sapiens
LRITSGVVVCQCGLSIPSHACDTWAVIL

SEQ ID NO: 56147 - protein, 13 aa, Homo sapiens
MSCLACDTWAVIL

SEQ ID NO: 56148 - protein, 59 aa, Homo sapiens
IVQAKLKQTLTFFDELHNVGRDHGTSDFRESLVSLVQNSRKLQNIRDNVEKESKRLKIS

SEQ ID NO: 56149 - protein, 48 aa, Homo sapiens
IFTFLRVPETRGRTFDQISAAFHRTPSLLEQEVKPSTELEYLGPDEND

SEQ ID NO: 56150 - protein, 158 aa, Homo sapiens
KPLKMADDLDFETGDAGASATFPMQCSALRKNGFVVLKGRPCKIVEMSTSKTGKHGHAKVHLVGIDIFTGKKYEDICPSTHNMDVPNIKRNDFQLIGIQDGYLSLLQDSGEVREDLRLPEGDLGKEIEQKYDCGEEILITVLSAMTEEAAVAIKAMAK

SEQ ID NO: 56151 - protein, 36 aa, Homo sapiens
LEEVLRVALEHGFRLDSVFPDPEDLLNSRSLRFVRH

SEQ ID NO: 56152 - protein, 11 aa, Homo sapiens
MERNRPLLCPV

SEQ ID NO: 56153 - protein, 147 aa, Homo sapiens
IFSAAGAAFTKLGELTMQLHPVADSSPAGAKWTETEIEMLRAAVKRFGDDLNHISCVIKERTVAQIKATVKRKVYEDSGIPLPAESPKKGPKKVASGVLSPPPAAPPPSSSSVPEAGGPPIKKQKADSLTLDSGLLMTSADPPLLSC

SEQ ID NO: 56154 - protein, 146 aa, Homo sapiens [sequence omitted]

SEQ ID NO: 56155 - protein, 139 aa, Homo sapiens
VKRFGDDLNHISCVIKERTVAQIKATVKRKVYEDSGIPLPAESPKKGPKKVASGVLSPPPAAPPPSSSSVPEAGGPPIKKQKADVTLSALNDSDANSDVVDIEGLGETPPAKKLNFDQDSLTLDSGLLMTSADPPLLSC

SEQ ID NO: 56156 - protein, 272 aa, Homo sapiens
MAVKRIRSTVDEKEQKQLLMDLDVVMRSSDCPYIVQFYGALFREGDCWICMELMSTSFDKFYKYVYSVLDDVIPEEILGKITLATVKALNHLKENLKIIHRDIKPSNILLDRSGNIKLCDFGISGQLVDSIAKTRDAGCRPYMAPERIDPSASRQGYDVRSDVWSLGITLYELATGRFPYPKWNSVFDQLTQVVKGDPPQLSNSEEREFSPSFINFVNLCLTKDESKRPKYKELLKHPFILMYEERAVEVACYVCKILDQMPATPSSPMYVD

SEQ ID NO: 56157 - protein, 22 aa, Homo sapiens
LTTSPWLQLFINARNWTLEGSC

SEQ ID NO: 56158 - protein, 8 aa, Homo sapiens
MWTSFKPF

SEQ ID NO: 56159 - protein, 73 aa, Homo sapiens
VQGARAVHVESVQPLSLENLALRGRCQEAWVLSGKQQIAKENQQVAKDVTLHQALLRLPQYQTDLLLTFNQPP

SEQ ID NO: 56160 - protein, 79 aa, Homo sapiens
KQQIAKENQQVAKDVTLHQALLRLPQYQTDLLLTFNQPPPDNRSSLGPENLSPAPWSLGDFEQLVTSLTLHDPNIFGPQ

SEQ ID NO: 56161 - protein, 142 aa, Homo sapiens
KDAYELEVLLRVKESEIQYLKQEISSLKDELQTALRDKKYASDKYKDIYTELSIAKAKADCDISRLKEQLKAATEALGEKSPDSATVSGYDIMKSKSNPDFLKKDRSCVTRQLRNIRSKSLKEGLTVQERLKLFESRDLKKD

SEQ ID NO: 56162 - protein, 117 aa, Homo sapiens
KESEIQYLKQEISSLKDELQTALRDKKYASDKYKDIYTELSIAKAKADCDISRLKEQLKAATEALGEKSPDSATVSGYDIMKSKSNPDFLKKDRSCVTRQLRNIRSKSVIEQVSWDT

SEQ ID NO: 56163 - protein, 22 aa, Homo sapiens
IVYYKLTDGFMLPDPQNISLRR

SEQ ID NO: 56164 - protein, 54 aa, Homo sapiens
KFQEMRKLISTMPGIHLSPEQQQQQLQSLREQVRTKNELLQKYKSLCMFEIPKE

SEQ ID NO: 56165 - protein, 4 aa, Homo sapiens
RTMQ

SEQ ID NO: 56166 - protein, 49 aa, Homo sapiens
ICQSLESAKAGTRFPGPQWGCANPRELGCKFVKNQHHVWQLSIGARSLP

SEQ ID NO: 56167 - protein, 183 aa, Homo sapiens
KLLSNITQLFPDLTKLLPFQPTIHTTVSNLYPKLTQLQPQLAQLQPNLTHKYTPTSPSYSPSSPEYTPTSPKYSPTSPKYSPTSPKYSPTSPTYSPTTPKYSPTSPTYSPTSPVYTPTSPKYSPTSPTYSPTSPKYSPTSPTYSPTSPKGSTYSPTSPGYSPTSPTYSLTSPAISPDDSDEEN

SEQ ID NO: 56168 - protein, 61 aa, Homo sapiens
LVPDHTIKDISGASFAGFYYICFQKSAASIEGYYYHRSSEWYQSLNLTHVPEHSAPIYEFR

SEQ ID NO: 56169 - protein, 91 aa, Homo sapiens
LNLDYLLEMLWEYLALTCIYTKKRGQRPDFTDAIILRKGASVEHVCHRIHRSLASQFKYALVWGTSTKYSPQRVGLTHTMEHEDVIQIVKK

SEQ ID NO: 56170 - protein, 272 aa, Homo sapiens
TVDRAPLRNKYFFGEGYTYGAQLQKRGPGQERLYPPGDVDEIPEWVHQLVIQKLVEHRVIPEGFVNSAVINDYQPGGCIVSHVDPIHIFERPIVSVSFFSDSALCFGCKFQFKPIRVSEPVLSLPVRRGSVTVLSGYAADEITHCIRPQDIKERRAVIILRKTRLDAPRLETKSLSSSVLPPSYASDRLSGNNRDPALKPKRSHRKADPDAAHRPRILEMDKEENRRSVLLPTHRRRGSFSSENYWRKSYESSEDCSEAAGSPARKVKMRRH

SEQ ID NO: 56171 - protein, 54 aa, Homo sapiens
MNVARQNNDSDCGAFVLQYCKHLALSQPFSFTQQDMPKLRRQIYKELCHCKLTV

SEQ ID NO: 56172 - protein, 394 aa, Homo sapiens
LDEAYIQPQPLGVVLIIGAWNYPFVLTIQPLIGAIAAGNAVIIKPSELSENTAKILAKLLPQYLDQDLYIVINGGVEETTELLKQRFDHIFYTGNTAVGKIVMEAAAKHLTPVTLELGGKSPCYIDKDCDLDIVCRRITWGKYMNCGQTCIAPDYILCEASLQNQIVWKIKETVKEFYGENIKESPDYERIINLRHFKRILSLLEGQKIAFGGETDEATRYIAPTVLTDVDPKTKVMQEEIFGPILPIVPVKNVDEAINFINEREKPLALYVFSHNHKLIKRMIDETSSGGVTGNDVIMHFTLNSFPFGGVGSSGMGAYHGKHSFDTFSHQRPCLLKSLKREGANKLRYPPNSQSKVDWGKFFLLKRFNKEKLGLLLLTFLGIVAAVLVKAEYY

SEQ ID NO: 56173 - protein, 61 aa, Homo sapiens
IKLARVTKVLGRTGSQGQCTQVRVEFMDDTSRSIIRNVKGPVREGDVLTLLESEREARRLR

SEQ ID NO: 56174 - protein, 249 aa, Homo sapiens
ISPQSGNFRQLLLQRCRTEYEVKDQAAKGDEVTRKRFHAFVFFLGELYLNLEIKGTNGQVTRADILQVGLRELLNALFSNPMDDNLICAVKLLKLTGSVLEDAWKEKGKMDMEEIIQRIENVVLDANCSRDVKQMLLKLVELRSSNWGRVHATSTYREATPENDPNYFMNEPTFYTSDGVPFTAADPDYQEKYQELLEREDFFPDYEENGTDLSGAGDPYLDDIDDEMDPEIEEAYEKFCLESERKRKQ

SEQ ID NO: 56175 - protein, 204 aa, Homo sapiens
LQQDSNDDTEDVSLFDAEEETTNRPRKAKIRHPVASFFHLFFRVSAIIVYLLCGLLSSSFITCMVTIILLLSCDFWAVKNVTGRLMVGLRWWNHIDEDGKSHWVFESRKESSQENKTVSEAESRIFWLGLIACPVLWVIFAFSALFSFRVKWLAVVIMGVVLQGANLYGYIRCKVRSRKHLTSMATSYFGKQFLRQNTGDDQTS

SEQ ID NO: 56176 - protein, 52 aa, Homo sapiens
VASMTSAAPQPALGATGSSLTPLGPAMMNMVGSVGIPPSAAQATGTTNPFLL

SEQ ID NO: 56177 - protein, 335 aa, Homo sapiens
LCGAGKSKRKKDLRISCMSKPPAPNPTPPRNLDSRTFITIGDRNFEVEADDLVTISELGRGAYGVVEKVRHAQSGTIMAVKRIRATVNSQEQKRLLMDLDINMRTVDCFYTVTFYGALFREGDVWICMELMDTSLDKFYRKVLDKNMTIPEDILGEIAVSIVRALEHLHSKLSVIHRDVKPSNVLINKEGHVKMCDFGISGYLVDSVAKTMDAGCKPYMAPERINPELNQKGYNVKSDVWSLGITMIEMAILRFPYESWGTPFQQLKQVVEEPSPQLPADRFSPEFVDFTAQCLRKNPAERMSYLELMEHPFFTLHKTKKTDIAAFVKEILGEDS

SEQ ID NO: 56178 - protein, 304 aa, Homo sapiens
LDSRTFITIGDRNFEVEADDLVTISELGRGAYGVVEKVRHAQSGTIMAVKRIRATVNSQEQKRLLMDLDINMRTVDCFYTVTFYGALFREGDVWICMELMDTSLDKFYRKVLDKNMTIPEDILGEIAVSIVRALEHLHSKLSVIHRDVKPSNVLINKEGHVKMCDFGISGYLVDSVAKTMDAGCKPYMAPERINPELNQKGYNVKSDVWSLGITMIEMAILRFPYESWGTPFQQLKQVVEEPSPQLPADRFSPEFVDFTAQCLRKNPAERMSYLELMEHPFFTLHKTKKTDIAAFVKEILGEDS

SEQ ID NO: 56179 - protein, 17 aa, Homo sapiens
IQKESTLHLVLRLRGGC

SEQ ID NO: 56180 - protein, 408 aa, Homo sapiens
VRLRTIGELLAPAAPFDKKCGRENWTVAFAPDGSYFAWSQGHRTVKLVPWSQCLQNFLLHGTKNVTNSSSLRLPRQNSDGGQKNKPREHIIDCGDIVWSLAFGSSVPEKQSRCVNIEWHRFRFGQDQLLLATGLNNGRIKIWDVYTGKLLLNLVDHTEVVRDLTFAPDGSLILVSASRDKTLRVWDLKDDGNMMKVLRGHQNWVYSCAFSPDSSMLCSVGASKAVFLWNMDKYTMIRKLEGHHHDVVACDFSPDGALLATASYDTRVYIWDPHNGDILMEFGHLFPPPTPIFAGGANDRWVRSVSFSHDGLHVASLADDKMVRFWRIDEDYPVQVAPLSNGLCCAFSTDGSVLAAGTHDGSVYFWATPRQVPSLQHLCRMSIRRVMPTQEVQELPIPSKLLEFLSYRI

SEQ ID NO: 56181 - protein, 155 aa, Homo sapiens
IPITLFMDLQAVLPRELYPVEFRNLLKWYAKEFKDPLLQEPPAWFKSFLFCELVFQLPFFPIATYAFLKGSCKWIRTPAIIYSVHTMTTLIPILSTFLFEDFSKASGFKGQRPETLHERLTLVSVYAPYLLIPFILLIFMLRSPYYKYEEKRKKK

SEQ ID NO: 56182 - protein, 78 aa, Homo sapiens
VEFPEARIYEETLNVLLYETPRVPDNSLLEATSRSRSQASPSEDEETFELRDRVRRIHVKRYSTYDDRQLGHQSTHRD

SEQ ID NO: 56183 - protein, 102 aa, Homo sapiens
KIQLANEEYKRITRNVTCQDTRHGGTLSDLGKQVRSLKALVITIFNFIVTVVAAFVCTYLGSQYIFTEMASRVLAALIVASVVGLAELYVMVRAMEGELGEL

SEQ ID NO: 56184 - protein, 117 aa, Homo sapiens
VSGVQHQSTLELSEVGVEAAAATSIAMSRMSLSSFSVNRPFLFFIFEDTTGLPLFVGSVRNPNPSAPRELKEQQDSPGNKDFLQSLKGFPRGDKLFGPDLKLVPPMEEDYPQFGSPK

SEQ ID NO: 56185 - protein, 415 aa, Homo sapiens
LVLLLCIGALLGHSSCQNPASPPEEGSPDPDSTGALVEEEDPFFKVPVNKLAAAVSNFGYDLYRVRSSTSPTTNVLLSPLSVATALSALSLGAEQRTESIIHRALYYDLISSPDIHGTYKELLDTVTAPQKNLKSASRIVFEKKLRIKSSFVAPLEKSYGTRPRVLTGNPRLDLQEINNWVQAQMKGKLARSTKEIPDEISILLLGVAHFKGQWVTKFDSRKTSLEDFYLDEERTVRVPMMSDPKAVLRYGLDSDLSCKIAQLPLTGSMSIIFFLPLKVTQNLTLIEESLTSEFIHDIDRELKTVQAVLTVPKLKLSYEGEVTKSLQEMKLQSLFDSPDFSKITGKPIKLTQVEHRAGFEWNEDGAGTTPSPGLQPAHLTFPLDYHLNQPFIFVLRDTDTGALLFIGKILDPRGP

SEQ ID NO: 56186 - protein, 595 aa, Homo sapiens
KPILQVINIRPITTGNSPPRYRLLMSDGLNTLSSFMLATQLNPLVEEEQLSSNCVCQIHRFIVNTLKDGRRVVILMELEVLKSAEAVGVKIGNPVPYNEGLGQPQVAPPAPAASPAASSRPQPQNGSSGMGSTVSKAYGASKTFGKAAGPSLSHTSGGTQSKVVPIASLTPYQSKWTICARVTNKSQIRTWSNSRGEGKLFSLELVDESGEIRATAFNEQVDKFFPLIEVNKVYYFSKGTLKIANKQFTAVKNDYEMTFNNETSVMPCEDDHHLPTVQFDFTGIDDLENKSKDSLVDIIGICKSYEDATKITVRSNNREVAKRNIYLMDTSGKVVTATLWGEDADKFDGSRQPVLAIKGARVSDFGGRSLSVLSSSTIIANPDIPEAYKLRGWFDAEGQALDGVSISDLKSGGVGGSNTNWKTLYEVKSENLGQGDKPDYFSSVATVVYLRKENCMYQACPTQDCNKKVIDQQNGLYRCEKCDTEFPNFKYRMILSVNIADFQENQWVTCFQESAEAILGQNAAYLGELKDKNEQAFEEVFQNANFRSFIFRVRVKVETYNDESRIKATVMDVKPVDYREYGRRLVMSIRRSALM

SEQ ID NO: 56187 - protein, 133 aa, Homo sapiens
LEESLGMVAQALNRLGPFDGLLGFSQGAALAALVCALGQAGDPRFPLPRFILLVSGFCPRGIGFKESILQRPLSLPSLHVFGDTDKVIPSQESVQLASQFPGAITLTHSGGHFIPAAAPQRQAYLKFLDQFAE

SEQ ID NO: 56188 - protein, 67 aa, Homo sapiens
KAAAAELLAQTTHFLHDPKVALESLYPLAKFTAELGLSPDKAAEVLSQGAHLAAGPDGRTIDRFSPT

SEQ ID NO: 56189 - protein, 19 aa, Homo sapiens
VQKQRSAGSFKRNSIKKIV

SEQ ID NO: 56190 - protein, 50 aa, Homo sapiens
KGESASPANEEITEEQNGTANGFSEINSKEKALETDSVSGVSKQSKKQKL

SEQ ID NO: 56191 - protein, 1364 aa, Homo sapiens
LLLMCLLLLGSSARAAHIKKAEATTTTTSAGAEAAEGQFDRYYHEEELESALREAAAAGLPGLARLFSIGRSVEGRPLWVLRLTAGLGSLIPEGDAGPDAAGPDAAGPLLPGRPQVKLVGNMHGDETVSRQVLIYLARELAAGYRRGDPRLVRLLNTTDVYLLPSLNPDGFERAREGDCGFGDGGPSGASGRDNSRGRDLNRSFPDQFSTGEPPALDEVPEVRALIEWIRRNKFVLSGNLHGGSVVASYPFDDSPEHKATGIYSKTSDDEVFKYLAKAYASNHPIMKTGEPHCPGDEDETFKDGITNGAHWYDVEGGMQDYNYVWANCFEITLELSCCKYPPASQLRQEWENNRESLITLIEKVHIGVKGFVKDSITGSGLENATISVAGINHNITTGRFGDFYRLLVPGTYNLTVVLTGYMPLTVTNVVVKEGPATEVDFSLRPTVTSVIPDTTEAVSTASTVAIPNILSGTSSSYQPIQPKDFHHHHFPDMEIFLRRFANEYPNITRLYSLGKSVESRELYVMEISDNPGVHEPGEPEFKYIGNMHGNEVVGRELLLNLIEYLCKNFGTDPEVTDLVHNTRIHLMPSMNPDGYEKSQEGDSISVIGRNNSNNFDLNRNFPDQFVQITDPTQPETIAVMSWMKSYPFVLSANLHGGSLVVNYPFDDDEQGLATYSKSPDDAVFQQIALSYSKENSQMFQGRPCKNMYPNEYFPHGITNGASWYNVPGGMQDWNYLQTNCFEVTIELGCVKYPLEKELPNFWEQNRRSLIQFMKQVHQGVRGFVLDATDGRGILNATISVAEINHPVTTYKTGDYWRLLVPGTYKITASARGYNPVTKNVTVKSEGAIQVNFTLVRSSTDSNNESKKGKGASSSTNDASDPTTKEFETLIKDLSAENGLESLMLRSSSNLALALYRYHSYKDLSEFLRGLVMNYPHITNLTNLGQSTEYRHIWSLEISNKPNVSEPEEPKIRFVAGIHGNAPVGTELLLALAEFLCLNYKKNPAVTQLVDRTRIVIVPSLNPDGRERAQEKDCTSKIGQTNARGKDLDTDFTNNASQPETKAIIENLIQKQDFSLSVALDGGSMLVTYPYDKPVQTVENKETLKHLASLYANNHPSMHMGQPSCPNKSDENIPGGVMRGAEWHSHLGSMKDYSVTYGHCPEITVYTSCCYFPSAARLPSLWADNKRSLLSMLVEVHKGVHGFVKDKTGKPISKAVIVLNEGIKVQTKEGGYFHVLLAPGVHNIIAIADGYQQQHSQVFVHHDAASSVVIVFDTDNRIFGLPRELVVTVSGATMSALILTACIIWCICSIKSNRHKDGFHRLRQHHDEYEDEIRMMSTGSKKSLLSHEFQDETDTEEETLYSSKH

SEQ ID NO: 56192 - protein, 232 aa, Homo sapiens
LENELDLKLVSFSKLCTSYSHSSTRDGRRDRYSSDTTPLLNGSSQDRMFETMAIEIEQLLARLTGVNDKMAEYTNSAGVPSLNAALMHTLQRHRDILQDYTHEFHKTKANFMAIRERENLMGSVRKDIESYKSGSGVNNRRTELFLKEHDHLRNSDRLIEETISIAMATKENMTSQRGMLKSIHSKMNTLANRFPAVNSLIQRINLRKRRDSLILGGVIGICTILLLLYAFH

SEQ ID NO: 56193 - protein, 107 aa, Homo sapiens
KQHFMDSRIPCLIVAAKSDLHEVKQEYSISPTDFCRKHKMPPPQAFTCNTADAPSKDIFVKLTTMAMYPHVTQADLKSSTFWLRASFGATVFAVLGFAMYKALLKQR

SEQ ID NO: 56194 - protein, 399 aa, Homo sapiens
IDILHSIVKRDIQENDEEAVQVKEQSILELGSLLAKTGQAAELGGLLKYVRPFLNSISKAKAARLVRSLLDLFLDMEAATGQEVELCLECIEWAKSEKRTFLRQALEARLVSLYFDTKRYQEALHLGSQLLRELKKMDDKALLVEVQLLESKTYHALSNLPKARAALTSARTTANAIYCPPKLQATLDMQSGIIHAAEEKDWKTAYSYFYEAFEGYDSIDSPKAITSLKYMLLCKIMLNTPEDVQALVSGKLALRYAGRQTEALKCVAQASKNRSLADFEKALTDYRAELRDDPIISTHLAKLYDNLLEQNLIRVIEPFSRVQIEHISSLIKLSKADVERKLSQMILDKKFHGILDQGEGVLIIFDEPPVDKTYEAALETIQNMSKVVDSLYNKAKKLT

SEQ ID NO: 56195 - protein, 10 aa, Homo sapiens
LDQIFQNLKP

SEQ ID NO: 56196 - protein, 190 aa, Homo sapiens
LELTAALTEGVVNGKKLKMRQAFHSHPGTHCPSPAVKDPNTQSVGNPQRIGWPHFKEIFMLSALSQEDVKTLKQYLLTQAQPGPWEYHSAVLTSQTPEEICANIIREKLLEHLPQEVPYNVQQKTAVWEEGPGGELVIQQKLLVPKESYVKLLIGPKGHVISQIAQEAGHDLMDIFLCDVDIRLSVKLLK

SEQ ID NO: 56197 - protein, 20 aa, Homo sapiens
MSRSTSVTSQISNGSHMSYT

SEQ ID NO: 56198 - protein, 216 aa, Homo sapiens
IKHSGLAANDASVTAGVFMSSRGHSTLPRTLMAPRMISEGDIGGIAQITSSLFLGRGSVASNRHLLQARGITCIVNATIEIPNFNWPQFEYVKVPLADMPHAPIGLYFDTVADKIHSVSRKHGATLVHCAAGVSRSATLCIAYLMKFHNVCLLEAYNWVKARRPVIRPNVGFWRQLIDYERQLFGKSTVKMVQTPYGIVPDVYEKESRHLMPYWGI

SEQ ID NO: 56199 - protein, 186 aa, Homo sapiens
KDYFNVPYPLPKIDLIAIADFAAGAMENWDLVTYRETALLIDPKNSCSSSRQWVALVVGHELAHQWFGNLVTMEWWTHLWLNEGFASWIEYLCVDHCFPEYDIWTQFVSADYTRAQELDALDNSHPIEVSVGHPSEVDEIFDAISYSKGASVIRMLHDYIGDKDFKKGMNMYLTKFQQKNAAAGNL

SEQ ID NO: 56200 - protein, 291 aa, Homo sapiens
LGWWSRQPVLVTQSAAIVPVRTKKRFTPPIYQPKFKTEKEFMQHARKAGLVIPPEKSDRSIHLACTAGIFDAYVPPEGDARISSLSKEGLIERTERMKKTMASQVSIRRIKDYDANFKIKDFPEKAKDIFIEAHLCLNNSDHDRLHTLVTEHCFPDMTWDIKYKTVRWSFVESLEPSHVVQVRCSSMMNQGNVYGQITVRMHTRQTLAIYDRFGRLMYGQEDVPKDVLEYVVFEKQLTNPYGSWRMHTKIVPPWAPPKQPILKTVMIPGPQLKPEEEYEEAQGEAQKPQLA

SEQ ID NO: 56201 - protein, 705 aa, Homo sapiens
VATAASGTMARLVAVCRDGEEEFPFERRQIPLYIDDTLTMVMEFPDNVLNLDGHQNNGAQLKQFIQRHGMLKQQDLSIAMVVTSREVLSALSQLVPCVGCRRSVERLFSQLVESGNPALEPLTVGPKGVLSVTRSCMTDAKKLYTLFYVHGSKLNDMIDAIPKSKKNKRCQLHSLDTHKPKPLGGCWMDVWELMSQECRDEVVLIDSSCLLETLETYLRKHRFCTDCKNKVLRAYNILIGELDCSKEKGYCAALYEGLRCCPHERHIHVCCETDFIAHLLGRAEPEFAGGRRERHAKTIDIAQEEVLTCLGIHLYERLHRIWQKLRAEEQTWQMLFYLGVDALRKSFEMTVEKVQGISRLEQLCEEFSEEERVRELKQEKKRQKRKNRRKNKCVCDIPTPLQTADEKEVSQEKETDFIENSSCKACGSTEDGNTCVEVIVTNENTSCTCPSSGNLLGSPKIKKGLSPHCNGSDCGYSSSMEGSETGSREGSDVACTEGICNHDEHGDDSCVHHCEDKEDDGDSCVECWANSEENDTKGKNKKKKKKSKILKCDEHIQKLGSCITDPGNRETSGNTMHTVFHRDKTKDTHPESCCSSEKGGQPLPWFEHRKNVPQFAEPTETLFGPDSGKGAKSLVELLDESECTSDEEIFISQDEIQSFMANNQSFYSNREQYRQHLKEKFNKYCRLNDHKRPICSGWLTTAGAN

SEQ ID NO: 56202 - protein, 6 aa, Homo sapiens
TPKTEE

SEQ ID NO: 56203 - protein, 216 aa, Homo sapiens [sequence omitted]

SEQ ID NO: 56204 - protein, 8 aa, Homo sapiens
VHIKDPKS

SEQ ID NO: 56205 - protein, 16 aa, Homo sapiens
MGGRNDYRNDQRNRPY

SEQ ID NO: 56206 - protein, 31 aa, Homo sapiens
IDLHSPSEIVKQITSISIEPGVEVEVTIADA

SEQ ID NO: 56207 - protein, 84 aa, Homo sapiens
RVPLALHPVVGQPFLKAEGSSNSVVHAETKLQNYGELGPGTTGASSSGAGLHWGGPTQSSAYGKLYRGPTRVPPRGGRGRGVPY

SEQ ID NO: 56208 - protein, 32 aa, Homo sapiens
LPRYLIHQSLAATMFEFAFHLRQRISELGARA

SEQ ID NO: 56209 - protein, 30 aa, Homo sapiens
VKPDLSYMPIWKFPDEEGACQPCPINCTHS

SEQ ID NO: 56210 - protein, 69 aa, Homo sapiens
LGSQDLLNWCMQIAKGMSYLEDVRLVHRDLAARNVLVKSPNHVKITDFGLARLLDIDETEYHADGGKVR

SEQ ID NO: 56211 - protein, 480 aa, Homo sapiens
TAAAAAEHSQRELDTVTLEDIKEHVKQLEKAVSGKEPRFVLRALRMLPSTSRRLNHYVLYKAVQGFFTSNNATRDFLLPFLEEPMDTEADLQFRPRTGKAASTPLLPEVEAYLQLLVVIFMMNSKRYKEAQKISDDLMQKISTQNRRALDLVAAKCYYYHARVYEFLDKLDVVRSFLHARLRTATLRHDADGQATLLNLLLRNYLHYSLYDQAEKLVSKSVFPEQANNNEWARYLYYTGRIKAIQLEYSEARRTMTNALRKAPQHTAVGFKQTVHKLLIVVELLLGEIPDRLQFRQPSLKRSLMPYFLLTQAVRTGNLAKFNQVLDQFGEKFQADGTYTLIIRLRHNVIKTGVRMISLSYSRISLADIAQKLQLDSPEDAEFIVAKAIRDGVIEASINHEKGYVQSKEMIDIYSTREPQLAFHQRISFCLDIHNMSVKAMRFPPKSYNKDLESAEERREREQQDLEFAKEMAEDDDDSFP

SEQ ID NO: 56212 - protein, 147 aa, Homo sapiens
LPPKPFSCGRSGKGHKRKSPFGSTERKTPVKKLAPEFSKVKTKTPKHSPIKEEPCGSLSETVCKRELRSQETPEKPRSSVDTPPRLSTPQKGPSTHPKEKAFSSEIEDLPYLSTTEMYLCRWHQPPPSPLPLRESSPKKEETVASKA

SEQ ID NO: 56213 - protein, 85 aa, Homo sapiens
ILQRLQLRMYKKKGIQESEPEVTSFFPEPDDVESLMITPFLPVVAFGRPLPKLTPQNFELPWLDERSRCRLEIQKKQTPHRTCRK

SEQ ID NO: 56214 - protein, 249 aa, Homo sapiens
VDSSTSGLEQDVAQLNIAEQNWSPGQPSFLQPRELRGMPNHIHMGAGPPPQFNRMEEMGVQGGRAKRYSSQRQRPVPEPPAPPVHISIMEGHYYDPLQFQGPIYTHGDSPAPLPPQGMLVQPGMNLPHPGLHPHQTPAPLPNPGLYPPPVSMSPGQPPPQQLLAPTYFSAPGVMNFGNPSYPYAPGALPPPPPPHLYPNTQAPSQVYGGVTYYNPAQQQVQPKPSPPRRTPQPVTIKPPPPEVVSRGSS

SEQ ID NO: 56215 - protein, 76 aa, Homo sapiens
RTPAGPPPPPPPPLRNGHRDSITTVRSFLDDFESKYSFHPVEDFPAPEEYKHFQRIYPSKTNRAARGAPPLPPILR

SEQ ID NO: 56216 - protein, 442 aa, Homo sapiens
VPPYAFFFPPMLGGLSPPGALTTLQHQLPVSGYSTPSPATIETQSSSSEEIVPSPPSPPPLPRIYKPCFVCQDKSSGYHYGVSACEGCKGFFRRSIQKNMVYTCHRDKNCIINKVTRNRCQYCRLQKCFEVGMSKESVRNDRNKKKKEVPKPECSESYTLTPEVGELIEKVRKAHQETFPALCQLGKYTTNNSSEQRVSLDIDLWDKFSELSTKCIIKTVEFAKQLPGFTTLTIADQITLLKAACLDILILRICTRYTPEQDTMTFSDGLTLNRTQMHNAGFGPLTDLVFAFANQLLPLEMDDAETGLLSAICLICGDRQDLEQPDRVDMLQEPLLEALKVYVRKRRPSRPHMFPKMLMKITDLRSISAKGAERVITLKMEIPGSMPPLIQEMLENSEGLDTLSGQPGGGGRDGGGLAPPPGSCSPSLSPSSNRSSPATHSP

SEQ ID NO: 56217 - protein, 655 aa, Homo sapiens
LHRYLRDFCGCHVAWSGSQLRLPRPLPAVPGELTEATPNRYRYYQNVCTQSYSFVWWDWARWEREIDWMALNGINLALAWSGQEAIWQRVYLALGLTQAEINEFFTGPAFLAWGRMGNLHTWDGPLPPSWHIKQLYLQHRVLDQMRSFGMTPVLPAFAGHVPEAVTRVFPQVNVTKMGSWGHFNCSYSCSFLLAPEDPIFPIIGSLFLRELIKEFGTDHIYGADTFNEMQPPSSEPSYLAAATTAVYEAMTAVDTEAVWLLQGWLFQHQPQFWGPAQIRAVLGAVPRGRLLVLDLFAESQPVYTRTASFQGQPFIWCMLHNFGGNHGLFGALEAVNGGPEAARLFPNSTMVGTGMAPEGISQNEVVYSLMAELGWRKDPVPDLAAWVTSFAARRYGVSHPDAGAAWRLLLRSVYNCSGEACRGHNRSPLVRRPSLQMNTSIWYNRSDVFEAWRLLLTSAPSLATSPAFRYDLLDLTRQAVQELVSLYYEEARSAYLSKELASLLRAGGVLAYELLPALDEVLASDSRFLLGSWLEQARAAAVSEAEADFYEQNSRYQLTLWGPEGNILDYANKQLAGLVANYYTPRWRLFLEALVDSVAQGIPFQQHQFDKNVFQLEQAFVLSKQRYPSQPRGDTVDLAKKIFLKYYPRWVAGSW

SEQ ID NO: 56218 - protein, 230 aa, Homo sapiens
VEYAYSDNSLDPGLFVESTRKGSVVSRANSIGSTSASSVPNTDDEDSDYHQEAYKESYKDRRRRAHTQAEQKRRDAIKRGYDDLQTIVPTCQQQDFSIGSQKLSKAIVLQKTIDYIQFLHKEKKKQEEEVSTLRKDVTALKIMKVNYEQIVKAHQDNPHEGEDQVSDQVKFNVFQGIMDSLFQSFNASISVASFQELSACVFSWIEEHCKPQTLREIVIGVLHQLKNQLY

SEQ ID NO: 56219 - protein, 68 aa, Homo sapiens
ISSLFERTCRQYDKLRKREAFLEQFRKEDMFKDNFDEMDTSREIVQQLIDEYHAATRPDYISWGTQEQ

SEQ ID NO: 56220 - protein, 42 aa, Homo sapiens
KEDMFKDNFDEMDRSREVVQELIDEYHAATQPDYISWGTQEQ

SEQ ID NO: 56221 - protein, 176 aa, Homo sapiens
TMASLRVERAGGPRLPRTRVGRPAALRLLLLLGAVLNPHEALAQPLPTTGTPGSEGGTVKNYETAVQFCWNHYKDQMDPIEKDWCDWAMISRPYSTLRDCLEHFAELFDLGFPNPLAERIIFETHQIHFANCSLVQPTFSDPPEDVLLAMIIAPICLIPFLITLVVWRSKDSEAQA

SEQ ID NO: 56222 - protein, 22 aa, Homo sapiens
LASGRRPPGAGSCLTAWNHRLL

SEQ ID NO: 56223 - protein, 47 aa, Homo sapiens
VEFAPAFFKVSDPTKLSKQKKQQRLEPLYNRYEEPNAWRISRAFRRR

SEQ ID NO: 56224 - protein, 243 aa, Homo sapiens
KLKVDSFRERITSEAEDLVANFFPKKLLELDSFLKEPILNIHDLTQIHSDMNLPVPDPILLTNSHDGLDGPTYKKRRLDECEEAFQGTKVFVMPNGMLKSNQQLVDIIEKVKPEIRLLIEKCNTVKMWVQLLIPRIEDGNNFGVSIQEETVAELRTVESEAASYLDQISRYYITRAKLVSKIAKYPHVEDYRRTVTEIDEKEYISLRLIISELRNQYVTLHDMILKNIEKIKRPRSSNAETLY

SEQ ID NO: 56225 - protein, 774 aa, Homo sapiens
LVESAVPLRGKMNQKTILVLLILAVITIFALVCVLLVGRGGDGGEPSQLPHCPSVSPSAQPWTHPGQSQLFADLSREELTAVMRFLTQRLGPGLVDAAQARPSDNCVFSVELQLPPKAAALAHLDRGSPPPAREALAIVFFGRQPQPNVSELVVGPLPHPSYMRDVTVERHGGPLPYHRRPVLFQEYLDIDQMIFNRELPQASGLLHHCCFYKHRGRNLVTMTTAPRGLQSGDRATWFGLYYNISGAGFFLHHVGLELLVNHKALDPARWTIQKVFYQGRYYDSLAQLEAQFEAGLVNVVLIPDNGTGGSWSLKSPVPPGPAPPLQFYPQGPRFSVQGSRVASSLWTFSFGLGAFSGPRIFDVRFQGERLVYEISLQEALAIYGGNSPAAMTTRYVDGGFGMGKYTTPLTRGVDCPYLATYVDWHFLLESQAPKTIRDAFCVFEQNQGLPLRRHHSDLYSHYFGGLAETVLVVRSMSTLLNYDYVWDTVFHPSGAIEIRFYATGYISSAFLFGATGKYGNQVSEHTLGTVHTHSAHFKVDLDVAGLENWVWAEDMVFVPMAVPWSPEHQLQRLQVTRKLLEMEEQAAFLVGSATPRYLYLASNHSNKWGHPRGYRIQMLSFAGEPLPQNSSMARGFSWERYQLAVTQRKEEEPSSSSVFNQNDPWAPTVDFSDFINNETIAGKDLVAWVTAGFLHIPHAEDIPNTVTVGNGVGFFLRPYNFFDEDPSFYSADSIYFRGDQDAGACEVNPLACLPQAAACAPDLPAFSHGGFSHN

SEQ ID NO: 56226 - protein, 5 aa, Homo sapiens
IKDAF

SEQ ID NO: 56227 - protein, 123 aa, Homo sapiens
LAGRYSGRKAVIVKNIDDGTSDRPYSHALVAGIDRYPRKVTAAMGKKKIAKRSKIKSFVKVYNYNHLMPTRYSVDIPLDKTVVNKDVFRDPALKRKARREAKVKFEERYKTGKNKWFFQKLRF

SEQ ID NO: 56228 - protein, 284 aa, Homo sapiens
LDAALHALQEEQARLKMRLWDLQQLRKELGDSPKDKVPFSVPKIPLVFRGHTQQDPEVPKSLVSNLRIHCPLLAGSALITFDDPKVAEQVLQQKEHTINMEECRLRVQVQPLELPMVTTIQVMMSSQLSGRRVLVTGFPASLRLSEEELLDKLEIFFGKTRNGGGDVDVRELLPGSVMLGFARDGVAQRLCQIGQFTVPLGGQQVPLRVSPYVNGEIQKAEIRSQPVPRSVLVLNIPDILDGPELHDVLEIHFQKPTRGGGEVEALTVVPQGQQGLAVFTSESG

SEQ ID NO: 56229 - protein, 474 aa, Homo sapiens
LCSMYAPVCTVLEQAIPPCRSICERARQGCEALMNKFGFQWPERLRCEHFPRHGAEQICVGQNHSEDGAPALLTTAPPPGLQPGAGGTPGGPGGGGAPPRYATLEHPFHCPRVLKVPSYLSYKFLGERDCAAPCEPARPDGSMFFSQEETRFARLWILTWSVLCCASTFFTVTTYLVDMQRFRYPERPIIFLSGCYTMVSVAYIAGFVLQERVVCNERFSEDGYRTVVQGTKKEGCTILFMMLYFFSMASSIWWVILSLTWFLAAGMKWGHEAIEANSQYFHLAAWAVPAVKTITILAMGQIDGDLLSGVCFVGLNSLDPLRGFVLAPLFVYLFIGTSFLLAGFVSLFRIRTIMKHDGTKTEKLERLMVRIGVFSVLYTVPATIVIACYFYEQAFREHWERSWVSQHCKSLAIPCPAHYTPRMSPDFTVYMIKYLMTLIVGITSGFWIWSGKTLHSWRKFYTRLTNSRHGETTV

SEQ ID NO: 56230 - protein, 721 aa, Homo sapiens
VNEKDFQSGQHVIVRTSPNHRYTFTLKTHPSVVPGSIAFSLPQRKWAGLSIGQEIEVSLYTFDKAKQCIGTMTIEIDFLQKKSIDSNPYDTDKMAAEFIQQFNNQAFSVGQQLVFSFNEKLFGLLVKDIEAMDPSILKGEPATGKRQKIEVGLVVGNSQVAFEKAENSSLNLIGKAKTKENRQSIINPDWNFEKMGIGGLDKEFSDIFRRAFASRVFPPEIVEQMGCKHVKGILLYGPPGCGKTLLARQIGKMLNAREPKVVNGPEILNKYVGESEANIRKLFADAEEEQRRLGANSGLHIIIFDEIDAICKQRGSMAGSTGVHDTVVNQLLSKIDGVEQLNNILVIGMTNRPDLIDEALLRPGRLEVKMEIGLPDEKGRLQILHIHTARMRGHQLLSADVDIKELAVETKNFSGAELEGLVRAAQSTAMNRHIKASTKVEVDMEKAESLQVTRGDFLASLENDIKPAFGTNQEDYASYIMNGIIKWGDPVTRVLDDGELLVQQTKNSDRTPLVSVLLEGPPHSGKTALAAKIAEESNFPFIKICSPDKMIGFSETAKCQAMKKIFDDAYKSQLSCVVVDDIERLLDYVPIGPRFSNLVLQALLVLLKKAPPQGRKLLIIGTTSRKDVLQEMEMLNAFSTTIHVPNIATGEQLLEALELLGNFKDKERTTIAQQVKGKKVWIGIKKLLMLIEMSLQMDPEYRVRKFLALLREEGASPLDFD

SEQ ID NO: 56231 - protein, 376 aa, Homo sapiens
LEIRGSTLLRCLDSGFRPGASRGLVGSWAAMESTLGAGIVIAEALQNQLAWLENVWLWITFLGDPKILFLFYFPAAYYASRRVGIAVLWISLITEWLNLIFKWFLFGDRPFWWVHESGYYSQAPAQVHQFPSSCETGPGSPSGHCMITGAALWPIMTALSSQVATRARSRWVRVMPSLAYCTFLLAVGLSRIFILAHFPHQVLAGLITGAVLGWLMTPRVPMERELSFYGLTALALMLGTSLIYWTLFTLGLDLSWSISLAFKWCERPEWIHVDSRPFASLSRDSGAALGLGIALHSPCYAQVRRAQLGNGQKIACLVLAMGLLGPLDWLGHPPQISLFYIFNFLKYTLWPCLVLALVPWAVHMFSAQEAPPIHSS

SEQ ID NO: 56232 - protein, 111 aa, Homo sapiens [sequence omitted]

SEQ ID NO: 56233 - protein, 596 aa, Homo sapiens
RQTMWTLVSWVALTAGLVAGTRCPDGQFCPVACCLDPGGASYSCCRPLLDKWPTTLSRHLGGPCQVDAHCSAGHSCIFTVSGTSSCCPFPEAVACGDGHHCCPRGFHCSADGRSCFQRSGNNSVGAIQCPDSQFECPDFSTCCVMVDGSWGCCPMPQASCCEDRVHCCPHGAFCDLVHTRCITPTGTHPLAKKLPAQRTNRAVALSSSVMCPDARSRCPDGSTCCELPSGKYGCCPMPNATCCSDHLHCCPQDTVCDLIQSKCLSKENATTDLLTKLPAHTVGDVKCDMEVSCPDGYTCCRLQSGAWGCCPFTQAVCCEDHIHCCPAGFTCDTQKGTCEQGPHQVPWMEKAPAHLSLPDPQALKRDVPCDNVSSCPSSDTCCQLTSGEWGCCPIPEAVCCSDHQHCCPQGYTCVAEGQCQRGSEIVAGLEKMPARRASLSHPRDIGCDQHTSCPVGQTCCPSLGGSWACCQLPHAVCCEDRQHCCPAGYTCNVKARSCEKEVVSAQPATFLARSPHVGVKDVECGEGHFCHDNQTCCRDNRQGWACCPYRQGVCCADRRHCCPAGFRCAARGTKCLRREAPRWDAPLRDPALRQLL

SEQ ID NO: 56234 - protein, 34 aa, Homo sapiens
LEPFVYLASKMTQPQSKSAFPLSRKNKGSGSLDG

SEQ ID NO: 56235 - protein, 521 aa, Homo sapiens
VLQSWCEKLAEIIWQNRQQIRRAEHLCQQLPIPGPVEEMLAEVNATITDIISALVTSTFIIEKQPPQVLKTQTKFAATVRLLVGGKLNVHMNPPQVKATIISEQQAKSLLKNENTRNECSGEILNNCCVMEYHQATGTLSAHFRNMSLKRIKRADRRGAESVTEEKFTVLFESQFSVGSNELVFQVKTLSLPVVVIVHGSQDHNATATVLWDNAFAEPGRVPFAVPDKVLWPQLCEALNMKFKAEVQSNRGLTKENLVFLAQKLFNNSSSHLEDYSGLSVSWSQFNRENLPGWNYTFWQWFDGVMEVLKKHHKPHWNDGAILGFVNKQQAHDLLINKPDGTFLLRFSDSEIGGITIAWKFDSPERNLWNLKPFTTRDFSIRSLADRLGDLSYLIYVFPDRPKDEVFSKYYTPVLAKAVDGYVKPQIKQVVPEFVNASADAGGSSATYMDQAPSPAVCPQAPYNMYPQNPDHVLDQDGEFDLDETMDVARHVEELLRRPMDSLDSRLSPPAGLFTSARGSLS

SEQ ID NO: 56236 - protein, 76 aa, Homo sapiens
ISRLYAKYFQGDLQLFSMEGFGTDAVIYLKALSTDSVERLPVYNKSAWRHYQTIQEAGDWCVPSTEPKNTSTYRVS

SEQ ID NO: 56237 - protein, 68 aa, Homo sapiens
MGEEICACIRLKDGEETTVEEIKAFCKGKISHFKIPKYIVFVTNYPLTISGKIQKFKLREQMERHLNL

SEQ ID NO: 56238 - protein, 13 aa, Homo sapiens
ITDPCELRKLLHP

SEQ ID NO: 56239 - protein, 74 aa, Homo sapiens [sequence omitted]

SEQ ID NO: 56240 - protein, 26 aa, Homo sapiens
RSCRVWFSCQTASCTYSCKASSRCLR

SEQ ID NO: 56241 - protein, 34 aa, Homo sapiens
VGNYISAASPQPGSGFGHGIAGPLIATAFTNGYH

SEQ ID NO: 56242 - protein, 33 aa, Homo sapiens
MCSPFLVRLGTGLGPCLQGSGCPGMARAHWTLP

SEQ ID NO: 56243 - protein, 34 aa, Homo sapiens
LVLDKGVVAEFDSPANLIAARGIFYGMARDAGLA

SEQ ID NO: 56244 - protein, 431 aa, Homo sapiens
ISAAQLLDELMGRDRNLAPDEKRSNVRWDHESVCKYYLCGFCPAELFTNTRSDLGPCEKIHDENLRKQYEKSSRFMKVGYERDFLRYLQSLLAEVERRIRRGHARLALSQNQQSSGAAGPTGKNEEKIQVLTDKIDVLLQQIEELGSEGKVEEAQGMMKLVEQLKEERELLRSTTSTIESFAAQEKQMEVCEVCGAFLIVGDAQSRVDDHLMGKQHMGYAKIKATVEELKEKLRKRTEEPDRDERLKKEKQEREEREKEREREREERERKRRREEEEREKERARDRERRKRSRSRSRHSSRTSDRRCSRSRDHKRSRSRERRRSRSRDRRRSRSHDRSERKHRSRSRDRRRSKSRDRKSYKHRSKSRDREQDRKSKEKEKRGSDDKKSSVKSGSREKQSEDTNTESKESDTKNEVNGTSEDIKSEGDTQSN

SEQ ID NO: 56245 - protein, 7 aa, Homo sapiens
KTYKSLF

SEQ ID NO: 56246 - protein, 859 aa, Homo sapiens
INYSLCLKPDLLDFTFEGKLEAAAQVRQATNQIVMNCADIDIITASYAPEGDEEIHATGFNYQNEDEKVTLSFPSTLQTGTGTLKIDFVGELNDKMKGFYRSKYTTPSGEVRYAAVTQFEATDARRAFPCWDEPAIKATFDISLVVPKDRVALSNMNVIDRKPYPDDENLVEVKFARTPVMSTYLVAFVVGEYDFVETRSKDGVCVRVYTPVGKAEQGKFALEVAAKTLPFYKDYFNVPYPLPKIDLIAIADFAAGAMENWGLVTYRETALLIDPKNSCSSSRQWVALVVGHELAHQWFGNLVTMEWWTHLWLNEGFASWIEYLCVDHCFPEYDIWTQFVSADYTRAQELDALDNSHPIEVSVGHPSEVDEIFDAISYSKGASVIRMLHDYIGDKDFKKGMNMYLTKFQQKNAATEDLWESLENASGKPIAAVMNTWTKQMGFPLIYVEAEQVEDDRLLRLSQKKFCAGGSYVGEDCPQWMVPITISTSEDPNQAKLKILMDKPEMNVVLKNVKPDQWVKLNLGTVGFYRTQYSSAMLESLLPGIRDLSLPPVDRLGLQNDLFSLARAGIISTVEVLKVMEAFVNEPNYTVWSDLSCNLGILSTLLSHTDFYEEIQEFVKDVFSPIGERLGWDPKPGEGHLDALLRGLVLGKLGKAGHKATLEEARRRFKDHVEGKQILSADLRSPVYLTVLKHGDGTTLDIMLKLHKQADMQEEKNRIERVLGATLLPDLIQKVLTFALSEEVRPQDTVSVIGGVAGGSKHGRKAAWKFIKDNWEELYNRYQGGFLISRLIKLSVEGFAVDKMAGEVKAFFESHPAPSAERTIQQCCENILLNAAWLKRDAESIHQYLLQRKASPPTV

SEQ ID NO: 56247 - protein, 68 aa, Homo sapiens
MPQVQPGPPPCPVFYPEKQEITLPPDGLWVLRFPYAYVTERGPCFPPKENVQLMSYKVLRGVLKAVTQ

SEQ ID NO: 56248 - protein, 479 aa, Homo sapiens
KESMIGVSFEEAKSIITGAKLRLESAWEIAFIRQKSDNIQPENLSCTSLIEASGEYGPQASTLSLFSSPPEILIPKTSSTPKTNNDILSSCEIKTGYNKTVQIPITSENSTVGLSNTDVASAWTENYGLQEKISLNPSVRFKAEKLEMALNYLGIQPTKEQHQALRQQVQADSKGTVSFGDFVQVARNLFCLQLDEVNVGAHEISNILDSQLLPCDSSEADEMERLKCERDDALKEVNTLKEKLLESDKQRKQLTEELQNVKQEAKAVVEETRALRSRIHLAEAAQRQAHGMEMDYEEVIRLLEAKITELKAQLADYSDQNKESVQDLKKRIMVLDCQLRKSEMARKTFEASTEKLLHFVEAIQEVFSDNSTPLSNLSERRAVLASQTSLTPLGRNGRSIPATLALESKELVKSVRALLDMDCLPYGWEEAYTADGIKYFINHVTQTTSWIHPVMSVLNLSRSEENEEDCSRELPNQKS

SEQ ID NO: 56249 - protein, 42 aa, Homo sapiens
MYYFDNPGGQIPSWLINWAAKNGVPNFLKDMARACQNYLKKT

SEQ ID NO: 56250 - protein, 15 aa, Homo sapiens
IPIQYPIISECKCSC

SEQ ID NO: 56251 - protein, 36 aa, Homo sapiens
MLPCGTCHGAGTAALSRPAVVAAAAAAAGPERRSCH

SEQ ID NO: 56252 - protein, 437 aa, Homo sapiens
LLPLLLGLNAGAVIDWPTEEGKEVWDYVTVRKDAYMFWWLYYATNSCKNFSELPLVMWLQGGPGGSSTGFGNFEEIGPLDSDLKPRKTTWLQAASLLFVDNPVGTGFSYVNGSGAYAKDLAMVASDMMVLLKTFFSCHKEFQTVPFYIFSESYGGKMAAGIGLELYKAIQRGTIKCNFAGVALGDSWISPVDSVLSWGPYLYSMSLLEDKGLAEVSKVAEQVLNAVNKGLYREATELWGKAEMIIEQNTDGVNFYNILTKSTPTSTMESSLEFTQSHLVCLCQRHVRHLQRDALSQLMNGPIRKKLKIIPEDQSWGGQATNVFVNMEEDFMKPVISIVDELLEAGINVTVYNGQLDLIVDTMGQEAWVRKLKWPELPKFSQLKWKALYSDPKSLETSAFVKSYKNLAFYWILKAGHMVPSDQGDMALKMMRLVTQQE

SEQ ID NO: 56253 - protein, 243 aa, Homo sapiens
IKRFEQKGFRLVGLKFMQASEDLLKEHYVDLKDRPFFAGLVKYMHSGPVVAMVWEGLNVVKTGRVMLGETNPADSKPGTIRGDFCIQVGRTMANLERTFIAIKPDGVQRGLVGEIIKRFEQKGFRLVAMKFLRASEEHLKQHYIDLKDRPFFPGLVKYMNSGPVVAMVWEGLNVVKTGRVMLGETNPADSKPGTIRGDFCIQVGRNIIHGSDSVKSAEKEISLWFKPEELVDYKSCAHDWVYE

SEQ ID NO: 56254 - protein, 269 aa, Homo sapiens
IQSIYLERFPIFKACFSANGEEVLATSTHSKVLYVYDMLAGKLIPVHQVRGLKEKIVRSFEVSPDGSFLLINGIAGYLHLLAMKTKELIGSMKINGRVAASTFSSDSKKVYASSGDGEVYVWDVNSRKCLNRFVDEGSLYGLSIATSRNGQYVACGSNCGVVNIYNQDSCLQETNPKPIKAIMNLVTGVTSLTFNPTTEILAIASEKMKEAVRLVHLPSCTVFSNFPVIKNKNISHVHTMDFSPRSGYFALGNEKGKALMYRLHHYSDF

SEQ ID NO: 56255 - protein, 57 aa, Homo sapiens
KHRRNGLSRSSGAQPASLPTTSQRKNSVKLTMRRRLRGQKKIGNPLLHQHRKTVCVC

SEQ ID NO: 56256 - protein, 679 aa, Homo sapiens
RTVILYKVSDQKPLGSWSVKQGQIITCPAVCNFQTGEYVVVHDNKVLRIWNNEDVNLDKVFKATLSAEVYRILSVQGTEPLVLFKEGAVRGLEALLADPQQKIETVISDEEVIKWTKFFVVFRHPVLIFITEKHGNYFAYVQMFNSRILTKYTLLLGQDENSVIKSFTASVDRKFISLMSLSSDGCIYETLIPIRPADPEKNQSLVKSLLLKAVVSGNARNGVALTALDQDHVAVLGSPLAASKECLSVWNIKFQTLQTSKELPQGTSGQLWYYGEHLFMLHGKSLTVIPYKCEVSSLAGALGKLKHSQDPGTHVVSHFVNWETPQGCGLGFQNSEQSRRILRRRKIEVSLQPEVPPSKQLLSTIMKDSEKHIEVEVRKFLALKQTPDFHTVIGDTVTGLLERCKAEPSFYPRNCLMQLIQTHVLSYSLCPDLMEIALKKKDVQLLQLCLQQFPDIPESVTCACLKIFLSIGDDSLQETDVNMESVFDYSINSVHDEKMEEQTEILQNGFNPEEDKCNNCDQELNKKPQDETKESTSCPVVQKRAALLNAILHSAYSETFLLPHLKDIPAQHITLFLKYLYFLYLKCSENATMTLPGIHPPTLNQIMDWICLLLDANFTVVVMMPEAKRLLINLYKLVKSQISVYSELNKIEVSFRELQKLNQEKNNRGLYSIEVLELF

SEQ ID NO: 56257 - protein, 442 aa, Homo sapiens
LKPSDKDRRLSVEIWDWDRTTRNDFMGSLSFGVSELMKMPASGWYKLLNQEEGEYYNVPIPEGDEEGNMELRQKFEKAKLGPAGNKVISPSEDRKQPSNNLDRVKLTDFNFLMVLGKGSFGKVMLADRKGTEELYAIKILKKDVVIQDDDVECTMVEKRVLALLDKPPFLTQLHSCFQTVDRLYFVMEYVNGGDLMYHIQQVGKFKEPQAVFYAAEISIGLFFLHKRGIIYRDLKLDNVMLDSEGHIKIADFGMCKEHMMDGVTTRTFCGTPDYIAPEIIAYQPYGKSVDWWAYGVLLYEMLAGQPPFDGEDEDELFQSIMEHNVSYPKSLSKEAVSVCKGLMTKHPAKRLGCGPEGERDVREHAFFRRIDWEKLENREIQPPFKPKVCGKGAENFDKFFTRGQPVLTPPDQLVIANIDQSDFEGFSYVNPQFVHPILQSAV

SEQ ID NO: 56258 - protein, 30 aa, Homo sapiens
MAGPRVAGDGTPVLWLRSAGSFVSTDTSGL

SEQ ID NO: 56259 - protein, 396 aa, Homo sapiens
LEEGKAGSGLRQYYLSKIEELQLIVNDKSQNLRRLQAQRNELNAKVRLLREELQLLQEQGSYVGEVVRAMDKKKVLVKVHPEGKFVVDVDKNIDINDVTPNCRVALRNDSYTLHKILPNKVDPLVSLMMVEKVPDSTYEMIGGLDKQIKEIKEVIELPVKHPELFEALGIAQPKGVLLYGPPGTGKTLLARAVAHHTDCTFIRVSGSELVQKFIGEGARMVRELFVMAREHAPSIIFMDEIDSIGSSRLEGGSGGDSEVQRTMLELLNQLDGFEATKNIKVIMATNRIDILDSALLRPGRIDRKIEFPPPNEEARLDILKIHSRKMNLTRGINLRKIAELMPGASGAEVKGVCTEAGMYALRERRVHVTQEDFEMAVAKVMQKDSEKNMSIKKLWK

SEQ ID NO: 56260 - protein, 531 aa, Homo sapiens
ITMSTNENANTPAARLHRFKNKGKDSTEMRRRRIEVNVELRKAKKDDQMLKRRNVSSFPDDATSPLQENRNNQGTVNWSVDDIVKGINSSNVENQLQATQAARKLLSREKQPPIDNIIRAGLIPKFVSFLGRTDCSPIQFESAWALTNIASGTSEQTKAVVDGGAIPAFISLLASPHAHISEQAVWALGNIAGDGSVFRDLVIKYGAVDPLLALLAVPDMSSLACGYLRNLTWTLSNLCRNKNPAPPIDAVEQILPTLVRLLHHDDPEVLADTCWAISYLTDGPNERIGMVVKTGVVPQLVKLLGASELPIVTPALRAIGNIVTGTDEQTQVVIDAGALAVFPSLLTNPKTNIQKEATWTMSNITAGRQDQIQQVVNHGLVPFLVSVLSKADFKTQKEAVWAVTNYTSGGTVEQIVYLVHCGIIEPLMNLLTAKDTKIILVILDAISNIFQAAEKLGETEKLSIMIEECGGLDKIEALQNHENESVYKASLSLIEKYFSVEEEEDQNVVPETTSEGYTFQVQDGAPGTFNF

SEQ ID NO: 56261 - protein, 35 aa, Homo sapiens
RSPFRHTFWVGFVLLWAFSCFIFVTANIILSETKL

SEQ ID NO: 56262 - protein, 71 aa, Homo sapiens
RNVFKFICDASSLHQVRKKLDSLGLCSVSCALEFIPNSKVQLAEPDLEQAAHLIQALSNHEDVIHVYDNIE

SEQ ID NO: 56263 - protein, 18 aa, Homo sapiens
LFTGTLREPTSSETLLGM

SEQ ID NO: 56264 - protein, 57 aa, Homo sapiens
IVERYKALVRWIDDESSDTPGATPEHSHEDNGNLPKPVEAFKEWKEWIIKCLAVLQK

SEQ ID NO: 56265 - protein, 26 aa, Homo sapiens
MQHPFFTLHESKGTDVASFVKLILGD

SEQ ID NO: 56266 - protein, 44 aa, Homo sapiens
VHGESDTEQLQDDDIETTKVEMLRLSLARNLARAIIREGSLEGS

SEQ ID NO: 56267 - protein, 224 aa, Homo sapiens
VRRAVLQLPGLTQVRWSRYSPEFKDPLIDKEYYRKPVEELTEEEKYVRELKKTQLIKAAPAGKTSSVFEDPVISKFTNMMMIGGNKVLARSLMIQTLEAVKRKQFEKYHAASAEEQATIERNPYTIFHQALKNCEPMIGLVPILKGGRFYQVPVPLPDRRRRFLAMKWMITECRDKKHQRTLMPEKLSHKLLEAFHNQGPVIKRKHDLHKMAEANRALAHYRWW

SEQ ID NO: 56268 - protein, 40 aa, Homo sapiens
IPPSSPTTFHHLHRPQPTWPPGAQQGGAQQKAMAAMDGQR

SEQ ID NO: 56269 - protein, 48 aa, Homo sapiens
VFAVDGELMVSEAVQGQVHPNYFWMVSGCVEPPPSWKPQQMPPPEEPL

SEQ ID NO: 56270 - protein, 207 aa, Homo sapiens
VASFSERVRNMSPDEIKIPPEPPGRCSNHLQDKIQKLYERKIKEGMDMNYIIQRKKEFRNPSIYEKLIQFCAIDELGTNYPKDMFDPHGWSEDSYYEALAKAQKIEMDKLEKAKKERTKIEFVTGTKKGTTTNATSTTTTTASTAVADAQKRKSKWDSAIPVTTIAQPTILTTTATLPAVVTVTTSASGSKTTVISAVGTIVKKAKQ

SEQ ID NO: 56271 - protein, 570 aa, Homo sapiens
LDGIISDFEALKRSFEVEEVETPNSTPPRRVQTPLLRATVASSTQKFQDLGVKNSEPSARHVDSLSQRSPKASLRRVELSGPKAAEPVSRRTELSIDISSKQVENAGAIGPSRFGLKRAEVLGHKTPEPAPRRTEITIVKPQESAHRRMEPPASKVPEVPTAPATDAAPKRVEIQMPKPAEAPTAPSPAQTLENSEPAPVSQLQSRLEPKPQPPVAEATPRSQEATEAAPSCVGDMADTPRDAGLKQAPASRNEKAPVDFGYVGIDSILEQMRRKAMKQGFEFNIMVVGQSGLGKSTLINTLFKSKISRKSVQPTSEERIPKTIEIKSITHDIEEKGVRMKLTVIDTPGFGDHINNENCWQPIMKFINDQYEKYLQEEVNINRKKRIPDTRVHCCLYFIPATGHSLRPLDIEFMKRLSKVVNIVPVIAKADTLTLEERVHFKQRITADLLSNGIDVYPQKEFDEDSEDRLVNEKFREMIPFAVVGSDHEYQVNGKRILGRKTKWGTIEVENTTHCEFAYLRDLLIRTHMQNIKDITSSIHFEAYRVKRLNEGSSAMANGMEEKEPEAPEM

SEQ ID NO: 56272 - protein, 41 aa, Homo sapiens [sequence omitted]

SEQ ID NO: 56273 - protein, 89 aa, Homo sapiens
RWPGFYILQWKFHSMPACAASSLPRVDDVLASLQVSSHKCKVMYYTEVIGSEDFRGSMTSLESSHSGFSQLSAATTSSSQSHSSSMISR

SEQ ID NO: 56274 - protein, 24 aa, Homo sapiens
LFPSPSLCIAPDLAGRRLGRREML

SEQ ID NO: 56275 - protein, 272 aa, Homo sapiens
LAYCLLLAFASGLVLSRVPHVQGEQQEWEGTEELPSPPDHAERAEEQHEKYRPSQDQGLPASRCLRCCDPGTSMYPATAVPQINITILKGEKGDRGDRGLQGKYGKTGSAGARGHTGPKGQKGSMGAPGERCKSHYAAFSVGRKKPMHSNHYYQTVIFDTEFVNLYDHFNMFTGKFYCYVPGLYFFSLNVHTWNQKETYLHIMKNEEEVVILFAQVGDRSIMQSQSLMLELREQDQVWVRLYKGERENAIFSEELDTYITFSGYLVKHATEP

SEQ ID NO: 56276 - protein, 940 aa, Homo sapiens
LAVCALVSLATAALLGHILLHDFLLVPRELSGSSPVLEETHPAHQQGASRPGPRDAQAHPGRPRAVPTQCDVPPNSRFDCAPDKAITQEQCEARGCCYIPAKQGLQGAQMGQPWCFFPPSYPSYKLENLSSSEMGYTATLTRTTPTFFPKDILTLRLDVMMETENRLHFTIKDPANRRYEVPLETPHVHSRAPSPLYSVEFSEEPFGVIVRRQLDGRVLLNTTVAPLFFADQFLQLSTSLPSQYITGLAEHLSPLMLSTSWTRITLWNRDLAPTPGANLYGSHPFYLALEDGGSAHGVFLLNSNAMDVVLQPSPALSWRSTGGILDVYIFLGPEPKSVVQQYLDVVGYPFMPPYWGLGFHLCRWGYSSTAITRQVVENMTRAHFPLDVQWNDLDYMDSRRDFTFNKDGFRDFPAMVQELHQGGRRYMMIVDPAISSSGPAGSYRPYDEGLRRGVFITNETGQPLIGKVWPGSTAFPDFTNPTALAWWEDMVAEFHDQVPFDGMWIDMNEPSNFIRGSEDGCPNNELENPPYVPGVVGGTLQAATICASSHQFLSTHYNLHNLYGLTEAIASHRALVKARGTRPFVISRSTFAGHGRYAGHWTGDVWSSWEQLASSVPEILQFNLLGVPLVGADVCGFLGNTSEELCVRWTQLGAFYPFMRNHNSLLSLPQEPYSFSEPAQQAMRKALTLRYALLPHLYTLFHQAHVAGETVARPLFLEFPKDSSTWTVDHQLLWGEALLITPVLQAGKAEVTGYFPLGTWYDLQTVPVEALGSLPPPPAAPREPAIHSEGQWVTLPAPLDTINVHLRAGYIIPLQGPGLTTTESRQQPMALAVALTKGGEARGELFWDDGESLEVLERGAYTQVIFLARNNTIVNELVRVTSEGAGLQLQKVTVLGVATAPQQVLSNGVPVSNFTYSPDTKVLDICVSLLMGEQFLVSWC

SEQ ID NO: 56277 - protein, 74 aa, Homo sapiens
MGYQPYNMQNLMTTLPSQDASLPPQQPYIAGQQPMYQQMAPSGGPPQQQPPVAQQPQAQGPPAQGSEAQLISFD

SEQ ID NO: 56278 - protein, 190 aa, Homo sapiens
LWGPCLGLRAAAFRLARRQVPCVCAVRHMRSSGHQRCEALAGAPLDNAPKEYPPKIQQLVQDIASLTLLEISDLNELLKKTLKIQDVGLVPMGGVMSGAVPAAAAQEAVEEDIPIAKERTHFTVRLTEAKPVDKVKLIKEIKNYIQGINLVQAKKLVESLPQEIKANVAKAEAEKIKAALEAVGGTVVLE

SEQ ID NO: 56279 - protein, 82 aa, Homo sapiens
VKIKCWNGVATWLWVANDENCGICRMAFNGCCPDCKVPGDDCPLVWGQCSHCFHMHCILKWLHAQQVQQHCPMCRQEWKFKE

SEQ ID NO: 56280 - protein, 481 aa, Homo sapiens
VFNLQGAVEPMQIDVDPQEDPQNAPDVNYVVENPSLDLEQYAASYSGLMRIERLQFIADHCPTLRVEALKMALSFVQRTFNVDMYEEIHRKLSEATRELQNAPDAIPESGVEPPALDTAWVEATRKKALLKLEKLDTDLKNYKGNSIKESIRRGHDDLGDHYLDCGDLSNALKCYSRARDYCTSAKHVINMCLNVIKVSVYLQNWSHVLSYVSKAESTPEIAEQRGERDSQTQAILTKLKCAAGLAELAARKYKQAAKCLLLASFDHCDFPELLSPSNVAIYGGLCALATFDRQELQRNVISSSSFKLFLELEPQVRDIIFKFYESKYASCLKMLDEMKDNLLLDMYLAPHVRTLYTQIRNRALIQYFSPYVSADMHRMAAAFNTTVAALEDELTQLILEGLISARVDSHSKILYARDVDQRSTTFEKSLLMGKEFQRRAKAMMLRAAVLRNQIHVKSPPREGSQGELTPANSQSRMSTNM

SEQ ID NO: 56281 - protein, 467 aa, Homo sapiens
LAMGGAVVDEGPTGVKAPDGGWGWAVLFGCFVITGFSYAFPKAVSVFFKELIQEFGIGYSDTAWISSILLAMLYGTGPLCSVCVNRFGCRPVMLVGGLFASLGMVAASFCRSIIQVYLTTGVITGLGLALNFQPSLIMLNRYFSKRRPMANGLAAAGSPVFLCALSPLGQLLQDRYGWRGGFLILGGLLLNCCVCAALMRPLVVTAQPGSGPPRPSRRLLDLSVFRDRGFVLYAVAASVMVLGLFVPPVFVVSYAKDLGVPDTKAAFLLTILGFIDIFARPAAGFVAGLGKVRPYSVYLFSFSMFFNGLADLAGSTAGDYGGLVVFCIFFGISYGMVGALQFEVLMAIVGTHKFSSAIGLVLLMEAVAVLVGPPSGGKLLDATHVYMYVFILAGAEVLTSSLILLLGNFFCIRKKPKEPQPEVAAAEEEKLHKPPADSGVDLREVEHFLKAEPEKNGEVVHTPETSV

SEQ ID NO: 56282 - protein, 7 aa, Homo sapiens
RDVAQDP

SEQ ID NO: 56283 - protein, 78 aa, Homo sapiens
IFDPASFYGHSEYELAIAGMFGGFSSSFYSAYHGKIPKAPGFEKRLQLYQLFHYLNHWNHFGSGYRGSSLNIMRNLVK

SEQ ID NO: 56284 - protein, 28 aa, Homo sapiens
LFNYLNHWNHFGREYRSPSLGTMRRLLK

SEQ ID NO: 56285 - protein, 39 aa, Homo sapiens
VLSDTAWDAELAVVREQRNRLCDLLGVPRPQLVPQPGAC

SEQ ID NO: 56286 - protein, 148 aa, Homo sapiens
RTTGFQYELVRRHRASDLHELSAPCRPCSDTEVLLAVCTSDFAVRGSIQQVTHEPERQDSAIHLRVSRLYRQKSRVFEPVPEGDGHWQGRVRTLLECGVRPGHGDFLFTGHMHFGEARLGCAPRFKDFQRMYRDAQERGLNPCEVGTD

SEQ ID NO: 56287 - protein, 23 aa, Homo sapiens
RNPFAHVQLKPTVTNDRSAPLLS

SEQ ID NO: 56288 - protein, 5 aa, Homo sapiens
MGAEP

SEQ ID NO: 56289 - protein, 34 aa, Homo sapiens
RNYSNFSYSETKKKDYSSCEGQFIPYCYWKYRKW

SEQ ID NO: 56290 - protein, 5 aa, Homo sapiens
MPNPL

SEQ ID NO: 56291 - protein, 19 aa, Homo sapiens
INVILFCSSGPSWREVTYY

SEQ ID NO: 56292 - protein, 71 aa, Homo sapiens
LGNNDDLILSCCLHYCKDKAKDFMPASKEEPIRLLREVVLLTDDRNLRVKALTRNVPVRDIPAFLTWAQVG

SEQ ID NO: 56293 - protein, 414 aa, Homo sapiens
KKVPKGTSSYQAEWILDGGSQSGGEGDEYEYDDMEHEDFMEEESQDESSEEEEEYETMTIGESVHDDLYDKKVDEEAEAKMLEKYKQERLEEMFPDEVDTPRDVAARIRFQKYRGLKSFRTSPWDPKENLPQDYARIFQFQNFTNTRKSIFKEVEEKEVEGAEVGWYVTLHVSEVPVSVVECFRQGTPLIAFSLLPHEQKMSVLNMVVRRDPGNTEPVKAKEELIFHCGFRRFRASPLFSQHTAADKHKLQRFLTADMALVATVYAPITFPPASVLLFKQKSNGMHSLIATGHLMSVDPDRMVIKRVVLSGHPFKIFTKMAVVRYMFFNREDVLWFKPVELRTKWGRRGHIKEPLGTHGHMKCSFDGKLKSQDTVLMNLYKRVFPKWTYDPYVPEPVPWLKSEISSTVPQGGME

SEQ ID NO: 56294 - protein, 292 aa, Homo sapiens
LHFVFKVGNRFQTARFYRDVLGMKVLRHEEFEEGCKAACNGPYDGKWSKTMVGFGPEDDHFVAELTYNYGVGDYKLGNDFMGITLASSQAVSNARKLEWPLTEVAEGVFETEAPGGYKFYLQNRSLPQSDPVLKVTLAVSDLQKSLNYWCNLLGMKIYEKDEEKQRALLGYADNQCKLELQGVKGGVDHAAAFGRIAFSCPQKELPDLEDLMKRENQKILTPLVSLDTPGKATVQVVILADPDGHEICFVGDEAFRELSKMDPEGSKLLDDAMAADKSDEWFAKHNKPKASG

SEQ ID NO: 56295 - protein, 58 aa, Homo sapiens
MTDSLRDYTNLPEAAPLLTILDMSARAKYVMDVEEITPAIVEAFVNDFLAEKLKPEPI

SEQ ID NO: 56296 - protein, 22 aa, Homo sapiens
LQHPPISFAELKRNTLYFSTDV

SEQ ID NO: 56297 - protein, 121 aa, Homo sapiens
IPGQPVTAVVQRVEIHKLRQGENLILGFSIGGGIDQDPSQNPFSEDKTDKGIYVTRVSEGGPAEIAGLQIGDKIMQVNGWDMTMVTHDQARKRLTKRSEEVVRLLVTRQSLQKAVQQSMLS

SEQ ID NO: 56298 - protein, 6 aa, Homo sapiens
LVDFWC

SEQ ID NO: 56299 - protein, 12 aa, Homo sapiens
MPSFPVSTLKLA

SEQ ID NO: 56300 - protein, 4 aa, Homo sapiens
MRLL

SEQ ID NO: 56301 - protein, 67 aa, Homo sapiens
KTKEKNTKKVDHRAPGAEEDDSELQRAWGALIKEKEQSRQKKSRLDNLPSLQIEVSRESSSGSEAES

SEQ ID NO: 56302 - protein, 962 aa, Homo sapiens
LLYKMIKSKTEYPLHKAIKVEREDVVFLYLIEMDSQLPGKLNEADHNGDLALDLALSRRLESIATTLVSHKADVDMVDKSGWSLLHKGIQRGDLFAATFLIKNGAFVNAATLGAQETPLHLVALYSSKKHSADVMSEMAQIAEALLQAGANPNMQDSKGRTPLHVSIMAGNEYVFSQLLQCKQLDLELKDHEGSTALWLAVQHITVSSDQSVNPFEDVPVVNGTSFDENSFAARLIQRGSHTDAPDTATGNCLLQRAAGAGNEAAALFLATNGAHVNHRNKWGETPLHTACRHGLANLTAELLQQGANPNLQTEEALPLPKEAASLTSLADSVHLQTPLHMAIAYNHPDVVSVILEQKANALHATNNLQIIPDFSLKDSRDQTVLGLALWTGMHTIAAQLLGSGAAINDTMSDGQTLLHMAIQRQDSKSALFLLEHQADINVSRTQDGETALQLAIRNQLPLVVDAICTRGADMSVPDEKGNPPLWLALANNLEDIASTLVRHGCDATCWGPGPGGCLQTLLHRAIDENNEPTACFLIRSGCDVNSPRQPGANGEGEEEARDGQTPLHLAASWGLEETVQCLLEFGANVNAQDAEGRTPIHVAISSQHGVIIQLLVSHPDIHLNVRDRQGLTPFACAMTFKNNKSAEAILKRESGAAEQVDNKGRNFLHVAVQNSDIESVLFLISVHANVNSRVQDASKLTPLHLAVQAGSEIIVRNLLLAGAKVNELTKHRQTALHLAAQQDLPTICSVLLENGVDFAAVDENGNNALHLAVMHGRLNNIRVLLTECTVDAEAFNLRGQSPLHILGQYGKENAAAIFDLFLECMPGYPLDKPDADGSTVLLLAYMKGNANLCRAIVRSGARLGVNNNQGVNIFNYQVATKQLLFRLLDMLSKEPPWCDGSYCYECTARFGVTTRKHHCRHCGRLLCHKCSTKEIPIIKFDLNKPVRVCNICFDVLTLGGVS

SEQ ID NO: 56303 - protein, 168 aa, Homo sapiens
IQDSGQIKKKFQPMNKIERSILHDVVEVAGLTSFSFGEDDDCRYVMIFKKEFAPSDEELDSYRRGEEWDPQKAEEKRKLKELAQRQEEEAAQQGPVVVSPASDYKDKYSHLIGKGAAKDAAHMLQANKTYGCVPVANKRDTRSIEEAMNEIRAKKRLRQSGEELPPTS

SEQ ID NO: 56304 - protein, 9 aa, Homo sapiens
IALHKSTPV

SEQ ID NO: 56305 - protein, 58 aa, Homo sapiens
MKKDYQQQKMEKVLSLPKPTIILSAYQRKCIQSILKEEGEHIREMVKQINDIRNHVNF

SEQ ID NO: 56306 - protein, 209 aa, Homo sapiens
VQLELITPFQLYFNPELIFKHFQIWRLITNFLFFGPVGFNFLFNMIFLYRYCRMLEEGSFRGRTADFVFMFLFGGFLMTLFGLFVSLVFLGQAFTIMLVYVWSRRNPYVRMNFFGLLNFQAPFLPWVLMGFSLLLGNSIIVDLLGIAVGHIYFFLEDVFPNQPGGIRILKTPSILKAIFDTPDEDPNYNPLPEERPGGFAWGEGQRLGG

SEQ ID NO: 56307 - protein, 136 aa, Homo sapiens
VSSFVMAAAVAMETDDAGNRLRFQLELEFVQCLANPNYLNFLAQRGYFKDKAFVNYLKYLLYWKDPEYAKYLKYPQCLHMLELLQYEHFRKELVNAQCAKFIDEQQILHWQHYSRKRMRLQQALAEQQQQNNTSGK

SEQ ID NO: 56308 - protein, 76 aa, Homo sapiens
IMVESGDDSWDLITCYCRKPFAGRPMIECSLCGTWIHLSCAKIKKTNVPDFFYCQKCKELRPEARRLGGPPKSGEP

SEQ ID NO: 56309 - protein, 104 aa, Homo sapiens
VADKLDNSRSILKRRYYRQHCTLELGSYIKDLSVVHSDLSSIVILDNSPGAYRSHPDNAIPIKSWFSDPSDTALLNLLPMLDALRFTADVRSVLSRNLHQHRLW

SEQ ID NO: 56310 - protein, 77 aa, Homo sapiens
MSFHPPVPQWVSCTRNTMKKTSFSTLPTVTKVSTVCEAAAPELEGGLILQRERWPPFLDLLLLQAQTPPPLFRTGTS

SEQ ID NO: 56311 - protein, 112 aa, Homo sapiens
KAKVPAQANGTPTTKSPAPGAPTRSPSTPAKSPKLQKKNQKPSQVNGAPGSPTEPAGQKQHQKALPKKGVLGKSPLSALARKKARLSLVIRSPSLLQSGAKKKAQVRKAGKP

SEQ ID NO: 56312 - protein, 294 aa, Homo sapiens
KSVKFLFGGLAGMGATVFVQPLDLVKNRMQLSGEGAKTREYKTSFHALTSILKAEGLRGIYTGLSAGLLRQATYTTTRLGIYTVLFERLTGADGTPPGFLLKAVIGMTAGATGAFVGTPAEVALIRMTADGRLPADQRRGYKNVFNALIRITREEGVLTLWRGCIPTMARAVVVNAAQLASYSQSKQFLLDSGYFSDNILCHFCASMISGLVTTAASMPVDIAKTRIQNMRMIDGKPEYKNGLDVLFKVVRYEGFFSLWKGFTPYYARLGPHTVLTFIFLEQMNKAYKRLFLSG

SEQ ID NO: 56313 - protein, 133 aa, Homo sapiens
IDNLMADGTCQDAAIVGYKDSPSVWAAVPGKTFVNITPAEVGVLVGKDRSSFYVNGLTLGGQKCSVIRDSLLQDGEFSMDLRTKSTGGAPTFNVTVTKTDKTLVLLMGKEGVHGGLINKKCYEMASHLRRSQY

SEQ ID NO: 56314 - protein, 1011 aa, Homo sapiens
LLENFTSEAAFIENLRRRFRENLIYTYIGPVLVSVNPYRDLQIYSRQHMERYRGVSFYEVPPHLFAVADTVYRALRTERRDQAVMISGESGAGKTEATKRLLQFYAETCPAPERGGAVRDRLLQSNPVLEAFGNAKTLRNDNSSRFGKYMDVQFDFKGAPVGGHILSYLLEKSRVVHQNHGERNFHIFYQLLEGGEEETLRRLGLERNPQSYLYLVKGQCAKVSSINDKSDWKVVRKALTVIDFTEDEVEDLLSIVASVLHLGNIHFAANEESNAQVTTENQLKYLTRLLSVEGSTLREALTHRKIIAKGEELLSPLNLEQAAYARDALAKAVYSRTFTWLVGKINRSLASKDVESPSWRSTTVLGLLDIYGFEVFQHNSFEQFCINYCNEKLQQLFIELTLKSEQEEYEAEGIAWEPVQYFNNKIICDLVEEKFKGIISILDEECLRPGEATDLTFLEKLEDTVKHHPHFLTHKLADQRTRKSLGRGEFRLLHYAGEVTYSVTGFLDKNNDLLFRNLKETMCSSKNPIMSQCFDRSELSDKKRPETVATQFKMSLLQLVEILQSKEPAYVRCIKPNDAKQPGRFDEVLIRHQVKYLGLLENLRVRRAGFAYRRKYEAFLQRYKSLCPETWPTWAGRPQDGVAVLVRHLGYKPEEYKMGRTKIFIRFPKTLFATEDALEVRRQSLATKIQAAWRGFHWRQKFLRVKRSAICIQSWWRGTLGRRKAAKRKWAAQTIRRLIRGFVLRHAPRCPENAFFLDHVRTSFLLNLRRQLPQNVLDTSWPTPPPALREASELLRELCIKNMVWKYCRSISPEWKQQLQQKAVASEIFKGKKDNYPQSVPRLFISTRLGTDEISPRVLQALGSEPIQYAVPVVKYDRKGYKPRSRQLLLTPNAVVIVEDAKVKQRIDYANLTGISVSSLSDSLFVLHVQRADNKQKGDVVLQSDHVIETLTKTALSANRVNSININQGSITFAGGPGRDGTIDFTPGSELLITKAKNGHLAVVAPRLNSR

SEQ ID NO: 56315 - protein, 210 aa, Homo sapiens
IYHLQSKVPTFVRMLAPEGALNIHEKAWNAYPYCRTVITNEYMKEDFLIKIETWHKPDLGTQENVHKLEPEAWKHVEAVYIDIADRSQVLSKDYKAEEDPAKFKSIKTGRGPLGPNWKQELVNQKDCPYMCAYKLVTVKFKWWGLQNKVENFIHKQERRLFTNFHRQLFCWLDKWVDLTMDDIRRMEEETKRQLDEMRQKDPVKGMTADD

SEQ ID NO: 56316 - protein, 13 aa, Homo sapiens
LAPGDVSPAAGQD

SEQ ID NO: 56317 - protein, 569 aa, Homo sapiens
LATAHRRRWWMACTAVLENLLFSAVLLGWGSLLIMLKSEGFYSYLCTEPENVTNGTVGGTAEPGHEEVSWMNGWLSCQAQDEMLNLAFTVGSFLLSAITLPLGIVMDKYGPRKLRLLGSACFAVSCLLIAYGASKPNALSVLIFIALALNGFGGMCMTFTSLTLPNMFGDLRSTFIALMIGSYASSAVTFPGIKLIYDAGVSFIVVLVVWAGCSGLVFLNCFFNWPLEPFPGPEDMDYSVKIKFSWLGFDHKITGKQFYKQVTTVGRRLSVGSSMRSAKEQVALQEGHKLCLSTVDLEVKCQPDAAVAPSFMHSVFSPILLLSLVTMCVTQLRLIFYMGAMNNILKFLVSGDQKTVMATVGLYTSIFGVLQLLCLLTAPVIGYIMDWRLKECEDASEEPEEKDANQGEKKKKKRDRQIQKITNAMRAFAFTNLLLVGFGVTCLIPNLPLQILSFILHTIVRGFIHSAVGGLYAAVYPSTQFGSLTGLQSLISALFALLQQPLFLAMMGPLQGDPLWVNVGLLLLSLLGFCLPLYLICYRRQLERQLQQRQEDDKLFLKINGSSNQEAFV

SEQ ID NO: 56318 - protein, 63 aa, Homo sapiens
VADYISRAESQSRQRPPLERTKPSEDSLSGQKGDSVSKLPKGPSENGELSAPLELGSMVNGVS

SEQ ID NO: 56319 - protein, 404 aa, Homo sapiens
IGSQTAFRVTAMEEPQSDPSVEPPLSQETFSDLWKLLPENNVLSPLPSQAMDDLMLSPDDIEQWFTEDPGPDEAPRMPEAAPPVAPAPAAPTPAAPAPAPSWPLSSSVPSQKTYQGSYGFRLGFLHSGTAKSVTCTYSPALNKMFCQLAKTCPVQLWVDSTPPPGTRVRAMAIYKQSQHMTEVVRRCPHHERCSDSDGLAPPQHLIRVEGNLRVEYLDDRNTFRHSVVVPYEPPEVGSDCTTIHYNYMCNSSCMGGMNRRPILTIITLEDSSGNLLGRNSFEVRVCACPGRDRRTEEENLRKKGEPHHELPPGSTKRALPNNTSSSPQPKKKPLDGEYFTLQIRGRERFEMFRELNEALELKDAQAGKEPGGSRAHSSHLKSKKGQSTSRHKKLMFKTEGPDSD

SEQ ID NO: 56320 - protein, 85 aa, Homo sapiens
KTMRIRMTDGRTLVGCFLCTDRDCNVILGSAQEFLKPSGQCPGNAHPPDSFSAGEPRVLGLAMVPGHHIVSIEVQRESLTGPPYL

SEQ ID NO: 56321 - protein, 106 aa, Homo sapiens
KARRKSTQAGDDLMRCVDLYNQAQSKWFEEMVTTTLELERLEVERVEMIRQHLCQYTQLRHETDMFNQSTVEPVDQLLRKVDPAKDRELWVREHKTGNIRPVDMEI

SEQ ID NO: 56322 - protein, 11 aa, Homo sapiens
REVHTKIISEE

SEQ ID NO: 56323 - protein, 82 aa, Homo sapiens
LQQTQAQVDEVVDIMRVNVDKVLERDQKLSELDDRADALQAGASQFETSAAKLKRKYWWKNLKMMIILGVICAIILIIIIGE

SEQ ID NO: 56324 - protein, 57 aa, Homo sapiens
LSELDDRADALQAGASQFETSAAKLKRKYWWKNLKMMIILGVICAIILIIIIVYFST

SEQ ID NO: 56325 - protein, 298 aa, Homo sapiens
LVLVPGRVMRPLGGQLWRFLPRGLEFWGPAEGTARVLLRQFCARQAEAWRASGRPGYCLGTRPLSTARPPPPWSQKGPGDSTRPSKPGPVSWKSLAITFAIGGALLAGMKHVKKEKAEKLEKERQRHIGKPLLGGPFSLTTHTGERKTDKDYLGQWLLIYFGFTHCPDVCPEELEKMIQVVDEIDSITTLPDLTPLFISIDPERDTKEAIANYVKEFSPKLVGLTGTREEVDQVARAYRVYYSPGPKDEDEDYIVDHTIIMYLIGPDGEFLDYFGQNKRKGEIAASIATHMRPYRKKS

SEQ ID NO: 56326 - protein, 84 aa, Homo sapiens
LASYLLHRTQQNILHEEEGRELSGLVIITAWIILCHSSSKNPVGGRIQLAIAIVITLFPFISWVYIYINKEMRSSWPTHCKTVI

SEQ ID NO: 56327 - protein, 12 aa, Homo sapiens
VTVKTPLHHNAP

SEQ ID NO: 56328 - protein, 16 aa, Homo sapiens
RWGLLLIEDVYNISGL

SEQ ID NO: 56329 - protein, 204 aa, Homo sapiens
LQQDSNDDTEDVSLFDAEEETTNRPRKAKIRHPVASFFHLFFRVSAIIVCLLCELLSSSFITCMVTIILLLSCDFWAVKNVTGRLMVGLRWWNHIDEDGKSHWVFESRKESSQENKTVSEAESRIFWLGLIACSVLWVIFAFSALFSFTVKWLAVVIMGVVLQGANLYGYIRCKVRSRKHLTSMATSYFGKQFLRQNTGDDQTS

SEQ ID NO: 56330 - protein, 2332 aa, Homo sapiens
VFPYRGPGNPVPGPLAPLPDYMSEEKLQEKARKWQQLQAKRYAEKRKFGFVDAQKEDMPPEHVRKIIRDHGDMTNRKFRHDKRVYLGALKYMPHAVLKLLENMPMPWEQIRDVPVLYHITGAISFVNEIPWVIEPVYISQWGSMWIMMRREKRDRRHFKRMRFPPFDDEEPPLDYADNILDVEPLEAIQLELDPEEDAPVLDWFYDHQPLRDSRKYVNGSTYQRWQFTLPMMSTLYRLANQLLTDLVDDNYFYLFDLKAFFTSKALNMAIPGGPKFEPLVRDINLQDEDWNEFNDINKIIIRQPIRTEYKIAFPYLYNNLPHHVHLTWYHTPNVVFIKTEDPDLPAFYFDPLINPISHRHSVKSQEPLPDDDEEFELPEFVEPFLKDTPLYTDNTANGIALLWAPRPFNLRSGRTRRALDIPLVKNWYREHCPAGQPVKVRVSYQKLLKYYVLNALKHRPPKAQKKRYLFRSFKATKFFQSTKLDWVEVGLQVCRQGYNMLNLLIHRKNLNYLHLDYNFNLKPVKTLTTKERKKSRFGNAFHLCREVLRLTKLVVDSHVQYRLGNVDAFQLADGLQYIFAHVGQLTGMYRYKYKLMRQIRMCKDLKHLIYYRFNTGPVGKGPGCGFWAAGWRVWLFFMRGITPLLERWLGNLLARQFEGRHSKGVAKTVTKQRVESHFDLELRAAVMHDILDMMPEGIKQNKARTILQHLSEAWRCWKANIPWKVPGLPTPIENMILRYVKAKADWWTNTAHYNRERIRRGATVDKTVCKKNLGRLTRLYLKAEQERQHNYLKDGPYITAEEAVAVYTTTVHWLESRRFSPIPFPPLSYKHDTKLLILALERLKEAYSVKSRLNQSQREELGLIEQAYDNPHEALSRIKRHLLTQRAFKEVGIEFMDLYSHLVPVYDVEPLEKITDAYLDQYLWYEADKRRLFPPWIKPADTEPPPLLVYKWCQGINNLQDVWETSEGECNVMLESRFEKMYEKIDLTLLNRLLRLIVDHNIADYMTAKNNVVINYKDMNHTNSYGIIRGLQFASFIVQYYGLVMDLLVLGLHRASEMAGPPQMPNDFLSFQDIATEAAHPIRLFCRYIDRIHIFFRFTADEARDLIQRYLTEHPDPNNENIVGYNNKKCWPRDARMRLMKHDVNLGRAVFWDIKNRLPRSVTTVQWENSFVSVYSKDNPNLLFNMCGFECRILPKCRTSYEEFTHKDGVWNLQNEVTKERTAQCFLRVDDESMQRFHNRVRQILMASGSTTFTKIVNKWNTALIGLMTYFREAVVNTQELLDLLVKCENKIQTRIKIGLNSKMPSRFPPVVFYTPKELGGLGMLSMGHVLIPQSDLRWSKQTDVGITHFRSGMSHEEDQLIPNLYRYIQPWESEFIDSQRVWAEYALKRQEAIAQNRRLTLEDLEDSWDRGIPRINTLFQKDRHTLAYDKGWRVRTDFKQYQVLKQNPFWWTHQRHDGKLWNLNNYRTDMIQALGGVEGILEHTLFKGTYFPTWEGLFWEKASGFEESMKWKKLTNAQRSGLNQIPNRRFTLWWSPTINRANVYVGFQVQLDLTGIFMHGKIPTLKISLIQIFRAHLWQKIHESIVMDLCQVFDQELDALEIETVQKETIHPRKSYKMNSSCADILLFASYKWNVSRPSLLADSKDVMDSTTTQKYWIDIQLRWGDYDSHDIERYARAKFLDYTTDNMSIYPSPTGVLIAIDLAYNLHSAYGNWFPGSKPLIQQAMAKIMKANPALYVLRERIRKGLQLYSSEPTEPYLSSQNYGELFSNQIIWFVDDTNVYRVTIHKTFEGNLTTKPINGAIFIFNPRTGQLFLKIIHTSVWAGQKRLGQLAKWKTAEEVAALIRSLPVEEQPKQIIVTRKGMLDPLEVHLLDFPNIVIKGSELQLPFQACLKVEKFGDLILKATEPQMVLFNLYDDWLKTISSYTAFSRLILILRALHVNNDRAKVILKPDKTTITEPHHIWPTLTDEEWIKVEVQLKDLILADYGKKNNVNVASLTQSEIRDIILGMEISAPSQQRQQIAEIEKQTKEQSQLTATQTRTVNKHGDEIITSTTSNYETQTFSSKTEWRVRAISAANLHLRTNHIYVSSDDIKETGYTYILPKNVLKKFICISDLRAQIAGYLYGVSPPDNPQVKEIRCIVMVPQWGTHQTVHLPGQLPQHEYLKEMEPLGWIHTQPNESPQLSPQDVTTHAKIMADNPSWDGEKTIIITCSFTPGSCTLTAYKLTPSGYEWGRQNTDKGNNPKGYLPSHYERVQMLLSDRFLGFFMVPAQSSWNYNFMGVRHDPNMKYELQLANPKEFYHEVHRPSHFLNFALLQEGEVYSADREDLYA

SEQ ID NO: 56331 - protein, 141 aa, Homo sapiens
LSGHYVGFSMVSLLLELNSACLHLRKLLLLSRQAPSLAFSVTSWASLATLALFRLVPLGWMSLWLFRQHHQVPLALVTLGGIGLVTVGIMSIILGIRILVNDVLQSRPHPPSPGHEKTRGTRTRRDNGPVTSNSSTLSLKD

SEQ ID NO: 56332 - protein, 59 aa, Homo sapiens
RSGFRLETLAGLRSRRLKQPKVSWSLCDSGKKWREHSVSPTSFLTLLPYLSFFPTGLSR

SEQ ID NO: 56333 - protein, 18 aa, Homo sapiens
RSRRLKQPKAFCLRDVAP

SEQ ID NO: 56334 - protein, 21 aa, Homo sapiens
MWHHSAVPCGFTALLPPPPSL

SEQ ID NO: 56335 - protein, 5 aa, Homo sapiens
LLYES

SEQ ID NO: 56336 - protein, 208 aa, Homo sapiens
LTVHTGTHLLSMQGSPGGHNRPGTLMAADRAKQMFGPQVLTTRHYVGSAAAFAGTPEHGQFQGSPGGAYGTAQPPPHYGPTQPAYSPSQQLRAPSAFPAVQYLSQPQPQPYAVHGHFQPTQTGFLQPGGALSLQKQMEHANQQTGFSDSSSLRPMHPQALHPAPGLLASPQLPVQMQPAGKSGFAATSQPGPRLPFIQHSQNPRFYHK

SEQ ID NO: 56337 - protein, 103 aa, Homo sapiens
LGALSGAAALGFASYGAHGAQFPDAYGKELFDKANKHHFLHSLALLGVPHCRKPLWAGLLLASGTTLFCTSFYYQALSGDPSIQTLAPAGGTLLLLGWLALAL

SEQ ID NO: 56338 - protein, 95 aa, Homo sapiens
LDLVDRQSITLISSPSGRRVYQVLGSSSKTYTCLASCHYCSCPAFAFSVLRKSDSILCKHLLAVYLSQVMRTCQQLSVSDKQLTDILLMEKKQEA

SEQ ID NO: 56339 - protein, 7 aa, Homo sapiens
KHKLLKE

SEQ ID NO: 56340 - protein, 80 aa, Homo sapiens
LLQPQQPLPPPQPGAAGGSGQPRKCSSRRNAWGNLSYADLITRAIESSPDRRLTLSQIYEWMVSCVPYFKDKGNSNSSAG

SEQ ID NO: 56341 - protein, 174 aa, Homo sapiens
IRHNLSLHSRFMRVQNEGTGKSSWWIINPDGGKSGKAPRRRAVSMDNSNKYTKSRGRTAKKKAALQTAPESADDSPSQLSKWSGSPTSRSSDELDAWTDFRSRTNSNASTVSGRLSPIMASTELDEVQDDDAPLSPMLYSSSASLSPSVSKPCTVELLRLTDMAGTMNLNDGAD

SEQ ID NO: 56342 - protein, 283 aa, Homo sapiens
LDNITLPPSQPSPTGGLMQRSSSFPYTTKGSGLSSPTSSFNSTVFGPSSLNSLRQSPMQTIQENKPATFSSMSHYGNQTLQDLLTSDSLSHSDVMMTQSDPLMSQASTAVSAQNSRRNVMLRNDPMMSFAAQPNQGSVVNQNLLHHQHQTQGALGGSRALSNSVSNMGLSESSSLGSAKHQQQSPVSQSMQTLSDSLSGSSLYSTSANLPVMGHEKFPSDLDLDMFNGSLECDMESIIRSELMDADGLDFNFDSLISTQNVVGLNVGNFTGAKQASSQSWVPG

SEQ ID NO: 56343 - protein, 397 aa, Homo sapiens
LINKSGELLAKNLSHLDTVLGALDVQEHSLGVLAVLFVKFSMPSVPDFETLFSQVQLFISTCNGEHIRYATDTFAGLCHQLTNALVERKQPLRGIGILKQAIDKMQMNTNQLTSIHADLCQLCLLAKCFKPALPYLDVDMMDICKENGAYDAKHFLCYYYYGGMIYTGLKNFERALYFYEQAITTPAMAVSHIMLESYKKYILVSLILLGKVQQLPKYTSQIVGRFIKPLSNAYHELAQVYSTNNPSELRNLVNKHSETFTRDNNMGLVKQCLSSLYKKNIQRLTKTFLTLSLQDMASRVQLSGPQEAEKYVLHMIEDGEIFASINQKDGMVSFHDNPEKYNNPAMLHNIDQEMLKCIELDERLKAMDQEITVNPQFVQKSMGSQEDDSGNKPSSYS

SEQ ID NO: 56344 - protein, 209 aa, Homo sapiens
IDFRQADFCVMTRLLGYVDPLDPSFVAAVITITFNPLYWNVVARWEHKTRKLSRAFGSPYLACYSLSVTILLLNFLRSHCFTQAMLSQPRMESLDTPAAYSLGLALLGLGVVLVLSSFFALGFAGTFLGDYFGILKEARVTVFPFNILDNPMYWGSTANYLGWAIMHASPTGLLLTVLVALTYIVALLYEEPFTAEIYRQKASGSHKRS

SEQ ID NO: 56345 - protein, 31 aa, Homo sapiens
VVIHWLRRDEEAAERLCPLVEHLPRVLQESE

SEQ ID NO: 56346 - protein, 145 aa, Homo sapiens
RPQASALELRGFQRDLSSLRRLAQSFRPAMRRVFLHEATARLMAGASPTRTHQLLDRSLRRRAGPGGKGGAVAELEPRPTRREHAEALLLASCYLPPGFLSAPGQRVGMLAEAARTLEKLGDRRLLHDCQQMLMRLGGGTTVTSS

SEQ ID NO: 56347 - protein, 488 aa, Homo sapiens
LRAIYQCFVWSGTAEARKRKAKSCICHVCGVHLNRLHSCLYCVFFGCFTKKHIHEHAKAKRHNLAIDLMYGGIYCFLCQDYIYDKDMEIIAKEEQRKAWKMQGVGEKFSTWEPTKRELELLKHNPKRRKITSNCTIGLRGLINLGNTCFMNCIVQALTHTPLLRDFFLSDRHRCEMQSPSSCLVCEMSSLFQEFYSGHRSPHIPYKLLHLVWTHARHLAGYEQQDAHEFLIAALDVLHRHCKGDDNGKKANNPNHCNCIIDQIFTGGLQSDVTCQVCHGVSTTIDPFWDISLDLPGSSTPFWPLSPGSEGNVVNGESHVSGTTTLTDCLRRFTRPEHLGSSAKIKCSGCHSYQESTKQLTMKKLPIVACFHLKRFEHSAKLRRKITTYVSFPLELDMTPFMASSKESRMNGQYQQPTDSLNNDNKYSLFAVVNHQGTLESGHYTSFIRQHKDQWFKCDDAIITKASIKDVLDSEGYLLFYHKQFLEYE

SEQ ID NO: 56348 - protein, 9 aa, Homo sapiens
VFVMKNIRL

SEQ ID NO: 56349 - protein, 171 aa, Homo sapiens
VSLSATDCYIVHEIYNGENAQDQFEYELEQALEAQYKYIVIEPTRIGDETARWITVGNCLHKTAVLAGTACLFTPLALPLDYSHYISLPAGVLSLACCTLYGISWQFDPCCKYQVEYDAYKLSRLPLHTLTSSTPVVLVRKDDLHRKRLHNTIALAALVYCVKKIYELYAV

SEQ ID NO: 56350 - protein, 14 aa, Homo sapiens
KENPLPQYLERLQP

SEQ ID NO: 56351 - protein, 46 aa, Homo sapiens
KLCPGGHRPASLSSGCPAGCRLSFNLPPSMLLSVQKCCMPSSLKTC

SEQ ID NO: 56352 - protein, 322 aa, Homo sapiens
TRRHLSSRNRPEGKVLETVGVFEVPKQNGKYETGQLFLHSIFGYRGVVLFPWQARLYDRDVASAAPEKAENPAGHGSKEVKGKTHTYYQVLIDARDCPHISQRSQTEAVTFLANHDDSRALYAIPGLDYVSHEDILPYTSTDQVPIQHELFERFLLYDQTKAPPFVARETLRAWQEKNHPWLELSDVHRETTENIRVTVIPFYMGMREAQNSHVYWWRYCIRLENLDSDVVQLRERHWRIFSLSGTLETVRGRGVVGREPVLSKEQPAFQYSSHVSLQASSGHMWGTFRFERPDGSHFDVRIPPFSLESNKDEKTPPSGLHW

SEQ ID NO: 56353 - protein, 57 aa, Homo sapiens [sequence omitted]

SEQ ID NO: 56354 - protein, 519 aa, Homo sapiens
KTTETYRASLPYSQISGLNALQLRLMVPVTVVFTRESVPLDDQEKLPFTVVHEREIPLKYKMKIKCRFQKAYRRALDHEEEALSSGSVQEAEAMLDEPQEQAEGSLTVYVISEHSSLLPQDMMSYIGPKRTAVVRGIMHREAFNIIGRRIVQVAQAMSLTEDVLAAALADHLPEDKWSAEKRRPLKSSLGYEITFSLLNPDPKSHDVYWDIEGAVRRYVQPFLNALGAAGNFSVDSQILYYAMLGVNPRFDSASSSYYLDMHSLPHVINPVESRLGSSAASLYPVLNFLLYVPELAHSPLYIQDKDGAPVATNAFHSPRWGGIMVYNVDSKTYNASVLPVRVEVDMVRVMEVFLAQLRLLFGIAQPQLPPKCLLSGPTSEGLMTWELDRLLWARSVENLATATTTLTSLAQLLGKISNIVIKDDVASEVYKAVAAVQKSAEELASGHLASAFVASQEAVTSSELAFFDPSLLHLLYFPDDQKFAIYIPLFLPMAVPILLSLVKIFLETRKSWRKPEKTD

SEQ ID NO: 56355 - protein, 338 aa, Homo sapiens
RRPLKSSLGYEITFSLLNPDPKSHDVYWDIEGAVRRYVQPFLNALGAAGNFSVDSQILYYAMLGVNPRFDSASSSYYLDMHSLPHVINPVESRLGSSAASLYPVLNFLLYVPELAHSPLYIQDKDGAPVATNAFHSPRWGGIMVYNVDSKTYNASVLPVRVEVDMVRVMEVFLAQLRLLFGIAQPQLPPKCLLSGPTSEGLMTWELDRLLWARSVENLATATTTLTSLAQLLGKISNIVIKDDVASEVYKAVAAVQKSAEELASGHLASAFVASQEAVTSSELAFFDPSLLHLLYFPDDQKFAIYIPLFLPMAVPILLSLVKIFLETRKSWRKPEKTD

SEQ ID NO: 56356 - protein, 77 aa, Homo sapiens
RHYFRNQLLKSFDFHFGFCIPSSKNTCEHIYDFPPLSEELISEMIRHPYETQSDSFYFVDDRLVMHNKADYSYSGTP

SEQ ID NO: 56357 - protein, 58 aa, Homo sapiens
ITCGFPANSLAMIFHTMWHCALEKCVSERTYRKFLTCLPHSPRALGWIKRNCPSAHPY

SEQ ID NO: 56358 - protein, 264 aa, Homo sapiens
KAAGRMNILAPVRRDRVLAELPQCLRKEAALHGHKDFHPRVTCACQEHRTGTVGFKISKVIVVGDLSVGKTCLINRFCKDTFDKNYKATIGVDFEMERFEVLGIPFSLQLWDTAGQERFKCIASTYYRGAQAIIIVFNLNDVASLEHTKQWLADALKENDPSSVLLFLVGSKKDLSTPAQYALMEKDALQVAQEMKAEYWAVSSLTGENVREFFFRVAALTFEANVLAELEKSGARRIGDVVRINSDDSNLYLTASKKKPTCCP

SEQ ID NO: 56359 - protein, 53 aa, Homo sapiens
LRYVNQRTLGTFLLGILLMLDVMIIIYFSRLLRSDFCPEHVPKKQHKDKFLTE

SEQ ID NO: 56360 - protein, 62 aa, Homo sapiens
IAAKIAAPLTKVDEIVVLSGDNSKVTSEVNRLLAELPASVHALTGVDLSKIPLIKKATGVQV

SEQ ID NO: 56361 - protein, 68 aa, Homo sapiens
LSKNKGPSKAASDDGSLKSSSPTSYWKSLAPDRSDDEHDPLDNTSRPRYSHSYLSDSDTEAKLTETNA

SEQ ID NO: 56362 - protein, 450 aa, Homo sapiens
LNSEKVAALIQKLNSDPQFVLAQNVGTTHDLLDICLKRATVQRAQHVFQHAVPQEGKPITNQKSSGRCWIFSCLNVMRLPFMKKLNIEEFEFSQSYLFFWDKVERCYFFLSAFVDTAQRKEPEDGRLVQFLLMNPANDGGQWDMLVNIVEKYGVIPKKCFPESYTTEATRRMNDILNHKMREFCIRLRNLVHSGATKGEISATQDVMMEEIFRVVCICLGNPPETFTWEYRDKDKNYQKIGPITPLEFYREHVKPLFNMEDKICLVNDPRPQHKYNKLYTVEYLSNMVGGRKTLYNNQPIDFLKKMVAASIKDGEAVWFGCDVGKHFNSKLGLSDMNLYDHELVFGVSLKNMNKAERLTFGESLMTHAMTFTAVSEKDDQDGAFTKWRVENSWGEDHGHKGYLCMTDEWFSEYVYEVVVDRKHVPEEVLAVLEQEPIILPAWDPMGALAE

SEQ ID NO: 56363 - protein, 137 aa, Homo sapiens
LLRGRRSINIVEHRENFGPFQNLESLMNVPLFKYKSTVQVCNSILCPKTGREKRKSPENRFLRKLLKPDIERERLKAVNSIISIVFGTRRIAWAHLDRKLTVLDWQQSDRWSLMRGIYSSSVYLEEVRQLHLQIPTC

SEQ ID NO: 56364 - protein, 123 aa, Homo sapiens
IPNDSPARGEGTHSEEEGFAMDEEDSDGELNTWELSEGTNCPPKEQPGDLFNEDWDSELKADQGNPYDADDIQESISQELKPWVCCAPQGDMIYDPSWHHPPPLIPYYSKMVFETGQFDDAED

SEQ ID NO: 56365 - protein, 250 aa, Homo sapiens
IFARARNGKYRLLKISIENEQLVIGSYSQPSDSWDKDYDSFVLPLLEDKQPCYILFRLDSQNAQGYEWIFIAWSPDHSHVRQKMLYAATRATLKKEFGGGHIKDEIFGTVKEDVSLHGYKKYLLSQSSPAPLTAAEEELRQIKINEVQTDVGVDTKHQTLQGVAFPISREAFQALEKLNNRQLNYVQLEIDIKNEIIILANTTNTELKDLPKRIPKDSARYHFFLYKHSHEGDYLESIVLFIQCLDTHAV

SEQ ID NO: 56366 - protein, 692 aa, Homo sapiens
KPGQPQPQHHHSHHHPHHHPQQQQQQPHHHHHYYFYNHSHNHHHHHHHQQPHQYLQHGAEGSPKAQPKPLKHEQKHTLQQHQETPKKKTGYGELNGNAGEREISLKNLSSDEATNPISRVLNGNQQVVDTSLKQTVKANTFGKAGIKTKNFIQKNSMDKKNGKSYENKSGENQSVDKSDTIPIPNGVVTNNSGYITNGYMGKGADNDGSGSESGYTTPKKRKARRNSAKGCENLNIVQDKIMQQETSVPTLKQGLETFKPDYSEQKGNRVDGSKPIWKYETGPGGTSRGKPAVGDMLRKSSDSKPGVSSKKFDDRPKGKHASAVASKEDSWTLFKPPPVFPVDNSSAKIVPKISYASKVKENLNKTIQNSSVSPTSSSSSSSSTGETQTQSSSRLSQVPMSALKSVTSANFSNGPVLAGTDGNVYPPGGQPLLTTAANTLTPISSGTDSVLQDMSLTSAAVEQIKTSLFIYPSNMQTMLLSTAQVDLPSQTDQQNLGDIFQNQWGLSFINEPSAGPETVTGKSSEHKVMEVTFQGEYPATLVSQGAEIIPSGTEHPVFPKAYELEKRTSPQVLGSILKSGTTSESGALSLEPSHIGDLQKADTSSQGALVFLSKDYEIESQNPLASPTNTLLGSAKEQRYQRGLERNDSWGSFDLRAAIVYHTKEMESIWNLQKQDPKRIITYNEAMDSPDQ

SEQ ID NO: 56367 - protein, 60 aa, Homo sapiens
ITATTIRTITLSSSSSSRTTTTIIISTTTATTTTTTIITSSLTNTCSMEPRAAPRPSQSR

SEQ ID NO: 56368 - protein, 44 aa, Homo sapiens
LQCACPAPGLAVAPRQQHGRTHPLRRLKKANDKKRTTNPFYNTM

SEQ ID NO: 56369 - protein, 17 aa, Homo sapiens
VRGRERGLSGFSFLMAQ

SEQ ID NO: 56370 - protein, 70 aa, Homo sapiens
MGNRGGFRGGFGSGIRGQGRGRGRGRGQGRGARGGKAEDKEWMPVTKLGRLVKDMKIKSLEEIYLFSLPN

SEQ ID NO: 56371 - protein, 201 aa, Homo sapiens
IIDFFLGASLKDEVLKIMPVQKQTRAGQRTRFKAFVAIGDYNGHVGLGVKCSKEVATAIRGAIILAKLSIVPVRRGYWGNKIGKPHTVPCKVTGCCGSVLVRLIPAPRGTGIVSAPVPKKLLMMAGIDDCYTSARGCTATLGNFTKATFDAISKTYSYLTPDLWKETVFTKSPYQEFTDHLVKTHTRVSVQRTQAPAVATT

SEQ ID NO: 56372 - protein, 37 aa, Homo sapiens
VFCYRCVFHYVRSHQACPITGYPTEVQHLIKLYSPEN

SEQ ID NO: 56373 - protein, 29 aa, Homo sapiens
KRNPRKVRWTKAFRKAAGKELTVDNSFEF

SEQ ID NO: 56374 - protein, 21 aa, Homo sapiens
LKGWSAVARSWFTTISSRRLR

SEQ ID NO: 56375 - protein, 95 aa, Homo sapiens
IGGYTKKVCVMTKIFYLSPEGMTSCQYDLRSQVIYPESYYFTRRKYLLKALFKALKRLKSLRDQFSFAENLYQIIGIDCFQKNDKKMFKSCRRLT

SEQ ID NO: 56376 - protein, 29 aa, Homo sapiens
LSPASVGSDTLSDLGISSLQDGLALHIRL

SEQ ID NO: 56377 - protein, 58 aa, Homo sapiens
LYSEYRPKIKGEHPGLSIGDVAKKLGEMWNNTAADDKQPYEKKAAKLKEKYEKDTAAY

SEQ ID NO: 56378 - protein, 69 aa, Homo sapiens
LTEEDGVHSVIEENIKCISRDYVLKQIRSLVQANPEVAMDSIIHMTQHISPTQRAEVIRILSTMDSPST

SEQ ID NO: 56379 - protein, 52 aa, Homo sapiens
KPAEEHPKKAFNSETDSFKLAYGGHQYHASCANFWINCVEPKPPGLVLPDLL

SEQ ID NO: 56380 - protein, 119 aa, Homo sapiens
VNLVINYDFPTSSVEYIHRIGRTGRAGNKGKAITFFTEDDKPLLRSVANVIQQAGCPVPEYIKGFQKLLSKQKKKMIKKPLERESISTTPKCFLEKAKDKQKKVTGQNSKKKVALEDKS

SEQ ID NO: 56381 - protein, 407 aa, Homo sapiens
LDFTFEGKLEAAAQVRQATNQIVMNCADIDIITASYAPEGDEEIHATGFNYQNEDEKVTLSFPSTLQTGTGTLKIDFVGELNDKMKGFYRSKYTTPSGEVPYAAVTQFEATDARRAFPCWDEPAIKATFDISLVVPKDRVALSNMNVIDRKPYPDDENLVEVKFARTPVTSTYLVAFVVGEYDFVETRSKDGVCVCVYTPVGKAEQGKFALEVAAKTLPFYKDYFNVPYPLPKIDLIAIADFAAGAMENWDLVTYRETALLIDPKNSCSSSRQWVALVVGHELAHQWFGNLVTMEWWTHLWLNEGFASWIEYLCVDHCFPEYDIWTQFVSADYTRAQELDALDNSHPIEVSVGHPSEVDEIFDAISYSKGASVIRMLHDYIGDKDFKKGMNMYLTKFQQKNAAAGNL

SEQ ID NO: 56382 - protein, 105 aa, Homo sapiens
VGGNLLCSYGTPPDSPGNLLSFPRFFGPGEFDPSVDVYAMKSHESSPKKEVYFMAIIDILTPYDTKKKAAHAAKTVKHGAGAEISTVNPEQYSKRFNEFMSNILT

SEQ ID NO: 56383 - protein, 34 aa, Homo sapiens
LESASTSSLEDRVKRNIYSLQRTSVALEKNFMKR

SEQ ID NO: 56384 - protein, 70 aa, Homo sapiens
ITDASLEHLKSCHSLERIELYDCQQITRAGIKRLRTHLPNIKVHAYFAPVTPPPSVGGSRQRFCRCCIIL

SEQ ID NO: 56385 - protein, 29 aa, Homo sapiens
IPVHVLFFSFLEDDSLYLLKESEDKFKLD

SEQ ID NO: 56386 - protein, 108 aa, Homo sapiens
TSVAPPPEEVEPGSGVRIVVEYCEPCGFEATYLELASAVKEQYPGIEIESRLGGTGAFEIEINGQLVFSKLENGGFPYEKDLIEAIRRASNGETLEKITNSRPPCVIL

SEQ ID NO: 56387 - protein, 37 aa, Homo sapiens
VPLDPLEMHMDMDGDYPIDTYSDGLRPPYPTADHMLA

SEQ ID NO: 56388 - protein, 48 aa, Homo sapiens
IPYRYLHGTQRYPMPQNLMWQKDRIRQMQEIHRHALNMRRVPSSQIEC

SEQ ID NO: 56389 - protein, 593 aa, Homo sapiens
IQERIEDRLPELEQLERIGLFSHAEIKAIIKKASDLEYKIQRRTLFKEDFINYVQYEINLLELIQRRRTRIGYSFKKDEIENSIVHRVQGVFQRASAKWKDDVQLWLSYVAFCKKWATKTRLSKVFSAMLAIHSNKPALWIMAAKWEMEDRLSSESARQLFLRALRFHPECPKLYKEYFRMELMHAEKLRKEKEEFEKASMDVENPDYSEEILKGELAWIIYKNSVSIIKGAEFHVSLLSIAQLFDFAKDLQKEIYDDLQALHTDDPLTWDYVARRELEIESQTEEQPTTKQAKAVEVGRKEERCCAVYEEAVKTLPTEAMWKCYITFCLERFTKKSNSGFLRGKRLERTMTVFRKAHELKLLSECQYKQLSVSLLCYNFLREALEVAVAGTELFRDSGTMWQLKLQVLIESKSPDIAMLFEEAFVHLKPQVCLPLWISWAEWSEGAKSQEDTEAVFKKALLAVIGADSVTLKNKYLDWAYRSGGYKKARAVFKSLQESRPFSVDFFRKMIQFEKEQESCNMANIREYYERALREFGSADSDLWMDYMKEELNHPLGRPENCGQIYWRAMKMLQGESAEAFVAKHAMHQTGHL

SEQ ID NO: 56390 - protein, 996 aa, Homo sapiens
KADFVLMDTVSMPEFMANLRLRFEKGRIYTFIGEVVVSVNPYKLLNIYGRDTIEQYKGRELYERPPHLFAIADAAYKAMKRRSKDTCIVISGESGAGKTEASKYIMQYIAAITNPSQRAEVERVKNMLLKSNCVLEAFGNAKTNRNDNSSRFGKYMDINFDFKGDPIGGHINNYLLEKSRVIVQQPGERSFHSFYQLLQGGSEQMLRSLHLQKSLSSYNYIHVGAQLKSSINDAAEFRVVADAMKVIGFKPEEIQTVYKILAAILHLGNLKFVVDGDTPLIENGKVVSIIAELLSTKTDMVEKALLYRTVATGRDIIDKQHTEQEASYGRDAFAKAIYERLFCWIVTRINDIIEVKNYDTTIHGKNTVIGVLDIYGFEIFDNNSFEQFCINYCNEKLQQLFIQLVLKQEQEEYQREGIPWKHIDYFNNQIIVDLVEQQHKGIIAILDDACMNVGKVTDEMFLEALNSKLGKHAHFSSRKLCASDKILEFDRDFRIRHYAGDVVYSVIGFIDKNKDTLFQDFKRLMYNSSNPVLKNMWPEGKLSITEVTKRPLTAATLFKNSMIALVDNLASKEPYYVRCIKPNDKKSPQIFDDERCRHQVEYLGLLENVRVRRAGFAFRQTYEKFLHRYKMISEFTWPNHDLPSDKEAVKKLIERCGFQDDVAYGKTKIFIRTPRTLFTLEELRAQMLIRIVLFLQKVWRGTLARMRYKRTKAALTIIRYYRRYKVKSYIHEVARRFHGVKTMRDYGKHVKWPSPPKVLRRFEEALQTIFNRWRASQLIKSIPASDLPQVRAKVAAVEMLKGQRADLGLQRAWEGNYLASKPDTPQTSGTFVPVANELKRKDKYMNVLFSCHVRKVNRFSKVEDRAIFVTDRHLYKMDPTKQYKVMKTIPLYNLTGLSVSNGKDQLVVFHTKDNKDLIVCLFSKQPTHESRIGELVGVLVNHFKSEKRHLQVNVTNPVQCSLHGKKCTVSVETRLNQPQPDFTKNRSGFILSVPGN

SEQ ID NO: 56391 - protein, 48 aa, Homo sapiens
LKVWDVKAQKLAMDLPGHADEVYAVDWSPDGQRVASGGKDKCLRIWRR

SEQ ID NO: 56392 - protein, 381 aa, Homo sapiens
IETPRQDGVSRRFIPPARMMSTESANSFTLIGEASDGGTMENLSRRLKVTGDLFDIMSGQTDVDHPLCEECTDTLLDQLDTQLNVTENECQNYKRCLEILEQMNEDDSEQLQMELKELALEEERLIQELEDVEKNRKIVAENLEKVQAEAERLDQEEAQYQREYSEFKRQQLELDDELKSVENQMRYAQTQLDKLKKTNVFNATFHIWHSGQFGTINNFRLGRLPSVPVEWNEINAAWGQTVLLLHALANKMGLKFQRYRLVPYGNHSYLESLTDKSKELPLYCSGGLRFFWDNKFDHAMVAFLDCVQQFKEEVEKGETRFCLPYRMDVEKGKIEDTGGSGGSYSIKTQFNSEEQWTKALKFMLTNLKWGLAWVSSQFYNK

SEQ ID NO: 56393 - protein, 48 aa, Homo sapiens
LGPRVAEVLEGKGAGKKGRFQGKATKMSRRMEAQALLQDYISTQSAKE

SEQ ID NO: 56394 - protein, 415 aa, Homo sapiens
LLSRVQAALVWERPARSALWCLGLNAAFWFFALTSLRLVFLLAFGLMIIVCIDQWKNKIWPEIKVPRPDALDNESWGFVHPRLLSVPELCHHVAEVWVSGTIFIRNVLLFKKQNPGKFCLLSCGILTFLAVLGRYVPGLLLSYLMLVTVMMWPLAVYHRLWDRAYVRLKPALQRLDFSVRGYMMSKQRERQLRRRALHPERAMDNHSDSEEELAAFCPQLDDSTVARELAITDSEHSDAEVSCTDNGTFNLSRGQTPLTEGSEDLDGHSDPEESFARDLPDFPSINMDPAGLDDEDDTSIGMPSLMYRSPPGAEEPQAPPASRDEAALPELLLGALPVGSNLTSNLASLVSQGMIQLALSGASQPGPSGAPAQRATRGFLRSPSSDLDTDAEGDDFELLDQSELSQLDPASSRSH

SEQ ID NO: 56395 - protein, 39 aa, Homo sapiens
KKKKSHLSLVGTASGLGSNKKKKPKPPAPPTPSIYDDIN

SEQ ID NO: 56396 - protein, 110 aa, Homo sapiens
KDQTSVGMSFVAGGISGTVAAVLTLPFDVVKTQRQVALGAMEAVRVNPLHVDSTWLLLRRIRAESGTKGLFAGFLPRIIKAAPSCAIMISTYEFGKSFFQRLNQDRLLGG

SEQ ID NO: 56397 - protein, 4 aa, Homo sapiens
LPLA

SEQ ID NO: 56398 - protein, 44 aa, Homo sapiens
LAREFMIKTRRRKGLSEDVSISKFFDDPMLLELAKQDVVLNYPM

SEQ ID NO: 56399 - protein, 484 aa, Homo sapiens
MAATEPELLDDQEAKREAETFKEQGNAYYAKKDYNEAYNYYTKAIDMCPKNASYYGNRAATLMMLGRFREALGDAQQSVRLDDSFVRGHLREGKCHLSLGNAMAACRSFQRALELDHKNAQAQQEFKNANAVMEYEKIAETDFEKRDFRKVVFCMDRALEFAPACHRFKILKAECLAMLGRYPEAQSVASDILRMDSTNADALYVRGLCLYYEDCIEKAVQFFVQALRMAPDHEKACIACRNAKALKAKKEDGNKAFKEGNYKLAYELYTEALGIDPNNIKTNAKLYCNRGTVNSKLRKLDDAIEDCTNAVKLDDTYIKAYLRRAQCYMDTEQYEEAVRDYEKVYQTEKTKEHKQLLKNAQLELKKSKRKDYYKILGVDKNASEDEIKKAYRKRALMHHPDRHSGASAEVQKEEEKKFKEVGEAFTILSDPKKKTRYDSGQDLDEEGMNMGDFDPNNIFKAFFGGPGGFSFEASGPGNFFFQFG

SEQ ID NO: 56400 - protein, 199 aa, Homo sapiens
KICQFKLVLLGESAVGKSSLVLRFVKGQFHEYQESTIGAAFLTQTVCLDDTTVKFEIWDTAGQERYHSLAPMYYRGAQAAIVVYDITNTDTFARAKNWVKELQRQASPNIVIALAGNKADLASKRAVEFQEAQAYADDNSLLFMETSAKTAMNVNEIFMAIAKKLPKNEPQNATGAPGRNRGVDLQENNPASRSQCCSN

SEQ ID NO: 56401 - protein, 242 aa, Homo sapiens
LPTLQTVRYGSKAVTRHRRVMHFQRQKLMAVTEYIPPKPAIHPSCLPSPPSPPQEEIGLIRLLRREIAAVFQDNRMIAVCQNVALSAEDKLLMRHQLRKHKILMKVFPNQVLKPFLEDSKYQNLLPLFVGHNMLLVSEEPKVKEMVRILRTVPFLPLLGGCIDDTILSRQGFINYSKLPSLPLVQGELVGGLTCLTAQTHSLLQHQPLQLTTLLDQYIREQREKDSVMSANGKPDPDTVPDS

SEQ ID NO: 56402 - protein, 30 aa, Homo sapiens
LQEPSLYTIKAVFILDNDGRRLLAKCDSGE

SEQ ID NO: 56403 - protein, 45 aa, Homo sapiens
LESDPQQVIQKVNFRADDGGLTEQSVAQVSLLRLILLVWNFPPWR

SEQ ID NO: 56404 - protein, 208 aa, Homo sapiens
IPLGLLGAALSSVTLYTRKLAGTMGKKQNKKKVEEVLEEEEEEYVVEKVLDRRVVKGKVEYLLKWKGFSDEDNTWEPEENLDCPDLIAEFLQSQKTAHETDKSEGGKRKADSDSEDKGEESKPKKKKEESEKPRGFARGLEPERIIGATDSSGELMFLMKWKNSDEADLVPAKEANVKCPQVVISFYEERLTWHSYPSEDDDKKDDKN

SEQ ID NO: 56405 - protein, 50 aa, Homo sapiens
IEIAHTLCLTERQIKIWFQNRRMKWKKENKTAGPGTTGQDRAEAEEEEEE

SEQ ID NO: 56406 - protein, 48 aa, Homo sapiens
ILEGNDIELVSNSAALIQQATTVKNKDIRKFLNGIYVSEKGTVQQADE

SEQ ID NO: 56407 - protein, 20 aa, Homo sapiens
LEMEDEDTIDVFQQQTGGVY

SEQ ID NO: 56408 - protein, 275 aa, Homo sapiens
VETRGPGSRAARGPRVGMHRRGVGAGAIAKKKLAEAKYKERGTVLAEDQLAQMSKQLDMFKTNLEEFASKHKQEIRKNPEFRVQFQDMCATIGVDPLASGKGFWSEMLGVGDFYYELGVQIIEVCLALKHRNGGLITLEELHQQVLKGRGKFAQDVSQDDLIRAIKKLKALGTGFGIIPVGGTYLIQSVPAELNMDHTVVLQLAEKNGYVTVSEIKASLKWETERARQVLEHLLKEGLAWLDLQAPGEAHYWLPALFTDLYSQEITAEEAREALP

SEQ ID NO: 56409 - protein, 83 aa, Homo sapiens
KQVVPEFVNASADAGGGSATYMDQAPSPAVCPQAHYNMYPQNPDSVLDTDGDFDLEDTMDVARRVEELLGRPMDSQWIPHAQS

SEQ ID NO: 56410 - protein, 756 aa, Homo sapiens
LEQLHQLYSDSFPMELRQFLAPWIESQDWAYAASKESHATLVFHNLLGEIDQQYSRFLQESNVLYQHNLRRIKQFLQSRYLEKPMEIARIVARCLWEESRLLQTAATAAQQGGQANHPTAAVVTEKQQMLEQHLQDVRKRVQDLEQKMKVVENLQDDFDFNYKTLKSQGDMQDLNGNNQSVTRQKMQQLEQMLTALDQMRRSIVSELAGLLSAMEYVQKTLTDEELADWKRRQQIACIGGPPNICLDRLENWITSLAESQLQTRQQIKKLEELQQKVSYKGDPIVQHRPMLEERIVELFRNLMKSAFVVERQPCMPMHPDRPLVIKTGVQFTTKVRLLVKFPELNYQLKIKVCIDKDSGDVAALRGSRKFNILGTNTKVMNMEESNNGSLSAEFKHLTLREQRCGNGGRANCDASLIVTEELHLITFETEVYHQGLKIDLETHSLPVVVISNICQMPNAWASILWYNMLTNNPKNVNFFTKPPIGTWDQVAEVLSWQFSSTTKRGLSIEQLTTLAEKLLGPGVNYSGCQITWAKFCKENMAGKGFSFWVWLDNIIDLVKKYILALWNEGYIMGFISKERERAILSTKPPGTFLLRFSESSKEGGVTFTWVEKDISGKTQIQSVEPYTKQQLNNMSFAEIIMGYKIMDATNILVSPLVYLYPDIPKEEAFGKYCRPESQEHPEADPGSAAPYLKTKFICVTPTTCSNTIDLPMSPRTLDSLMQFGNNGEGAEPSAGGQFESLTFDMELTSECATSPM

SEQ ID NO: 56411 - protein, 812 aa, Homo sapiens
IWQALNHYAYRDAVFLAERLYAEVHSEEALFLLATCYYRSGKAYKAYRLLKGHSCTTPQCKYLLAKCCVDLSKLAEGEQILSGGVFNKQKSHDDIVTEFGDSACFTLSLLGHVYCKTDRLAKGSECYQKSLSLNPFLWSPFESLCEIGEKPDPDQTFKFTSLQNFSNCLPNSCTTQVPNHSLSHRQPETVLTETPQDTIELNRLNLESSNSKYSLNTDSSVSYIDSAVISPDTVPLGTGTSILSKQVQNKPKTGRSLLGGPAALSPLTPSFGILPLETPSPGDGSYLQNYTNTPPVIDVPSTGAPSKKSVARIGQTGTKSVFSQSGNSREVTPILAQTQSSGPQTSTTPQVLSPTITSPPNALPRRSSRLFTSDSSTTKENSKKLKMKFPPKIPNRKTKSKTNKGGITQPNINDSLEITKLDSSIISEGKISTITPQIQAFNLQKAAAGLMSLLREMGKGYLALCSYNCKEAINILSHLPSHHYNTGWVLCQIGRAYFELSEYMQAERIFSEVRRIENYRVEGMEIYSTTLWHLQKDVALSVLSKDLTDMDKNSPEAWCAAGNCFSLQREHDIAIKFFQRAIQVDPNYAYAYTLLGHEFVLTEELDKALACFRNAIRVNPRHYNAWYGLGMIYYKQEKFSLAEMHFQKALDINPQSSVLLCHIGVVQHALKKSEKALDTLNKAIVIDPKNPLCKFHRASVLFANEKYKSALQELEELKQIVPKESLVYFLIGKVYKKLGQTHLALMNFSWAMDLDPKGANNQIKEAIDKRYLPDDEEPITQEEQIMGTDESQESSMTDADDTQLHAAESDEF

SEQ ID NO: 56412 - protein, 80 aa, Homo sapiens
LVTQSAAIVPVRTKKRFTSPIYQPKFKTEKEFMQHARKAGLVIPPEKSDRSIHLACTAGIFDAYVPPEGDARISSLSKER

SEQ ID NO: 56413 - protein, 196 aa, Homo sapiens
TESNQEVANPEHYIKHPLQNRWALWFFKNDKSKTWQANLWLISKFDTVEDFWALYNHIQLSSNLMPGCDYSLFKDGIEPMWEDEKNKRGGRWLITLNKQQRRSDLDRFWLETLLCLIGESFDDYSDDVCGAVVNVRAKGDKIAIWTTECENREAVTHIGRVYKERLGLPPKIVIGYQSHADTATKSGSTTKNRFVV

SEQ ID NO: 56414 - protein, 280 aa, Homo sapiens
KSEVRAKFKFSILNAKGEETKAMESQRAYRFVQGKDWGFKKFIRRDFLLDEANGLLPDDKLTLFCEVSVVQDSVNISGQNTMNMVKVPECRLADELGGLWENSRFTDCCLCVAGQEFQAHKAILAARSPVFSAMFEHEMEESKKNRVEINDVEPEVFKEMMCFIYTGKAPNLDKMADDLLAAADKYALERLKVMCEDALCSNLSVENAAEILILADLHSADQLKTQAVDFINYHASDVLETSGWKSMVVSHPHLVAEAYRSLASAQCPFLGPPRKRLKQS

SEQ ID NO: 56415 - protein, 315 aa, Homo sapiens
VPDRLRLPLCFLGVFVCYFYYGILQEKITRGKYGEGAKQETFTFALTLVFIQCVINAVFAKILIQFFDTARVDRTRSWLYAACSISYLGAMVSSNSALQFVNYPTQVLGKSCKPIPVMLLGVTLLKKKYPLAKYLCVLLIVAGVALFMYKPKKVVGIEEHTVGYGELLLLLSLTLDGLTGVSQDHMRAHYQTGSNHMMLNINLWSTLLLGMGILFTGELWEFLSFAERYPAIIYNILLFGLTSALGQSFIFMTVVYFGPLTCSIITTTRKFFTILASVILFANPISPMQWVGTVLVFLGLGLDAKFGKGAKKTSH

SEQ ID NO: 56416 - protein, 4 aa, Homo sapiens
IQRE

SEQ ID NO: 56417 - protein, 43 aa, Homo sapiens
ISFSSSRSGRRQLHLEGASLELSDDDTESKTSDVNETQPPQSE

SEQ ID NO: 56418 - protein, 26 aa, Homo sapiens
VRSFLWLALDPPWVSNQGCREGRAVS

SEQ ID NO: 56419 - protein, 220 aa, Homo sapiens
KRCSLRARHPALQPPRRPKSSNPFTRAQEEERRRQNKTTLTYVAAVAVGMLGASYAAVPLYRLYCQTTGLGGSAVAGHASDKIENMVPVKDRIIKISFNADVHASLQWNFRPQQTEIYVVPGETALAFYRAKNPTDKPVIGISTYNIVPFEAGQYFNKIQCFCFEEQRLNPQEEVDMPVFFYIDPEFAEDPRMIKVDLITLSYTFFEAKEGHKLPVPGYN

SEQ ID NO: 56420 - protein, 45 aa, Homo sapiens
LVVLSSGLFLLASSALCWKVRQRSKKAKRRESQTALVANQRSLFA

SEQ ID NO: 56421 - protein, 343 aa, Homo sapiens
IQTLKEEIEQSLTKRDEFEFLEKASKLRGISTKPVYIPEVELNHKLIKGIHQSTIDLKNELKQCIGRLQEPTPSSGDPGEHDPASTHKSTRPVKKVSKEEKKSKKPPPVPALPSKLPTFGAPEQLVDLKQAGLEAAAKATSSHPNSTSLKAKVLETFLAKSRPELLEYYIKVILDYNTAHNKVALSECYTVASVAEMPQNYRPHPQRFTYCSQVLGLHCYKKGIHYWEVELQKNNFCGVGICYGSMNRQGPESRLGRNSASWCVEWFNTKISAWHNNVEKTLPSTKATRVGVLLNCDHGFVIFFAVADKVHLMYKFRVDFTEALYPAFWVFSAGATLSICSPK

SEQ ID NO: 56422 - protein, 20 aa, Homo sapiens
LIDPRLIIESPSNTSSTEPA

SEQ ID NO: 56423 - protein, 31 aa, Homo sapiens
LDDVEGHACDEDFRGRRQEAPKVEEGLREGQ

SEQ ID NO: 56424 - protein, 166 aa, Homo sapiens
VTSWPGKQVETLRLWEEAVKARKKEAANLCQTSTAATTPVTLTTPFSITSSVSSGTMSNPVTVAAAMSMRSPVNVSSAVNITSPMNIGHPVTITSPLSMTSPLTLTTPVNLPTPVTAPVNIAHPVTITSPMNLPTPMTLAAPLNIAMRPVESMPFLPQALPTSPPW

SEQ ID NO: 56425 - protein, 124 aa, Homo sapiens
LFFPSAKMALETVPKDLRHLRACLLCSLVKTIDQFEYDGCDNCDAYLQMKGNREMVYDCTSSSFDGIIAMMSPEDSWVSKWQRVSNFKPGVYAVSVTGRLPQGIVRELKSRGVAYKSRDTAIKT

SEQ ID NO: 56426 - protein, 96 aa, Homo sapiens
LEYEIKTNHPDSASEKNPVTLLKELSVIKSRYQTLYARFKPVAVEQKESKSRICATVKKTMNMIQKLQKQTDLELSPLTKEEKTAAEQFKFHMPDL

SEQ ID NO: 56427 - protein, 12 aa, Homo sapiens
KDGATSSHLQIY

SEQ ID NO: 56428 - protein, 117 aa, Homo sapiens
KEGVMVAKKDVHMPKHPELADKNVPNLHVMKAMQSLKCRGYVKEHFAWRHFYWYLTNECIQYLRDYLHLPPEIVPATLRRSRPETGRPRPKGLYMRSAVLPGADKKAEAGAGSATEF

SEQ ID NO: 56429 - protein, 59 aa, Homo sapiens
LTIQNRQAQIEVVPSASALIIKALKEPPETERNRKTLNTVGISLLMRSSTLLDRWSTDP

SEQ ID NO: 56430 - protein, 60 aa, Homo sapiens
KKQKNIKHSGNITFDEIVNLARQMEHRSLARELSGTIKEILGTAQSLWVVMLMAATLMTS

SEQ ID NO: 56431 - protein, 606 aa, Homo sapiens
TEGGGGLREEEAEEAEEEGRKMAAVELEWIPETLYNTAISAVVDNYIRSRRDIRSLPENIQFDVYYKLYQQGRLCQLGSEFCELEVFAKVLRALDKRHLLHHCFQALMDHGVKVASVLAYSFSRRCSYIAESDAAVKEKAIQVGFVLGGFLSDAGWYSDAEKVFLSCLQLCTLHDEMLHWFRAVECCVRLLHVRNGNCKYHLGEETFKLAQTYMDKLSKHGQQANKAALYGELCALLFAKSHYDEAYKWCIEAMKEITAGLPVKVVVDVLRQASKACVVKREFKKAEQLIKHAVYLARDHFGSKHPKYSDTLLDYGFYLLNVDNICQSVAIYQAALDIRQSVFGGKNIHVATAHEDLAYSSYVHQYSSGKFDNALFHAERAIGIITHILPEDHLLLASSKRVKALILEEIAIDCHNKETEQRLLQEAHDLHLSSLQLAKKAFGEFNVQTAKHYGNLGRLYQSMRKFKEAEEMHIKAIQIKEQLLGQEDYEVALSVGHLASLYNYDMNQYENAEKLYLRSIAIGKKLFGEGYSGLEYDYRGLIKLYNSIGNYEKVFEYHNVLSNWNRLRDRQYSVTDALEDVSTSPQSTEEVVQSFLISQNVEGPSC

SEQ ID NO: 56432 - protein, 145 aa, Homo sapiens
VVLALRTRTAVTSLLSPTPATALAVRYASKKSGGSSKNLGGKSSGRRQGIKKMEGHYVHAGNIIATQRHFRWHPGAHVGVGKNKCLYALEEGIVRYTKEVYVPHPRNTEAVDLITRLPKGAVLYKTFVHVVPAKPEGTFKLVAML

SEQ ID NO: 56433 - protein, 344 aa, Homo sapiens
RAQASSFGWGAAELTSDISAPFTRRNPGAGARSAGVTMTKAGSKGGNLRDKLDGNELDLSLSDLNEVPVKELAALPKATILDLSCNKLTTLPSDFCGLTHLVKLDLSKNKLQQLPADFGRLVNLQHLDLLNNKLVTLPVSFAQLKNLKWLDLKDNPLDPVLAKVAGDCLDEKQCKQCANKVLQHMKAVQADQERERQRRLEVEREAEKKREAKQRAKEAQERELRKREKAEEKERRRKEYDALKAAKREQEKKPKKEANQAPKSKSGSRPRKPPPRKHTRSWAVLKLLLLLLLFGVAGGLVACRVTELQQQPLCTSVNTIYDNAVQGLRRHEILQWVLQTDSQQ

SEQ ID NO: 56434 - protein, 1126 aa, Homo sapiens
ILRKERPISLGIFPLPAGDGLLTPDAQKGGETPGSEQWKFQELSQPRSHTSLKDELSDVSQGGSKATTPASTANSDVATIPTDTPLKEENEGFVKVTDAPNKSEISKHIEVQVAQETRNVSTGSAENEEKSEVQAIIESTPELDMDKDLSGYKGSSTPTKGIENKAFDRNTESLFEELSSAGSGLIGDVDEGADLLGMGREVENLILENTQLLETKNALNIVKNDLIAKVDELTCEKDVLQGELEAVKQAKLKLEEKNRELEEELRKARAEAEDARQKAKDDDDSDIPTAQRKRFTRVEMARVLMERNQYKERLMELQEAVRWTEMIRASRENPAMQEKKRSSIWQFFSRLFSSSSNTTKKPEPPVNLKYNAPTSHVTPSVKKRSSTLSQLPGDKSKAFDFLSEETEASLASRREQKREQYRQVKAHVQKEDGRVQAFGWSLPQKYKQVTNGQGENKMKNLPVPVYLRPLDEKDTSMKLWCAVGVNLSGGKTRDGGSVVGASVFYKDVAGLDTEGSKQRSASQSSLDKLDQELKEQQKELKNQEELSSLVWICTSTHSATKVLIIDAVQPGNILDSFTVCNSHVLCIASVPGARETDYPAGEDLSESGQVDKASLCGSMTSNSSAETDSLLGGITVVGCSAEGVTGAATSPSTNGASPVMDKPPEMEAENSEVDENVPTAEEATEATEGNAGSAEDTVDISQTGVYTEHVFTDPLGVQIPEDLSPVYQSSNDSDAYKDQISVLPNEQDLVREEAQKMSSLLPTMWLGAQNGCLYVHSSVAQWRKCLHSIKLKDSILSIVHVKGIVLVALADGTLAIFHRGVDGQWDLSNYHLLDLGRPHHSIRCMTVVHDKVWCGYRNKIYVVQPKAMKIEKSFDAHPRKESQVRQLAWVGDGVWVSIRLDSTLRLYHAHTYQHLQDVDIEPYVSKMLGTGKLGFSFVRITALMVSCNRLWVGTGNGVIISIPLTETVILHQGRLLGLRANKTSGVPGNRPGSVIRVYGDENSDKVTPGTFIPYCSMAHAQLCFHGHRDAVKFFVAVPGQVISPQSSSSGTDLTGDKAGPSAQEPGSQTPLKSMLVISGGEGYIDFRMGDEGGESELLGEDLPLEPSVTKAERSHLIVWQVMYGNE

SEQ ID NO: 56435 - protein, 6 aa, Homo sapiens
KAKSKR

SEQ ID NO: 56436 - protein, 31 aa, Homo sapiens
MSQANVSRAKAVRALKNNSNDIVNAIMELTV

SEQ ID NO: 56437 - protein, 147 aa, Homo sapiens
VGNASVAQDIPKLQKLGITHVLNAAEGRSFMHVNTNANFYKDSGITYLGIKANDTQEFNLSAYFERAADFIDQALAQKNGRVLVHCREGYSRSPTLVIAYLMMRQKMDVKSALSIVRQNREIGPNDGFLAQLCQLNDRLAKEGKLKP

SEQ ID NO: 56438 - protein, 246 aa, Homo sapiens
LQLIMQLGSVLLTRCPFWGCFSQLMLYAERAEARRKPDIPVPYLYFDMGAAVLCASFMSFGVKRRWFALGAALQLAISTYAAYIGGYVHYGDWLKVRMYSRTVAIIGGFLVLASGAGELYRRKPRSRSLQSTGQVFLGIYLICVAYSLQHSKEDRLAYLNHLPGGELMIQLFFVLYGILALAFLSGYYVTLAAQILAVLLPPVMLLIDGNVAYWHNTRRVEFWNQMKLLGESVGIFGTAVILATDG

SEQ ID NO: 56439 - protein, 30 aa, Homo sapiens
LQPLDEAVLQQKPNINAVATLEKVIEIQSA

SEQ ID NO: 56440 - protein, 24 aa, Homo sapiens
LANGHVPFKDMPATQGEDSTVKGI

SEQ ID NO: 56441 - protein, 83 aa, Homo sapiens
KNYPRVSVDTCEYEIPRCSLPIQQRFQPTSKQVQLDGTSFLAVPDAFYLWTPALRLLRHLKKASGTADMHNLGAKTCGTSCDQ

SEQ ID NO: 56442 - protein, 52 aa, Homo sapiens
LPYALAFAAGAMVYVVMDDIIPEAQISGNGKLASWASILGFVVMMSLDVGLG

SEQ ID NO: 56443 - protein, 63 aa, Homo sapiens
INSPDRASGPEGSLSQTMAGSSPNTPQPVPEQSALCQGLYFHINQTLREAHFHSLQHRGRPLT

SEQ ID NO: 56444 - protein, 279 aa, Homo sapiens
LVDAREKLHIPWGDNSNQQHGDKMMSFDTRAPMAAQGMVETRVFLQYLPAIRALWADSGIQNAYDRRREFQLGESVKYFLDNLDKLGEPDYIPSQQDILLARRPTKGIHEYDFEIKNVPFKMVDVGGQRSERKRWFECFDSVTSILFLVSSSEFDQVLMEDRLTNRLTESLNIFETIVNNRVFSNVSIILFLNKTDLLEEKVQIVSIKDYFLEFEGDPHCLRDVQKFLVECFRNKRRDQQQKPLYHHFTTAINTENIRLVFRDVKDTILHDNLKQLMLQ

SEQ ID NO: 56445 - protein, 413 aa, Homo sapiens
IETLLSLEKQTRTASDMVSTSRILVAVVKMCYEAKEWDLLNENIMLLSKRRSQLKQAVAKMVQQCCTYVEEITDLPIKLRLIDTLRMVTEGKIYVEIERARLTKTLATIKEQNGDVKEAASILQELQVETYGSMEKKERVEFILEQMRLCLAVKDYIRTQIISKKINTKFFQEENTEKLKLKYYNLMIQLDQHEGSYLSICKHYRAIYDTPCIQAESEKWQQALKSVVLYVILAPFDNEQSDLVHRISGDKKLEEIPKYKDLLKLFTTMELMRWSTLVEDYGMELRKGSLESPATDVFGSTEEGEKRWKDLKNRVVEHNIRIMAKYYTRITMKRMAQLLDLSVDESEAFLSNLVVNKTIFAKVDRLAGIINFQRPKDPNNLLNDWSQKLNSLMSLVNKTTHLIAKEEMIHNLQ

SEQ ID NO: 56446 - protein, 90 aa, Homo sapiens
KGLGTEAVLAMLSYGVTTLGLTKFEAKIGQGNEPSIRMFQKLHFEQVATSSVFQEVTLRLTVSESEHQWLLEQTSHVEEKPYRDGSAEPC

SEQ ID NO: 56447 - protein, 121 aa, Homo sapiens
RLAALPENPPAIDWAYYKANVAKAGLVDDFEKKFNALKVPVPEDKYTAQVDAEEKEDVKSCAEWVSLSKARIVEYEKEMEKMKNLIPFDQMTIEDLNEAFPETKLDKKKYPYWPHQPIENL

SEQ ID NO: 56448 - protein, 164 aa, Homo sapiens
LEQRRGFLAREQYRALRPDLADKVASVYEAPGFFLDLEPIPGALDAVREMNDLPDTQVFICTSPLLKYHHCVGEKYRWVEQHLGPQFVERIILTRDKTVVLGDLLIDDKDTVRGQEETPSWEHILFTCCHNRHLVLPPTRRRLLSWSDNWREILDSKRGAAQRE

SEQ ID NO: 56449 - protein, 51 aa, Homo sapiens
IHENVDTDLPGSLGQSEEKPVPAAPVPSPVAPAPVPSRRNPPGGKSSLVLG

SEQ ID NO: 56450 - protein, 24 aa, Homo sapiens
IEFRAAGWKTTPAAHKYYYSEVSD

SEQ ID NO: 56451 - protein, 119 aa, Homo sapiens
IKKKIEEVSNTPLLLTVEVQECRGTLAVNIPPPPTDRVWYGFRKPPHVELKARPKLGEREVTLVHVTDWIEKKLEQEFQKVFVMPNMDDVYITIMHSAMDPRSTSCLLKDPPVEAADQP

SEQ ID NO: 56452 - protein, 617 aa, Homo sapiens
IDAMSGYSSDRDRGRDRGFGAPRFGGSRAGPLSGKKFGNPGEKLVKKKWNLDELPKFEKNFYQEHPDLARRTAQEVETYRRSKEITVRGHNCPKPVLNFYEANFPANVMDVIARQNFTEPTAIQAQGWPVALSGLDMVGVAQTGSGKTLSYLLPAIVHINHQPFLERGDGPICLVLAPTRELAQQVQQVAAEYCRACRLKSTCIYGGAPKGPQIRDLERGVEICIATPGRLIDFLECGKTNLRRTTYLVLDEADRMLDMGFEPQIRKIVDQIRPDRQTLMWSATWPKEVRQLAEDFLKDYIHINIGALELSANHNILQIVDVCHDVEKDEKLIRLMEEIMSEKENKTIVFVETKRRCDELTRKMRRDGWPAMGIHGDKSQQERDWVLNEFKHGKAPILIATDVASRGLDVEDVKFVINYDYPNSSEDYIHRIGRTARSTKTGTAYTFFTPNNIKQVSDLISVLREANQAINPKLLQLVEDRGSGRSRGRGGMKDDRRDRYSAGKRGGFNTFRDRENYDRGYSSLLKRDFGAKTQNGVYSAANYTNGSFGSNFVSAGIQTSFRTGNPTGTYQNGYDSTQQYGSNVPNMHNGMNQQAYAYPATAAAPMIGYPMPTGYSQ

SEQ ID NO: 56453 - protein, 27 aa, Homo sapiens
IPPYESYEKLYEKLLTAIEETCGFAVE

SEQ ID NO: 56454 - protein, 6 aa, Homo sapiens
MNRLRL

SEQ ID NO: 56455 - protein, 23 aa, Homo sapiens
VPETTSEGYTFQVQDGAPGTFNF

SEQ ID NO: 56456 - protein, 409 aa, Homo sapiens
KLFSLSSVEQLDQVHGSNEIPDVYIVERLFSSSLVVVVSHTKPRQMNVYHFKKGTEICNYSYSSNILSIRLNRQRLLVCLEESIYIHNIKDMKLLKTLLDIPANPTGLCALSINHSNSYLAYPGSLTSGEIVLYDGNSLKTVCTIAAHEGTLAAITFNASGSKLASASEKGTVIRVFSVPDGQKLYEFRRGMKRYVTISSLVFSMDSQFLCASSNTETVHIFKLEQVTNSRPEEPSTWSGYMGKMFMAATNYLPTQVSDMMHQDRAFATARLNFSGQRNICTLSTIQKLPRLLVASSSGHLYMYNLDPQDGGECVLIKTHSLLGSGTTEENKENDLRPSLPQSYAATVARPSASSASTVPGYSEDGGALRGEVIPEHEFATGPVCLDDENEFPPIILCRGNQKGKTKQS

SEQ ID NO: 56457 - protein, 532 aa, Homo sapiens
LTLLLLGALLSADLYFHLWPQVQRQLRPRERPRGCPCTGRASSLARDSAAAASDPGTIVHNFSRTEPRTEPAGGSHSGSSSKLQALFAHPLYNVPEEPPLLGAEDSLLASQEALRYYRRKVARWNRRHKMYREQMNLTSLDPPLQLRLEASWVQFHLGINRHGLYSRSSPVVSKLLQDMRHFPTISADYSQDEKALLGACDCTQIVKPSGVHLKLVLRFSDFGKAMFKPMRQQRDEETPVDFFYFIDFQRHNAEIAAFHLDRILDFRRVPPTVGRIVNVTKEILEVTKNEILQSVFFVSPASNVCFFAKCPYMCKTEYAVCGNPHLLEGSLSAFLPSLNLAPRLSVPNPWIRSYTLAGKEEWEVNPLYCDTVKQIYPYNNSQRLLNVIDMAIFDFLIGNMDRHHYEMFTKFGDDGFLIHLDNARGFGRHSHDEISILSPLSQCCMIKKKTLLHLQLLAQADYRLSDVMRESLLEDQLSPVLTEPHLLALDRRLQTILRTVEGCIVAHGQQSVIVDGPVEQLAPDSGQANLTS

SEQ ID NO: 56458 - protein, 1146 aa, Homo sapiens
INHTSRFLASIFPEEWLNSLLLLLCLYIYPHSHQVNDFSSLLTMDLGRVDTFNESRFSVVYTPVTNTTQQIMNKVASTPFLAGKEVLGLPDEESIKEFTANYPEEIVRVTFTNTYSYHLKFLLGHGMPAKKEHKDHTAHCYETNEDVYCEVSVFWKEGFVALQAAINAAIIEITTNHSVMEELMSVTGKNMKMHSFIGQSGVITDLYLFSCIISFSSFIYYASVNVTRERKRMKALMTMMGLRDSAFWLSWGLLYAGFIFIMALFLALVIRSTQFIILSGFMVVFSLFLLYGLSLVALAFLMSILVKKSFLTGLVVFLLTVFWGCLGFTSLYRHLPASLEWILSLLSPFAFMLGMAQLLHLDYDLNSNAFPHPSDGSNLIVATNFMLAFDTCLYLALAIYFEKILPNEYGHRRPPLFFLKSSFWSQTQKTDHVALEDEMDADPSFHDSFEQAPPEFQGKEAIRIRNVTKEYKGKPDKIEALKDLVFDIYEGQITAILGHSGAGKSTLLNILSGLSVPTKGSVTIYNNKLSEMADLENLSKLTGVCPQSNVQFDFLTVRENLRLFAKIKGILPQEVDKEIQRVLLELEMKNIQDVLAQNLSGGQKRKLTFGIAILGDPQIFLLDEPTAGLDPFSRHQVWNLLKERKTDRVILFSTQFMDEADILADRKVFLSQGKLKCAGSSLFLKKKWGIGYHLSLQLNEICVEENITSLVKQHIPDAKLSAKSEGKLIYTLPLERTNKFPELYKDLDSYPDLGIENYGVSMTTLNEVFLKLEGKSTINESDIAILGEVQAEKADDTERLVEMEQVLSSLNKMRKTIGGVALWRQQICAIARVRLLKLKHERKALLALLLILMAGFCPLLVEYTMVKIYQNSYTWELSPHLYFLAPGQQPHDPLTQLLIINKTGASIDDFIQSVEHQNIALEVDAFGTRNGTDDPSYNGAITVCCNEKNYSFSLACNAKRLNCFPVLMDIVSNGLLGMVKPSVHIRTERSTFLENGQDNPIGFLAYIMFWLVLTSSCPPYIAMSSIDDYKNRARSQLRISGLSPSAYWFGQALVDVSLYFLVFVFIYLMSYISNFEDMLLTIIHIIQIPCAVGYSFSLIFMTYVISFIFRKGRKNSGIWSFCFYVVSIFLVDVYCIYLIYNSELIL

SEQ ID NO: 56459 - protein, 74 aa, Homo sapiens
LMVYKLPVEDVQPLAQAFFKLEKVKQSFDLEEYSLSQSTLEQVFLELSKEQELGDFEEDFDPSVKWKLLPQEEP

SEQ ID NO: 56460 - protein, 197 aa, Homo sapiens
LAALPALATALALLLAWLLVRRGAAASPEPARAPPEPAPPAEATGAPAPSRPCAPEPAASPAGPEEPGEPAGLGELGEPAGPGEPEGPGDPAAAPAEAEEQAVEARQEEEQDLDGEKGPSSEGPEEEDGEGFSFKYSPGKLRGNQYKKMMTKEELEEEQRVQKEQLAAIFKLMKDNKETFGEMSDGDVQEQLRLYDM

SEQ ID NO: 56461 - protein, 58 aa, Homo sapiens
RQEEEQDLDGEKGPSSEGPEEEDGEGFSFKYSPGKLRGNQYKKMMTKEELEEEQRTEE

SEQ ID NO: 56462 - protein, 21 aa, Homo sapiens
VGNGDTTSQDDCVSKERSSSR

SEQ ID NO: 56463 - protein, 50 aa, Homo sapiens
MTGGGFGGCTVTLLEASAAPHAMRHIQEHYGGTATFYLSQAADGAKVLCL

SEQ ID NO: 56464 - protein, 12 aa, Homo sapiens
KWPKTSALGRRS

SEQ ID NO: 56465 - protein, 49 aa, Homo sapiens
IDPFQSRLDSHFAGLFTHRLKPAFFLESVDAHLQIGPLKKSCISVLKRR

SEQ ID NO: 56466 - protein, 8 aa, Homo sapiens
MITFSFSE

SEQ ID NO: 56467 - protein, 1600 aa, Homo sapiens
KNFLKKWRMKRESLLEWGLSILLGLCIALFSSSMRNVQFPGMAPQNLGRVDKFNSSSLMVVYTPISNLTQQIMNKTALAPLLKGTSVIGAPNKTHMDEILLENLPYAMGIIFNETFSYKLIFFQGYNSPLWKEDFSAHCWDGYGEFSCTLTKYWNRGFVALQTAINTAIIEITTNHPVMEELMSVTAITMKTLPFITKNLLHNEMFILFFLLHFSPLVYFISLNVTKERKKSKNLMKMMGLQDSAFWLSWGLIYAGFIFIISIFVTIIITFTQIIVMTGFMVIFILFFLYGLSLVALVFLMSVLLKKAVLTNLVVFLLTLFWGCLGFTVFYEQLPSSLEWILNICSPFAFTTGMIQIIKLDYNLNGVIFPDPSGDSYTMIATFSMLLLDGLIYLLLALYFDKILPYGDERHYSPLFFLNSSSCFQHQRTNAKVIEKEIDAEHPSDDYFEPVAPEFQGKEAIRIRNVKKEYKGKSGKVEALKGLLFDIYEGQITAILGHSGAGKSSLLNILNGLSVPTEGSVTIYNKNLSEMQDLEEIRKITGVCPQFNVQFDILTVKENLSLFAKIKGIHLKEVEQEVQRILLELDMQNIQDNLAKHLSEGQKRKLTFGITILGDPQILLLDEPTTGLDPFSRDQVWSLLRERRADHVILFSTQSMDEADILADRKVIMSNGRLKCAGSSMFLKRRWGLGYHLSLHRNEICNPEQITSFITHHIPDAKLKTENKEKLVYTLPLERTNTFPDLFSDLDKCSDQGVTGYDISMSTLNEVFMKLEGQSTIEQDFEQVEMIRDSESLNEMELAHSSFSEMQTAVSDMGLWRMQVFAMARLRFLKLKRQTKVLLTLLLVFGIAIFPLIVENIMYAMLNEKIDWEFKNELYFLSPGQLPQEPRTSLLIINNTESNIEDFIKSLKHQNILLEVDDFENRNGTDGLSYNGAIIVSGKQKDYRFSVVCNTKRLHCFPILMNIISNGLLQMFNHTQHIRIESSPFPLSHIGLWTGLPDGSFFLFLVLCSISPYITMGSISDYKKNAKSQLWISGLYTSAYWCGQALVDVSFFILILLLMYLIFYIENMQYLLITSQIVFALVIVTPGYAASLVFFIYMISFIFRKRRKNSGLWSFYFFFASTIMFSITLINHFDLSILITTMVLVPSYTLLGFKTFLEVRDQEHYREFPEANFELSATDFLVCFIPYFQTLLFVFVLRCMELKCGKKRMRKDPVFRISPQSRDAKPNPEEPIDEDEDIQTERIRTATALTTSILDEKPVIIASCLHKEYAGQKKSCFSKRKKKIAARNISFCVQEGEILGLLGPNGAGKSSSIRMISGITKPTAGEVELKGCSSVLGHLGYCPQENVLWPMLTLREHLEVYAAVKGLRKADARLAIARLVSAFKLHEQLNVPVQKLTAGITRKLCFVLSLLGNSPVLLLDEPSTGIDPTGQQQMWQAIQAVVKNTERGVLLTTHNLAEAEALCDRVAIMVSGRLRCIGSIQHLKNKLGKDYILELKVKETSQVTLVHTEILKLFPQAAGQERYSSLLTYKLPVADVYPLSQTFHKLEAVKHNFNLEEYSLSQCTLEKVFLELSKEQEVGNFDEEIDTTMRWKLLPHSDEP

SEQ ID NO: 56468 - protein, 626 aa, Homo sapiens
IRDSLEKSDQLTKNMVSILSSFESRLMKLENSIIPVHKQTENLQRLQENVEKTLSCLDHVISYYHVASDTEKIIREGPTGRLEEYLGSMAKIQKAVEYFQDNSPDSPELNKVKLLFERGKEALESEFRSLMTRHSKVVSPVLILDLISGDDDLEAQEDVTLEHLPESVLQDVIRISRWLVEYGRNQDFMNVYYQIRSSQLDRSIKGLKEHFHKSSSSSGVPYSPAIPNKRKDTPTKKPVKRPGRDDMLDVETDAYIHCVSAFVKLAQSEYQLLADIIPEHHQKKTFDSLIQDALDGLMLEGENIVSAARKAIVRHDFSTVLTVFPILRHLKQTKPEFDQVLQGTAASTKNKLPGLITSMETIGAKALEDFADNIKNDPDKEYNMPKDGTVHELTSNAILFLQQLLDFQETAGAMLASQETSSSATSYSSEFSKRLLSTYICKVLGNLQLNLLSKSKVYEDPALSAIFLHNNYNYILKSLEKSELIQLVAVTQKTAERSYREHIEQQIQTYQRSWLKVTDYIAEKNLPVFQPGVKLRDKERQIIKERFKGFNDGLEELCKIQKAWAIPDTEQRDRIRQAQKTIVKETYGAFLQKFGSVPFTKNPEKYIKYGVEQVGDMIDRLFDTSA

SEQ ID NO: 56469 - protein, 386 aa, Homo sapiens
LAGRDDMLDVETDAYIHCVSAFVKLAQSEYQLLADIIPEHHQKKTFDSLIQDALDGLMLEGENIVSAARKAIVRHDFSTVLTVFPILRHLKQTKPEFDQVLQGTAASTKNKLPGLITSMETIGAKALEDFADNIKNDPDKEYNMPKDGTVHELTSNAILFLQQLLDFQETAGAMLASQETSSSATSYSSEFSKRLLSTYICKVLGNLQLNLLSKSKVYEDPALSAIFLHNNYNYILKSLEKSELIQLVAVTQKTAERSYREHIEQQIQTYQRSWLKVTDYIAEKNLPVFQPGVKLRDKERQIIKERFKGFNDGLEELCKIQKAWAIPDTEQRDRIRQAQKTIVKETYGAFLQKFGSVPFTKNPEKYIKYGVEQVGDMIDRLFDTSA

SEQ ID NO: 56470 - protein, 240 aa, Homo sapiens
LLASMLAKAGLTHIITMDLHQKEIQGFFSFPVDNLRASPFLLQYIQEEIPNYRNAVIVAKSPDAAKRAQSYAERLRLGLAVIHGEAQCTELDMDDGRHSPPMVKNATVHPGLELPLMMAKEKPPITVVGDVGGRIAIIVDDIIDDVESFVAAAEILKERGAYKIYVMATHGILSAEAPRLIEESSVDEVVVTNTVPHEVQKLQCPKIKTVDISLILSEAIRRIHNGESMAYLFRNITVDD

SEQ ID NO: 56471 - protein, 20 aa, Homo sapiens
RRRRIIQTSRDFVKSVLRGT

SEQ ID NO: 56472 - protein, 102 aa, Homo sapiens
IDFSEDARPSPCYQLAQRTFRTFDFYKKHQETMTPAGLSFFQCRWDDSVTYIFHQLLDMREPVFEFVRPPPYHPKQKRFPHRQPLRYLDRYRDSHEPTYGIY

SEQ ID NO: 56473 - protein, 579 aa, Homo sapiens
KANKEFGDSLSLEILQIIKESQQQHGLRHGDFQRYRGYCSRRQRRLRKTLNFKMGNRHKFTGKKVTEELLTDNRYLLLVLMDAERAWSYAMQLKQEANTEPRKRFHLLSRLRKAVKHAEELERLCESNRVDAKTKLEAQAYTAYLSGMLRFEHQEWKAAIEAFNKCKTIYEKLASAFTEEQAVLYNQRVEEISPNIRYCAYNIGDQSAINELMQMRLRSGGTEGLLAEKLEALITQTRAKQAATMSEVEWRGRTVPVKIDKVRIFLLGLADNEAAIVQAESEETKERLFESMLSECRDAIQVVREELKPDQKQRDYILEGEPGKVSNLQYLHSYLTYIKLSTAIKRNENMAKGLQRALLQQQPEDDSKRSPRPQDLIRLYDIILQNLVELLQLPGLEEDKAFQKEIGLKTLVFKAYRCFFIAQSYVLVKKWSEALVLYDRVLKYANEVNSDAGAFKNSLKDLPDVQELITQVRSEKCSLQAAAILDANDAHQTETSSSQVKDNKPLVERFETFCLDPSLVTKQANLVHFPPGFQPIPCKPLFFDLALNHVAFPPLEDKLEQKTKSGLTGYIKGIFGFRS

SEQ ID NO: 56474 - protein, 26 aa, Homo sapiens
TDVTSNFLTVTIKESNTDQGFFKEKR

SEQ ID NO: 56475 - protein, 31 aa, Homo sapiens
LSEFKPFFGNIIITDVTANCLTVTFKEYVTV

SEQ ID NO: 56476 - protein, 24 aa, Homo sapiens
METLARQCLWAASFAGPPPKPRTS

SEQ ID NO: 56477 - protein, 491 aa, Homo sapiens
LLVLGLCRARPRNALLLLADDGGFESGAYNNSAIATPHLDALARRSLLFRNAFTSVSSCSPSRASLLTGLPQHQNGMYGLHQDVHHFNSFDKVRSLPLLLSQAGVRTGIIGKKHVGPETVYPFDFAYTEENGSVLQVGRNITRIKLLVRKFLQTQDDRPFFLYVAFHDPHRCGHSQPQYGTFCEKFGNGESGMGRIPDWTPQAYDPLDVLVPYFVPNTPAARADLAAQYTTVGRMDQGVGLVLQELRDAGVLNDTLVIFTSDNGIPFPSGRTNLYWPGTAEPLLVSSPEHPKRWGQVSEAYVSLLDLTPTILDWFSIPYPSYAIFGSKTIHLTGRSLLPALEAEPLWATVFGSQSHHEVTMSYPMRSVQHRHFRLVHNLNFKMPFPIDQDFYVSPTFQDLLNRTTAGQPTGWYKDLRHYYYRARWELYDRSRDPHETQNLATDPRFAQLLEMLRDQLAKWQWETHDPWVCAPDGVLEEKLSPQCQPLHNEL

SEQ ID NO: 56478 - protein, 211 aa, Homo sapiens
LALGLLLLATLLRPADACSCSPVHPQQAFCNADVVIRAKAVSEKEVDSGNDIYGNPIKRIQYEIKQIKMFKGPEKDIEFIYTAPSSAVCGVSLDVGGKKEYLIAGKAEGDGKMHITLCDFIVPWDTLSTTQKKSLNHRYQMGCECKITRCPMIPCYISSPDECLWMDWVTEKNINGHQAKFFACIKRSDGSCAWYRGAAPPKQEFLDIEDP

SEQ ID NO: 56479 - protein, 12 aa, Homo sapiens
RMEIRLHTRCGG

SEQ ID NO: 56480 - protein, 16 aa, Homo sapiens
RSGLWRLRSRRRHPLS

SEQ ID NO: 56481 - protein, 83 aa, Homo sapiens
RTSSPRSPPSSSEIFTPAHEENVRFIYEAWQGVERDLRGQVPGGERGLVEEYVEKVPNPSLKTFKPIDLSDLKRRSTQDAKKS

SEQ ID NO: 56482 - protein, 194 aa, Homo sapiens
LAQIAAENEEDEHSVNYKPPAQKSIQEIQELDKDDESLRKYKEALLGRVAVSADPNVPNVVVTGLTLVCSSAPGPLELDLTGDLESFKKQSFVLKEGVEYRIKISFRVNREIVSGMKYIQHTYRKGVKIDKTDYMVGSYGPRAEEYEFLTPVEEAPKGMLARGSYSIKSRFTDDDKTDHLSWEWNLTIKKDWKD

SEQ ID NO: 56483 - protein, 304 aa, Homo sapiens
VDEVVPAAPYVTTLETLDKYNCDFCVHGNDITLTVDGRDTYEEVKQAGRYRECKRTQGVSTTDLVGRMLLVTKAHHSSQEMSSEYREYADSFGKCPGGRNPWTGVSQFLQTSQKIIQFASGKEPQPGETVIYVAGAFDLFHIGHVDFLEKVHRLAERPYIIAGLHFDQEVNHYKGKNYPIMNLHERTLSVLACRYVSEVVIGAPYAVTAELLSHFKVDLVCHGKTEIIPDRDGSDPYQEPKRRGIFRQIDSGSNLTTDLIVQRIITNRLEYEARNQKKEAKELAFLEAARQQAAQPLGERDGDF

SEQ ID NO: 56484 - protein, 196 aa, Homo sapiens
LQTSQKIIQFASGKEPQPGETVIYVAGAFDLFHIGHVDFLEKVHRLAERPYIIAGLHFDQEVNHYKGKNYPIMNLHERTLSVLACRYVSEVVIGAPYAVTAELLSHFKVDLVCHGKTEIIPDRDGSDPYQEPKRRGIFRQIDSGSNLTTDLIVQRIITNRLEYEARNQKKEAKELAFLEAARQQAAQPLGERDGDF

SEQ ID NO: 56485 - protein, 164 aa, Homo sapiens
KHFVNLYRYFGDKIQNIFSEEDFRLYREVRQKVQLTIAEAFGISASSLHLTKPTFFSRINSTEARTAHDEYWHAHVDKVTYGSFDYTSLLYLSNYLEDFGGGRFMFMEEGANKTVEPRAGRVSFFTSGSENLHRVEKVHWGTRYAITIAFSCNPDHGIEDPAFP

SEQ ID NO: 56486 - protein, 316 aa, Homo sapiens
MENGFRVYNTDPLKEKEKQEFLEGGVGHVEMLFRCNYLALVGGGKKPKYPPNKVMIWDDLKKKTVIEIEFSTEVKAVKLRRDRIVVVLDSMIKVFTFTHNPHQLHVFETCYNPKGLCVLCPNSNNSLLAFPGTHTGHVQLVDLASTEKPPVDIPAHEGVLSCIALNLQGTRIATASEKGTLIRIFDTSSGHLIQELRRGSQAANIYCINFNQDASLICVSSDHGTVHIFAAEDPKRNKQSSLASASFLPKYFSSKWSFSKFQVPSGSPCICAFGTEPNAVIAICADGSYYKFLFNPKGECIRDVYAQFLEMTDDKL

SEQ ID NO: 56487 - protein, 13 aa, Homo sapiens
MFKNLQTVNVDEN

SEQ ID NO: 56488 - protein, 11 aa, Homo sapiens
RRPQGLAGSGG

SEQ ID NO: 56489 - protein, 100 aa, Homo sapiens
LGLKRAVPGGQRPDNAKPNRDLKLQAGSDLRRRRRDLGPHAEGQLAPRDGVIIGLNPLPDVQVNDLRGALDAQLRQAAGGALQVVHSRQLRQAPGPPEES

SEQ ID NO: 56490 - protein, 9 aa, Homo sapiens
LCRVLTCQG

SEQ ID NO: 56491 - protein, 402 aa, Homo sapiens
RYRLGRKIGSGSFGDIYLGTDIAAGEEVAIKLECVKTKHPQLHIESKIYKMMQGGVGIPTIRWCGAEGDYNVMVMELLGPSLEDLFNFCSRKFSLKTVLLLADQMISRIEYIHSKNFIHRDVKPDNFLMGLGKKGNLVYIIDFGLAKKYRDARTHQHIPYRENKNLTGTARYASINTHLGIEQSRRDDLESLGYVLMYFNLGSLPWQGLKAATKRQKYERISEKKMSTPIEVLCKGYPSEFATYLNFCRSLRFDDKPDYSYLRQLFRNLFHRQGFSYDYVFDWNMLKFGASRAADDAERERRDREERLRHSRNPATRGLPSTASGRLRGTQEVAPPTPLTPTSHTANTSPRPVSGMERERKVSMRLHRGAPVNISSSDLTGRQDTSRMSTSQNSIPFEHHGK

SEQ ID NO: 56492 - protein, 18 aa, Homo sapiens
VAATSVITIVKSKTDARS

SEQ ID NO: 56493 - protein, 327 aa, Homo sapiens
LGQGSPDSMSVGFIGAGQLAFALAKGFTAAGVLAAHKIMASSPDMDLATVSALRKMGVKLTPHNKETVQHSDVLFLAVKPHIIPFILDEIGADIEDRHIVVSCAAGVTISSIEKKLSAFRPAPRVIRCMTNTPVVVREGATVYATGTHAQVEDGRLMEQLLSSVGFCTEVEEDLIDAVTGLSGSGPAYAFTALDALADGGVKMGLPRRLAVRLGAQALLGAAKMLLHSEQHPGQLKDNVSSPGGATIHALHVLESGGFRSLLINAVEASCIRTRELQSMADQEQVSPAAIKKTILDKVKLDSPAGTALSPSGHTKLLPRSLAPAGKD

SEQ ID NO: 56494 - protein, 61 aa, Homo sapiens
LHFKDDKTKVSGDALQLMVELLKVFVVEAAVRGVRQAQAEDALRVDVDQLEKVLPQLLLDF

SEQ ID NO: 56495 - protein, 253 aa, Homo sapiens
LRTWISRARQQTFIFTDGDDPELELQGGDRVINTNCSAVRTRQALCCKMSVEYDKFIESGRKWFCHVDDDNYVNARSLLHLLSSFSPSQDVYLGRPSLDHPIEATERVQGGRTVTTVKFWFATGGAGFCLSRGLALKMSPWASLGSFMSTAEQVRLPDDCTVGYIVEGLLGARLLHSPLFHSHLENLQRLPPDTLLQQVTLSHGGPENPHNVVNVAGGFSLHQDPTRFKSIHCLLYPDTDWCPRQKQGAPTSR

SEQ ID NO: 56496 - protein, 7 aa, Homo sapiens
RPRMSGR

SEQ ID NO: 56497 - protein, 4 aa, Homo sapiens
MSRV

SEQ ID NO: 56498 - protein, 135 aa, Homo sapiens
IFQILYANEGECRKDVEMEPVQEAEKTNFQNHKGHEFIPTLYHFPANCDACAKPLWHVFKPPPALECQRRHVKCHRDHLDKKEDLICPCKVSYDVTSARDMLLLACSQDEQKKWVTHLVKKIPKNPPSGFVRASP

SEQ ID NO: 56499 - protein, 47 aa, Homo sapiens
IQLQREPRPFPKLRILRKVEKIDDFKAEDFQIEGYNPHPTIKMEMAV

SEQ ID NO: 56500 - protein, 45 aa, Homo sapiens
VTFSFPRITSFYTFHFSSEITAMPVCAFWSEERRPWPLPGKSIYF

SEQ ID NO: 56501 - protein, 1451 aa, Homo sapiens
RGLGTCLATLAGLLLTAAGETFSGGCLFDEPYSTCGYSQSEGDDFNWEQVNTLTKPTSDPWMPSGSFMLVNASGRPEGQRAHLLLPQLKENDTHCIDFHYFVSSKSNSPPGLLNVYVKVNNGPLGNPIWNISGDPTRTWNRAELAISTFWPNFYQVIFEVITSGHQGYLAIDEVKVLGHPCTRTPHFLRIQNVEVNAGQFATFQCSAIGRTVAGDRLWLQGIDVRDAPLKEIKVTSSRRFIASFNVVNTTKRDAGKYRCMIRTEGGVGISNYAELVVKEPPVPIAPPQLASVGATYLWIQLNANSINGDGPIVAREVEYCTASGSWNDRQPVDSTSYKIGHLDPDTEYEISVLLTRPGEGGTGSPGPALRTRTKCADPMRGPRKLEVVEVKSRQITIRWEPFGYNVTRCHSYNLTVHYCYQVGGQEQVREEVSWDTENSHPQHTITNLSPYTNVSVKLILMNPEGRKESQELIVQTDEDLPGAVPTESIQGSTFEEKIFLQWREPTQTYGVITLYEITYKAVSSFDPEIDLSNQSGRVSKLGNETHFLFFGLYPGTTYSFTIRASTAKGFGPPATNQFTTKISAPSMPAYELETPLNQTDNTVTVMLKPAHSRGAPVSVYQIVVEEERPRRTKKTTEILKCYPVPIHFQNASLLNSQYYFAAEFPADSLQAAQPFTIGDNKTYNGYWNTPLLPYKSYRIYFQAASRANGETKIDCVQVATKGAATPKPVPEPEKQTDHTVKIAGVIAGILLFVIIFLGVVLVMKKRKLAKKRKETMSSTRQEMTVMVNSMDKSYAEQGTNCDEAFSFMDTHNLNGRSVSSPSSFTMKTNTLSTSVPNSYYPDETHTMASDTSSLVQSHTYKKREPADVPYQTGQLHPAIRVADLLQHITQMKCAEGYGFKEEYESFFEGQSAPWDSAKKDENRMKNRYGNIIAYDHSRVRLQTIEGDTNSDYINGNYIDGYHRPNHYIATQGPMQETIYDFWRMVWHENTASIIMVTNLVEVGRVKCCKYWPDDTEIYKDIKVTLIETELLAEYVIRTFAVEKRGVHEIREIRQFHFTGWPDHGVPYHATGLLGFVRQVKSKSPPSAGPLVVHCSAGAGRTGCFIVIDIMLDMAEREGVVDIYNCVRELRSRRVNMVQTEEQYVFIHDAILEACLCGDTSVPASQVRSLYYDMNKLDPQTNSSQIKEEFRTLNMVTPTLRVEDCSIALLPRNHEKNRCMDILPPDRCLPFLITIDGESSNYINAALMDSYKQPSAFIVTQHPLPNTVKDFWRLVLDYHCTSVVMLNDVDPAQLCPQYWPENGVHRHGPIQVEFVSADLEEDIISRIFRIYNAARPQDGYRMVQQFQFLGWPMYRDTPVSKRSFLKLIRQVDKWQEEYNGGEGRTVVHCLNGGGRSGTFCAISIVCEMLRHQRTVDVFHAVKTLRNNKPNMVDLLDQYKFCYEVALEYLNSG

SEQ ID NO: 56502 - protein, 42 aa, Homo sapiens
IDTSGGPLDLMACRVVAASTREMAMLIAQALQTINYGRDDEK

SEQ ID NO: 56503 - protein, 42 aa, Homo sapiens
LLSPGTAWLRAHDGDTGAQSVPSRGHWGWEIKHRVSICPGSL

SEQ ID NO: 56504 - protein, 187 aa, Homo sapiens
VCLLGDTGVGKSSIVCRFVQDHFDHNISPTIGASFMTKTVPCGNELHKFLIWDTAGQERFHSLAPMYYRGSAAAVIVYDITKQDSFYTLKKWVKELKEHGPENIVMAIAGNKCDLSDIREVPLKDAKEYAESIGAIVVETSAKNAINIEELFQGISRQIPPLDPHENGNNGTIKVEKPTMQASRRCC

SEQ ID NO: 56505 - protein, 507 aa, Homo sapiens
LLRYLFPALLLHGLGEGSALLHPDSRSHPRSLEKSAWRAFKESQCHHMLKHLHNGARITVQMPPTIEGHWVSTGCEVRSGPEFITRSYRFYHNNTFKAYQFYYGSNRCTNPTYTLIIRGKIRLRQASWIIRGGTEADYQLHNVQVICHTEAVAEKLGQQVNRTCPGFLADGGPWVQDVAYDLWREENGCECTKAVNFAMHELQLIRVEKQYLHHNLDHLVEELFLGDIHTDATQRMFYRPSSYQPPLQNAKNHDHACIACRIIYRSDEHHPPILPPKADLTIGLHGEWVSQRCEVRPEVLFLTRHFIFHDNNNTWEGHYYHYSDPVCKHPTFSIYARGRYSRGVLSSRVMGGTEFVFKVNHMKVTPMDAATASLLNVFNGNECGAEGSWQVGIQQDVTHTNGCVALGIKLPHTEYEIFKMEQDARGRYLLFNGQRPSDGSSPDRPEKRATSYQMPLVQCASSSPRAEDLAEDSGSSLYGRAPGRHTWSLLLAALACLVPLLHWNIRR

SEQ ID NO: 56506 - protein, 285 aa, Homo sapiens
KPDYDSAASEYGKAAVAFKNAKQFEQAKDACLREAVAHENNRALFHAAKAYEQAGMMLKEMQKLPEAVQLIEKASMMYLENGTPDTAAMALERAGKLIENVDPEKAVQLYQQTANVFENEERLRQAVELLGKASRLLVRGRRFDEAALSIQKEKNIYKEIENYPTCYKKTIAQVLVHLHRNDYVAAERCVRESYSIPGFNGSEDCAALEQLLEGYDQQDQDQVSDVCNSPLFKYMDNDYAKLGLSLVVPGGGIKKKSPATPQAKPDGVTATAADEEEDEYSGGLC

SEQ ID NO: 56507 - protein, 113 aa, Homo sapiens
LMKLSHETVTIELKNGTQVHGTITGVDVSMNTHLKAVKMTLKNREPVQLETLSIRGNNIRYFILPDSLPLDTLLVDVEPKVKSKKREAVAGRGRGRGRGRGRGRGRGRGGPRR

SEQ ID NO: 56508 - protein, 159 aa, Homo sapiens
KKCLICKEQVQSRTKIEECVVCSDKKAAVLFQPCGHMCACENCANLMKKCVQCRAVVERRVPFIMCCGGKSSEDATDDISSGNIPVLQKDKDNTNVNADVQKLQQQLQDIKEQTMCPVCLDRLKNMIFLCGHGTCQLCGDRMSECPICRKAIERRILLY

SEQ ID NO: 56509 - protein, 26 aa, Homo sapiens
IGVSLASPAEVTSSVRPDSWCALALA

SEQ ID NO: 56510 - protein, 300 aa, Homo sapiens
LQRGAHGPPGPLQRAEAEPGADPPRAAEAEGAPGPGARSRGAGGGGRRAEREPHACMDPGAALQRRAGGGGGLGAGSPALSGGQGRRRKQPPRPADFKLQVIIIGSRGVGKTSLMERFTDDTFCEACKSTVGVDFKIKTVELRGKKIRLQIWDTAGQERFNSITSAYYRSAKGIILVYDITKKETFDDLPKWMKMIDKYASEDAELLLVGNKLDCETDREITRQQGEKFAQQITGMRFCEASAKDNFNVDEIFLKLVDDILKKMPLDILRNELSNSILSLQPEPEIPPELPPPRPHVRCC

SEQ ID NO: 56511 - protein, 66 aa, Homo sapiens
LNVKNVMVVVSRWYGGILLGPDRFKHINNCARNILVEKNYTNSPEESSKALGKNKKVRKDKKRNEH

SEQ ID NO: 56512 - protein, 499 aa, Homo sapiens
KCPWAIPQNTISCSLADVMSEQLAKELQLEEEAAVFPEVAVAEGPFITGENIDTSSDLMLAQMLQMEYDREYDAQLRREEKKFNGDSKVSISFENYRKVHPYEDSDSSEDEVDWQDTRDDPYRPAKPVPTPKKGFIGKGKDITTKHDEVVCGRKNTARMENFAPEFQVGDGIGMDLKLSNHVFNALKQHAYSEERRSARLHEKKEHSTAEKAVDPKTRLLMYKMVNSGMLETITGCISTGKESVVFHAYGGSMEDEKEDSKVIPTECAIKVFKTTLNEFKNRDKYIKDDFRFKDRFSKLNPRKIIRMWAEKEMHNLARMQRAGIPCPTVVLLKKHILVMSFIGHDQVPAPKLKEVKLNSEEMKEAYYQTLHLMRQLYHECTLVHADLSEYNMLWHAGKVWLIDVSQSVEPTHPHGLEFLFRDCRNVSQFFQKGGVKEALSERELFNAVSGLNITADNEADFLAEIEALEKMNEDHVQKNGRKAASFLKDDGDPPLLYDE

SEQ ID NO: 56513 - protein, 13 aa, Homo sapiens
MGYSSKYNILFFG

SEQ ID NO: 56514 - protein, 37 aa, Homo sapiens
LLNNGFRESDQLFKQYRKSFLTSEKTSALPGETQRRL

SEQ ID NO: 56515 - protein, 164 aa, Homo sapiens
RKNNQIEQFSVKKAERFRKQTPTKALCVLASIEVLYLWKALPNCSFPNLQRMSQACHEVDDSSVVGLKYLLLGAIHKCLGNSEDAVQYFQRAVKDELCRQNNLYVQPYACYELGCLLLDKPETVGRGRALLLQAKEDFSGYDFENRLHVRIHAALASLRELVPQ

SEQ ID NO: 56516 - protein, 494 aa, Homo sapiens
MYLLQLVQALKYENFDDIKNGLEPTKKDSQSSVSENVSNSGINSAEIDSSQIITSPLPSVSSPPPASKTKEVPDGENLEQDLCTFLISRACKNSTLANYLYWYVIVECEDQDTQQRDPKTHEMYLNVMRRFSQALLKGDKSVRVMRSLLAAQQTFVDRLVHLMKAVQRESGNRKKKNERLQALLGDNEKMNLSDVELIPLPLEPQVKIRGIIPETATLFKSALMPAQLFFKTEDGGKYPVIFKHGDDLRQDQLILQIISLMDKLLRKENLDLKLTPYKVLATSTKHGFMQFIQSVPVAEVLDTEGSIQNFFRKYAPSENGPNGISAEVMDTYVKSCAGYCVITYILGVGDRHLDNLLLTKTGKLFHIDFGYILGRDPKPLPPPMKLNKEMVEGMGGTQSEQYQEFRKQCYTAFLHLRRYSNLILNLFSLMVDANIPDIALEPDKTVKKVQDKFRLDLSDEEAVHYMQSLIDESVHALFAAVVEQIHKFAQYWRK

SEQ ID NO: 56517 - protein, 171 aa, Homo sapiens
KDTSLASFIPAVNDLTSDLFRTKSKSEEIKIELEKLEKNLTATLVLEKCLQEDVKKAELHLSTERAKVDNRRQNMDFLKAKSEEFRFGIKAAEEQLSARGMDASLSHQSLVALSEKLARLKQQTIPLKKKLESYLDLMPNPSLAQVKIEEAKRELDSIEAELTRRVDMMEL

SEQ ID NO: 56518 - protein, 45 aa, Homo sapiens
RRGSSKQTSPYISYQNWVTCSHLKQPLAIRNGVTMPVLDQSHLIL

SEQ ID NO: 56519 - protein, 182 aa, Homo sapiens
IYQKAVSDRSFAFTAAKLCDKMALFMVEGTKFRSLLLNMLQKDFTVREELQQQDVERWLGFITFLCEVFGTMRSSTGEPFRVLVCPIYTCLRELLQSQDVKEDAVLCCSMELQSTGRLLEEQLPEMMTELLASARDKMLCPSESMLTRSLLLEVIELHANSWNPLTPPITQYYNRTIQKLTA

SEQ ID NO: 56520 - protein, 86 aa, Homo sapiens
TQVIQLNEQVHSLKLALEGVEKERDFYFGKLREIELLCQEHGQENDDLVQRLMDILYASEEHEGHTEEPEAEEQAHEQQPPQQEEY

SEQ ID NO: 56521 - protein, 57 aa, Homo sapiens
KDLTCLRASQESTDIHLQPLKTQLKSWKPCLSPKSGEEWEIIWKLLTLRPLFLRMQN

SEQ ID NO: 56522 - protein, 544 aa, Homo sapiens
IWVLLDMFLLLYFSECNKCDEKKERGLPAGDVLEPVQKPHEGPGEMGKPVVIPKEDQEKMKEMFKINQFNLMASEMIALNRSLPDVRLEGCKTKVYPDNLPTTSVVIVFHNEAWSTLLRTVHSVINRSPRHMIEEIVLVDDASERDFLKRPLESYVKKLKVPVHVIRMEQRSGLIRARLKGAAVSKGQVITFLDAHCECTVGWLEPLLARIKHDRRTVVCPIIDVISDDTFEYMAGSDMTYGGFNWKLNFRWYPVPQREMDRRKGDRTLPVRTPTMAGGLFSIDRDYFQEIGTYDAGMDIWGGENLEISFRIWQCGGTLEIVTCSHVGHVFRKATPYTFPGGTGQIINKNNRRLAEVWMDEFKNFFYIISPGVTKVDYGDISSRVGLRHKLQCKPFSWYLENIYPDSQIPRHYFSLGEIRNVETNQCLDNMARKENEKVGIFNCHGMGGNQVFSYTANKEIRTDDLCLDVSKLNGPVTMLKCHHLKGNQLWEYDPVKLTLQHVNSNQCLDKATEEDSQVPSIRDCNGSRSQQWLLRNVTLPEIF

SEQ ID NO: 56523 - protein, 64 aa, Homo sapiens
KSPASVFRTPTSGQSVSTCSSKNTSKTKKHFSQLKMLLSQNESQKIPKVDFRNFLSSLKGGLLK

SEQ ID NO: 56524 - protein, 93 aa, Homo sapiens
MSNGPYQSSAATSGGAGHYHSLQDPFHGVYHSHPGNPSNVTPADSCHCSRTPDAFISSFAHHASCHFSRSNVPVETTDEIPFSFSDRLRISEK

SEQ ID NO: 56525 - protein, 87 aa, Homo sapiens
IVHRVIKVHEKDNGDIKFLTKGDNNEVDDRGLYKEGQNWLEKKDVVGRARGFLPYVGMVTIIMNDYPKFKYALLAVMGAYVLLKRES

SEQ ID NO: 56526 - protein, 29 aa, Homo sapiens
IASDGLKGRVFEVSLADLQNDEVAFRKFS

SEQ ID NO: 56527 - protein, 39 aa, Homo sapiens
LDLSSPCFLSVGSQVLPVLKENVEGHDLPASEKHQDVTS

SEQ ID NO: 56528 - protein, 546 aa, Homo sapiens
MTNNTGAELSPPGAAALPGVSGSGDERVMMELNHLKDKVQVVEDICLLNIQGKPHGMEGALPNREDRAVRDSLHLLKSLNDTMHRKFQETEQTIQKLQQDFSFLYSQLNHTENDVTHLQKEMSNCRAGENAGMGRFTKVGEQERTVDTLPSPQHPVAHCCSQLEERWQRLQSQVISELDACKECTQGVQREVSMVEGRVSHMEKTCSKLDSISGNLQRIKEGLNKHVSSLWNCVRQMNGTLRSHSRDISGLKNSVQQFYSHVFQISTDLQDLVKFQPSAKAPSPPPPAEAPKEPLQPEPAPPRPSGPATAEDPGRRPVLPQRPPEERPPQPPGSTGVIAETGQAGPPAGAGVSGRGLPRGVDGQTGSGTVPGAEGFAGAPGYPKSPPVASPGAPVPSLVSFSAGLTQKPFPSDGGVVLFNKVLVNDGDVYNPSTGVFTAPYDGRYLITATLTPERDAYVEAVLSVSNASVAQLHTAGYRREFLEYHRPPGALHTCGGPGAFHLIVHLKAGDAVNVVVTGGKLAHTDFDEMYSTFSGVFLYPFLSHL

SEQ ID NO: 56529 - protein, 269 aa, Homo sapiens
MKGIVAASGSETEDEDSMDIPLDLSSSAGSGKRRRRGNLPKESVQILRDWLYEHRYNAYPSEQEKALLSQQTHLSTLQVCNWFINARRRLLPDMLRKDGKDPNQFTISRRGAKISETSSVESVMGIKNFMPALEETPFHSCTAGPNPTLGRPLSPKPSSPGSVLARPSVICHTTVTALKDVPFSLCQSVGVGQNTDIQQIAAKNFTDTSLMYPEDTCKSGPSTNTQSGLFNTPPPTPPDLNQDFSGFQLLVDVALKRAAEMELQAKLTA

SEQ ID NO: 56530 - protein, 36 aa, Homo sapiens
ILQSKKKRCCPSKHTCLRYRSVTGSSTPAAGSSLTC

SEQ ID NO: 56531 - protein, 46 aa, Homo sapiens
VKMTDDELVYNVHLAVNFLVSLLKKNWQNVRALYIKSTMGKPRCLY

SEQ ID NO: 56532 - protein, 45 aa, Homo sapiens
VSRFMQVRSLQYLCRFVIRQYTRIDLIQKLPLPNKMKDYLQEKHY

SEQ ID NO: 56533 - protein, 58 aa, Homo sapiens
TCVKFYIEGSEPGKQGTVYAQVKENPGSGEYDFRYIFVEIESYPRRTIIIEDNRSQDD

SEQ ID NO: 56534 - protein, 36 aa, Homo sapiens
IAASLVSEDTKTKFLNKMGQLTTSGAMLANVFQRKK

SEQ ID NO: 56535 - protein, 502 aa, Homo sapiens
IYIMGIQERNEKLFYRILQDDIESLMPIVYTPTVGLACSQYGHIFRRPKGLFISISDRGHVRSIVDNWPENHVKAVVVTDGERILGLGDLGVYGMGIPVGKLCLYTACAGIRPDRCLPVCIDVGTDNIALLKDPFYMGLYQKRDRTQQYDDLIDEFMKAITDRYGRNTLIQFEDFGNHNAFRFLRKYREKYCTFNDDIQGTAAVALAGLLAAQKVISKPISEHKILFLGAGEAALGIANLIVMSMVENGLSEQEAQKKIWMFDKYGLLVKGRKAKIDSYQEPFTHSAPESIPDTFEDAVNILKPSTIIGVAGAGRLFTPDVIRAMASINERPVIFALSNPTAQAECTAEEAYTLTEGRCLFASGSPFGPVKLTDGRVFTPGQGNNVYIFPGVALAVILCNTRHISDSVFLEAAKALTSQLTDEELAQGRLYPPLANIQEVSINIAIKVTEYLYANKMAFRYPEPEDKAKYVKERTWRSEYDSLLPDVYEWPESASSPPVITE

SEQ ID NO: 56536 - protein, 33 aa, Homo sapiens
IDPQVFYELPEAVQKELLAEWKRAGSDFHIGHK

SEQ ID NO: 56537 - protein, 467 aa, Homo sapiens
KYIDENQDRYIKKLAKWVAIQSVSAWPEKRGEIRRMMEVAAADVKQLGGSVELVDIGKQKLPDGSEIPLPPILLGRLGSDPQKKTVCIYGHLDVQPAALEDGWDSEPFTLVERDGKLYGRGSTDDKGPVAGWINALEAYQKTGQEIPVNVRFCLEGMEESGSEGLDELIFARKDTFFKDVDYVCISDNYWLGKKKPCITYGLRGICYFFIEVECSNKDLHSGVYGGSVHEAMTDLILLMGSLVDKRGNILIPGINEAVAAVTEEEHKLYDDIDFDIEEFAKDVGAQILLHSHKKDILMHRWRYPSLSLHGIEGAFSGSGAKTVIPRKVVGKFSIRLVPNMTPEVVGEQVTSYLTKKFAELRSPNEFKVYMGHGGKPWVSDFSHPHYLAGRRAMKTVFGVEPDLTREGGSIPVTLTFQEATGKNVMLLPVGSADDGAHSQNEKLNRYNYIEGTKMLAAYLYEVSQLKD

SEQ ID NO: 56538 - protein, 27 aa, Homo sapiens
LFRADHPFLFVIRKDDIILFSGKVSCP

SEQ ID NO: 56539 - protein, 31 aa, Homo sapiens
IVMVTLQGFVGPWYRNLFRFLLLFSYIIPIR

SEQ ID NO: 56540 - protein, 76 aa, Homo sapiens
LIIFDYISVSASLENRVCEYVDHLHEHFKYPVMIQRASYMPPKDPGYSTEMKEESVKKHQYPDGEVWKKLLPAQEN

SEQ ID NO: 56541 - protein, 41 aa, Homo sapiens
VEQTIMALQMDRDSDVKYFASIHPASTKISEDAMSTASSTY

SEQ ID NO: 56542 - protein, 37 aa, Homo sapiens
IYCGVVGFLVVLTLTHFGLLASPFLSGLNLLGKRKTR

SEQ ID NO: 56543 - protein, 31 aa, Homo sapiens
RARLKRKTQSFYMSSPGPSEYCPSERTISEI

SEQ ID NO: 56544 - protein, 38 aa, Homo sapiens
RLECVEPNCRSKRMLAIKRCKHFELGGDKKRKGQVIPF

SEQ ID NO: 56545 - protein, 210 aa, Homo sapiens
MGINGSAYRVFPYSVFYVFYEQYLTIIDDTIFNLGVSLGAIFLVTMVLLGCELWSAVIMCATIAMVLVNMFGVMWLWGISLNAVSLVNLVMSCGISVEFCSHITRAFTVSMKGSRVERAEEALAHMGSSVFSGITLTKFGGIVVLAFAKSQIFQIFYFRMYLAMVLLGATHGLIFLPVLLSYIGPSVNKAKSCATEERYKGTERERLLNF

SEQ ID NO: 56546 - protein, 97 aa, Homo sapiens [sequence omitted]

SEQ ID NO: 56547 - protein, 42 aa, Homo sapiens
KSEEDWKTRWFHQGPNPYNGAQDWIYSGSYWDRNYFNLPDIY

SEQ ID NO: 56548 - protein, 579 aa, Homo sapiens
LENAKKLSMYGVDLHHAKDSEGVEIMLGVCASGLLIYRDRLRINRFAWPKVLKISYKRNNFYIKIRPGEFEQFESTIGFKLPNHRAAKRLWKVCVEHHTFFRLLLPEAPPKKFLTLGSKFRYSGRTQAQTRRASALIDRPAPYFERSSSKRYTMSRSLDGASVNENHEIYMKDSMSAAEVGTGQYATTKGISQTNLITTVTPEKKAEEERDEEEDKRRKGEEVTPISAIRHEGKTDSERTDTAADGETTATEELEKTQDDLMKHQTNISELKRTFLETSTDTAVTNEWEKRLSTSPVRLAARQEDAPMIEPLVPEEKMETKTESSGIETEPTVHHLPLSTEKVVQETVLVEERRVVHASGDASYSAGDSGDAAAQPAFTGIKGKEGSALTEGAKEEGGEEVAKAVLEQEETAAASRERQEEQSAAIHISETLEQKPHFESSTVKTETISFGSVSPGGVKLEISTKEVPVVHTETKTITYESSQVDPGTDLEPGVLMSAQTITSETTSTTTTTHITKTVKGGISETRIEKRIVITGDADIDHDQALAQAIKEAKEQHPDMSVTKVVVHKETEITPEDGED

SEQ ID NO: 56549 - protein, 406 aa, Homo sapiens
KGEITPAAIQKMLDDNNHLIQCIMDSQNKGKTSECSQYQQMLHTNLVYLATIADSNQNMQSLLPAPPTQNMPMGPGGMNQSGPPPPPRSHNMPSDGMVGGGPPAPHMQNQMNGQMPGPNHMPMQGPGPNQLNMTNSSMNMPSSSHGSMGGYNHSVPSSQSMPVQNQMTMSQGQPMGNYGPRPNMSMQPNQGPMMHQQPPSQQYNMPQGGGQHYQGQQPPMGMMGQVNQGNHMMGQRQIPPYRPPQQGPPQQYSGQEDYYGDQYSHGGQGPPEGMNQQYYPDGHNDYGYQQPSYPEQGYDRPYEDSSQHYYEGGNSQYGQQQDAYQGPPPQQGYPPQQQQYPGQQGYPGQQQGYGPSQGGPGPQYPNYPQGQGQQYGGYRPTQPGPPQPPQQRPYGYDQGQYGNYQQ

SEQ ID NO: 56550 - protein, 53 aa, Homo sapiens
RKFTVWPTARCIPGTTSTTGISTPAAAVPRAARLPRTAAGLRSFTGWSRSSVS

SEQ ID NO: 56551 - protein, 28 aa, Homo sapiens
LEFVADEGICYLPHWMMQNLLLEEGSLV

SEQ ID NO: 56552 - protein, 1341 aa, Homo sapiens [sequence omitted]

SEQ ID NO: 56553 - protein, 4 aa, Homo sapiens
ISNV

SEQ ID NO: 56554 - protein, 29 aa, Homo sapiens
IVLTTSAGIMDHEEAKTKTHRRENPRILF

SEQ ID NO: 56555 - protein, 307 aa, Homo sapiens
RKLFIGGLSFETTDESLRSHFEQWGTLTDCVVMRDPNTKRSRGFGFVTYATVEEVDAAMNARPHKVDGRVVEPKRAVSREDSQRPGAHLTVKKIFVGGIKEDTEEHHLRDYFEQYGKIEVIEIMTDRGSGKKRGFAFVTFDDHDSVDKIVIQKYHTVNGHNCEVRKALSKQEMASASSSQRGRSGSGNFGGGRGGGFGGNDNFGHGGNFSGRGGFGGSRAGGRYGGSGDGSNGFGNDGSNFGGGGSYNDFGNYNNQSSNFGPMKGGNFGGRNSGPYGGGGQYFAKPRNQGGYGGSSSSSSCVSGRRF

SEQ ID NO: 56556 - protein, 6 aa, Homo sapiens
RWFRWE

SEQ ID NO: 56557 - protein, 77 aa, Homo sapiens
LGRLVHRKTCTTVAFTQVNSEDKGTLAKLMEAIRTNYNDRYDEIRRHWGGNVLGPKSVARIAKLEKAKAKDLATKLG

SEQ ID NO: 56558 - protein, 29 aa, Homo sapiens
LWLIHHRKHSRPIVTVWERELRKEWRCNK

SEQ ID NO: 56559 - protein, 92 aa, Homo sapiens
MLLADYNGRLAAEIDDRKQLTRMLADFLRCQKEALAEKEHKLEEYKRKLARVSLVRKELRSRIQSLPDLSRLPNVTGSHMHLPFAGDIYSED

SEQ ID NO: 56560 - protein, 5 aa, Homo sapiens
IDQTI

SEQ ID NO: 56561 - protein, 231 aa, Homo sapiens
LMTNGFHMTWSVKLDEHIIPLGSMAINSISKLTQLTQSSMYSLPNAPTLADLEDDTHEASDDQPEKPHFDSRSVIFELDSCNGSGKVCLVYKSGKPALAEDTEIWFLDRALYWHFLTDTFTAYYRLLITHLGLPQWQYAFTSYGISPQAKQWFSMYKPITYNTNLLTEETDSFVNKLDPSKVFKSKNKIVIPKKKGPVQPAGGQKGPSGPSGPSTSSTSKSSSGSGNPTRK

SEQ ID NO: 56562 - protein, 73 aa, Homo sapiens
IPCIVIPVLLWIYKKFLEPYIYPLVSPFVSRIWPKKAIQESNDTNKGKVNFKGADMNGLPTKGPTEICDKKKD

SEQ ID NO: 56563 - protein, 38 aa, Homo sapiens
KTRKRQVGPQSGEVRKEAPRDETKADTDTAPASFPAPG

SEQ ID NO: 56564 - protein, 25 aa, Homo sapiens
LVFLLGIVLHNMSCISKRFTVISCG

SEQ ID NO: 56565 - protein, 61 aa, Homo sapiens
MALHFFFLVKDYGSWLDIGTSISHYVIVMSMTIFLVFLNGLAQLLTTKKLRLCGKPKSHFM

SEQ ID NO: 56566 - protein, 126 aa, Homo sapiens
VKYYTLEEIQKHNHSKSTWLILHHKVYDLTKFLEEHPGGEEVLREQAGGDATENFEDVGHSTDAREMSKTFIIGELHPDDRPKLNKPPETLITTIDSSSSWWTNWVIPAISAVAVALMYRLYMAED

SEQ ID NO: 56567 - protein, 27 aa, Homo sapiens
TRRMQYNRRFVNVVPTFSKKKGPNANS

SEQ ID NO: 56568 - protein, 123 aa, Homo sapiens
LAVDALATKGRLIVIGFISGYQTPTGLSPVKAGTLPAKLLKKSASVQGFFLNHYLSKYQAAMSHLLEMCVSGDLVCEVDLGDLSPEGRFTGLESIFRAVNYMYMGKNTGKIVVELPHSVNSKL

SEQ ID NO: 56569 - protein, 124 aa, Homo sapiens
KACEAFEAQECERINFFRNALWLHVNQLSQQCVTSDEMYEQVRKSLEMCSIQRDIEYFVNQRKTGQIPPAPIMYENFYSSQKNAVPAGKATGPNLARRGPLPIPKSSPDDPNYSLVDDYSLLYQ

SEQ ID NO: 56570 - protein, 97 aa, Homo sapiens
VTALEYATDTKATVVGKPEKTFFLEALRGTGCEPEEAVMIGDDCRDDVGGAQDVGMLGILVKTGKYRASDEEKINPPPYLTCESFPHAVDHILQHLL

SEQ ID NO: 56571 - protein, 324 aa, Homo sapiens
KAIENCEYAFNLKKDEVCVNPYHYQRVETPVLPPVLVPRHTEILTELPPLDDYTHSIPENTNFPAGIEPQSNYIPETPPPGYISEDGETSDQQLNQSMDTGSPAELSPTTLSPVNHSLDLQPVTYSEPAFWCSIAYYELNQRVGETFHASQPSLTVDGFTDPSNSERFCLGLLSNVNRNATVEMTRRHIGRGVRLYYIGGEVFAECLSDSAIFVQSPNCNQRYGWHPATVCKIPPGCNLKIFNNQEFAALLAQSVNQGFEAVYQLTRMCTIRMSFVKGWGAEYRRQTVTSTPCWIELHLNGPLQWLDKVLTQMGSPSVRCSSMS

SEQ ID NO: 56572 - protein, 28 aa, Homo sapiens
KVVITRLKLDKDRKMLLERKAKSRQVEK

SEQ ID NO: 56573 - protein, 677 aa, Homo sapiens
LCDFAKMHHQQRMAALGTDKELSDLLDFSAMFSPPVSSGKNGPTSLASGHFTGSNVEDRSSSGSWGNGGHPSPSRNYGDGTPYDHMTSRDLGSHDNLSPPFVNSRIQSKTERGSYSSYGRESNLQGCHQQSLLGGDMDMGNPGTLSPTKPGSQYYQYSSNNPRRRPLHSSAMEVQTKKVRKVPPGLPSSVYAPSASTADYNRDSPGYPSSKPATSTFPSSFFMQDGHHSSDPWSSSSGMNQPGYAGMLGNSSHIPQSSSYCSLHPHERLSYPSHSSADINSSLPPMSTFHRSGTNHYSTSSCTPPANGTDSIMANRGSGAAGSSQTGDALGKALASIYSPDHTNNSFSSNPSTPVGSPPSLSAGTAVWSRNGGQASSSPNYEGPLHSLQSRIEDRLERLDDAIHVLRNHAVGPSTAMPGGHGDMHGIIGPSHNGAMGGLGSGYGTGLLSANRHSLMVGTHREDGVALRGSHSLLPNQVPVPQLPVQSATSPDLNPPQDPYRGMPPGLQGQSVSSGSSEIKSDDEGDENLQDTKSSEDKKLDDDKKDIKSITRSRSSNNDDEDLTPEQKAEREKERRMANNARERLRVRDINEAFKELGRMVQLHLKSDKPQTKLLILHQAVAVILSLEQQVRERNLNPKAACLKRREEEKVSSEPPPLSLAGPHPGMGDASNHMGQM

SEQ ID NO: 56574 - protein, 250 aa, Homo sapiens
IAPAFSSMSNKYPQAVFLEVDVHQCQGTAATNNISATPTFLFFRNKVRIDQYQGADAVGLEEKIKQHLENDPGSNEDTDIPKGYMDLMPFINKAGCECLNESDEHGFDNCLRKDTTFLESDCDEQLLITVAFNQPVKLYSMKFQGPDNGQGPKYVKIFINLPRSMDFEEAERSEPTQALELTEDDIKEDGIVPLRYVKFQNVNSVTIFVQSNQGEEETTRISYFTFIGTPVQATNMNDFKRVVGKKGESH

SEQ ID NO: 56575 - protein, 120 aa, Homo sapiens
KVGPMPWLGPQTDESIKGLCERGRKNILLVPIAFTSDHIETLYELDIEYSQVLAKECGVENIRRAESLNGNPLFSKALADLVHSHIQSNELCSKQLTLSCPLCVNPVCRETKSFFTSQQL

SEQ ID NO: 56576 - protein, 5 aa, Homo sapiens
LEYIC

SEQ ID NO: 56577 - protein, 102 aa, Homo sapiens
VGPPGAPGRDGSKGERGAPGPRGSPGPPGSFDFLLLMLADIRNDITELQEKVFGHRTHSSAEEFPLPQEFPSYPEAMDLGSGDDHPRRTETRDLRAPRDFYP

SEQ ID NO: 56578 - protein, 329 aa, Homo sapiens
LAAAFLVAFVLLLYMVSPLISPKPLALPGAHVVVTGGSSGIGKCIAIECYKQGAFITLVARNEDKLLQAKKEIEMHSINDKQVVLCISVDVSQDYNQVENVIKQAQEKLGPVDMLVNCAGMAVSGKFEDLEVSTFERLMSINYLGSVYPSRAVITTMKERRVGRIVFVSSQAGQLGLFGFTAYSASKFAIRGLAEALQMEVKPYNVYITVAYPPDTDTPGFAEENRTKPLETRLISETTSVCKPEQVAKQIVKDAIQGNFNSSLGSDGYMLSALTCGMAPVTSITEGLQQVVTMGLFRTIALFYLGSFDSIVRRCMMQREKSENADKTA

SEQ ID NO: 56579 - protein, 6 aa, Homo sapiens
MFLSHK

SEQ ID NO: 56580 - protein, 7 aa, Homo sapiens
IISDMYA

SEQ ID NO: 56581 - protein, 118 aa, Homo sapiens
VVVIRFGHDWDPTCMKMDEVLYSIAEKVKNFAVIYLVDITEVPDFNKMYELYDPCTVMFFFRNKHIMIDLGTGNNNKINWAMEDKQEMVDIIETVYRGARKGRGLVVSPKDYSTKYRY

SEQ ID NO: 56582 - protein, 126 aa, Homo sapiens
VALKGPVTNAAILLAPVSMLSSDFRPSLPLPHFNKHLLGAEHGDEPRHGGLTLRLGLHQQGSEPSYLDRTEQLQAVLCSTMEKSVLGGQDQLRVRVTELEDEVRNLRKINRDLFDFSTRFITRPAK

SEQ ID NO: 56583 - protein, 327 aa, Homo sapiens
TQFNKGPSYGLSAEVKNRLLSKYDPQKEAELRTWIEGLTGLSIGPDFQKGLKDGTILCTLMNKLQPGSVPKINRSMQNWHQLENLSNFIKAMVSYGMNPVDLFEANDLFESGNMTQVQVSLLALAGKGLDLGSLAALCWYSRPLSLTQAKTKGLQSGVDIGVKYSEKQERNFDDATMKAGQCVIGLQMGTNKCASQSGMTAYGTRRHLYDPKNHILPPMDHSTISLQMGTNKCASQVGMTAPGTRRHIYDTKLGTDKCDNSSMSLQMGYTQGANQSGQVFGLGRQIYDPKYCPQGTVADGAPSGTGDCPDPGEVPEYPPYYQEEAGY

SEQ ID NO: 56584 - protein, 24 aa, Homo sapiens
IDGHMVNLDKYRGFVCIVTNVASQ

SEQ ID NO: 56585 - protein, 82 aa, Homo sapiens
IKEFAAGYNVKFDMFSKICVNGDDAHPLWKWMKIQPKGKGILGNAIKWNFTKFLIDKNGCVVKRYGPMEEPLVIEKDLPHYF

SEQ ID NO: 56586 - protein, 18 aa, Homo sapiens
MGGPEKTALGRVHTCPWA

SEQ ID NO: 56587 - protein, 22 aa, Homo sapiens
MTREEFLERAAALFIAKVKPVG

SEQ ID NO: 56588 - protein, 51 aa, Homo sapiens
TLAEYCVKTKAPAPDEGSDLFYDDYYEDGEVEEEADSCFGDDEDDSGTEES

SEQ ID NO: 56589 - protein, 167 aa, Homo sapiens
LPAALLRRPGLGRLVRHARAYAEAAAAPAAASGPNQMSFTFASPTQVFFNGANVRQVDVPTLTGAFGILAAHVPTLQVLRPGLVVVHAEDGTTSKYFVSSGSIAVNADSSVQLLAEEAVTLDMLDLGAAKANLEKAQAELVGTADEATRAEIQIRIEANEALVKALE

SEQ ID NO: 56590 - protein, 175 aa, Homo sapiens
VAAMASDEGKLFVGGLSFDTNEQSLEQVFSKYGQISEVVVVKDRETQRSRGFGFVTFENIDDAKDAMMAMNGKSVDGRQIRVDQAGKSSDNRSRGYRGGSAGGRGFFRGGRGRGRGFSRGGGDRGYGGNRFESRSGGYGGSRDYYSSRSQSGGYSDRSSGGSYRDSYDSYATHNE

SEQ ID NO: 56591 - protein, 114 aa, Homo sapiens
LAALPCGAEEASPLRPAQVTLSPPPAVTNGSQPGAPHNSTHTRPPGASGSALTRSFYVILGFCGLTALYFLIRAFRLKKPQRRRYGLLANTEDPTEMASLDSDEETVFESRNLR

SEQ ID NO: 56592 - protein, 26 aa, Homo sapiens
KGPSLSYREKEIFDNQLLEERNRRRR

SEQ ID NO: 56593 - protein, 210 aa, Homo sapiens
LSAPGLRGFRILGLRSSVGPAVQARGVHQSVATDGPSSTQPALPKARAVAPKPSSRGEYVVAKLDDLVNWARRSSLWPMTFGLACCAVEMMHMAAPRYDMDRFGVVFRASPRQSDVMIVAGTLTNKMAPALRKVYDQMPEPRYVVSMGSCANGGGYYHYSYSVVRGCDRIVPVDIYIPGCPPTAEALLYGILQLQRKIKRERRLQIWYRR

SEQ ID NO: 56594 - protein, 137 aa, Homo sapiens
KRTFRKFTYRGVDLDQLLDMSYEQLMQLYSARQRRRLNRGLRRKQHSLLKRLRKAKKEAPPMEKPEVVKTHLRDMIILPEMVGSMVGVYNGKTFNQVEIKPEMIGHYLGEFSITYKPVKHGRPGIGATHSSRFIPLK

SEQ ID NO: 56595 - protein, 306 aa, Homo sapiens
TFIKQMRIIHGAGYSEEDKRGFTKLVYQNIFTAMQAMIRAMETLKILYKYEQNKANALLIREVDVEKVTTFEHQYVSAIKTLWEDPGIQECYDRRREYQLSDSAKYYLTDVDRIATLGYLPTQQDVLRVRVPTTGIIEYPFDLENIIFRMVDVGGQRSERRKWIHCFENVTSIMFLVALSEYDQVLVESDNENRMEESKALFRTIITYPWFQNSSVILFLNKKDLLEDKILYSHLVDYFPEFDGPQRDAQAAREFILKMFVDLNPDSDKIIYSHFTCATDTENIRFVFAAVKDTILQLNLKEYNLV

SEQ ID NO: 56596 - protein, 84 aa, Homo sapiens
RMSSTRSSRPCCLTSAPSPTPGSTCRRGSASTSRSTRSGCRRTRSVRSRTSCWARSPRSSRSGRRGCWPSCARTSGPSAARTSC

SEQ ID NO: 56597 - protein, 44 aa, Homo sapiens
IHTTEKQYKCNVGHPPANEFMCSASEKSHQERDLIKVVNMVLPL

SEQ ID NO: 56598 - protein, 44 aa, Homo sapiens
TPTLGTLDFYMARLHGAIERDPAQHEKLIVRIKEILAQVASEHL

SEQ ID NO: 56599 - protein, 226 aa, Homo sapiens
KENNFPPLPKFIPVKPCFYQNFSDEIPVEHQVLVKRIYRLWMFYCATLGVNLIACLAWWIGGGSGTNFGLAFVWLLLFTPCGYVCWFRPVYKAFRADSSFNFMAFFFIFGAQFVLTVIQAIGFSGWGACGWLSAIGFFQYSPGAAVVMLLPAIMFSVSAAMMAIAIMKVHRIYRGAGGSFQKAQTEWNTGTWRNPPSREAQYNNFSGNSLPEYPTVPSYPGSGQWP

SEQ ID NO: 56600 - skipped

SEQ ID NO: 56601 - protein, 23 aa, Homo sapiens
VADETKCCCFFKRRKRKSLQRHK

SEQ ID NO: 56602 - protein, 355 aa, Homo sapiens
VKIGRPGYKVTKQRDSEMGQQSLLFQIDYPEIAEGIMPRHRFMSAYEQRIEPPDRRWQYLLMAAEPYETIAFKVPSREIDKAEGKFWTHWNRETKQFFLQFHFKMEKPPAPPSLPAGPPGVKRPPPPLMNGLPPRPPLPESLPPPPPGGLPLPPMPPTGPAPSGPPGPPQLPPPAPGVHPPAPVVHPPASGVHPPAPGVHPPAPGVHPPAPGVHPPTSGVHPPAPGVHPPAPGVHPPAPGVHPPAPGVHPPAPGVHPPPSAGVHPQAPGVHPAAPAVHPQAPGVHPPAPGMHPQAPGVHPQPPGVHPSAPGVHPQPPGVHPSNPGVHPPTPMPPMLRPPLPSEGPGNIPPPPPTN

SEQ ID NO: 56603 - protein, 189 aa, Homo sapiens
TQYDEIGIPVALLSYKDMLDIFTRFGRTVRAALYAPKEPVLDYNMVIIFIMAVGTVAIGGYWAGSRDVKKRYMKHKRDDGPEKQEDEAVDVTPVMTCVFVVMCCSMLVLLYYFYDLLVYVVIGIFCLASATGLYSCLAPCVRRLPFGKCRIPNNSLPYFHKRPQARMLLLALFCVAVSVVWGVFRNEDQ

SEQ ID NO: 56604 - protein, 112 aa, Homo sapiens
TLVTSCAVALWRRELGVFWTGSGFAKVLPPSPWAPAPADGPQPPKDSATPLSPQPPSEEPATSPWPAEQSPKSRTSEEMGAGAPMREPGSPAESEGRDQAQPSPVTQPGASA

SEQ ID NO: 56605 - protein, 166 aa, Homo sapiens
VDYNCNMTLEELVACDNAAQKMQTVTAAVEELLVAAQRQDRLTVGVYESAKLMNVDPDSVVLCLLAIDEEEEDDIALQIHFTLIQSFCCDNDINIVRVSGMQRLAQLLGEPAETQGTTEARDLHCLLVTNPHTDAWKSHGLVEVASYCEESRGNNQWVPYISLQER

SEQ ID NO: 56606 - protein, 96 aa, Homo sapiens [sequence omitted]

SEQ ID NO: 56607 - protein, 139 aa, Homo sapiens
ILNPICTWCVGQAASMGSLLLAAGTPGMRHSLPNSRIMIHQPSGGARGQATDIAIQAEEIMKLKKQLYNIYAKHTKQSLQVIESAMERDRYMSPMEAQEFGILDKVLVHPPQDGEDEPTLVQKEPVEAAPAAEPVPAST

SEQ ID NO: 56608 - protein, 112 aa, Homo sapiens
LDLEARGYIKPHVDSIKFCGATIAGLSLLSPSVMRLVHTQEPGEWLELLLEPGSLYILRGSARYDFSHEILRDEESFFGERRIPRGRRISVICRSLPEGMGPGESGQPPPAC

SEQ ID NO: 56609 - protein, 41 aa, Homo sapiens
RCGSSEDLHDVREGPDLDRPGSDRQERERARGDSEALDEES

SEQ ID NO: 56610 - protein, 39 aa, Homo sapiens
MQPFNYVTLQCLAARALDKNKIPYKGFIPEDLEAFIELH

SEQ ID NO: 56611 - protein, 24 aa, Homo sapiens
LLDRYVKFVKERTEVEQAYAKQLR

SEQ ID NO: 56612 - protein, 215 aa, Homo sapiens
VTEDFSHLPPEQQRKRLQQQLEERSRELQKEVDQREALKKMKDVYEKTPQMGDPASLEPQIAETLSNIERLKLEVQKYEAWLAEAESRVLSNRGDSLSRHARPPDPPASAPPDSSSNSASQDTKESSEEPPSEESQDTPIYTEFDEDFEEEPTSPIGHCVAIYHFEGSSEGTISMAEGEDLSLMEEDKGDGWTRVRRKEGGEGYVPTSYLRVTLN

SEQ ID NO: 56613 - protein, 112 aa, Homo sapiens
VQAQPGEATSGPPGIQPGQEPPVTMIFMGYQNVEDEAETKKVLGLQDTITAELVVIEDAAEPKEPAPPNGSAAEPPTEAASREENQAGPEATTSDPQDLDMKKHRCKCCSIM

SEQ ID NO: 56614 - protein, 68 aa, Homo sapiens
RWQGGERSMSGHSGPGHMMNRGGMSGRGSFAPGGASRGHPIPHGGMQGGFGGQSRGSRPSDARFTRRY

SEQ ID NO: 56615 - protein, 92 aa, Homo sapiens
IRTHTGEKPYTCNECGKSFTNSFSLTIHRRIHNGEKSYECSDCGKSFNVLSSVKKHMRTHTGKKPYECNYCGKSFTSNSYLSVHTRMHNRQM

SEQ ID NO: 56616 - protein, 73 aa, Homo sapiens [sequence omitted]

SEQ ID NO: 56617 - protein, 274 aa, Homo sapiens
VASEGLPEPVLRKVELPVPTHRRPVQAWVESLRGFEQERVGLADLHPDVFATAPRLDILHQVAMWQKNFKRISYAKTKTRAEVRGGGRKPWPQKGTGRARHGSIRSPLWRGGGVAHGPRGPTSYYYMLPMKVRALGLKVALTVKLAQDDLHIMDSLELPTGDPQYLTELAHYRRWGDSVLLVDLTHEEMPQSIVEATSRLKTFNLIPAVGLNVHSMLKHQTLVLTLPTVAFLEDKLLWQDSRYRPLYPFSLPYSDFPRPLPHATQGPAATPYHC

SEQ ID NO: 56618 - protein, 59 aa, Homo sapiens
VLSPRYEIVIITVVAAAVIMGTAGLSTYLYNRQRKIKKYRLQQAQKGTPMKPNTQATPP

SEQ ID NO: 56619 - protein, 4 aa, Homo sapiens
MNWE

SEQ ID NO: 56620 - protein, 103 aa, Homo sapiens
VVLDLLMSLPEELPLLPCTALVEHMTETYLRLTAPQPIPAGGSLGPAAEGDGAGSKAPEETPPATEKAEHSELKSPWQAAGICPLNPFLVPLELLGRAATPAR

SEQ ID NO: 56621 - protein, 677 aa, Homo sapiens
IKRGGNRFEPYANPTKRYRAFITNIPFDVKWQSLKDLVKEKVGEVTYVELLMDAEGKSRGCAVVEFKMEESMKKAAEVLNKHSLSGRPLKVKEDPDGEHARRAMQKVMATTGGMGMGPGGPGMITIPPSILNNPNIPNEIIHALQAGRLGSTVFVANLDYKVGWKKLKEVFSMAGVVVRADILEDKDGKSRGIGTVTFEQSIEAVQAISMFNGQLLFDRPMHVKMDERALPKGDFFPPERPQQLPHGLGGIGMGLGPGGQPIDANHLNKGIGMGNIGPAGMGMEGIGFGINKMGGMEGPFGGGMENMGRFGSGMNMGRINEILSNALKRGEIIAKQGGGGGGGSVPGIERMGPGIDRLGGAGMERMGAGLGHGMDRVGSEIERMGLVMDRMGSVERMGSGIERMGPLGLDHMASSIERMGQTMERIGSGVERMGAGMGFGLERMAAPIDRVGQTIERMGSGVERMGPAIERMGLSMERMVPAGMGAGLERMGPVMDRMATGLERMGANNLERMGLERMGANSLERMGLERMGANSLERMGPAMGPALGAGIERMGLAMGGGGGASFDRAIEMERGNFGGSFAGSFGGAGGHAPGVARKACQIFVRNLPFDFTWKMLKDKFNECGHVLYADIKMENGKSKGCGVVKFESPEVAERACRMMNGMKLSGREIDVRIDRNA

SEQ ID NO: 56622 - protein, 17 aa, Homo sapiens
ITGWKTWKHSICSKSGL

SEQ ID NO: 56623 - protein, 209 aa, Homo sapiens
ISYFRIHERTHTGEKPYECKKCGKTFNYPLDLKIHKRNHTGEKPYECKECAKTFISLENFRRHMITHTGDGPYKCRDCGKVFIFPSALRTHERTHTGEKPYECKQCGKAFSCSSYIRIHKRTHTGEKPYECKECGKAFIYPTSFQGHMRMHTGEKPYKCKECGKAFSLHSSFQRHTRIHNYEKPLECKQCGKAFSVSTSLKKHMRMHNR

SEQ ID NO: 56624 - protein, 317 aa, Homo sapiens
IEQRSLKWIFVGGKGGVGKTTCSCSLAVQLSKGRESVLIISTDPAHNISDAFDQKFSKVPTKVKGYDNLFAMEIDPSLGVAELPDEFFEEDNMLSMGKKMMQEAMSAFPGIDEAMSYAEVMRLVKGMNFSVVVFDTAPTGHTLRLLNFPTIVERGLGRLMQIKNQISPFISQMCNMLGLGDMNADQLASKLEETLPVIRSVSEQFKDPEQTTFICVCIAEFLSLYETERLIQELAKCKIDTHNIIVNQLVFPDPEKPCKMCEARHKIQAKYLDQMEDLYEDFHIVKLPLLPHEVRGADKVNTFSALLLEPYKPPSAQ

SEQ ID NO: 56625 - protein, 358 aa, Homo sapiens
RDPPQTAWAARMCTKMEQPFYHDDSYTATGYGRAPGGLSLHDYKLLKPSLAVNLADPYRSLKAPGARGPGPEGGGGGSYFSGQGSDTGASLKLASSELERLIVPNSNGVITTTPTPPGQYFYPRGGGSGGGAGGAGGGVTEEQEGFADGFVKALDDLHKMNHVTPPNVSLGATGGPPAGPGGVYAGPEPPPVYTNLSSYSPASASSGGAGAAVGTGSSYPTTTISYLPHAPPFAGGHPAQLGLGRGASTFKEEPQTVPEARSRDATPPVSPINMEDQERIKVERKRLRNRLAATKCRKRKLERIARLEDKVKTLKAENAGLSSTAGLLREQVAQLKQKVMTHVSNGCQLLLGVKGHAF

SEQ ID NO: 56626 - protein, 37 aa, Homo sapiens
VPESSGRYVNRMTNEALHKGCSLKVLADSERYTWIVL

SEQ ID NO: 56627 - protein, 64 aa, Homo sapiens
LVTCVVHNFQSRPPSGRRLSPWEDLGQAPTMDSPLEKNPRSAGRIRHRHGSPHPSRRTAPAVAT

SEQ ID NO: 56628 - protein, 20 aa, Homo sapiens
VGKHSVCLVPFVDIKGLTLE

SEQ ID NO: 56629 - protein, 690 aa, Homo sapiens
KYDPTFKGPIYNRGCTDIICCVFLLLAIVGYVAVGIIAWTHGDPRKVIYPTDSRGEFCGQKGTKNENKPYLFYFNIVKCASPLVLLEFQCPTPQICVEKCPDRYLTYLNARSSRDFEYYKQFCVPGFKNNKGVAEVLQDGDCPAVLIPSKPLARRCFPAIHAYKGVLMVGNETTYEDGHGSRKNITDLVEGAKKANGVLEARQLAMRIFEDYTVSWYWIIIGLVIAMAMSLLFIILLRFLAGIMVWVMIIMVILVLGYGIFHCYMEYSRLRGEAGSDVSLVDLGFQTDFRVYLHLRQTWLAFMIILSILEVIIILLLIFLRKRILIAIALIKEASRAVGYVMCSLLYPLVTFFLLCLCIAYWASTAVFLSTSNEAVYKIFDDSPCPFTAKTCNPETFPSSNESRQCPNARCQFAFYGGESGYHRALLGLQIFNAFMFFWLANFVLALGQVTLAGAFASYYWALRKPDDLPAFPLFSAFGRALRYHTGSLAFGALILAIVQIIRVILEYLDQRLKAAENKFAKCLMTCLKCCFWCLEKFIKFLNRNAYIMIAIYGTNFCTSARNAFFLLMRNIIRVAVLDKVTDFLFLLGKLLIVGSVGILAFFFFTHRIRIVQDTAPPLNYYWVPILTVIVGSYLIAHGFFSVYGMCVDTLFLCFLEDLERNDGSAERPYFMSSTLKKLLNKTNKKAAES

SEQ ID NO: 56630 - protein, 58 aa, Homo sapiens
TVHNIAYQLQLMSAVRTSIVEKRFPDFVRDFMGAMYGDPTLCPTWATDALASVGITLG

SEQ ID NO: 56631 - protein, 851 aa, Homo sapiens
LQDAFSSIGQSCHLDLPQIAVVGGQSAGKSSVLENFVGRDFLPRGSGIVTRRPLILQLIFSKTEHAEFLHCKSKKFTDFDEVRQEIEAETDRVTGTNKGISPVPINLRVYSPHVLNLTLIDLPGITKVPVGDQPPDIEYQIKDMILQFISRESSLILAVTPANMDLANSDALKLAKEVDPQGLRTIGVITKLDLMDEGTDARDVLENKLLPLRRGYIGVVNRSQKDIEGKKDIRAALAAERKFFLSHPAYRHMADRMGTPHLQKTLNQQLTNHIRESLPALRSKLQSQLLSLEKEVEEYKNFRPDDPTRKTKALLQMVQQFGVDFEKRIEGSGDQVDTLELSGGARINRIFHERFPFELVKMEFDEKDLRREISYAIKNIHGVRTGLFTPDLAFEAIVKKQVVKLKEPCLKCVDLVIQELINTVRQCTSKLSSYPRLREETERIVTTYIREREGRTKDQILLLIDIEQSYINTNHEDFIGFANAQQRSTQLNKKRAIPNQVIRRGWLTINNISLMKGGSKEYWFVLTAESLSWYKDEEEKEKKYMLPLDNLKIRDVEKGFMSNKHVFAIFNTEQRNVYKDLRQIELACDSQEDVDSWKASFLRAGVYPEKDQAENEDGAQENTFSMDPQLERQVETIRNLVDSYVAIINKSIRDLMPKTIMHLMINNTKAFIHHELLAYLYSSADQSSLMEESADQAQRRDDMLRMYHALKEALNIIGDISTSTVSTPVPPPVDDTWLQSASSHSPTPQRRPVSSIHPPGRPPAVRGPTPGPPLIPVPVGAAASFSAPPIPSRPGPQSVFANSDLFPAPPQIPSRPVRIPPGIPPGVPSRRPPAAPSRPTIIRPAEPSLLD

SEQ ID NO: 56632 - protein, 263 aa, Homo sapiens
KDLRQIELACDSQEDVDSWKASFLRAGVYPEKDQAENEDGAQENTFSMDPQLERQVETIRNLVDSYVAIINKSIRDLMPKTIMHLMINNTKAFIHHELLAYLYSSADQSSLMEESADQAQRRDDMLRMYHALKEALNIIGDISTSTVSTPVPPPVDDTWLQSASSHSPTPQRRPVSSIHPPGRPPAVRGPTPGPPLIPVPVGAAASFSAPPIPSRPGPQSVFANSDLFPAPPQIPSRPVRIPPGIPPGVPRRPPPSAPARPFF

SEQ ID NO: 56633 - protein, 23 aa, Homo sapiens
MTPSPSEMFIPANVVLKWYENFQ

SEQ ID NO: 56634 - protein, 487 aa, Homo sapiens
IITLGCNSVLIQFATPNDFCSFYNILKTCRGHTLERSVFSERTEESSAVQYFQFYGYLSQQQNMMQDYVRTGTYQRAILQNHTDFKDKIVLDVGCGSGILSFFAAQAGARKIYAVEASTMAQHAEVLVKSNNLTDRIVVIPGKVEEVSLPEQVDIIISEPMGYMLFNERMLESYLHAKKYLKPSGNMFPTIGDVHLAPFTDEQLYMEQFTKANFWYQPSFHGVDLSALRGAAVDEYFRQPVVDTFDIRILMAKSVKYTVNFLEAKEGDLHRIEIPFKFHMLHSGLVHGLAFWFDVAFIGSIMTVWLSTAPTEPLTHWYQVRCLFQSPLFAKAGDTLSGTCLLIANKRQSYDISIVAQVDQTGSKSSNLLDLKNPFFRYTGTTPSPPPGSHYTSPSENMWNTGSTYNLSSGMAVAGMPTAYDLSSVIASGSSVGHNNLIPLGSSGAQGSGGGSTSAHYAVNSQFTMGGPAISMASPMSIPTNTMHYGS

SEQ ID NO: 56635 - protein, 57 aa, Homo sapiens
IAQGWRFWTQRQGRSCVSWTRWSPTPPLRRSRTSSLRPIRSGTPPASPSAWTPRASP

SEQ ID NO: 56636 - protein, 72 aa, Homo sapiens
LAAQSVIKKDNQTLSHSLKMADQNLEKLKTESERLEQHTQKSVNWLLWAMLIIVCFIFISMILFIRIMPKLK

SEQ ID NO: 56637 - protein, 5 aa, Homo sapiens
KMAAS

SEQ ID NO: 56638 - protein, 56 aa, Homo sapiens
KGTSYKYEVALAGPALELHNCMAKLLAHPLQRPCQSHASYSLLEEEDEAIEVEATV

SEQ ID NO: 56639 - protein, 63 aa, Homo sapiens
LGFPDAWGLPTPQQARGKARGNEYQPSNIKRKNKHGWVRRLSTPAGVQVILRRMLKGRKSLSH

SEQ ID NO: 56640 - protein, 103 aa, Homo sapiens
KMADFLKGLPVYNKSNFSRFHADSVCKASNRRPSVYLPTREYPSEQIIVTEKTNILLRYLHQQWDKKNAAKKRDQEQVELEGESSAPPRKVARTDSPDMHEDT

SEQ ID NO: 56641 - protein, 62 aa, Homo sapiens
LRLLPQVDTTGTFKIQKTRLQREGFDPRQTSDRLFFLDLKQGHYLPLNEAVYTRICSGAFAL

SEQ ID NO: 56642 - protein, 604 aa, Homo sapiens
LLLLLAPLPPGAPPGADAYFPEERWSPESPLQAPRVLIALLARNAAHALPTTLGALERLRHPRERTALWVATDHNMDNTSTVLREWLVAVKSLYHSVEWRPAEEPRSYPDEEGPKHWSDSRYEHVMKLRQAALKSARDMWADYILFVDADNLILNPDTLSLLIAENKTVVAPMLDSRAAYSNFWCGMTSQGYYKRTPAYIPIRKRDRRGCFAVPMVHSTFLIDLRKAASRNLAFYPPHPDYTWSFDDIIVFAFSCKQAEVQMYVCNKEEYGFLPVPLRAHSTLQDEAESFMHVQLEVMVKHPPAEPSRFISAPTKTPDKMGFDEVFMINLRRRQDRRERMLRALQAQEIECRLVEAVDGKAMNTSQVEALGIQMLPGYRDPYHGRPLTKGELGCFLSHYNIWKEVVDRGLQKSLVFEDDLRFEIFFKRRLMNLMRDVEREGLDWDLIYVGRKRMQVEHPEKAVPRVRNLVEADYSYWTLAYVISLQGARKLLAAEPLSKMLPVDEFLPVMFDKHPVSEYKAHFSLRNLHAFSVEPLLIYPTHYTGDDGYVSDTETSVVWNNEHVKTDWDRAKSQKMREQQALSREAKNSDVLQSPLDSAARDEL

SEQ ID NO: 56643 - protein, 60 aa, Homo sapiens
KQHWDRDLQVTLIPTFDSVAMHTWYAETHARHQALGITVLGSNSMVSMQDDAFPACKVEF

SEQ ID NO: 56644 - protein, 142 aa, Homo sapiens
VGPSILHCRVLHVDYALKVCVDIPGTSKLLLELPLVIGTIPLHPFGSRSSSVGSHASFLLDWRLGALPERPEAPPEYSEVVADTEEAALGQSPFPLPQDPDMSLEGPFFAYIQEFRYRPPPLYSEEDPNPLLGDMRPRCMTC

SEQ ID NO: 56645 - protein, 45 aa, Homo sapiens
KTFRQQHGKKVVGQITVDMMYGGMRGMKGLVYETSVLDPDEGIRF

SEQ ID NO: 56646 - protein, 42 aa, Homo sapiens
LSFAAAMNGLAGPLHGLANQEVLVWLTQLQKEVGKDVSDEKL

SEQ ID NO: 56647 - protein, 142 aa, Homo sapiens
MFAVGCSMGPFLHYWYLSLDRLFPASGLRGFPNVLKKVLVDQLVASPLLGVWYFLGLGCLEGQTVGESCQELREKFWEFYKADWCVWPAAQFVNFLFVPPQFRVTYINGLTLGWDTYLSYLKYRSPVPLTPPGCVALDTRAD

SEQ ID NO: 56648 - protein, 139 aa, Homo sapiens
VKQDMPPPGGYGPIDYKRNLPRRGLSGYSMLAIGIGTLIYGHWSIMKWNRERRRLQIEDFEARIALLPLLQAETDRRTLQMLRENLEEEAIIMKDVPDWKVGESVFHTTRWVPPLIGELYGLRTTEEALHASHGFMWYT

SEQ ID NO: 56649 - protein, 36 aa, Homo sapiens
KPYNADQLGRALRAIIEEMLDLLEQSEGKINYCHKH

SEQ ID NO: 56650 - protein, 17 aa, Homo sapiens
LHPFPSESYSPGMTMSV

SEQ ID NO: 56651 - protein, 19 aa, Homo sapiens
RRKRWTSRTRPRGSSAAAS

SEQ ID NO: 56652 - protein, 339 aa, Homo sapiens
VALMPPPLLLLLLLASPPAASAPSARDPFAPQLGDTQNCQLRCRDRDLGPQPSQAGLEGASESPYDRAVLISACERGCRLFSICRFVARSSKPNATQTECEAACVEAYVKEAEQQACSHGCWSQPAEPEPEQKRKVLEAPSGALSLLDLFSTLCNDLVNSAQGFVSSTWTYYLQTDNGKVVVFQTQPIVESLGFQGGRLQRVEVTWRGSHPEALEVHVDPVGPLDKVRKAKIRVKTSSKAKVESEEPQDNDFLSCMSRRSGLPRWILACCLFLSVLVMLWLSCSTLVTAPGQHLKFQPLTLEQHKGFMMEPDWPLYPPPSHACEDSLPPYKLKLDLTKL

SEQ ID NO: 56653 - protein, 416 aa, Homo sapiens
VLDLKGKVLICRNYRGDVDMSEVEHFMPILMEKEEEGMLSPILAHGGVRFMWIKHNNLYLVATSKKNACVSLVFSFLYKVVQVFSEYFKELEEESIRDNFVIIYELLDELMDFGYPQTTDSKILQEYITQEGHKLETGAPRPPATVTNAVSWRSEGIKYRKNEVFLDVIESVNLLVSANGNVLRSEIVGSIKMRVFLSGMPELRLGLNDKVLFDNTGRGKSKSVELEDVKFHQCVRLSRFENDRTISFIPPDGEFELMSYRLNTHVKPLIWIESVIEKHSHSRIEYMIKAKSQFKRRSTANNVEIHIPVPNDADSPKFKTTVGSVKWVPENSEIVWSIKSFPGGKEYLMRAHFGLPSVEAEDKEGKPPISVKFEIPYFTTSGIQVRYLKIIEKSGYQALPWVRYITQNGDYQLRTQ

SEQ ID NO: 56654 - protein, 1103 aa, Homo sapiens
LDTEEAELLGADTQGSEFEFTDFTLPSQTQTPPGGPGGPGGGGAGGPGGAGAGAAAGQLDAQVGPEGILQNGAVDDSVAKTSQLLAELNFEEDEEDTYYTKDLPIHACSYCGIHDPACVVYCNTSKKWFCNGRGNTSGSHIVNHLVRAKCKEVTLHKDGPLGETVLECYNCGCRNVFLLGFIPAKADSVVVLLCRQPCASQSSLKDINWDSSQWQPLIQDRCFLSWLVKIPSEQEQLRARQITAQQINKLEELWKENPSATLEDLEKPGVDEEPQHVLLRYEDAYQYQNIFGPLVKLEADYDKKLKESQTQDNITVRWDLGLNKKRIAYFTLPKTDSDMRLMQGDEICLRYKGDLAPLWKGIGHVIKVPDNYGDEIAIELRSSVGAPVEVTHNFQVDFVWKSTSFDRMQSALKTFAVDETSVSGYIYHKLLGHEVEDVIIKCQLPKRFTAQGLPDLNHSQVYAVKTVLQRPLSLIQGPPGTGKTVTSATIVYHLARQGNGPVLVCAPSNIAVDQLTEKIHQTGLKVVRLCAKSREAIDSPVSFLALHNQIRNMDSMPELQKLQQLKDETGELSSADEKRYRALKRTAERELLMNADVICCTCVGAGDPRLAKMQFRSILIDESTQATEPECMVPVVLGAKQLILVGDHCQLGPVVMCKKAAKAGLSQSLFERLVVLGIRPIRLQVQYRMHPALSAFPSNIFYEGSLQNGVTAADRVKKGFDFQWPQPDKPMFFYVTQGQEEIASSGTSYLNRTEAANVEKITTKLLKAGAKPDQIGIITPYEGQRSYLVQYMQFSGSLHTKLYQEVEIASVDAFQGREKDFIILSCVRANEHQGIGFLNDPRRLNVALTRARYGVIIVGNPKALSKQPLWNHLLNYYKEQKVLVEGPLNNLRESLMQFSKPRKLVNTINPGARFMTTAMYDAREAIIPGSVYDRSSQGRPSSMYFQTHDQIGMISAGPSHVAAMNIPIPFNLVMPPMPPPGYFGQANGPAAGRGTPKGKTGRGGRQKNRFGLPGPSQTNLPNSQASQDVASQPFSQGALTQGYISMSQPSQMSQPGLSQPELSQDSYLGDEFKSQIDVALSQDSTYQGERAYQHGGVTGLSQY

SEQ ID NO: 56655 - protein, 112 aa, Homo sapiens
LATNQPFFWEAQAPVSTVEQLDQRYLLVPEKVKDAYLVHLIQRFQDEHEDWSIIIFTNTCKTCQILCMMLRKFSFPTVALHSMMKQKERFAALAKFKSSIYRILIATDVASR

SEQ ID NO: 56656 - protein, 23 aa, Homo sapiens
VQQVIENHILKLFQSNLVPADPE

SEQ ID NO: 56657 - protein, 37 aa, Homo sapiens
IEACSLPEHNLITWTDGPPPVQFQAQNGPNTSLASLL

SEQ ID NO: 56658 - protein, 55 aa, Homo sapiens
LVAYYQKYVDEASKKEIKDILIQYDRTLLVADPRRCKSKKFGGPGARACYQKSYR

SEQ ID NO: 56659 - protein, 68 aa, Homo sapiens
RKHKKKRLVQSPNSYFMDVKCPGCYKVTTVFSHAQMVVLCVGCSTVLCQPTGGKARLTEGCSFRRKQH

SEQ ID NO: 56660 - protein, 105 aa, Homo sapiens
VAPSKQSKKSSPMDRNSDEYRQRRERNNMAVKKSRLKSKQKAQDTLQRVNQLKEENERLEAKIKLLTKELSVLKDLFLEHAHNLADNVQSISTENTTADGDNAGQ

SEQ ID NO: 56661 - protein, 278 aa, Homo sapiens [sequence omitted]

SEQ ID NO: 56662 - protein, 81 aa, Homo sapiens
ILEEEPQENQKKLLPLSVTPEAFSGTVIEKEFVSPSLTPPPAIAHPALPTIPERKEVLLEASEETGKRVSKFKAARLQQKD

SEQ ID NO: 56663 - protein, 452 aa, Homo sapiens
ISLISKAEIRYEGILYTIDTENSTVALAKVRSFGTEDRPTDRPIPPRDEVFEYIIFRGSDIKDLTVCEPPKPQCSLPQDPAIVQSSLGSSTSSFQSMGSYGPFGRMPTYSQFSPSSLVGQQFGAVGVAGSSLTSFGTETSNSGTLPQSSAVGSAFTQDTRSLKTQLSQGRSSPQLDPLRKSPTMEQAVQTASAHLPAPAAVGRRSPVSTRPLPSASQKAGENQEHRRAEVHKVSRPENEQLRNDNKRQVAPGAPSAPRRGRGGHRGGRGRFGIRRDGPMKFEKDFDFESANAQFNKEEIDREFHNKLKLKEDKLEKQEKPVNGEDKGDSGVDTQNSEGNADEEDPLGPNCYYDKTKSFFDNISCDDNRERRPTWAEERRLNAETFGIPLRPNRGRGGYRGRGGLGFRGGRGRGGGRGGTFTAPRGFRGGFRGGRGGREFADFEYRKTTAFGP

SEQ ID NO: 56664 - protein, 24 aa, Homo sapiens
IHVTVQPKYKHVYPKNSVVRKSHL

SEQ ID NO: 56665 - protein, 4 aa, Homo sapiens
KTPS

SEQ ID NO: 56666 - protein, 613 aa, Homo sapiens
IGCELLKNLVLTGFSHIDLIDLDTIDVSNLNRQFLFQKKHVGRSKAQVAKESVLQFYPKANIVAYHDSIMNPDYNVEFFRQFILVMNALDNRAARNHVNRMCLAADVPLIESGTAGYLGQVTTIKKGVTECYECHPKPTQRTFPGCTIRNTPSEPIHCIVWAKYLFNQLFGEEDADQEVSPDRADPEAAWEPTEAEARARASNEDGDIKRISTKEWAKSTGYDPVKLFTKLFKDDIRYLLTMDKLWRKRKPPVPLDWAEVQSQGEETNASDQQNEPQLGLKDQQVLDVKSYARLFSKSIETLRVHLAEKGDGAELIWDKDDPSAMDFVTSAANLRMHIFSMNMKSRFDIKSMAGNIIPAIATTNAVIAGLIVLEGLKILSGKIDQCRTIFLNKQPNPRKKLLVPCALDPPNPNCYVCASKPEVTVRLNVHKVTVLTLQDKIVKEKFAMVAPDVQIEDGKGTILISSEEGETEANNHKKLSEFGIRNGSRLQADDFLQDYTLLINILHSEDLGKDVEFEVVGDAPEKVGPKQAEDAAKSITNGSDDGAQPSTSTAQEQDDVLIVDSDEEDSSNNADVSEEERSRKRKLDEKENLSAKRSRIEQKEELDDVIALD

SEQ ID NO: 56667 - protein, 284 aa, Homo sapiens
LEYTECDTFRSTFHSKSTLSEPQNNSAEGNSHKYDILKKNLSKKSVIKSERINGGKKLLNSNKSGAAFNQSKSLTLPQTCNREKIYTCSECGKAFGKQSILSRHWRIHTGEKPYECRECGKTFSHGSSLTRHQISHSGEKPYKCIECGKAFSHGSSLTNHQSTHTGEKPYECMNCGKSFSRVSLLIQHLRIHTQEKRYECRICGKAFIHSSSLIHHQKSHTGEKPYECRECGKAFCCSSHLTQHQRIHSMKKKYECNKCLKVFSSFSFLVQHQSIHTEEKPFEV

SEQ ID NO: 56668 - protein, 65 aa, Homo sapiens
KACDYIRELRQTNQRMQETFKEAERLQMDNELLRQQIEELKNENALLRAQLQQHNLEMVGEGTRQ

SEQ ID NO: 56669 - protein, 206 aa, Homo sapiens
ITYKCSGLSEYNAFWKCVQAGVTYLFVQLCKMLFLATFFPTWEGGIYDFIGEFMKASVDVADLIGLNLVMSRNAGKGEYKIMVAALGWATAELIMSRCIPLWVGARGIEFDWKYIQMSIDSNISLVHYIVASAQVWMITRYDLYHTFRPAVLLLMFLSVYKAFVMETFVHLCSLGSWAALLARAVVTGLLALSTLALYVAVVNVHS

SEQ ID NO: 56670 - protein, 444 aa, Homo sapiens
MEAEMALFEQEVLGAPVPGIPTAVPAVPTVPTVPTVEAMQVPAAPVIRPIIATNTYQQVQQTLEARAAAAATVVPPMVGGPPFVGPVGFGPGDRSHLDSPEAREAMFLRRAAVAPQRAPILRPAFVPHVLQRADSALSSAAAGPRPMALRPPHQALVGPPLPGPPGPPMMLPPMARAPGPPLGSMAALRPPLEEPAAPRELGLGLGLGLKEKEEAVVAAAAGLEEASAAVAVGAGGAPAGPAVIGPSLPLALAMPLPEPEPLPLPLEVVRGLLPPLRIPELLSLRPRPRPPRPEPPPGLMALEVPEPLGEDKKKGKPEKLKRCIRTAAGSSWEDPSLLEWDADDFRIFCGDLGNEVNDDILARAFSRFPSFLKAKVIRDKRTGKTKGYGFVSFKDPSDYVRAMREMNGKYVGSRPIKLRKSMWKDRNLDVVRKKQKEKKKLGLR

SEQ ID NO: 56671 - protein, 90 aa, Homo sapiens
LGPTEGRPQLKGVVLCTFTRKPKKPNSANRKCCRVRLSTGREAVCFIPGEGHTLQEHQIVLVEGGRTQDLPGVKLTVVRGKYDCGHVQKK

SEQ ID NO: 56672 - protein, 77 aa, Homo sapiens
LWFANPGGSNSMPSQSRSSVQRTHSLPVHSSPQAILMFPPDCPVPGPDLEINPTLESLCLSMTEHALGDGTDKTSTI

SEQ ID NO: 56673 - protein, 174 aa, Homo sapiens
VAPSPAGYQNTHSPASYHPTPSPMAYQASPSPSPVGYSPMTPGAPSPGGYNPHTPGSGIEQNSSDWVTTDIQVKVRDTYLDTQVVGQTGVIRSVTGGMCSVYLKDSEKVVSISSEHLEPITPTKNNKVKVILGEDREATGVLLSIDGEDGIVRMDLDEQLKILNLRFLGKLLEA

SEQ ID NO: 56674 - protein, 343 aa, Homo sapiens
LRSGLRLGSRGLCTRLATPPRRAPDQAAEIGSRGSTKAQGPQQQPGSEGPSYAKKVALWLAGLLGAGGTVSVVYIFGNNPVDENGAKIPDEFDNDPILVQQLRRTYKYFKDYRQMIIEPTSPCLLPDPLQEPYYQPPYTLVLELTGVLLHPEWSLATGWRFKKRPGIETLFQQLAPLYEIVIFTSETGMTAFPLIDSVDPHGFISYRLFRDATRYMDGHHVKDISCLNRDPARVVVVDCKKEAFRLQPYNGVALRPWDGNSDDRVLLDLSAFLKTIALNGVEDVRTVLEHYALEDDPLAAFKQRQSRLEQEEQQRLAELSKSNKQNLFLGSLTSRLWPRSKQP

SEQ ID NO: 56675 - protein, 211 aa, Homo sapiens
IAEFKCKLELLVGSPASCMELELYGVDDKFYSKLDQEDALLGSYPVDDGCRIHVIDHSGARLGEYEDVSRVEKYTISQEAYDQRQDTVRSFLKRSKLGRYNEEERAQQEAEAAQRLAEEKAQASSIPVGSRCEVRAAGQSPRRGTVMYVGLTDFKPGYWIGVRYDEPLGKNDGSVNGKRYFECQAKYGAFVKPAVVTVGDFPEEDYGLDEI

SEQ ID NO: 56676 - protein, 212 aa, Homo sapiens
TAMRILGGVISAISEAAAQYNPEPPPPRTHYSNIEANESEEVRQFRRLFAQLAGDDMEVSATELMNILNKVVTRHPDLKTDGFGIDTCRSMVAVMDSDTTGKLGFEEFKYLWNNIKRWQAIYKQFDTDRSGTICSSELPGAFEAAGFHLNEHLYNMIIRRYSDESGNMDFDNFISCLVRLDAMFRAFKSLDKDGTGQIQVNIQEWLQLTMYS

SEQ ID NO: 56677 - protein, 26 aa, Homo sapiens
ILSMITFPLKPYPLLCIWEIIHREAL

SEQ ID NO: 56678 - protein, 409 aa, Homo sapiens
KAQDEIPALSVSRPQTGLSFLGPEPEDLEDLYSRYKKLQQELEFLEVQEEYIKDEQKNLKKEFLHAQEEVKRIQSIPLVIGQFLEAVDQNTAIVGSTTGSNYYVRILSTIDRELLKPNASVALHKHSNALVDVLPPEADSSIMMLTSDQKPDVMYADIGGMDIQKQEVREAVELPLTHFELYKQIGIDPPRGVLMYGPPGCGKTMLAKAVAHHTTAAFIRVVGSEFVQKYLGEGPRMVRDVFRLAKENAPAIIFIDEIDAIATKRFDAQTGADREVQRILLELLNQMDGFDQNVNVKVIMATNRADTLDPALLRPGRLDRKIEFPLPDRRQKRLIFSTITSKMNLSEEVDLEDYVARPDKISGADINSICQESGMLAVRENRYIVLAKDFEKAYKTVIKKDEQEHEFYK

SEQ ID NO: 56679 - protein, 14 aa, Homo sapiens
THQPHHCAPARPRA

SEQ ID NO: 56680 - protein, 62 aa, Homo sapiens
MEILELYCDLLLARFGLIQSMKELDSGLAESVSTLIWAAPRLQSEVAELKIVADQLCAKYSK

SEQ ID NO: 56681 - protein, 55 aa, Homo sapiens
VSDLHGLTELILLPPPCPASFNADEDDRVDILGPQPESHQQLSASSHTDYASIPR

SEQ ID NO: 56682 - protein, 282 aa, Homo sapiens [sequence omitted]

SEQ ID NO: 56683 - protein, 87 aa, Homo sapiens
INTTLICNVTNALGARQAELTVQVKEGPPSEHSGMSRNAIIFLVLGILVFLILLGIGIYFYWSKCSREVLWHCHLCPSSEHHQSCRN

SEQ ID NO: 56684 - protein, 93 aa, Homo sapiens
LTVQVKEGPPSEHSGMSRNAIIFLVLGILVFLILLGIGIYFYWSKCSREVLWHCHLCPSSTEHASASANGHVSYSAVSRENSSSQDPQTEGTR

SEQ ID NO: 56685 - protein, 5 aa, Homo sapiens
LMGKF

SEQ ID NO: 56686 - protein, 43 aa, Homo sapiens
LNLDMHQRVHMGEKTWKCRECDMCFSQASSLRLHQNVHVGEKP

SEQ ID NO: 56687 - protein, 29 aa, Homo sapiens
METAVEALPLVEAIEIYPLAEAEGVQISG

SEQ ID NO: 56688 - protein, 30 aa, Homo sapiens
KDVHMPKHPELADKNVPNLHVMKAMQSLKS

SEQ ID NO: 56689 - protein, 195 aa, Homo sapiens
VATDHKAFYVLFTWDQEAQIYELVAQTVSERKNWCALITETAGSLKVPAPASRPKPRPSPSSTREPLLSSSENGNGGRETSPADARTERILSDLLPFCRPGPEGQLAATALRKVLSLKQLLFPAEEDNGAGPPRDGDGVPGGGPLSPARTQEIQENLLSLEETMKQLEELEEEFCRLRPLLSQLGGNSVPQPGCT

SEQ ID NO: 56690 - protein, 141 aa, Homo sapiens
KPRPSPSSTREPLLSSSENGNGGRETSPADARTERILSDLLPFCRPGPEGQLAATALRKVLSLKQLLFPAEEDNGAGPPRDGDGVPGGGPLSPARTQEIQENLLSLEETMKQLEELEEEFCRLRPLLSQLGGNSVPQPGCT

SEQ ID NO: 56691 - protein, 377 aa, Homo sapiens
TVICSSRATVMLYDDGNKRWLPAGTGPQAFSRVQIYHNPTANSFRVVGRKMQPDQQVVINCAIVRGVKYNQATPNFHQWRDARQVWGLNFGSKEDAAQFAAGMASALEALEGGGPPPPPALPTWSVPNGPSPEEVEQQKRQQPGPSEHIERRVSNAGGPPAPPAGGPPPPPGPPPPPGPPPPPGLPPSGVPAAAHGAGGGPPPAPPLPAAQGPGGGGAGAPGLAAAIAGAKLRKVSKQEEASGGPTAPKAESGRSGGGGLMEEMNAMLARRRKATQVGEKTPKDESANQEEPEARVPAQSESVRRPWEKNSTTLPRMKSSSSVTTSETQPCTPSSSDYSDLQRVKQELLEEVKKELQKVKEEIIEAFVQELRKRGSP

SEQ ID NO: 56692 - protein, 80 aa, Homo sapiens
LEASRFAQENELMFLETSALTGENVEEAFLKCARTILNKIDSGELDPERMGSGIQYGDASLRQLRQPRSAQAVAPQPCGC

SEQ ID NO: 56693 - protein, 737 aa, Homo sapiens
LSCQAQGPPEPVDLLWLQDAVPLATAPGHGPQRSLHVPGLNKTSSFSCEAHNAKGVTTSRTATITVLPQQPRNLHLVSRQPTELEVAWTPGLSGIYPLTHCTLQAVLSDDGMGIQAGEPDPPEEPLTSQASVPPHQLRLGSLHPHTPYHIRVACTSSQGPSSWTHWLPVETPEGVPLGPPENISATRNGSQAFVHWQEPRAPLQGTLLGYRLAYQGQDTPEVLMDIGLRQEVTLELQGDGSVSNLTVCVAAYTAAGDGPWSLPVPLEAWRPGQAQPVHQLVKEPSTPAFSWPWWYVLLGAVVAAACVLILALFLVHRRKKETRYGEVFEPTVERGELVVRYRVRKSYSRRTTEATLNSLGISEELKEKLRDVMVDRHKVALGKTLGEGEFGAVMEGQLNQDDSILKVAVKTMKIAICTRSELEDFLSEAVCMKEFDHPNVMRLIGVCFQGSERESFPAPVVILPFMKHGDLHSFLLYSRLGDQPVYLPTQMLVKFMADIASGMEYLSTKRFIHRDLAARNCMLNENMSVCVADFGLSKKIYNGDYYRQGRIAKMPVKWIAIESLADRVYTSKSDVWSFGVTMWEIATRGQTPYPGVENSEIYDYLRQGNRLKQPADCLDGLYALMSRCWELNPQDRPSFTELREDLENTLKALPPAQEPDEILYVNMDEGGGYPEPPGAAGGADPPTQPDPKDSCSCLTAAEVHPAGRYVLCPSTTPSPAQPADRGSPAAPGQEDGA

SEQ ID NO: 56694 - protein, 728 aa, Homo sapiens
LEMEQQQAYRPEMKTEMKQGAPTSFLPPEASQLKPDRQQFQSRKRPYEENRGRGYFEHREDRRGRSPQPPAEEDEDDFDDTLVAIDTYNCDLHFKVARDRSSGYPLTIEGFAYLWSGARASYGVRRGRVCFEMKINEEISVKHLPSTEPDPHVVRIGWSLDSCSTQLGEEPFSYGYGGTGKKSTNSRFENYGDKFAENDVIGCFADFECGNDVELSFTKNGKWMGIAFRIQKEALGGQALYPHVLVKNCAVEFNFGQRAEPYCSVLPGFTFIQHLPLSERIRGTVGPKSKAECEILMMVGLPAAGKTTWAIKHAASNPSKKYNILGTNAIMDKMRVMGLRRQRNYAGRWDVLIQQATQCLNRLIQIAARKKRNYILDQTNVYGSAQRRKMRPFEGFQRKAIVICPTDEDLKDRTIKRTDEEGKDVPDHAVLEMKANFTLPDVGDFLDEVLFIELQREEADKLVRQYNEEGRKAGPPPEKRFDNRGGGGFRGRGGGGGFQRYENRGPPGGNRGGFQNRGGGSGGGGNYRGGFNRSGGGGYSQNRWGNNNRDNNNSNNRGSYNRAPQQQPPPQQPPPPQPPPQQPPPPPSYSPARNPPGASTYNKNSNIPGSSANTSTPTVSSYSPPQPSYSQPPYNQGGYSQGYTAPPPPPPPPPAYNYGSYGGYNPAPYTPPPPPTAQTYPQPSYNQYQQYAQQWNQYYQNQGQWPPYYGNYDYGSYSGNTQGGTSTQ

SEQ ID NO: 56695 - protein, 78 aa, Homo sapiens
KDSEAWVPDSEERLILREEFTSRMHQRFLDGKDGDFDYSTVDDNPDFDNLDIVARDEEERYFDEEEPEDAPSPELDGD

SEQ ID NO: 56696 - protein, 19 aa, Homo sapiens
LARHLQTYGEHYPLDHFDK

SEQ ID NO: 56697 - protein, 155 aa, Homo sapiens
IENRALKDEEKMELQEIQLREAKHIAEEADRKYEEVARKLVIIEGDLERTEERAELAESLCREMDEQIRLMDQNLKCLSAAEEKYSQKEDKYEEEIKILTDKIKEAETHAEFAERSVAKLEKTIDDLEDKLKCTKGEHLCTQRMLDQTLLDLNEM

SEQ ID NO: 56698 - protein, 468 aa, Homo sapiens
KTQANDYFKAKDYENAIKFYSQAIELNPSNAIYYGNRSLAYLRTECYGYALGDATRAIELDKKYIKGYYRRAASNMALGKFRAALRDYETVVKVKPHDKDAKMKYQECNKIVKQKAFERAIAGDEHKRSVVDSLDIESMTIEDEYSGPKLEDGKVTISFMKELMQWYKDQKKLHRKCAYQILVQVKEVLSKLSTLVETTLKETEKITVCGDTHGQFYDLLNIFELNGLPSETNPYIFNGDFVDRGSFSVEVILTLFGFKLLYPDHFHLLRGNHETDNMNQIYGFEGEVKAKYTAQMYELFSEVFEWLPLAQCINGKVLIMHGGLFSEDGVTLDDIRKIERNRQPPDSGPMCDLLWSDPQPQNGRSISKRGVSCQFGPDVTKAFLEENNLDYIIRSHEVKAEGYEVAHGGRCVTVFSAPNYCDQMGNKASYIHLQGSDLRPQFHQFTAVPHPNVKPMAYANTLLQLGMM

SEQ ID NO: 56699 - protein, 39 aa, Homo sapiens
VSVEARTRGGAGTAAAAAAAGGTLIPVLRTPRASPWLTS

SEQ ID NO: 56700 - protein, 69 aa, Homo sapiens
RMQDTSVSFGYQLDLPKANLLFKGSVDSNWIVGATLEKKLPPLPLTLALGAFLNHRKNKFQCGFGLTIG

SEQ ID NO: 56701 - protein, 319 aa, Homo sapiens
RKMKVLWAALLVTFLAGCQAKVEQAVETEPEPELRQQTEWQSGQRWELALGRFWDYLRWVQTLSEQVQEELLSSQVTQELRALMDETMKELKAYKSELEEQLTPVAEETRARLSKELQAAQARLGADMEDVCGRLVQYRGEVQAMLGQSTEELRVRLASHLRKLRKRLLRDADDLQKRLAVYQAGAREGAERGLSAIRERLGPLVEQGRVRAATVGSLAGQPLQERAQAWGERLRARMEEMGSRTRDRLDEVKEQVAEVRAKLEEQAQQIRLQAEAFQARLKSWFEPLVEDMQRQWAGLVEKVQAAVGTSAAPVPSDNH

SEQ ID NO: 56702 - protein, 79 aa, Homo sapiens
LSLPVLVVVLSIVLEGPAPAQGTPDVSSALDKLKEFGNTLEDKARELISRIKQSELSAKMREWFSETFQKVKEKLKIDS

SEQ ID NO: 56703 - protein, 614 aa, Homo sapiens
IKGVLFRIFIIWAISSWFRRGPAPQDQAGPGGAPRVASRNLFPKDTLMNLHVYISEHEHFTDFNATSALFWEQHDLVYGDWTSGENSDGCYEHFAELDIPQSVQQNGSIYIHVYFTKSGFHPDPRQKALYRRLATVHMSRMINKYKRRRFQKTKNLLTGETEADPEMIKRAEDYGPVEVISHWHPNITINIVDDHTPWVKGSVPPPLDQYVKFDAVSGDYYPIIYFNDYWNLQKDYYPINESLASLPLRVSFCPLSLWRWQLYAAQSTKSPWNFLGDELYEQSDEEQDSVKVALLETNPYLLALTIIVSIVHSVFEFLAFKNDIQFWNSRQSLEGLSVRSVFFGVFQSFVVLLYILDNETNFVVQVSVFIGVLIDLWKITKVMDVRLDREHRVAGIFPRLSFKDKSTYIESSTKVYDDMAFRYLSWILFPLLGCYAVYSLLYLEHKGWYSWVLSMLYGFLLTFGFITMTPQLFINYKLKSVAHLPWRMLTYKALNTFIDDLFAFVIKMPVMYRIGCLRDDVVFFIYLYQRWIYRVDPTRVNEFGMSGEDPTAAAPVAEVPTAAGALTPTPAPTTTTATREEASTSLPTKPTQGASSASEPQEAPPKPAEDKKKD

SEQ ID NO: 56704 - protein, 141 aa, Homo sapiens
RAKPGPQDTVERPFYDLWASDNPLDRPLVGQDEFFLEQTKKKGVKRPARLHTKPSQARREAEADKPRRLGRLKYQAPDIDVQLSSELTDSLRTLKPEGNILRDRFKSFQRRNMIEPRERAKFKRKYKVKLVEKRAFREIQL

SEQ ID NO: 56705 - protein, 73 aa, Homo sapiens
LGRLKYQAPDIDVQLSSELTDSLRTLKPEGNILRDRFKSFQRRNMIEPRERAKFKRKYKVKLVEKRAFREIQL

SEQ ID NO: 56706 - protein, 97 aa, Homo sapiens
KQHVAPVTSVEWHPQDSGVFAASGADHQITQWDLAVERDPEAGDVEADPGLADLPQQLLFVHQGETELKELHWHPQCPGLLVSTALSGFTIFRTISV

SEQ ID NO: 56707 - protein, 53 aa, Homo sapiens
IKRPQDQLRFPRMLMKLVSLRTLSSVHSEQVFALRLQDKKLPPLLSEIWDVHE

SEQ ID NO: 56708 - protein, 250 aa, Homo sapiens
LLLLMAVAAPSRARGSGCRAGTGARGAGAEGREGEACGTVGLLLEHSFEIDDSANFRKRGSLLWNQQDGTLSLSQRQLSEEERGRLRDVAALNGLYRVRIPRRPGALDGLEAGGYVSSFVPACSLVESHLSDQLTLHVDVAGNVVGVSVVTHPGGCRGHEVEDVDLELFNTSVQLQPPTTAPGPETAAFIERLEMEQAQKAKNPQEQKSFFAKYWMYIIPVVLFLMMSGAPDTGGQGGGGGGGGGGGSGR

SEQ ID NO: 56709 - protein, 356 aa, Homo sapiens
LHTGQGHSAVPRGHPSHPRHPDIWNFGCQESSLMQAAWLLGALVVPQLLGFGHGARGAEREWEGGWGGAQEEEREREALMLKHLQEALGLPAGRGDENPAGTVEGKEDWEMEEDQGEEEEEEATPTPSSGPSPSPTPEDIVTYILGRLAGLDAGLHQLHVRLHALDTRVVELTQGLRQLRNAAGDTRDAVQALQEAQGRAEREHGRLEGCLKGLRLGHKCFLLSRDFEAQAAAQARCTARGGSLAQPADRQQMEALTRYLRAALAPYNWPVWLGVHDRRAEGLYLFENGQRVSFFAWHRSPRPELGAQPSASPHPLSPDQPNGGTLENCVAQASDDGSWWDHDCQRRLYYVCEFPF

SEQ ID NO: 56710 - protein, 57 aa, Homo sapiens
LGPPLLHPPPAQSWPAQLPPRAPLPGQMLLSGGPRGPVPQPGLQPSVMEDDILMDLI

SEQ ID NO: 56711 - protein, 437 aa, Homo sapiens
VEPAAPLVARGSSPPARPAPAMVRPRRAPYRSGAGGPLGGRGRPPRPLVVRAVRSRSWPASPRGPQPPRIRARSAPPMEGARVFGALGPIGPSSPGLTLGGLAVSEHRLSNKLLAWSGVLEWQEKRRPYSDSTAKLKRTLPCQAYVNQGENLETDQWPQKLIMQLIPQQLLTTLGPLFRNSQLAQFHFTNRDCDSLKGLCRIMGNGFAGCMLFPHISPCEVRVLMLLYSSKKKIFMGLIPYDQSGFVSAIRQVITTRKQAVGPGGVNSGPVQIVNNKFLAWSGVMEWQEPRPEPNSRSKRWLPSHVYVNQGEILRTEQWPRKLYMQLIPQQLLTTLVPLFRNSRLVQFHFTKDLETLKSLCRIMDNGFAGCVHFSYKASCEIRVLMLLYSSEKKIFIGLIPHDQGNFVNGIRRVIANQQQVLQRNLEQEQQQRGMGG

SEQ ID NO: 56712 - protein, 69 aa, Homo sapiens
RPPPPLLAAAMESSTFALVPVFAHLSILQSLVPAAGAASPVAISAQHLCYSHVTPGDPGAGAGQGPAPS

SEQ ID NO: 56713 - protein, 11 aa, Homo sapiens
RRHWRRTKLGL

SEQ ID NO: 56714 - protein, 174 aa, Homo sapiens
IMKTGALLLQGFIQDRAGRMGGEAPELALDPVPQDASTKKLSECLKRIGDELDSNMELQRMIAAVDTDSPREVFFRVAADMFSDGNFNWGRVVALFYFASKLVLKALCTKVPELIRTIMGWTLDFLRERLLGWIQDQGGWDGLLSYFGTPTWQTVTIFVAGVLTASLTIWKKMG

SEQ ID NO: 56715 - protein, 7 aa, Homo sapiens
RLTLKHD

SEQ ID NO: 56716 - protein, 35 aa, Homo sapiens
LEGLGNDSRDMYMESEGGDGYLAPENGYLMEAAPE

SEQ ID NO: 56717 - protein, 577 aa, Homo sapiens
IAVLIDELRNEDVQLRLNSIKKLSTIALALGVERTRSELLPFLTDTIYDEDEVLLALAEQLGTFTTLVGGPEYVHCLLPPLESLATVEETVVRDKAVESLRAISHEHSPSDLEAHFVPLVKRLAGGDWFTSRTSACGLFSVCYPRVSSAVKAELRQYFRNLCSDDTPMVRRAAASKLGEFAKVLELDNVKSEIIPMFSNLASDEQDSVRLLAVEACVNIAQLLPQEDLEALVMPTLRQAAEDKSWRVRYMVADKFTELQKAVGPEITKTDLVPAFQNLMKDCEAEVRAAASHKVKEFCENLSADCRENVIMSQILPCIKELVSDANQHVKSALASVIMGLSPILGKDNTIEHLLPLFLAQLKDECPEVRLNIISNLDCVNEVIGIRQLSQSLLPAIVELAEDAKWRVRLAIIEYMPLLAGQLGVEFFDEKLNSLCMAWLVDHVYAIREAATSNLKKLVEKFGKEWAHATIIPKVLAMSGDPNYLHRMTTLFCINVLSEVCGQDITTKHMLPTVLRMAGDPVANVRFNVAKSLQKIGPILDNSTLQSEVKPILEKLTQDQDVDVKYFAQEALTVLSLA

SEQ ID NO: 56718 - protein, 37 aa, Homo sapiens
IHTGEKPYKCHVCGKVFRHSSWFVQHQRSVHERVLTN

SEQ ID NO: 56719 - protein, 45 aa, Homo sapiens
ILSKTGYSNESTRFLFEGQRIADNHTPKELGMEEEDVIEVYQEQT

SEQ ID NO: 56720 - protein, 204 aa, Homo sapiens
KMAEVQVLVLDGRGHLLGRLAAIVAKQVLLGRKVVVVRCEGINISGNFYRNKLKYLAFLRKRMNTNPSRGPYHFRAPSRIFWRTVRGMLPHKTKRGQAALDRLKVFDGIPPPYDKKKRMVVPAALKVVRLKPTRKFAYLGRLAHEVGWKYQAVTATLEEKRKEKAKIHYRKKKQLMRLRKQAEKNVEKKIDKYTEVLKTHGLLV

SEQ ID NO: 56721 - protein, 155 aa, Homo sapiens
IQTERAYQKQPTIFQNKKRVLLGETGKEKLPRYYKNIGLGFKTPKEAIEGTYIDKKCPFTGNVSIRGRILSGVVTKMKMQRTIVIRRDYLHYIRKYNRFEKRHKNMSVHLSPCFRDVQIGDIVTVGECRPLSKTVRFNVLKVTKAAGTKKQFQKF

SEQ ID NO: 56722 - protein, 352 aa, Homo sapiens
LLFLLPGSLGAESHLSLLYHLTAVSSPAPGTPAFWVSGWLGPQQYLSYNSLRGEAEPCGAWVWENQVSWYWEKETTDLRIKEKLFLEAFKALGGKGPYTLQGLLGCELGPDNTSVPTAKFALNGEEFMNFDLKQGTWGGDWPEALAISQRWQQQDKAANKELTFLLFSCPHRLREHLERGRGNLEWKEPPSMRLKARPSSPGFSVLTCSAFSFYPPELQLRFLRNGLAAGTGQGDFGPNSDGSFHASSSLTVKSGDEHHYCCIVQHAGLAQPLRVELESPAKSSVLVVGIVIGVLLLTAAAVGGALLWRRMRSGLPAPWISLRGDDTGVLLPTPGEAQDADLKDVNVIPATA

SEQ ID NO: 56723 - protein, 334 aa, Homo sapiens
LDNRGPMMWRPSVLLLLLLLRHGAQGKPSPDAGPHGQGRVHQAAPLSDAPHDDAHGNFQYDHEAFLGREVAKEFDQLTPEESQARLGRIVDRMDRAGDGDGWVSLAELRAWIAHTQQRHIRDSVSAAWDTYDTDRDGRVGWEELRNATYGHYAPGEEFHDVEDAETYKKMLARDERRFRVADQDGDSMATREELTAFLHPEEFPHMRDIVIAETLEDLDRNKDGYVQVEEYIADLYSAEPGEEEPAWVQTERQQFRDFRDLNKDGHLDGSEVGHWVLPPAQDQPLVEANHLLHESDTDKDGRLSKAEILGNWNMFVGSQATNYGEDLTRHHDEL

SEQ ID NO: 56724 - protein, 105 aa, Homo sapiens
LKKLHTQERAVEEVKLAIKPYYQKKDITKEEYKDILRKAVHKICHSKSGEINPVKVSNLVRAYVQRYRYFRKHGRKPGDPPGPPRPPKEPGPPDKGGPGLPLPPL

SEQ ID NO: 56725 - protein, 89 aa, Homo sapiens
INEVLSQFDTVIKCTRNVCKECGNLYCHNMQLTLHKRNHTQKKCNQCLDCGKYFTRQSTLIQHQRIHTGERPYKCNECIKTFNQRAHLT

SEQ ID NO: 56726 - protein, 46 aa, Homo sapiens
LVEAARGLGQLGEAVKRLAEMAWTTSMPAPTTTTPEEEERPLRGDV

SEQ ID NO: 56727 - protein, 61 aa, Homo sapiens
VSHSDLKPFTCGACGKAFKRSSHLSRHRATHRARAGPPHTCPLCPRRFQDAAELAQHVRLH

SEQ ID NO: 56728 - protein, 230 aa, Homo sapiens
TPDPWGSSDGGVPVSGPSASDPWTPAPAFSDPWGGSPAKPSTNGTTAAGGFDTEPDEFSDFDRLRTALPTSGSSAGELELLAGEVPARSPGAFDMSGVRGSLAEAVGSPPPAATPTPTPPTRKTPESFLGPNAALVDLDSLVSRPGPTPPGAKASNPFLPGGGPATGPSVTNPFQPAPPATLTLNQLRLSPVPPVPGAPPTYISPLGGGPGLPPMMPPGPPAPNTNPFLL

SEQ ID NO: 56729 - protein, 146 aa, Homo sapiens
VPARSPGAFDMSGVRGSLAEAVGSPPPAATPTPTPPTRKTPESFLGPNAALVDLDSLVSRPGPTPPGAKASNPFLPGGGPATGPSVTNPFQPAPPATLTLNQLRLSPVPPVPGAPPTYISPLGGGPGLPPMMPPGPPAPNTNPFLL

SEQ ID NO: 56730 - protein, 43 aa, Homo sapiens
RTHTGERPYACNKCGKAFTQSSHLIGHQRTHNRTKRKKKQPTS

SEQ ID NO: 56731 - protein, 90 aa, Homo sapiens
RDPWYSTVGLLPPVRAMSQRNLNAKTEQGPTGVTMTSNPITWGQIKKTTQEAEKLLERQGQAKTPDSMFLAMLAVVSCASIGSGEPPTGN

SEQ ID NO: 56732 - protein, 72 aa, Homo sapiens
KAQYLAAKALKKQSWRFHTKYMMWFQRHEEPKTITDEFEQGTYIYFDYEKWGQRKKEGFTFEYRYLEDRDLQ

SEQ ID NO: 56733 - protein, 37 aa, Homo sapiens
LVAAGRLGTSVRKTLLLCSPQPDGKVVYTSLQWASLQ

SEQ ID NO: 56734 - protein, 203 aa, Homo sapiens
RRRRGSGANMPVARSWVCRKTYVTPRRPFEKSRLDQELKLIGEYGLRNKREVWRVKFTLAKIRKAARELLTLDEKDPRRLFEGNALLRRLVRIGVLDEGKMKLDYILGLKIEDFLERRLQTQVFKLGLAKSIHHARVLIRQRHIRVRKQVVNIPSFIVRLDSQKHIDFSLRSPYGGGRPGRVKRKNAKKGQGGAGAGDDEEED

SEQ ID NO: 56735 - protein, 114 aa, Homo sapiens
IECGKTFCWSTNLIRHSIIHTGEKPYECSECGKAFSRSSSLTQHQRMHTGRNPISVTDVGRPFTSGQTSVNIQELLLGKNFLNVTTEENLLQEEASYMASDRTYQRETPQVSSL

SEQ ID NO: 56736 - protein, 545 aa, Homo sapiens
VAVTFTQEEWGQLDVTQRALYVEVMLETCGLLVALGDSTKPETVEPIPSHLALPEEVSLQEQLAQGVPRYSYLGQAMDQDGPSEMQEYFLRPGTDPQSEKLHGKMSLEHEGLATADGICSMMIQNQVSPEDALYGFDSYGPVTDSLIHEGENSYKFEEMFNENCFLVQHEQILPRVKPYDCPECGKAFGKSKHLLQHHIIHTGEKPYKCLECGKDFNRRSHLTRHQRTHNGDKPFVCSECGRTFNRGSHLTRHQRVHSGEKPFVCNECGKAFTYRSNFVLHNKSHNEKKPFACSECGKGFYESTALIQHFIIHTGERPFKCLECGKAFNCRSHLKQHERIHTGEKPFVCSQCGKAFTHYSTYVLHERAHTGEKPFECKECGKAFSIRKDLIRHFNIHTGEKPYECLQCGKAFTRMSGLTRHQWIHTGEKPYVCIQCGKAFCRTTNLIRHFSIHTGEKPYECVECGKAFNRRSPLTRHQRIHTAEKSHEPIQSGNVSCESTDLIQHSIIHTESSPVSAVNMETPSIAAHSSSLDINGFIVEETLPL

SEQ ID NO: 56737 - protein, 777 aa, Homo sapiens
LELLEHCGVCRERLRPEREPRLLPCLHSACSACLGPAAPAAANSSGDGGAAGDGTVVDCPVCKQQCFSKDIVENYFMRDSGSKAATDAQDANQCCTSCEDNAPATSYCVECSEPLCETCVEAHQRVKYTKDHTVRSTGPAKSRDGERTVYCNVHKHEPLVLFCESCDTLTCRDCQLNAHKDHQYQFLEDAVRNQRKLLASLVKRLGDKHATLQKSTKEVRSSIRQVSDVQKRVQVDVKMAILQIMKELNKRGRVLVNDAQKVTEGQQERLERQHWTMTKIQKHQEHILRFASWALESDNNTALLLSKKLIYFQLHRALKMIVDPVEPHGEMKFQWDLNAWTKSAEAFGKIVAERPGTNSTGPAPMAPPRAPGPLSKQGSGSSQPMEVQEGYGFGSGDDPYSSAEPHVSGVKRSRSGEGEVSGLMRKVPRVSLERLDLDLTADSQPPVFKVFPGSTTEDYNLIVIERGAAAAATGQPGTAPAGTPGAPPLAGMAIVKEEETEAAIGAPPTATEGPETKPVLMALAEGPGAEGPRLASPSGSTSSGLEVVAPEGTSAPGGGPGTLDDSATICRVCQKPGDLVMCNQCEFCFHLDCHLPALQDVPGEEWSCSLCHVLPDLKEEDGSLSLDGADSTGVVAKLSPANQRKCERVLLALFCHEPCRPLHQLATDSTFSLDQPGGTLDLTLIRARLQEKLSPPYSSPQEFAQDVGRMFKQFNKLTEDKADVQSIIGLQRFFETRMNEAFGDTKFSAVLVEPPPMSLPGAGLSSQELSGGPGDGP

SEQ ID NO: 56738 - protein, 196 aa, Homo sapiens
VMERWETPYMHALAAAASSKGGRVLEVGFGMAIAASKVQEAPIDEHWIIECNDGVFQRLRDWAPRQTHKVIPLKGLWEDVAPTLPDGHFDGILYDTYPLSEETWHTHQFNFIKNHAFRLLKPGGVLTYCNLTSWGELMKSKYSDITIMFEETQVPALLEAGFRRENIRTEVMALVPPADCRYYAFPQMITPLVTKG

SEQ ID NO: 56739 - protein, 15 aa, Homo sapiens
VTRFLGPRYRELVKN

SEQ ID NO: 56740 - protein, 52 aa, Homo sapiens
LEQHDSCPVCRKSLTGQNTATNPPGLTGVSFSSSSSSSSSSSPSNENATSNS

SEQ ID NO: 56741 - protein, 85 aa, Homo sapiens
KRLSASRRKQHFINQAVRNSDLVPKAKGRKSLQRLENTQYLLTLLETDGGLPGLEDGDLAPPASPGIFAEACNNATYVEVSGTIS

SEQ ID NO: 56742 - protein, 112 aa, Homo sapiens
RREDPAYTPRECFQRISRRLRAVLKRSRIPMETLETWEERLLRFFSVSPQAVYTAMLDNSFERLLLHAVCQYMDLISASADLEGKRQMKVSNRHLDFLPPGLLLSAYLEQHS

SEQ ID NO: 56743 - protein, 47 aa, Homo sapiens
LRRASYEFMRRSLIFYRNEIRKVTGKDPLEQFGISEEARFQLSGLQA

SEQ ID NO: 56744 - protein, 52 aa, Homo sapiens
VLLQGLAGGTFLFITFLEILAKELEEKSDRLLKVLFLVLGYTVLAGMVFLKW

SEQ ID NO: 56745 - protein, 52 aa, Homo sapiens
METSAKMNYNVKELFQELLTLETRRNMSLNIDGKRSGKQKRTDRVKGKCTLM

SEQ ID NO: 56746 - protein, 135 aa, Homo sapiens
VAYYKKALELDPDNETYKSNLKIAELKLREAPSPTGGVGSFDIAGLLNNPGFMSMASNLMNNPQIQQLMSGMISGGNNPLGTPGTSPSQNDLASLIQAGQQFAQQMQQQNPELIEQLRSQIRSRTPSASNDDQQE

SEQ ID NO: 56747 - protein, 28 aa, Homo sapiens
VALDMYEHETGRAFQYADGLEQLRGAPS

SEQ ID NO: 56748 - protein, 128 aa, Homo sapiens
KSHRCPFPDCAKAYYKSSHLKSHLRTHTGERPFACDWQGCDKKFARSDELARHHRTHTGEKRFSCPLCSKRFTRSDHLAKHARRHPGFHPDLLRRPGARSTSPSDSLPCSLAGSPAPSPAPSPAPAGL

SEQ ID NO: 56749 - protein, 30 aa, Homo sapiens
KTCFTFCYAAGNNNGTSVEDGQIPEVIFYT

SEQ ID NO: 56750 - protein, 133 aa, Homo sapiens
LSFIAKNDEGATHEKLDFRLHFSCSSYLITTPCYSDAFAKLLESGDLSMSSIKVDGIRMSFQNLLAKICFHHHFSVVERVDSCASMYSRSIQGHHVCLLVKKGENSVSVDGKCSDSTLLSNLLEEMKATLAKC

SEQ ID NO: 56751 - protein, 71 aa, Homo sapiens
ILPVGGIKEKTIAAKRAGVTCIVLPAENKKDFYDLAAFITEGLEVHFVEHYREIFDIAFPDEQAEALAVER

SEQ ID NO: 56752 - protein, 123 aa, Homo sapiens
LSFSDSESDNSADSSLPSREPPPPQKPPPPNSKVSGRRSPESCSKPEKILKKGTYDKAYTDELVELHRRLMALRERNVLQQIVNLIEETGHFNVTNTTFDFDLFSLDETTVRKLQSCLEAVAT

SEQ ID NO: 56753 - protein, 104 aa, Homo sapiens
VSEMPAAKRLRLDTGPQSLSGKSTPQPPSGKTTPNSGDVQVTEDAVRRYLTRKPMTTKDLLKKFQTKKTGLSSEQTVNVLAQILKRLNPERKMINDKMHFSLKE

SEQ ID NO: 56754 - protein, 641 aa, Homo sapiens
KDAFADAVQRARQIAAKIGGDAATTVNNSTPDFGFGGQKRQLEDGDQPESKKLASQGDSISSQLGPIHPPPRTSMTEEYRVPDGMVGLIIGRGGEQINKIQQDSGCKVQISPDSGGLPERSVSLTGAPESVQKAKMMLDDIVSRGRGGPPGQFHDNANGGQNGTVQEIMIPAGKAGLVIGKGGETIKQLQERAGVKMILIQDGSQNTNVDKPLRIIGDPYKVQQACEMVMDILRERDQGGFGDRNEYGSRIGGGIDVPVPRHSVGVVIGRSGEMIKKIQNDAGVRIQFKQDDGTGPEKIAHIMGPPDRCEHAARIINDLLQSLRSGPPGPPGGPGMPPGGRGRGRGQGNWGPPGGEMTFSIPTHKCGLVIGRGGENVKAINQQTGAFVEISRQLPPNGDPNFKLFIIRGSPQQIDHAKQLIEEKIEGPLCPVGPGPGGPGPAGPMGPFNPGPFNQGPPGAPPHAGGPPPHQYPPQGWGNTYPQWQPPAPHDPSKAAAAAADPNAAWAAYYSHYYQQPPGPVPGPAPAPAAPPAQGEPPQPPPTGQSDYTKAWEEYYKKIGQQPQQPGAPPQQDYTKAWEEYYKKQAQVATGGGPGAPPGSQPDYSAAWAEYYRQQAAYYGQTPGPGGPQPPPTQQGQQQAQ

SEQ ID NO: 56755 - protein, 102 aa, Homo sapiens
KAWEEYYKKQAQVATGGGPGAPPGSQPDYSAAWAEYYRQQAAYYGQTPGPGGPQPPPTQQGQQQASGNCHPPPPPFSFQPPATVHPALVGSAGNPFPCGVCP

SEQ ID NO: 56756 - protein, 110 aa, Homo sapiens
IQFLSSHNLPHGSTYQMRRPGGELPLSKSYSSGNRKGFLSGLLDNVKQELAKNKEMKESIKKFRDEARRLEESDVLQEARRKYKTIESETVRTSEVLRKKLGELTGTVKE

SEQ ID NO: 56757 - protein, 84 aa, Homo sapiens
ILDIDNVDLAMGKMMEQGPVLIITFQAQLVMVVRNPKGEVVEGDPDKVLRMLYVWALCRDQDELNPYAAWRLLDISASSTEQIL

SEQ ID NO: 56758 - protein, 277 aa, Homo sapiens [sequence omitted]

SEQ ID NO: 56759 - protein, 1354 aa, Homo sapiens
LGSFFGSLPGFSSARNLVANAHSSARARPAADPTGAPAAEAAQPQAQVAAHPEQTAPWTEKELQPSEKQMVSGAKDLVCSKMSRAKDAVSSGVASVVDVAKGVVQGGLDTTRSALTGTKEVVSSGVTGAMDMAKGAVQGGLDTSKAVLTGTKDTVSTGLTGAVNVAKGTVQAGVDTTKTVLTGTKDTVTTGVMGAVNLAKGTVQTGVETSKAVLTGTKDAVSTGLTGAVNVARGSIQTGVDTSKTVLTGTKDTVCSGVTGAMNVAKGTIQTGVDTSKTVLTGTKDTVCSGVTGAMNVAKGTIQTGVDTSKTVLTGTKDTVCSGVTGAMNVAKGTIQTGVDTTKTVLTGTKNTVCSGVTGAVNLAKEAIQGGLDTTKSMVMGTKDTMSTGLTGAANVAKGAMQTGLNTTQNIATGTKDTVCSGVTGAMNLARGTIQTGVDTTKIVLTGTKDTVCSGVTGAANVAKGAVQGGLDTTKSVLTGTKDAVSTGLTGAVNVAKGTVQTGVDTTKTVLTGTKDTVCSGVTSAVNVAKGAVQGGLDTTKSVVIGTKDTMSTGLTGAANVAKGAVQTGVDTAKTVLTGTKDTVTTGLVGAVNVAKGTVQTGMDTTKTVLTGTKDTIYSGVTSAVNVAKGAVQTGLKTTQNIATGTKNTFGSGVTSAVNVAKGAAQTGVDTAKTVLTGTKDTVTTGLMGAVNVAKGTVQTSVDTTKTVLTGTKDTVCSGVTGAANVAKGAIQGGLDTTKSVLTGTKDAVSTGLTGAVKLAKGTVQTGMDTTKTVLTGTKDAVCSGVTGAANVAKGAVQMGVDTAKTVLTGTKDTVCSGVTGAANVAKGAVQTGLKTTQNIATGTKNTLGSGVTGAAKVAKGAVQGGLDTTKSVLTGTKDAVSTGLTGAVNLAKGTVQTGVDTSKTVLTGTKDTVCSGVTGAVNVAKGTVQTGVDTAKTVLSGAKDAVTTGVTGAVNVAKGTVQTGVDASKAVLMGTKDTVFSGVTGAMSMAKGAVQGGLDTTKTVLTGTKDAVSAGLMGSGNVATGATHTGLSTFQNWLPSTPATSWGGLTSSRTTDNGGEQTALSPQEAPFSGISTPPDVLSVGPEPAWEAAATTKGLATDVATFTQGAAPGREDTGLLATTHGPEEAPRLAMLQNELEGLGDIFHPMNAEEQAQLAASQPGPKVLSAEQGSYFVRLGDLGPSFRQRAFEHAVSHLQHGQFQARDTLAQLQDCFRLIEKAQQAPEGQPRLDQGSGASAEDAAVQEERDAGVLSRVCGLLRQLHTAYSGLVSSLQGLPAELQQPVGRARHSLCELYGIVASAGSVEELPAERLVQSREGVHQAWQGLEQLLEGLQHNPPLSWLVGPFALPAGGQ

SEQ ID NO: 56760 - protein, 155 aa, Homo sapiens
LLLGAVALRPAEAVSEPTTVAFDVRPGGVVHSFSHNVGPGDKYTCMFTYASQGGTNEQWQMSLGTSEDHQHFTCTIWRPQGKSYLYFTQFKAEVRGAEIEYAMAYSKAAFERESDVPLKTEEFEVTKTAVAHRPGAFKAELSKLVIVAKASRTEL

SEQ ID NO: 56761 - protein, 57 aa, Homo sapiens
LDENVHFFHTNFLVSQLIRAGKPYQLQIYPNERHSIRCPESGEHYEVTLLHFLQEYL

SEQ ID NO: 56762 - protein, 188 aa, Homo sapiens
KECGRAFAGRSGLTKHVRIHTGEKPYECNECGKAYNRFYLLTEHFKTHTEEKPFECKVCGKSFRSSSCLKNHFRIHTGIKPYKCKECGKAFTVSSSLHNHVKIHTGEKPYECKDCGKAFATSSQLIEHIRTHTGEKPYICKECGKTFRASSHLQKHVRIHTGEKPYICNECGKAYNRFYLLTKHLKTH

SEQ ID NO: 56763 - protein, 17 aa, Homo sapiens
IHTGEKPYECKDMSVTI

SEQ ID NO: 56764 - protein, 33 aa, Homo sapiens
KRLVDDRWLWRHVDLTLYTKRGFVMLARMVSIS

SEQ ID NO: 56765 - protein, 59 aa, Homo sapiens
MPSPTEILSSCLTMPKLRVLELQGLGWEGQEAEKILCKGLPHCMVIVRACPKESMDWWM

SEQ ID NO: 56766 - protein, 250 aa, Homo sapiens
ITVRAMGSRFGSWMTDTMAPSADSRVWYMDGYYKGRRVLEFRTLGDFIKGQNFIQHLLPQPWAGTGHVVYNGSLFYNKYQSNVVVKYHFRSRSVLVQRSLPGAGYNNTFPYSWGGFSDMDFMVDESGLWAVYTTNQNAGNIVVSRLDPHTLEVMRSWDTGYPKRSAGEAFMICGVLYVTNSHLAGAKVYFAYFTNTSSYEYTDVPFHNQYSHISMLDYNPRERALYTWNNGHQVLYNVTLFHVISTSGDP

SEQ ID NO: 56767 - protein, 1739 aa, Homo sapiens
LGQPRAGLCLLLAALQLLPGTQADPVDVLKALGVQGGQAGVPEGPGFCPQRTPEGDRAFRIGQASTLGIPTWELFPEGHFPENFSLLITLRGQPANQSVLLSIYDERGARQLGLALGPALGLLGDPFRPLPQQVNLTDGRWHRVAVSIDGEMVTLVADCEAQPPVLGHGPRFISIAGLTVLGTQDLGEKTFEGDIQELLISPDPQAAFQACERYLPDCDNLAPAATVAPQGEPETPRPRRKGKGKGRKKGRGRKGKGRKKNKEIWTSSPPPDSAENQTSTDIPKTETPAPNLPPTPTPLVVTSTVTTGLNATILERSLDPDSGTELGTLETKAAREDEEGDDSTMGPDFRAAEYPSRTQFQIFPGAGEKGAKGEPAVIEKGQQFEGPPGAPGPQGVVGPSGPPGPPGFPGDPGPPGPAGLPGIPGIDGIRGPPGTVIMMPFQFAGGSFKGPPVSFQQAQAQAVLQQTQLSMKGPPGPVGLTGRPGPVGLPGHPGLKGEEGAEGPQGPRGLQGPHGPPGRVGKMGRPGADGARGLPGDTGPKGDRGFDGLPGLPGEKGQRGDFGHVGQPGPPGEDGERGAEGPPGPTGQAGEPGPRGLLGPRGSPGPTGRPGVTGIDGAPGAKGNVGPPGEPGPPGQQGNHGSQGLPGPQGLIGTPGEKGPPGNPGIPGLPGSDGPLGHPGHEGPTGEKGAQGPPGSAGPPGYPGPRGVKGTSGNRGLQGEKGEKGEDGFPGFKGDVGLKGDQGKPGAPGPRGEDGPEGPKGQAGQAGEEGPPGSAGEKGKLGVPGLPGYPGRPGPKGSIGFPGPLGPIGEKGKSGKTGQPGLEGERGPPGSRGERGQPGATGQPGPKGDVGQDGAPGIPGEKGLPGLQGPPGFPGPKGPPGHQGKDGRPGHPGQRGELGFQGQTGPPGPAGVLGPQGKTGEVGPLGERGPPGPPGPPGEQGLPGLEGREGAKGELGPPGPLGKEGPAGLRGFPGPKGGPGDPGPTGLKGDKGPPGPVGANGSPGERGPLGPAGGIGLPGQSGSEGPVGPAGKKGSRGERGPPGPTGKDGIPGPLGPLGPPGAAGPSGEEGDKGDVGAPGHKGSKGDKGDAGPPGQPGIRGPAGHPGPPGADGAQGRRGPPGLFGQKGDDGVRGFVGVIGPPGLQGLPGPPGEKGEVGDVGSMGPHGAPGPRGPQGPTGSEGTPGLPGGVGQPGAVGEKGERGDAGDPGPPGAPGIPGPKGDIGEKGDSGPSGAAGPPGKKGPPGEDGAKGSVGPTGLPGDLGPPGDPGVSGIDGSPGEKGDPGDVGGPGPPGASGEPGAPGPPGKRGPSGHMGREGREGEKGAKGEPGPDGPPGRTGPMGARGPPGRVGPEGLRGIPGPVGEPGLLGAPGQMGPPGPLGPSGLPGLKGDTGPKGEKGHIGLIGLIGPPGEAGEKGDQGLPGVQGPPGPKGDPGPPGPIGSLGHPGPPGVAGPLGQKGSKGSPGSMGPRGDTGPAGPPGPPGAPAELHGLRRRRRFVPVPLPVVEGGLEEVLASLTSLSLELEQLRRPPGTAERPGLVCHELHRNHPHLPDGEYWIDPNQGCARDSFRVFCNFTAGGETCLYPDKKFEIVKLASWSKEKPGGWYSTFRRGKKFSYVDADGSPVNVVQLNFLKLLSATARQNFTYSCQNAAAWLDEATGDYSHSARFLGTNGEELSFNQTTAATVSVPQDGCRLRKGQTKTLFEFSSSRAGFLPLWDVAATDFGQTNQKFGFELGPVCFSS

SEQ ID NO: 56768 - protein, 111 aa, Homo sapiens
KLVFFELIFDSLQDDEEVEGWAEAVEPEEMLDVKMEDIKESIETMRTRLERSIQMLTLLRAFEARDRNLQEGNLERVNFWSAVNVAVLLLVAVLQVCTLKRFFQDKRPVPT

SEQ ID NO: 56769 - protein, 298 aa, Homo sapiens
LADTPDAATTSRSDQLTPQGHVAVAVGSGGSYGAEDEVEEESDKAALLQEQQQQQQPGFWTFSYYQSFFDVDTSQVLDRIKGSLLPRPGHNFVRHHLRNRPDLYGPFWICATLAFVLAVTGNLTLVLAQRRDPSIHYSPQFHKVTVAGISIYCYAWLVPLALWGFLRWRKGVQERMGPYTFLETVCIYGYSLFVFIPMVVLWLIPVPWLQWLFGALALGLSAAGLVFTLWPVVREDTRLVATVLLSVVVLLHALLAMGCKLYFFQSLPPENVAPPPQITSLPSNIALSPTLPQSLAPS

SEQ ID NO: 56770 - protein, 31 aa, Homo sapiens
LLTEAYGEVHIKTMPAATYRLLTGQEQPVYL

SEQ ID NO: 56771 - protein, 409 aa, Homo sapiens
KRRLSSSRRGVSREEIEREVNILREIRHPNIITLHDIFENKTDVVLILELVSGGELFDFLAEKESLTEDEATQFLKQILDGVHYLHSKRIAHFDLKPENIMLLDKNVPNPRIKLIDFGIAHKIEAGNEFKNIFGTPEFVAPEIVNYEPLGLEADMWSIGVITYILLSGASPFLGETKQETLTNISAVNYDFDEEYFSNTSELAKDFIRRLLVKDPKRRMTIAQSLEHSWIKAIRRRNVRGEDSGRKPERRRLKTTRLKEYTIKSHSSLPPNNSYADFERFSKVLEEAAAAEEGLRELQRSRRLCHEDVEALAAIYEEKEAWYREESDSLGQDLRRLRQELLKTEALKRQAQEEAKGALLGTSGLKRRFSRLENRYEALAKQVASEMRFVQDLVRALEQEKLQGVECGLR

SEQ ID NO: 56772 - protein, 132 aa, Homo sapiens
LKNHMRVHTGLRPYQCDSCCKTFVRSDHLHRHLKKDGCNGVPSRRGRKPRVRGGAPDPSPGATATPGAPAQPSSPDARRNGQEKHFKDEDEDEDVASPDGLGRLNVAGAGGGGDSGGGPGAATDGNFTAGLA

SEQ ID NO: 56773 - protein, 357 aa, Homo sapiens
LELDEQQKKRLEAFLTQKAKVGELKDDDFERISELGAGNGGVVTKVQHRPSGLIMARKLIHLEIKPAIRNQIIRELQVLHECNSPYIVGFYGAFYSDGEISICMEHMDGGSLDQVLKEAKRIPEEILGKVSIAVLRGLAYLREKHQIMHRDVKPSNILVNSRGEIKLCDFGVSGQLIDSMANSFVGTRSYMAPERLQGTHYSVQSDIWSMGLSLVELAVGRYPIPPPDAKELEAIFGRPVVDGEEGEPHSISPRPRPPGRPVSGHGMDSRPAMAIFELLDYIVNEPPPKLPNGVFTPDFQEFVNKCLIKNPAERADLKMLTNHTFIKRSEVEEVDFAGWLCKTLRLNQPGTPTRTAV

SEQ ID NO: 56774 - protein, 340 aa, Homo sapiens
LDDDFKEMEKKVDVTSKAVTEVLARTIEYLQPNPASRAKLTMLNTVSKIRGQVKNPGYPQSEGLLGECMIRHGKELGGESNFGDALLDAGESMKRLAEVKDSLDIEVKQNFIDPLQNLCEKDLKEIQHHLKKLEGRRLDFDYKKKRQGKIPDEELRQALEKFEESKEVAETSMHNLLETDIEQVSQLSALVDAQLDYHRQAVQILDELAEKLKRRMREASSRPKREYKPKPREPFDLGEPEQSNGGFPCTTAPKIAASSSFRSSDKPIRTPSRSMPPLDQPSCKALYDFEPENDGELGFHEGDVITLTNQIDENWYEGMLDGQSGFFPLSYVEVLVPLPQ

SEQ ID NO: 56775 - protein, 300 aa, Homo sapiens
KEAILLHFSTDPVAASIMKIYTFNKDQDRVKLGVDTIAKYLDNIHLHPEEEKYRKIKLQNKVFQERINCLEGTHEFFEAIGFQKVLLPAQDQEDPEEFYVLSETTLAQPQSLERHKEQLLAAEPVRAKLDRQRRVFQPSPLASQFELPGDFFNLTAEEIKREQRLRSEAVERLSVLRTKAMREKEEQRGLRKYNYTLLRVRLPDGCLLQGTFYARERLGAVYGFVREALQSDWLPFELLASGGQKLSEDENLALNECGLVPSALLTFSWDMAVLEDIKAAGAEPDSILKPELLSAIEKLL

SEQ ID NO: 56776 - protein, 377 aa, Homo sapiens
VDYSVWDHIEVSDDEDETHPNIDTASLFRWRHQARVERMEQFQKEKEELDRGCRECKRKVAECQRKLKELEVAEGGKAELERLQAEAQQLRKEERSWEQKLEEMRKKEKSMPWNVDTLSKDGFSKSMVNTKPEKTEEDSEEVREQKHKTFVEKYEKQIKHFGMLRRWDDSQKYLSDNVHLVCEETANYLVIWCIDLEVEEKCALMEQVAHQTIVMQFILELAKSLKVDPRACFRQFFTKIKTADRQYMEGFNDELEAFKERVRGRAKLRIEKAMKEYEEEERKKRLGPGGLDPVEVYESLPEELQKCFDVKDVQMLQDAISKMDPTDAKYHMQRCIDSGLWVPNSKASEAKEGEEAGPGDPLLEAVPKTGDEKDVSV

SEQ ID NO: 56777 - protein, 168 aa, Homo sapiens
LTRRIGVGVAVLNRLLYAVGGFDGTNRLNSAECYYPERNEWRMITAMNTIRSGAGVCVLHNCIYAAGGYDGQDQLNSVERYDVETETWTFVAPMKHRRSALGITVHQGRIYVLGGYDGHTFLDSVECYDPDTDTWSEVTRMTSGRSGVGVAVTMEPCRKQIDQQNCTC

SEQ ID NO: 56778 - protein, 53 aa, Homo sapiens
KENINVKQVFERLVDVICEKMNESLEPSSSSGSNGKGPAVGDAPAPQPSSCSC

SEQ ID NO: 56779 - protein, 12 aa, Homo sapiens
KTELAWSPRLAA

SEQ ID NO: 56780 - protein, 25 aa, Homo sapiens
LEEPPLPEDHQEEDDNLQRQQQGQS

SEQ ID NO: 56781 - protein, 467 aa, Homo sapiens
KSLQALGEVIEAELRSTKHWELTAEGEEIAREGSHEARVFRSIPPEGLAQSELMRLPSGKVGFSKAMSNKWIRVDKSAADGPRVFRVVDSMEDEVQRRLQLVRGGQAEKLGEKERSELRKRKLLAEVTLKTYWVSKGSAFSTSISKQETELSPEMISSGSWRDRPFKPYNFLAHGVLPDSGHLHPLLKVRSQFRQIFLEMGFTEMPTDNFIESSFWNFDALFQPQQHPARDQHDTFFLRDPAEALQLPMDYVQRVKRTHSQGGYGSQGYKYNWKLDEARKNLLRTHTTSASARALYRLAQKKPFTPVKYFSIDRVFRNETLDATHLAEFHQIEGVVADHGLTLGHLMGVLREFFTKLGITQLRFKPAYNPYTEPSMEVFSYHQGLKKWVEVGNSGVFRPEMLLPMGLPENVSVIAWGLSLERPTMIKYGINNIRELVGHKVNLQMVYDSPLCRLDAEPRPPPTQEAA

SEQ ID NO: 56782 - protein, 209 aa, Homo sapiens
VAATLAPGSRGYRARPPPRRRPGPRWPDPEDLLTPRWQLGPRYAAKQFARYGAASGVVPGSLWPSPEQLRELEAEEREWYPSLATMQESLRVKQLAEEQKRREREQHIAECMAKMPQMIVNWQQQQRENWEKAQADKERRARLQAEAQELLGYQVDPRSARFQELLQDLEKKERKRLKEEKQKRKKEARAAALAAAVAQDPAASGAPSS

SEQ ID NO: 56783 - protein, 159 aa, Homo sapiens
VPELTQQMFDAKNMMAACDPRHGRYLTVAAVFRGRMSMKEVDEQMLSVQSKNSSYFVEWIPNNVKTAVCDIPPRGLKMAATFIGNSTAIQELFKRISEQFTAMFRRKAFLHWYTGEGMDEMEFTEAESNMNDLVSEYQQYQDATAEEGEFEEEAEEEVA

SEQ ID NO: 56784 - protein, 25 aa, Homo sapiens
KYLKLSPKHPESNTAGMDIFAKFSA

SEQ ID NO: 56785 - protein, 322 aa, Homo sapiens
LNFHNCNNSVPGKEHPFDITVMIREKNPDGFLSAAEMPLFKLYMVMSACFLAAGIFWVSILCRNTYSVFKIHWLMAALAFTKSISLLFHSINYYFINSQGHPIEGLAVMYYIAHLLKGALLFITIALIGSGWAFIKYVLSDKEKKVFGIVIPMQVLANVAYIIIESREEGASDYVLWKEILFLVDLICCGAILFPVVWSIRHLQDASGTDGKVAVNLAKLKLFRHYYVMVICYVYFTRIIAILLQVAVPFQWQWLYQLLVEGSTLAFFVLTGYKFQPTGNNPYLQLPQEDEEDVQMEQVMTDSGFREGLSKVNKTASGRELL

SEQ ID NO: 56786 - protein, 34 aa, Homo sapiens
LGFKRSYEEHIPYTHMNGGKKNGRILTLPRSNPS

SEQ ID NO: 56787 - protein, 46 aa, Homo sapiens
LAQQVNPEEIQLGEDEDEDEMDLEPNEVRLEQQSVPAAVFGSLKED

SEQ ID NO: 56788 - protein, 135 aa, Homo sapiens
VFSMAAMNKEGGTASVATGPDSPSPVPLPPGKPALPGADGTPFGCPPGRKEKPSDPVEWTVMDVVEYFTEAGFPEQATAFQEQEIDGKSLLLMQRTDVLTGLSIRLGPALKIYEHHIKVLQQGHFEDDDPDGFLG

SEQ ID NO: 56789 - protein, 11 aa, Homo sapiens
IDISTYIEQSR

SEQ ID NO: 56790 - protein, 5 aa, Homo sapiens
MVKVE

SEQ ID NO: 56791 - protein, 299 aa, Homo sapiens
VLPLAFGKYFASVSAHVSIWKVPVSYAHTVKATMPIWVVLLSRIIMKEKQSTKVYLSLIPIISGVLLATVTELSFDMWGLVSALAATLCFSLQNIFSKKVLRDSRIHHLRLLNILGCHAVFFMIPTWVLVDLSAFLVSSDLTYVYQWPWTLLLLAVSGFCNFAQNVIAFSILNLVSPLSYSVANATKRIMVITVSLIMLRNPVTSTNVLGMMTAILGVFLYNKTKYDANQQARKHLLPVTTADLSSKERHRSPLEKPHNGLLFPQHGDYQYGRNNILTDHFQYSRQSYPNSYSLNRYDV

SEQ ID NO: 56792 - protein, 23 aa, Homo sapiens
IETLIRDMLLSGSTFNWPYGSGQ

SEQ ID NO: 56793 - protein, 160 aa, Homo sapiens
KLLLGIGILVLLIIVILGVPLIIFTIKANSEACRDGLRAVMECRNVTHLLQQELTEAQKGFQDVEAQAATCNHTVMALMASLDAEKAQGQKKVEELEGEITTLNHKLQDASAEVERLRRENQVLSVRIADKKYYPSSQDSSSAAAPQLLIVLLGLSALLQ

SEQ ID NO: 56794 - protein, 108 aa, Homo sapiens
KDEPQTVPDVPSFGESPPLSPIDMDTQERIKAERKRLRNRIAASKCRKRKLERISRLEEKVKTLKSQNTELASTASLLREQVAQLKQKVLSHVNSGCQLLPQHQVPAY

SEQ ID NO: 56795 - protein, 100 aa, Homo sapiens
LREVICTSRDGDKFWRMPECYIRGSTIKYLRIPDEIIDMVKEEVVAKGRGRGGLQQQKQQKGRGMGGAGRGVFGGRGRGGIPGTGRGQPEKKPGRQAGKQ

SEQ ID NO: 56796 - protein, 167 aa, Homo sapiens
KTLSRERPLPNIFNLYTILTVMLQFFVHFLSLVYLYREAQARSPEKQEQFVDLYKEFEPSLVNSTVYIMAMAMQMATFAINYKGPPFMESLPENKPLVWSLAVSLLAIIGLLLGSSPDFNSQFGLVDIPVEFKLVIAQVLLLDFCLALLADRVLQFFLGTPKLKVPS

SEQ ID NO: 56797 - protein, 15 aa, Homo sapiens
KSLHVHERTHSRQKP

SEQ ID NO: 56798 - protein, 207 aa, Homo sapiens
INRIGNLLVPNENYCKFEDWLMPILDQMVMEQNTEGVKWTPSKMIARLGKEINNPESVYYWAQKNHIPVFSPALTDGSLGDMIFFHSYKNPGLVLDIVEDLRLINTQAIFAKCTGMIILGGGVVKHHIANANLMRNGADYAVYINTAQEFDGSDSGARPDEAVSWGKIRVDAQPVKVYADASLVFPLLVAETFAQKMDAFMHEKNED

SEQ ID NO: 56799 - protein, 163 aa, Homo sapiens
IARLGKEINNPESVYYWAQKNHIPVFSPALTDGSLGDMIFFHSYKNPGLVLDIVEDLRLINTQAIFAKCTGMIILGGGVVKHHIANANLMRNGADYAVYINTAQEFDGSDSGARPDEAVSWGKIRVDAQPVKVYADASLVFPLLVAETFAQKMDAFMHEKNED

SEQ ID NO: 56800 - protein, 174 aa, Homo sapiens
LNPEFISVCNNATWAIGEICMQMGAEMQPYVQMVLNNLVEIINRPNTPKTLLENTAITIGRLGYVCPQEVAPMLQQFIRPWCTSLRNIRDNEEKDSAFRGICMMIGVNPGGVVQDFIFFCDAVASWVSPKDDLRDMFYKILHGFKDQVGEDNWQQFSEQFPPLLKERLAAFYGV

SEQ ID NO: 56801 - protein, 363 aa, Homo sapiens
IAAMIPLLLAALLCVPAGALTCYGDSGQPVDWFVVYKLPALRGSGEAAQRGLQYKYLDESSGGWRDGRALINSPEGAVGRSLQPLYRSNTSQLAFLLYNDQPPQPSKAQDSSMRGHTKGVLLLDHDGGFWLVHSVPNFPPPASSAAYSWPHSACTYGQTLLCVSFPFAQFSKMGKQLTYTYPWVYNYQLEGIFAQEFPDLENVVKGHHVSQEPWNSSITLTSQAGAVFQSFAKFSKFGDDLYSGWLAAALGTNLQVQFWHKTVGILPSNCSDIWQVLNVNQIAFPGPAGPSFNSTEDHSKWCVSPKGPWTCVGDMNRNQGEEQRGGGTLCAQLPALWKAFQPLVKNYQPCNGMARKPSRAYKI

SEQ ID NO: 56802 - protein, 295 aa, Homo sapiens
KEIAEAYDVLSDPRKREIFDRYGEEGLKGSGPSGGSGGGANGTSFSYTFHGDPHAMFAEFFGGRNPFDTFFGQRNGEEGMDIDDPFSGFPMGMGGFTNVNFGRSRSAQEPARKKQDPPVTHDLRVSLEEIYSGCTKKMKISHKRLNPDGKSIRNEDKILTIEVKKGWKEGTKITFPKEGDQTSNNIPADIVFVLKDKPHNIFKRDGSDVIYPARISLREALCGCTVNVPTLDGRTIPVVFKDVIRPGMRRKVPGEGLPLPKTPEKRGDLIIEFEVIFPERIPQTSRTVLEQVLPI

SEQ ID NO: 56803 - protein, 125 aa, Homo sapiens
LCRPDAEVWCLFGDGAFGYSLIEFDTFVRHKIPVMALVGNDAGWTQISREQVPSLGSNVACGLAYTDYHKAAMGLGARGLLLSRENEDQVVKVLHDAQQQCRDGHPVVVNILIGRTDFRDGSIAV

SEQ ID NO: 56804 - protein, 211 aa, Homo sapiens
LVASVGLNVPASVCYSHTDIKVPDFSEYRRLEVLDSTKSSRESSEARKGFSYLVTGVTTVGVAYAAKNAVTQFVSSMSASADVLALAKIEIKLSDIPEGKNMAFKWRGKPLFVRHRTQKEIEQEAAVELSQLRDPQHDLDRVKKPEWVILIGVCTHLGCVPIANAGDFGGYYCPCHGSHYDASGRIRLGPAPLNLEVPTYEFTSDDMVIVG

SEQ ID NO: 56805 - protein, 43 aa, Homo sapiens
LEWTDAVQLTALVMGSEALQQQLLAMLVNYVTKELRAEIQYDD

SEQ ID NO: 56806 - protein, 483 aa, Homo sapiens
LGNETLKVPLALFALNRQRLCERLRKNPAVQAGSIVVLQGGEETQRYCTDTGVLFRQESFFHWAFGVTEPGCYGVIDVDTGKSTLFVPRLPASHATWMGKIHSKEHFKEKYAVDDVQYVDEIASVLTSQKPSVLLTLRGVNTDSGSVCREASFDGISKFEVNNTILHPEIVECRVFKTDMELEVLRYTNKISSEAHREVMKAVKVGMKEYELESLFEHYCYSRGGMRHSSYTCICGSGENSAVLHYGHAGAPNDRTIQNGDMCLFDMGGEYYCFASDITCSFPANGKFTADQKAVYEAVLRSSRAVMGAMKPGVWWPDMHRLADRIHLEELAHMGILSGSVDAMVQAHLGAVFMPHGLGHFLGIDVHDVGGYPEGVERIDEPGLRSLRTARHLQPGMVLTVEPGIYFIDHLLDEALADPARASFLNREVLQRFRGFGGVRIEEDVVVTDSGIELLTCVPRTVEEIEACMAGCDKAFTPFSGPK

SEQ ID NO: 56807 - protein, 67 aa, Homo sapiens
THEVDELTQIIADVSQDPTLPRTEDHPCQKCGHKEAVFFQSHSARAEDAMRLYYVCTAPHCGHRWTE

SEQ ID NO: 56808 - protein, 161 aa, Homo sapiens
RMEIPVPVQPSWLRRASAPLPGLSAPGRLFDQRFGEGLLEAELAALCPTTLAPYYLRAPSVALPVAQVPTDPGHFSVLLDVKHFSPEEIAVKVVGEHVEVHARHEERPDEHGFVAREFHRRYRLPPGVDPAAVTSALSPEGVLSIQAAPASAQAPPPAAAK

SEQ ID NO: 56809 - protein, 566 aa, Homo sapiens
ICLKAAPNSAPAPRGPPRTMTKTDPAPMAPPPRGEEEEEEEEDEPVPEAPSPTQERRQKPVVHPSAPAPLPKDYAFTFFDPNDPACQEILFDPQTTIPELFAIVRQWVPQVQHKIDVIGNEILRRGCHVNDRDGLTDMTLLHYACKAGAHGVGDPAAAVRLSQQLLALGADVTLRSRWTNMNALHYAAYFDVPDLVRVLLKGARPRVVNSTCSDFNHGSALHIAASSLCLGAAKCLLEHGANPALRNRKGQVPAEVVPDPMDMSLDKAEAALVAKELRTLLEEAVPLSCALPKVTLPNYDNVPGNLMLSALGLRLGDRVLLDGQKTGTLRFCGTTEFASGQWVGVELDEPEGKNDGSVGGVRYFICPPKQGLFASVSKISKAVDAPPSSVTSTPRTPRMDFSRVTGKGRREHKGKKKTPSSPSLGSLQQRDGAKAEVGDQVLVAGQKQGIVRFYGKTDFAPGYWYGIELDQPTGKHDGSVFGVRYFTCPPRHGVFAPASRIQRIGGSTDSPGDSVGAKKVHQVTMTQPKRTFTTVRTPKDIASENSISRLLFCCWFPWMLRAEMQS

SEQ ID NO: 56810 - protein, 42 aa, Homo sapiens
VPPALQSYLGTDRITAPTHVPLQYIGPNQPRKPGLPGQPAVS

SEQ ID NO: 56811 - protein, 150 aa, Homo sapiens
TLGAMPSKGPLQSVQVFGRKKTATAVAHCKRGNGLIKVNGRPLEMIEPRTLQYKLLEPVLLLGKERFAGVDIRVRVKGGGHVAQIYAIRQSISKALVAYYQKYVDEASKKEIKDILIQYDRTLLVADPRRCESKKFGGPGARARYQKSYR

SEQ ID NO: 56812 - protein, 26 aa, Homo sapiens
TIALTASEVINPLIEELGCDKFINRE

SEQ ID NO: 56813 - protein, 236 aa, Homo sapiens
VMVEPHRHEGVFICRGKEDALVTKNLVPGESVYGEKRVSISEGDDKIEYRAWNPFRSKLAAAILGGVDQIHIKPGAKVLYLGAASGTTVSHVSDIVGPDGLVYAVEFSHRSGRDLINLAKKRTNIIPVIEDARHPHKYRMLIAMVDVIFADVAQPDQTRIVALNAHTFLRNGGHFVISIKANCIDSTASAEAVFASEVKKMQQENMKPQEQLTLEPYERDHAVVVGVYRPPPKVKN

SEQ ID NO: 56814 - protein, 23 aa, Homo sapiens
KECKKAFRQHSHLTYHQRIHNVT

SEQ ID NO: 56815 - protein, 291 aa, Homo sapiens
RIPVSQPGMADPHQLFDDTSSAQSRGYGAQRAPGGLSYPAASPTPHAAFLADPVSNMAMAYGSSLAAQGKELVDKNIDRFIPITKLKYYFAVDTMYVGRKLGLLFFPYLHQDWEVQYQQDTPVAPRFDVNAPDLYIPAMAFITYVLVAGLALGTQDRFSPDLLGLQASSALAWLTLEVLAILLSLYLVTVNTDLTTIDLVAFLGYKYVGMIGGVLMGLLFGKIGYYLVLGWCCVAIFVFMIRTLRLKILADAAAEGVPVRGARNQLRMYLTMAVAAAQPMLMYWLTFHLVR

SEQ ID NO: 56816 - protein, 484 aa, Homo sapiens
IRGLIDGVVEADLVEALQEFGPISYVVVMPKKRQALVEFEDVLGACNAVNYAADNQIYIAGHPAFVNYSTSQKISRPGDSDDSRSVNSVLLFTILNPIYSITTDVLYTICNPCGPVQRIVIFRKNGVQAMVEFDSVQSAQRAKASLNGADIYSGCCTLKIEYAKPTRLNVFKNDQDTWDYTNPNLSGQGDPGSNPNKRQRQPPLLGDHPAEYGGPHGGYHSHYHDEGYGPPPPHYEGRRMGPPVGGHRRGPSRYGPQYGHPPPPPPPPEYGPHADSPVLMVYGLDQSKMNCDRVFNVFCLYGNVEKVKFMKSKPGAAMVEMADGYAVDRAITHLNNNFMFGQKLNVCVSKQPAIMPGQSYGLEDGSCSYKDFSESRNNRFSTPEQAAKNRIQHPSNVLHFFNAPLEVTEENFFEICDELGVKRPSSVKVFSGKSERSSSGLLEWESKSDALETLGFLNHYQMKNPNGPYPYTLKLCFSTAQHAS

SEQ ID NO: 56817 - protein, 310 aa, Homo sapiens
LTGSNYPGLSISLRLTGSSAQEEASGVALGEAPDHSYESLRVTSAQKHVLHVQLNRPNKRNAMNKVFWREMVECFNKISRDADCRAVVISGAGKMFTAGIDLMDMASDILQPKGDDVARISWYLRDIITRYQETFNVIERCPKPVIAAVHGGCIGGGVDLVTACDIRYCAQDAFFQVKEVDVGLAADVGTLQRLPKVIGNQSLVNELAFTARKMMADEALGSGLVSRVFPDKEVMLDAALALAAEISSKSPVAVQSTKVNLLYSRDHSVAESLNYVASWNMSMLQTQDLVKSVQATTENKELKTVTFSKL

SEQ ID NO: 56818 - skipped

SEQ ID NO: 56819 - protein, 415 aa, Homo sapiens
RPRPNTFVIRCLQWTTVIERTFHVDSPDEREEWMRAIQMVANSLKQRAPGEDPMDYKCGSPSDSSTTEEMEVAVSKARAKVTMNDFDYLKLLGKGTFGKVILVREKATGRYYAMKILRKEVIIAKDEVAHTVTESRVLQNTRHPFLTALKYAFQTHDRLCFVMEYANGGELFFHLSRERVFTEERARFYGAEIVSALEYLHSRDVVYRDIKLENLMLDKDGHIKITDFGLCKEGISDGATMKTFCGTPEYLAPEVLEDNDYGRAVDWWGLGVVMYEMMCGRLPFYNQDHERLFELILMEEIRFPRTLSPEAKSLLAGLLKKDPKQRLGGGPSDAKEVMEHRFFLSINWQDVVQKKLLPPFKPQVTSEVDTRYFDDEFTAQSITITPPDRYDSLGLLELDQRTHFPQFSYSASIRE

SEQ ID NO: 56820 - protein, 71 aa, Homo sapiens
LDDGLEGLFEDIDTSMYDNELWAPASEGLKPGPEDGPGKEEAPELDEAELDYLMDVLVGTQALERPPGPGR

SEQ ID NO: 56821 - protein, 157 aa, Homo sapiens
VPTMPPALQPFPAPVGPFDAAPAQVAVFLPPPHMQPPFVPAYPGLGYPPMPRVPVVGITPSQMVANAFCSAAQLQPQPATLLGKAGAFPPPAIPSAPGSQARPRPNGAPWPPEPAPAPAPELDPFEAQWAALEGKATVEKPSNPFSGDLQKTFEIEL

SEQ ID NO: 56822 - protein, 5 aa, Homo sapiens
ISVGY

SEQ ID NO: 56823 - protein, 280 aa, Homo sapiens
VLMVETHNEIYDKFKQSTHSIYMFFNTSELREAVPEPVLLSRAELRLLRLKLKVEQHVELYQKYSNNSWRYLSNRLLAPSDSPEWLSFDVTGVVRQWLSRGGEIEGFRLSAHCSCDSRDNTLQVDINGFTTGRRGDLATIHGMNRPFLLLMATPLERAQHLQSSRHRRALDTNYCFSSTEKNCCVRQLYIDFRKDLGWKWIHEPKGYHANFCLGPCPYIWSLDTQYSKVLALYNQHNPGASAAPCCVPQALEPLPIVYYVGRKPKVEQLSNMIVRSCKCS

SEQ ID NO: 56824 - protein, 42 aa, Homo sapiens
MSSTKGLYSDTELQQCLAAAQAASQHVFRFYRESLQRRYSKS

SEQ ID NO: 56825 - protein, 19 aa, Homo sapiens
VSSDLQHATAQLSLEHRDS

SEQ ID NO: 56826 - protein, 41 aa, Homo sapiens
MARPQLSHTILTEKNWFHYAARIWDGVRKSSALAEYSRLLA

SEQ ID NO: 56827 - protein, 21 aa, Homo sapiens
LLRSGRFGSPLVGSGPEWGGV

SEQ ID NO: 56828 - protein, 179 aa, Homo sapiens
VNTHCHADHITGSGLLRSLLPGCQSVISRLSGAQADLHIEDGDSIRFGRFALETRASPGHTPGCVTFVLNDHSMAFTGDALLIRGCGRTDFQQGCAKTLYHSVHEKIFTLPGDCLIYPAHDYHGFTVSTVEEERTLNPRLTLSCEEFVKIMGNLNLPKPQQIDFAVPANMRCGVQTPTA

SEQ ID NO: 56829 - protein, 286 aa, Homo sapiens
IVRLWEEGEELELVEKSCTHSEKTNRTLSYRTGLKITSLTEVVCGLDLCNQGNSGRAVTYSRSRYLECISCGSSDMSCERGRHQSLQCRSPEEQCLDVVTHWIQEGEEGRPKDDRHLRGCGYLPGCPGSNGFHNNDTFHFLKCCNTTKCNEGPILELENLPQNGRQCYSCKGNSTHGCSSEETFLIDCRGPMNQCLVATGTHEPKNQSYMVRGCATASMCQHAHLGDAFSMNHIDVSCCTKSGCNHPDLDVQYRSGAAPQPGPAHLSLTITLLMTARLWGGTLLWT

SEQ ID NO: 56830 - protein, 201 aa, Homo sapiens
VADLLYWKDTRTSGVVFTGLMVSLLCLLHFSIVSVAAHLALLLLCGTISLRVYRKVLQAVHRGDGANPFQAYLDVDLTLTREQTERLSHQITSRVVSAATQLRHFFLVEDLVDSLKLALLFYILTFVGAIFNGLTLLILGVIGLFTIPLLYRQHQAQIDQYVGLVTNQLSHIKAKIRAKIPGTGALASAAAAVSGSKAKAE

SEQ ID NO: 56831 - protein, 58 aa, Homo sapiens
LRDEVGHLALALEALQAQVQAAPPQGALEELRTELQEVRAQLCNPGRSASHAVPASKK

SEQ ID NO: 56832 - protein, 60 aa, Homo sapiens
KFCFPCSREFIKAQGPAGEVYCPSGDKCPLVGSSVPWAFMQGEIATILAGDIKVKKERDP

SEQ ID NO: 56833 - protein, 39 aa, Homo sapiens
TGSGSPFAGNSPAREGEQDAASLKDVFKGFDPTASPFCQ

SEQ ID NO: 56834 - protein, 298 aa, Homo sapiens
VAAMDNSGKEAEAMALLAEAERKVKNSQSFFSGLFGGSSKIEEACEIYARAANMFKMAKNWSAAGNAFCQAAQLHLQLQSKHDAATCFVDAGNAFKKADPQEAINCLMRAIEIYTDMGRFTIAAKHHISIAEIYETELVDIEKAIAHYEQSADYYKGEESNSSANKCLLKVAGYAALLEQYQKAIDIYEQVGTNAMDSPLLKYSAKDYFFKAALCHFCIDMLNAKLAVQKYEELFPAFSDSRECKLMKKLLEAHEEQNVDSYTESVKEYDSISRLDQWLTTMLLRIKKTIQGDEEDLR

SEQ ID NO: 56835 - protein, 14 aa, Homo sapiens
TSSKAEASVACSLC

SEQ ID NO: 56836 - protein, 39 aa, Homo sapiens
VSEQVSNGPVESVTLENSPLVWKEGRQLLRHPVPAGFSF

SEQ ID NO: 56837 - protein, 200 aa, Homo sapiens
ILCPVGAYFPGGSVTPVSLLADPAFIRAWVGGVGNYKLGGNYGPTVLVQQEALKRGCEQVLWLYGPDHQLTEVGTMNIFVYWTHEDGVLELVTPPLNGVILPGVVRQSLLDMAQTWGEFRVVERTITMKQLLRALEEGRVREVFGSGTACQVCPVHRILYKDRNLHIPTMENGPELILRFQKELKEIQYGIRAHEWMFPV

SEQ ID NO: 56838 - protein, 685 aa, Homo sapiens
VTGDEWGDNYFLVGPYTEQGVRTQVELLEAPTPALKRTLDSMNSKGCKVYFGRWLIEGGPLVVLLDVGASAWALERWKGELWDTCNIGVPWYDREANDAVLFGFLTTWFLGEFLAQSEEKPHVVAHFHEWLAGVGLCLCRARRLPVATIFTTHATLLGRYLCAGAVDFYNNLENFNVDKEAGERQIYHRYCMERAAAHCAHVFTTVSQITAIEAQHLLKRKPDIVTPNGLNVKKFSAMHEFQNLHAQSKARIQEFVRGHFYGHLDFNLDKTLYFFIAGRYEFSNKGADVFLEALARLNYLLRVNGSEQTVVAFFIMPARTNNFNVETLKGQAVRKQLWDTANTVKEKFGRKLYESLLVGSLPDMNKMLDKEDFTMMKRAIFATQRQSFPPVCTHNMLDDSSDPILTTIRRIGLFNSSADRVKVIFHPEFLSSTSPLLPVDYEEFVRGCHLGVFPSYYEPWGYTPAECTVMGIPSISTNLSGFGCFMEEHIADPSAYGIYILDRRFRSLDDSCSQLTSFLYSFCQQSRRQRIIQRNRTERLSDLLDWKYLGRYYMSARHMALSKAFPEHFTYEPNEADAAQGYRYPRPASVPPSPSLSRHSSPHQSEDEEDPRNGPLEEDGERYDEDEEAAKDRRNIRAPEWPRRASCTSSTSGSKRNSVDTATSSSLSTPSEPLSPTSSLGEERN

SEQ ID NO: 56839 - protein, 34 aa, Homo sapiens
RAMANPKLLGMGLSEAEAIGADSARFEELLLQVQ

SEQ ID NO: 56840 - protein, 84 aa, Homo sapiens
LGGPHPLFLPAEGQGCTAYDVAVNSDFYRRMQNSDFLRELVITIAREGLEDKYNLQLNPAEHPLGAASSDPGAGGPVHARPRES

SEQ ID NO: 56841 - protein, 7 aa, Homo sapiens
KRRNHGR

SEQ ID NO: 56842 - protein, 187 aa, Homo sapiens
LVVVGGGGVGKSALTIQFIQSYFVSDYDPTIEDSYTKICSVDGIPARLDILDTAGQEEFGAMREQYMRAGHGFLLVFAINDRQSFNEVGKLFTQILRVKDRDDFPVVLVGNKADLESQRQVPRSEASAFGASHHVAYFEASAKLRLNVDEAFEQLVRAVRKYQEQELPPSPPSAPRKKGGGCPCVLL

SEQ ID NO: 56843 - protein, 137 aa, Homo sapiens
LGISDNGGLFVMDEDATLQDLPPFCESDPESTDDGSLSEETPAGPPTCSVPPASALPTQQYAKSLPVSVPVWGFKEKRTEARSSDEENGPPSSPDLDRIAASMRALVLREAEDTQVFGDLPRPRLNTSDFQKLKRKY

SEQ ID NO: 56844 - protein, 68 aa, Homo sapiens
IEHLNTSGAPADTSDPLQQICKILNAHMDSLQWIDQNSALLQRKVEEVTKVCEGRRKEQERSFRITFD

SEQ ID NO: 56845 - protein, 7 aa, Homo sapiens
KMEFPTQ

SEQ ID NO: 56846 - protein, 58 aa, Homo sapiens
RTACPRPREHSRAHPPCTTNGSAWSCVLSTPSTTFCSSSSLARRLPMRSARGWPQTPG

SEQ ID NO: 56847 - protein, 77 aa, Homo sapiens
VSLGLLSLPLRRRHWVALRQVDGVYYNLDSKLRAPEALGDEDGVRAFLAAALAQGLCEVLLVVTKEVEEKGSWLRTD

SEQ ID NO: 56848 - protein, 250 aa, Homo sapiens
VLVAVKRVIDYAVKIRVKPDRTGVVTDGVKHSMNPFCEIAVEEAVRLKEKKLVKEVIAVSCGPAQCQETIRTALAMGADRGIHVEVPPAEAERLGPLQVARVLAKLAEKEKVDLVLLGKQAIDDDCNQTGQMTAGFLDWPQGTFASQVTLEGDKLKVEREIDGGLETLRLKLPAVVTADLRLNEPRYATLPNIMKAKKKKIEVIKPGDLGVDLTSKLSVISVEDPPQRTAGVKVETTEDLVAKLKEIGRI

SEQ ID NO: 56849 - protein, 16 aa, Homo sapiens
VPSVINYVLFYVTENP

SEQ ID NO: 56850 - protein, 16 aa, Homo sapiens
KTYSPCYPLFSEHRRK

SEQ ID NO: 56851 - protein, 17 aa, Homo sapiens
VFQSTWIKRLLLFVYLD

SEQ ID NO: 56852 - skipped

SEQ ID NO: 56853 - protein, 17 aa, Homo sapiens
IAKTSKSSHWRFLLPEN

SEQ ID NO: 56854 - protein, 65 aa, Homo sapiens
IHTGEKPYRCTECGKAFRVRSSLTTHMAIHTGEKRYKCNECGKVFRQSSNLASHHRMHTGEKPYK

SEQ ID NO: 56855 - protein, 60 aa, Homo sapiens
LSFHLDLGPSMLDAVLGVMDAARPEAAAAKPDAEPRPGTQPPQARCRPNADLELNDVIGL

SEQ ID NO: 56856 - protein, 27 aa, Homo sapiens
LSDLRADNQRLKDENAALIRVISKLSK

SEQ ID NO: 56857 - protein, 32 aa, Homo sapiens
LGLPQSQSAQALTPPPIPNGSAPEGPASPGSQ

SEQ ID NO: 56858 - protein, 128 aa, Homo sapiens
LGRVLPGSSVLFLCDMQEKFRHNIAYFPQIVSVAARMLKNTTLDLLDRGLQVHVVVDACSSRSQVDRLVALARMRQSGAFLSTSEGLILQLVGDAVHPQFKEIQKLIKEPAPDSGLLGLFQGQNSLLH

SEQ ID NO: 56859 - protein, 117 aa, Homo sapiens
LLCGIEAQACILDPRSYPGLALTSLYPQNTTLDLLDRGLQVHVVVDACSSRSQVDRLVALARMRQSGAFLSTSEGLILQLVGDAVHPQFKEIQKLIKEPAPDSGLLGLFQGQNSLLH

SEQ ID NO: 56860 - protein, 77 aa, Homo sapiens
VCWRSFSLRDYLLKHMVTHTGVRAFQCAVCAKRFTQKSSLNVHMRTHRPERAPCPACGKVFSHRALLERHLAAHPAP

SEQ ID NO: 56861 - protein, 76 aa, Homo sapiens
RASTGPSTGAACPLSSPVYSTPPPWLWPWPTSMGPGSGRGTTSCATPVTAASWLAPASMLACPQRNPSTSAAGPRT

SEQ ID NO: 56862 - protein, 290 aa, Homo sapiens
LFDVKNAFYIGSYQQCINEAQRVKLSSPERDVERDVFLYRAYLAQRKFGVVLDEIKPSSAPELQAVRMFADYLAHESRRDSIVAELDREMSRSVDVTNTTFLLMAASIYLHDQNPDAALRALHQGDSLECTAMTVQILLKLDRLDLARKELKRMQDLDEDATLTQLATAWVSLATGGEKLQDAYYIFQEMADKCSPTLLLLNGQAACHMAQGRWEAAEGLLQEALDKDSGYPETLVNLIVLSQHLGKPPEVTNRYLSQLKDAHRSHPFIKEYQAKENDFDRLVLQYAPSA

SEQ ID NO: 56863 - protein, 45 aa, Homo sapiens
REPVSVGTPSEGEGLGADGQEHKEDTFDVFRQRMMQMYRHKRANK

SEQ ID NO: 56864 - protein, 373 aa, Homo sapiens
VDFAVYSGGVYLFTEAYYYMLGPAKETNIAVFWCLLTVTFSIKMFLTVTRLYFSAEEGGERSVCLTFAFLFLLLAMLVQVVREETLELGLEPGLASMTQNLEPLLKKQGWDWALPVAKLAIRVGLAVVGSVLGAFLTFPGLRLAQTHRDALTMSEDRPMLQFLLHTSFLSPLFILWLWTKPIARDFLHQPPFGETRFSLLSDSAFDSGRLWLLVVLCLLRLAVTRPHLQAYLCLAKARVEQLRREAGRIEAREIQQRVVRVYCYVTVVSLQYLTPLILTLNCTLLLKTLGGYSWGLGPAPLLSPDPSSASAAPIGSGEDEVQQTAARIAGALGGLLTPLFLRGVLAYLIWWTAACQLLASLFGLYFHQHLAGS

SEQ ID NO: 56865 - protein, 32 aa, Homo sapiens
IFRNASGQSWFSPPASPFGQSSVQTIQPKRDS

SEQ ID NO: 56866 - protein, 487 aa, Homo sapiens
LLAASCAWSGVAGEEELQVIQPDKSVLVAAGETATLRCTATSLIPVGPIQWFRGAGPGRELIYNQKEGHFPRVTTVSDLTKRNNMDFSIRIGNITPADAGTYYCVKFRKGSPDDVEFKSGAGTELSVRAKPSAPVVSGPAARATPQHTVSFTCESHGFSPRDITLKWFKNGNELSDFQTNVDPVGESVSYSIHSTAKVVLTREDVHSQVICEVAHVTLQGDPLRGTANLSETIRVPPTLEVTQQPVRAENQVNVTCQVRKFYPQRLQLTWLENGNVSRTETASTVTENKDGTYNWMSWLLVNVSAHRDDVKLTCQVEHDGQPAVSKSHDLKVSAHPKEQGSNTAAENTGSNERNIYIVVGVVCTLLVALLMAALYLVRIRQKKAQGSTSSTRLHEPEKNAREITQDTNDITYADLNLPKGKKPAPQAAEPNNHTEYASIQTSPQPASEDTLTYADLDMVHLNRTPKQPAPKPEPSFSEYASVQVPRK

SEQ ID NO: 56867 - protein, 519 aa, Homo sapiens
VDVVEILPYLPCLTARDQDRLRATCTLSGNRDTLWHLFNTLQRRPGWVEYFIAALRGCELVDLADEVASVYQSYQPRTSDRPPDPLEPPSLPAERPGPPTPAAAHSIPYNSCREKEPSYPMPVQETQAPESPGENSEQALQTLSPRAIPRNPDGGPLESSSDLAALSPLTSSGHQEQDTELGSTHTAGATSSLTPSRGPVSPSVSFQPLARSTPRASRLPGPTGSVVSTGTSFSSSSPGLASAGAAEGKQGAESDQAEPIICSSGAEAPANSLPSKVPTTLMPVNTVALKVPANPASVSTVPSKLPTSSKPPGAVPSNALTNPAPSKLPINSTRAGMVPSKVPTSMVLTKVSASTVPTDGSSRNEETPAAPTPAGATGGSSAWLDSSSENRGLGSELSKPGVLASQVDSPFSGCFEDLAISASTSLGMGPCHGPEENEYKSEGTFGIHVAENPSIQLLEGNPGPPADPDGGPRPQADRKFQEREVPCHRPSPGALWLQVAVTGVLVVTLLVVLYRRRLH

SEQ ID NO: 56868 - protein, 75 aa, Homo sapiens
KRPLFPWFGLDIGGTLVKLVYFEPKDITAEEEEEEVESLKSIRKYLTSNVAYGSTGIRDVHLELKDLTLCGRKDR

SEQ ID NO: 56869 - protein, 77 aa, Homo sapiens
LITITNNIGSIARMCALNENINQVVFVGNFLRINTIAMRLLAYALDYWSKGQLKALFSEHEGYFGAVGALLELLKIP

SEQ ID NO: 56870 - protein, 73 aa, Homo sapiens
MEHWGQPIPGAGQPWRQPLPTSGRWWLGAASWWWLGAASWWWLGAAPWWWLGTASWWWLGSRRWHPQSVEQAE

SEQ ID NO: 56871 - protein, 4 aa, Homo sapiens
RFVV

SEQ ID NO: 56872 - protein, 201 aa, Homo sapiens
IQYENPWTIPNMLSMTRIGLAPVLGYLIIEEDFNIALGVFALAGLTDLLDGFIARNWANQRSALGSALDPLADKILISILYVSLTYADLIPVPLTYMIISRDVMLIAAVFYVRYRTLPTPRTLAKYFNPCYATARLKPTFISKVNTAVQLILVAASLAAPVFNYADSIYLQILWCFTAFTTAASAYSYYHYGRKTVQVIKD

SEQ ID NO: 56873 - protein, 81 aa, Homo sapiens
RKYGGPPPDSVYSGQQPSVGTEIFVGKIPRDLFEDELVPLFEKAGPIWDLRLMMDPLTGLNRGYVFVTFCTKAAREAVKTV

SEQ ID NO: 56874 - protein, 50 aa, Homo sapiens
LDGNELSYFGQEGMTEVQCGKVTVQFQCSSDSTNGTGVQGGQIPELIFYA

SEQ ID NO: 56875 - protein, 5 aa, Homo sapiens
MMQFK

SEQ ID NO: 56876 - protein, 29 aa, Homo sapiens
MVQTLEQYEFCYKVVQEYIDAFSDYANFK

SEQ ID NO: 56877 - protein, 1414 aa, Homo sapiens
TAATAALAGRSGGPHWDWDVTRAGRPGLGAGLRLPRLLSPPLRPRLLLLLLLLSPPLLLLLLPCEAEAAAAAAAVSGSAAAEAKECDRPCVNGGRCNPGTGQCVCPAGWVGEQCQHCGGRFRLTGSSGFVTDGPGNYKYKTKCTWLIEGQPNRIMRLRFNHFATECSWDHLYVYDGDSIYAPLVAAFSGLIVPERDGNETVPEVVATSGYALLHFFSDAAYNLTGFNITYSFDMCPNNCSGRGECKISNSSDTVECECSENWKGEACDIPHCTDNCGFPHRGICNSSDVRGCSCFSDWQGPGCSVPVPANQSFWTREEYSNLKLPRASHKAVVNGNIMWVVGGYMFNHSDYNMVLAYDLASREWLPLNRSVNNVVVRYGHSLALYKDKIYMYGGKIDSTGNVTNELRVFHIHNESWVLLTPKAKEQYAVVGHSAHIVTLKNGRVVMLVIFGHCPLYGYISNVQEYDLDKNTWSILHTQGALVQGGYGHSSVYDHRTRALYVHGGYKAFSANKYRLADDLYRYDVDTQMWTILKDSRFFRYLHTAVIVSGTMLVFGGNTHNDTSMSHGAKCFSSDFMAYDIACDRWSVLPRPDLHHDVNRFGHSAVLHNSTMYVFGGFNSLLLSDILVFTSEQCDAHRSEAACLAAGPGIRCVWNTGSSQCISWALATDEQEEKLKSECFSKRTLDHDRCDQHTDCYSCTANTNDCHWCNDHCVPRNHSCSEGQISIFRYENCPKDNPMYYCNKKTSCRSCALDQNCQWEPRNQECIALPENICGIGWHLVGNSCLKITTAKENYDNAKLFCRNHNALLASLTTQKKVEFVLKQLRIMQSSQSMSKLTLTPWVGLRKINVSYWCWEDMSPFTNSLLQWMPSEPSDAGFCGILSEPSTRGLKAATCINPLNGSVCERPANHSAKQCRTPCALRTACGDCTSGSSECMWCSNMKQCVDSNAYVASFPFGQCMEWYTMSTCPPENCSGYCTCSHCLEQPGCGWCTDPSNTGKGKCIEGSYKGPVKMPSQAPTGNFYPQPLLNSSMCLEDSRYNWSFIHCPACQCNGHSKCINQSICEKCENLTTGKHCETCISGFYGDPTNGGKCQPCKCNGHASLCNTNTGKCFCTTKGVKGDECQLCEVENRYQGNPLRGTCYYTLLIDYQFTFSLSQEDDRYYTAINFVATPDEQNRDLDMFINASKNFNLNITWAASFSAGTQAGEEMPVVSKTNIKEYKDSFSNEKFDFRNHPNITFFVYVSNFTWPIKIQIAFSQHSNFMDLVQFFVTFFSCFLSLLLVAAVVWKIKQSCWASRRREQLLREMQQMASRPFASVNVALETDEEPPDLIGGSIKTVPKPIALEPCFGNKAAVLSVFVRLPRGLGGIPPPGQSGLAVASALVDISQQMPIVYKEKSGAVRNRKQQPPAQPGTCI

SEQ ID NO: 56878 - protein, 14 aa, Homo sapiens
LIELMNFTPQRPGL

SEQ ID NO: 56879 - protein, 38 aa, Homo sapiens
LYQKFGFKTEEYVLDFYDKYYPLESTECKHAFFLRLRR

SEQ ID NO: 56880 - protein, 46 aa, Homo sapiens
RAVNPIIPPTGLVRAPCGLCPVFDDCHEGGEISPSNCIYMTEWLEF

SEQ ID NO: 56881 - protein, 89 aa, Homo sapiens
TAWYRRMSVVYGIGTWSVLGSLLYYSRTMAKSSVDQKDGSASEVPSELSERPKGFYVETVVTYKEDFVPNTEKILNYWKSWTGGPGTEP

SEQ ID NO: 56882 - protein, 75 aa, Homo sapiens
VKYPVNSLNAQKDFMWKQLSHIKKILFQIQKRSSTIGNHGLVALVQNHDWLLNSENQDLVQHLNLIVALIPILGL

SEQ ID NO: 56883 - protein, 187 aa, Homo sapiens
IGRGICVLLGISLEDTQKELEHMVRKILNLRVFEDESGKHWSKSVMDKQYEILCVSQFTLQCVLKGNKPDFHLAMPTEQAEGFYNSFLEQLRKTYRPELIKDGKFGAYMQVHIQNDGPVTIELESPAPGTATSDPKQLSKLEKQQQRKEKTRAKGPSESSKERNTPRKEDRSASSGAEGDVSSEREP

SEQ ID NO: 56884 - protein, 148 aa, Homo sapiens
IKNFQEEQAARLLSSETRDTLRQWHKRRTTNRTIPSVDDFQNYLRVAFQEVNSGCTGKTLLVRPYITTEDVCQICAEKFKVGDPEEYSLFLFVDETWQQLAEDTYPQKIKAELHSRPQPHIFHFVYKRIKNDPYGIIFQNGEEDLTTS

SEQ ID NO: 56885 - protein, 234 aa, Homo sapiens
LSPEEFNTNMDIRPNHTIYINNMNDKIKKEELKRSLYALFSQFGHVVDIVALKTMKMRGQAFVIFKELGSSTNALRQLQGFPFYGKPMRIQYAKTDSDIISKMRGTFADKEKKKEKKKAKTVEQTATTTNKKPGQGTPNSANTQGNSTPNPQVPDYPPNYILFLNNLPEETNEMMLSMLFNQFPGFKEVRLVPGRHDIAFVEFENDGQAGAARDALQGFKITPSHAMKITYAKK

SEQ ID NO: 56886 - protein, 934 aa, Homo sapiens
IIVNCVEEKPKECNGVKIPVDASKPNPNDVEFDNLYLDMNGIIHPCTHPEDKPAPKNEDEMMVAIFEYIDRLFSIVRPRRLLYMAIDGVAPRAKMNQQRSRRFRASKEGMEAAVEKQRVREEILAKGGFLPPEEIKERFDSNCITPGTEFMDNLAKCLRYYIADRLNNDPGWKNLTVILSDASAPGEGEHKIMDYIRRQRAQPNHDPNTHHCLCGADADLIMLGLATHEPNFTIIREEFKPNKPKPCGLCNQFGHEVKDCEGLPREKKGKHDELADSLPCAEGEFIFLRLNVLREYLERELTMASLPFTFDVERSIDDWVFMCFFVGNDFLPHLPSLEIRENAIDRLVNIYKNVVHKTGGYLTESGYVNLQRVQMIMLAVGEVEDSIFKKRKDDEDSFRRRQKEKRKRMKRDQPAFTPSGILTPHALGSRNSPGSQVASNPRQAAYEMRMQNNSSPSISPNTSFTSDGSPSPLGGIKRKAEDSDSEPEPEDNVRLWEAGWKQRYYKNKFDVDAADEKFRRKVVQSYVEGLCWVLRYYYQGCASWKWYYPFHYAPFASDFEGIADMPSDFEKGTKPFKPLEQLMGVFPAASGNFLPPSWRKLMSDPDSSIIDFYPEDFAIDLNGKKYAWQGVALLPFVDERRLRAALEEVYPDLTPEETRRNSLGGDVLFVGKHHPLHDFILELYQTGSTEPVEVPPELCHGIQGKFSLDEEAILPDQIVCSPVPMLRDLTQNTVVSINFKDPQFAEDYIFKAVMLPGARKPAAVLKPSDWEKSSNGRQWKPQLGFNRDRRPVHLDQAAFRTLGHVMPRGSGTGIYSNAAPPPVTYQGNLYRPLLRGQAQIPKLMSNMRPQDSWRGPPPLFQQQRFDRGVGAEPLLPWNRMLQTQNAAFQPNQYQMLAGPGGYPPRRDDRGGRQGYPREGRKYPLPPPSGRYNWN

SEQ ID NO: 56887 - protein, 20 aa, Homo sapiens
RKKRMRRLKRKRRKMRQRSK

SEQ ID NO: 56888 - protein, 814 aa, Homo sapiens
KSFNRHLHFTLVKDRNVATPRDYFFALAHTVRDHLVGRWIRTQQHYYERDPKRIYYLSLEFYMGRTLQNTMVNLGLQNACDEAIYQLGLDLEELEEIEEDAGLGNGGLGRLAACFLDSMATLGLAAYGYGIRYEFGIFNQKIVNGWQVEEADDWLRYGNPWEKARPEYMLPVHFYGRVEHTPDGVKWLDTQVVLAMPYDTPVPGYKNNTVNTMRLWSAKAPNDFKLQDFNVGDYIEAVLDRNLAENISRVLYPNDNFFEGKELRLKQEYFVVAATLQDIIRRFKSSKFGCRDPVRTCFETFPDKVAIQLNDTHPALSIPELMRILVDVEKVDWDKAWEITKKTCAYTNHTVLPEALERWPVSMFEKLLPRHLEIIYAINQRHLDHVAALFPGDVDRLRRMSVIEEGDCKRINMAHLCVIGSHAVNGVARIHSEIVKQSVFKDFYELEPEKFQNKTNGITPRRWLLLCNPGLADTIVEKIGEEFLTDLSQLKKLLPLVSDEVFIRDVAKVKQENKLKFSAFLEKEYKVKINPSSMFDVHVKRIHEYKRQLLNCLHVVTLYNRIKRDPAKAFVPRTVMIGGKAAPGYHMAKLIIKLVTSIGDVVNHDPVVGDRLKVIFLENYRVSLAEKVIPAADLSQQISTAGTEASGTGNMKFMLNGALTIGTMDGANVEMAEEAGAENLFIFGLRVEDVEALDRKGYNAREYYDHLPELKQAVDQISSGFFSPKEPDCFKDIVNMLMHHDRFKVFADYEAYMQCQAQVDQLYRNPKEWTKKVIRNIACSGKFSSDRTITEYAREIWGVEPSDLQIPPPNIPRD

SEQ ID NO: 56889 - protein, 304 aa, Homo sapiens
LKLQASNVTNKNDPKSINSRVFIGNLNTALVKKSDVETIFSKYGRVAGCSVHKGYAFVQYSNERHARAAVLGENGRVLAGQTLDINMAGEPKPDRPKGLKRAASAIYSGYIFDYDYYRDDFYDRLFDYRGRLSPVPVPRAVPVKRPRVTVPLVRRVKTNVPVKLFARSTAVTTSSAKIKLKSSELQAIKTELTQIKSNIDALLSRLEQIAAEQKANPDGKKKGDGGGAGGGGGGGGSGGGGSGGGGGGGSSRPPAPQENTTSEAGLPQGEARTRDDGDEEGLLTHSEEELEHSQDTDADDGALQ

SEQ ID NO: 56890 - protein, 9 aa, Homo sapiens
MAIGMGIRC

SEQ ID NO: 56891 - protein, 56 aa, Homo sapiens
MDSIEKELDVLESWLDYTGELEPPEPLARLPQLKHCIKQLLMDLGKVQQIALCCST

SEQ ID NO: 56892 - protein, 430 aa, Homo sapiens
LESDPERTLAMDSALSDPHNGSAEAGGPTNSTTRPPSTPEGIALAYGSLLLMALLPIFFGALRSVRCARGKNASDMPETITSRDAARFPIIASCTLLGLYLFFKVYFPNKSYAGSVLKTWKTQKSKKGKTAVIQNPTTRDSHSFPSEIFSQEYINLLLSMYFFVLGILALSHTISPFMNKFFPASFPNRQYQLLFTQGSGENKEEIINYEFDTKDLVCLGLSSIVGVWYLLRKHWIANNLFGLAFSLNGVELLHLNNVSTGCILLGGLFIYDVFWVFGTNVMVTVAKSFEAPIKLVFPQDLLEKGLEANNFAMLGLGDVVIPGIFIALLLRFDISLKKNTHTYFYTSFAAYIFGLGLTIFIMHIFKHAQPALLYLVPACIGFPVLVALAKGEVTEMFSYEESNPKDPAAVTESKEGTEASASKGLEKKEK

SEQ ID NO: 56893 - protein, 27 aa, Homo sapiens
IEKVNKGIGIENIHYLNDGLWHMKTYK

SEQ ID NO: 56894 - protein, 28 aa, Homo sapiens
KYQGLEIKSSDQPLTVPVSPKFSTRFHC

SEQ ID NO: 56895 - protein, 372 aa, Homo sapiens
LLLPLPGMPAGSWDPAGYLLYCPCMGRFGNQADHFLGSLAFAKLLNRTLAVPPWIEYQHHKPPFTNLHVSYQKYFKLEPLQAYHRVISLEDFMEKLAPTHWPPEKRVAYCFEVAAQRSPDKKTCPMKEGNPFGPFWDQFHVSFNKSELFTGISFSASYREQWSQRFSPKEHPVLALPGAPAQFPVLEEHRPLQKYMVWSDEMVKTGEAQIHAHLVRPYVGIHLRIGSDWKNACAMLKDGTAGSHFMASPQCVGYSRSTAAPLTMTMCLPDLKEIQRAVKLWVRSLDAQSVYVATDSESYVPELQQLFKGKVKVVSLKPEVAQVDLYILGQADHFIGNCVSSFTAFVKRERDLQGRPSSFFGMDRPPKLRDEF

SEQ ID NO: 56896 - protein, 56 aa, Homo sapiens
KAGQVRRLQRARQRAERHALSAKAVQRQNRARESRPRRSKNQSSFIYQPCQRQFNY

SEQ ID NO: 56897 - protein, 68 aa, Homo sapiens
VEYTQNQKDVLSEKEKKLEEYKQKLARVTQVRKELKSHIQSLPDLSLLPNVTGGLAPLPSAGDLFSTD

SEQ ID NO: 56898 - protein, 452 aa, Homo sapiens
LVARITDKGLQYAAQEGLLALQSELLRITLPDFTGDLRIPHVGRGRYEFHSLNIHSCELLHSALRPVPGQGLSLSISDSSIRVQGRWKVRKSFFKLQGSFDVSVKGISISVNLLLGSESSGRPTVTASSCSSDIADVEVDMSGDLGWLLNLFHNQIESKFQKVLESRICEMIQKSVSSDLQPYLQTLPVTTEIDSFADIDYSLVEAPRATAQMLEVMFKGEIFHRNHRSPVTLLAAVMSLPEEHNKMVYFAISDYVFNTASLVYHEEGYLNFSITDDMIPPDSNIRLTTKSFRPFVPRLARLYPNMNLELQGSVPSAPLLNFSPGNLSVDPYMEIDAFVLLPSSSKEPVFRLSVATNVSATLTFNTSKITGFLKPGKVKVELKESKVGLFNAELLEALLNYYILNTFYPKFNDKLAEGFPLPLLKRVQLYDLGLQIHKDFLFLGANVQYMRV

SEQ ID NO: 56899 - protein, 335 aa, Homo sapiens
LRTSPSVASLSENELPPPPEPPGYVCSLTEDLVTKAREELQEKPEWRLRDVQALRDMVRKEYPNLSTSLDDAFLLRFLRARKFDYDRALQLLVNYHSCRRSWPEVFNNLKPSALKDVLASGFLTVLPHTDPRGCHVVCIRPDRWIPSNYPITENIRAIYLTLEKLIQSEETQVNGIVILADYKGVSLSKASHFGPFIAKKVIGILQDGFPIRIKAVHVVNEPRIFKGIFAIIKPFLKEKIANRFFLHGSDLNSLHTNLPRSILPKEYGGTAGELDTATWNAVLLASEDDFVKEFCQPVPACDSILGQTLLPEGLTSDAQCDDSLRAVKSQLYSCY

SEQ ID NO: 56900 - protein, 290 aa, Homo sapiens
IMIKHRQVQRRGRRSQMTTSFTDPAISMDLLRAVLQPSINEEIQTVFNKYMKFFQKAALNVRDNVGEEVDAEQLIQEACRSCLEQAKLLFSDGEKVIPRLTHELPGIKRGRQAEEECAHRGSPLPKKRKGRPPGHILSSDRAAAGMVWKPKSCEPIRREGPKWDPARLNESTTFVLGSRANKALGMGGTRGRIYIKHPHLFKYAADPQDKHWLAEQHHMRATGGKMAYLLIEEDIRDLAASDDYRGCLDLKLEELKSFVLPSWMVEKMRKYMETLRTENEHRAVEAPPQT

SEQ ID NO: 56901 - protein, 336 aa, Homo sapiens
LSYNVREKDIQRFFSGYGRLLEVDLKNGYGFVEFEDSRDADDAVYELNGKELCGERVIVEHARGPRRDRDGYSYGSRSGGGGYSSRRTSGRDKYGPPVRTEYRLIVENLSSRCSWQDLKDFMRQAGEVTYADAHKERTNEGVIEFRSYSDMKRALDKLDGTEINGRNIRLIEDKPRTSHRRSYSGSRSRSRSRRRSRSRSRRSSRSRSRSISKSRSRSRSRSKGRSRSRSKGRKSRSKSKSKPKSDRGSHSHSRSRSKDEYEKSRSRSRSRSPKENGKGDIKSKSRSRSQSRSNSPLPVPPSKARSVSPPPKRATSRSRSRSRSKSRSRSRSSSRD

SEQ ID NO: 56902 - protein, 479 aa, Homo sapiens
IRAAPPPLFLLLLLLLLLVSWASRGEAAPDQDEIQRLPGLAKQPSFRQYSGYLKGSGSKHLHYWFVESQKDPENSPVVLWLNGGPGCSSLDGLLTEHGPFLVQPDGVTLEYNPYSWNLIANVLYLESPAGVGFSYSDDKFYATNDTEVAQSNFEALQDFFRLFPEYKNNKLFLTGESYAGIYIPTLAVLVMQDPSMNLQGLAVGNGLSSYEQNDNSLVYFAYYHGLLGNRLWSSLQTHCCSQNKCNFYDNKDLECVTNLQEVARIVGNSGLNIYNLYAPCAGGVPSHFRYEKDTVVVQDLGNIFTRLPLKRMWHQALLRSGDKVRMDPPCTNTTAASTYLNNPYVRKALNIPEQLPQWDMCNFLVNLQYRRLYRSMNSQYLKLLSSQKYQILLYNGDVDMACNFMGDEWFVDSLNQKMEVQRRPWLVKYGDSGEQIAGFVKEFSHIAFLTIKGAGHMVPTDKPLAAFTMFSRFLNKQPY

SEQ ID NO: 56903 - protein, 5 aa, Homo sapiens
MSSAP

SEQ ID NO: 56904 - protein, 173 aa, Homo sapiens
KMSSKRAKAKTTKKRPQRATSNVFAMFDQSQIQEFKEAFNMIDQNRDGFIDKEDLHDMLASLGKNPTDEYLEGMMSEAPGPINFTMFLTMFGEKLNGTDPEDVIRNAFACFDEEASGFIHEDHLRELLTTMGDRFTDEEVDEMYREAPIDKKGNFNYVEFTRILKHGAKDKDD

SEQ ID NO: 56905 - protein, 58 aa, Homo sapiens
LCLELILARRACRESLASPVAGSWSHFPERKSARGSDSGGTCSEEWRRRVQALSSCWP

SEQ ID NO: 56906 - protein, 39 aa, Homo sapiens
MCQCWRKEPEERPTFEYLQAFLEDYFTSTEPQYQPGENL

SEQ ID NO: 56907 - protein, 68 aa, Homo sapiens
ICYIMAEICNANVPQIRQRVHQILNMRGSSIKIVRHIIKEYAENIGDGRSPEFRENEQKRILGLLENF

SEQ ID NO: 56908 - protein, 37 aa, Homo sapiens
LKQYRAGPSFEERKQLGLPHQRRGGNFKSKSRYKRRK

SEQ ID NO: 56909 - protein, 13 aa, Homo sapiens
KEATCRHLQPSIS

SEQ ID NO: 56910 - protein, 194 aa, Homo sapiens
VYEKPVQVPCGHVFCSACLQECLKPKKPVCGVCRSALAPGVRAVELERQIESTETSCHGCRKNFFLSKIRSHVATCSKYQNYIMEGVKATIKDASLQPRNVPNRYTFPCPYCPEKNFDQEGLVEHCKLFHSTDTKSVVCPICASMPWGDPNYRSANFREHIQRRHRFSYDTFVDYDVDEEDMMNQVLQRSIIDQ

SEQ ID NO: 56911 - protein, 259 aa, Homo sapiens
RLKAGSAGDMRGTPKTHLLAFSLLCLLSKVRTQLCPTPCTCPWPPPRCPLGVPLVLDGCGCCRVCARRLGEPCDQLHVCDASQGLVCQPGAGPGGRGALCLLAEDDSSCEVNGRLYREGETFQPHCSIRCRCEDGGFTCVPLCSEDVRLPSWDCPHPRRVEVLGKCCPEWVCGQGGGLGTQPLPAQGPQFSGLVSSLPPGVPCPEWSTAWGPCSTTCGLGMATRVSNQNRFCRLETQRRLCLSRPCPPSRGRSPQNSAF

SEQ ID NO: 56912 - protein, 112 aa, Homo sapiens
INKFARNTSRITELKEEIEVKKKQLQNLEDACDDIMLADDDCLMIPYQIGDVFISHSQEETQEMLEEAKKNLQEEIDALESRVESIQRVLADLKVQLYAKFGSNINLEADES

SEQ ID NO: 56913 - protein, 59 aa, Homo sapiens
MKMSERAASLSTMVPLPRSAYWQHITRQHSTGQLYRLQDVSSPLKLHRTETFPAYRSEH

SEQ ID NO: 56914 - protein, 57 aa, Homo sapiens
KPTNKAPHPKQEPQEINFPDDLPGSNTAAPVQETLHGCQPVTQEDGKESRISVQERQ

SEQ ID NO: 56915 - protein, 65 aa, Homo sapiens
LDFTVTVHFFHLLGCWFYSSRFPSALTWWLVQAVCIALMAVIGEYLCMRTELKEIPLNSAPKSNV

SEQ ID NO: 56916 - protein, 68 aa, Homo sapiens [sequence omitted]

SEQ ID NO: 56917 - protein, 413 aa, Homo sapiens
IRHEASDFPCRVAKLPKNKNRNRYRDVSPFDHSRIKLHQEDNDYINASLIKMEEAQRSYILTQGPLPNTCGHFWEMVWEQKSRGVVMLNRVMEKGSLKCAQYWPQKEEKEMIFEDTNLKLTLISEDIKSYYTVRQLELENLTTQETREILHFHYTTWPDFGVPESPASFLNFLFKVRESGSLSPEHGPVVVHCSAGIGRSGTFCLADTCLLLMDKRKDPSSVDIKKVLLEMRKFRMGLIQTADQLRFSYLAVIEGAKFIMGDSSVQDQWKELSHEDLEPPPEHIPPPPRPPKRILEPHNGKCREFFPNHQWVKEETQEDKDCPIKEEKGSPLNAAPYGIESMSQDTEVRSRVVGGSLRGAQAASPAKGEPSLPEKDEDHALSYWKPFLVNMCVATVLTAGAYLCYRFLFNSNT

SEQ ID NO: 56918 - protein, 187 aa, Homo sapiens
VCLLGDTGVGKSSIVWRFVEDSFDPNINPTIGASFMTKTVQYQNELHKFLIWDTAGQERFRALAPMYYRGSAAAIIVYDITKEETFSTLKNWVKELRQHGPPNIVVAIAGNKCDLIDVREVMERDAKDYADSIHAIFVETSAKNAININELFIEISRRIPSTDANLPSGGKGFKLRRQPSEPKRSCC

SEQ ID NO: 56919 - protein, 236 aa, Homo sapiens
LSLEPQHELKFRGPFTDVVTTNLKLGNPTDRNVCFKVKTTAPRRYCVRPNSGIIDAGASINVSVMLQPFDYDPNEKSKHKFMVQSMFAPTDTSDMEAVWKEAKPEDLMDSKLRCVFELPAENDKPHDVEINKIISTTASKTETPIVSKSLSSSLDDTEVKKVMEECKRLQGEVQRLREENKQFKEEDGLRMRKTVQSNSPISALAPTGKEEGLSTRLLALVVLFFIVGVIIGKIAL

SEQ ID NO: 56920 - protein, 72 aa, Homo sapiens
IGFDWPGVWVHLDIAAPVHAGERATGFGVALLLALFGRASEDPLLNLVSPLGCEVDVEEGDLGRDSKRRRLV

SEQ ID NO: 56921 - protein, 104 aa, Homo sapiens
LTIQNRQAQIEVVPSASALIIKALKEPPRDRKKQKNIKHSGNITFDEIVNIARQMRHRSLARELSGTIKEILGTAQSVGCNVDGRHPHDIIDDINSGAVECPAS

SEQ ID NO: 56922 - protein, 87 aa, Homo sapiens
IPALAKVLLYGLGSVFPIENIYSATKTGKESCFERIMQRFGRKAVYVVIGDGVEEEQGAKKHNMPFWRISCHADLEALRHALELEYL

SEQ ID NO: 56923 - protein, 19 aa, Homo sapiens
ILAGWWTQRPIKINCLNIL

SEQ ID NO: 56924 - protein, 20 aa, Homo sapiens
MNMNPMPMSGMPMGPDQKYC

SEQ ID NO: 56925 - protein, 973 aa, Homo sapiens
IAMELSDANLQTLTEYLKKTLDPDPAIRRPAEKFLESVEGNQNYPLLLLTLLEKSQDNVIKVCASVTFKNYIKRNWRIVEDEPNKICEADRVAIKANIVHLMLSSPEQIQKQLSDAISIIGREDFPQKWPDLLTEMVNRFQSGDFHVINGVLRTAHSLFKRYRHEFKSNELWTEIKLVLDAFALPLTNLFKATIELCSTHANDASALRILFSSLILISKLFYSLNFQDLPEFFEDNMETWMNNFHTLLTLDNKLLQTDDEEEAGLLELLKSQICDNAALYAQKYDEEFQRYLPRFVTAIWNLLVTTGQEVKYDLLVSNAIQFLASVCERPHYKNLFEDQNTLTSICEKVIVPNMEFRAADEEAFEDNSEEYIRRDLEGSDIDTRRRAACDLVRGLCKFFEGPVTGIFSGYVNSMLQEYAKNPSVNWKHKDAAIYLVTSLASKAQTQKHGITQANELVNLTEFFVNHILPDLKSANVNEFPVLKADGIKYIMIFRNQVPKEHLLVSIPLLINHLQAESIVVHTYAAHALERLFTMRGPNNATLFTAAEIAPFVEILLTNLFKALTLPGSSENEYIMKAIMRSFSLLQEAIIPYIPTLITQLTQKLLAVSKNPSKPHFNHYMFEAICLSIRITCKANPAAVVNFEEALFLVFTEILQNDVQEFIPYVFQVMSLLLETHKNDIPSSYMALFPHLLQPVLWERTGNIPALVRLLQAFLERGSNTIASAAADKIPGLLGVFQKLIASKANDHQGFYLLNSIIEHMPPESVDQYRKQIFILLFQRLQNSKTTKFIKSFLVFINLYCIKYGALALQEIFDGIQPKMFGMVLEKIIIPEIQKVSGNVEKKICAVGITKLLTECPPMMDTEYTKLWTPLLQSLIGLFELPEDDTIPDEEHFIDIEDTPGYQTAFSQLAFAGKKEHDPVGQMVNNPKIHLAQSLHKLSTACPGRVPSMVSTSLNAEALQYLQGYLQAASVTLL

SEQ ID NO: 56926 - protein, 30 aa, Homo sapiens
KYQCQACARTFSRMSLLHKHQESGCSGCPR

SEQ ID NO: 56927 - protein, 77 aa, Homo sapiens
KHSDEYKIRRERNNIAVRKSRDKAKMRNLETQHKVLELTAENERLQKKVEQLSRELSTLRNLFKQLPEPLLASSGHC

SEQ ID NO: 56928 - protein, 410 aa, Homo sapiens
LLYDGYISIANGLINEIKPQSVCAPSEQLLHLIKLGMENDDTAVQYAIGRSDTVAPGTGIDLEFDADVQTMSPEASEYETCYVTSHKGPCRVATYSRDGQLIATGSADASIKILDTERMLAKSAMPIEVMMNETAQQNMENHPVIRTLYDHVDEVTCLAFHPTEQILASGSRDYTLKLFDYSKPSAKRAFKYIQEAEMLRSISFHPSGDFILVGTQHPTLRLYDINTFQCFVSCNPQDQHTDAICSVNYNSSANMYVTGSKDGCIKLWDGVSNRCITTFEKAHDGAEVCSAIFSKNSKYILSSGKDSVAKLWEISTGRTLVRYTGAGLSGRQVHRTQAVFNHTEDYVLLPDERTISLCCWDSRTAERRNLLSLGHNNIVRCIVHSPTNPGFMTCSDDFRARFWYRRSTTD

SEQ ID NO: 56929 - protein, 218 aa, Homo sapiens
TKDEWMEKLNNLHVQRADMNRLIMNYLVTEGFKEAAEKFRMESGIEPSVDLETLDERIKIREMILKGQIQEAIALINSLHPELLDTNRYLYFHLQQQHLIELIRQRETEAALEFAQTQLAEQGEESRECLTEMERTLALLAFDSPEESPFGDLLHTMQRQKVWSEVNQAVLDYENRESTPKLAKLLKLLLWAQNELDQKKVKYPKMTDLSKGVIEEPK

SEQ ID NO: 56930 - protein, 36 aa, Homo sapiens
KPRGDAKKCRKVYGMERRDLWCTACRWKKACQRFLD

SEQ ID NO: 56931 - protein, 144 aa, Homo sapiens
LSDLQSILATMNVPAGPAGGQQVDLASVLTPEIMAPILANADVQERLLPYLPSGESLPQTADEIQNTLTSPQFQQALGMFSAALASGQLGPLMCQFGLPAEAVEAANKGDVEAFAKAMQNNAKPEQKEGDTKDKKDEEEDMSLD

SEQ ID NO: 56932 - protein, 5 aa, Homo sapiens
KSGKP

SEQ ID NO: 56933 - protein, 190 aa, Homo sapiens
LSTSGESLYHVLGLDKNATSDDIKKSYRKLALKYHPDKNPDNPEAADKFKEINNAHAILTDATKRNIYDKYGSLGLYVAEQFGEENVNTYFVLSSWWAKALFVFCGLLTCCYCCCCLCCCFNCCCGKCKPKAPEGEETEFYVSPEDLEAQLQSDEREATDTPIVIQPASATETTQLTADSHPSYHTDGFN

SEQ ID NO: 56934 - protein, 215 aa, Homo sapiens
KAREAYNQGLKKCPHSTPLWLLLSRLEEKIGQLTRARAILEKSRLKNPKNPGLWLESVRLEYRAGLKNIANTLMAKALQECPNSGILWSEAIFLEARPQRRTKSVDALKKCEHDPHVLLAVAKLFWSQRKITKAREWFHRTVKIDSDLGDAWAFFYKFELQHGTEEQQEEVRKRCESAEPRHGELWCAVSKDIANWQKKIGDILRLVAGRIKNTF

SEQ ID NO: 56935 - protein, 46 aa, Homo sapiens
TQTDLFTCGKCRKKNCTYTQVQTRSSDEPMTTFVVCNECGNRWKFC

SEQ ID NO: 56936 - protein, 286 aa, Homo sapiens
LNPADITVLFKMFTSMDPPPVELIRVPAFLDLFMQSLFKPGARINQDHKHKYIHILAYAASVVETWKKNKRVSINKDELKSTSKAVETVHNLCCNENKGASELVAELSTLYQCIRFPVVAMGVLKWVDWTVSEPRYFQLQTDHTPVHLALLDEISTCHQLLHPQVLQLLVKLFETEHSQLDVMEQLELKKTLLDRMVHLLSRGYVLPVVSYIRKCLEKLDTDISLIRYFVTEVLDVIAPPYTSDFVQLFLPILENDSIAGTIKTEGEHDPVTEFIAHCKSNFIMVN

SEQ ID NO: 56937 - protein, 398 aa, Homo sapiens
LSANLSDMSGPVPSRARVYTDVNTHRPREYWDYESHVVEWGNQDDYQLVRKLGRGKYSEVFEAINITNNEKVVVKILKPVKKKKIKREIKILENLRGGPNIITLADIVKDPVSRTPALVFEHVNNTDFKQLYQTLTDYDIRFYMYEILKALDYCHSMGIMHRDVKPHNVMIDHEHRKLRLIDWGLAEFYHPGQEYNVRVASRYFKGPELLVDYQMYDYSLDMWSLGCMLASMIFRKEPFFHGHDNYDQLVRIAKVLGTEDLYDYIDKYNIELDPRFNDILGRHSRKRWERFVHSENQHLVSPEALDFLDKLLRYDHQSRLTAREAMEHPYFYTVVKDQARMGSSSMPGGSTPVSSANMMSGISSVPTPSPLGPLAGSPVIAAANPLGMPVPAAAGAQQ

SEQ ID NO: 56938 - protein, 69 aa, Homo sapiens
IREDPDSVPPIDVLWIKGAQGGDYFYSFGGCHRYAAYQQLQRETIPAKLVQSTLSDLRVYLGASTPDLQ

SEQ ID NO: 56939 - protein, 140 aa, Homo sapiens
VNLDMEDHRDEDFVKPKGAFKAFTGEGQKLGSTAPQVLSTSSPAQQAENEAKASSSILIDESEPTTNIQIRLADGGRLVQKFNHSHRISDIRLFIVDARPAMAATSFILMTTFPNKELADESQTLKEANLLNAVIVQRLT

SEQ ID NO: 56940 - protein, 57 aa, Homo sapiens
INMNGVNSSNGVVDPRAIPVLAKWQNSYSIKVVLQEFRRLMMSKENMKLPQPPEGQC

SEQ ID NO: 56941 - protein, 35 aa, Homo sapiens
KLDYITYLSISDQLFDIPKERKNAEYKRYLEMLLE

SEQ ID NO: 56942 - protein, 47 aa, Homo sapiens
LGPTATGQPWPLDPENSHEPSSHPEKPLPAVSPDPQDQVQMPRSCLW

SEQ ID NO: 56943 - protein, 382 aa, Homo sapiens
LSGVRWLTRALVSAGNPGAWRGLSTSAAAHAASRSQAEDVRVEGSFPVTMLPGDGVGPELMHAVKEVFKAAAVPVEFQEHHLSEVQNMASEEKLEQVLSSMKENKVAIIGKIHTPMEYKGELASYDMRLRRKLDLFANVVHVKSLPGYMTRHNNLDLVIIREQTEGEYSSLEHESARGVIECLKIVTRAKSQRIAKFAFDYATKKGRGKVTAVHKANIMKLGDGLFLQCCEEVAELYPKIKFETMIIDNCCMQLVQNPYQFDVLVMPNLYGNIIDNLAAGLVGGAGVVPGESYSAEYAVFETGARHPFAQAVGRNIANPTAMLLSASNMLRHLNLEYHSSMIADAVKKVIKVGKVRTRDMGGYSTTTDFIKSVIGHLQTKGS

SEQ ID NO: 56944 - protein, 384 aa, Homo sapiens
LSGVRWLTRALVSAGNPGAWRGLSTSAAAHAASRSQAEDVRVEGSFPVTMLPGDGVGPELMHAVKEVFKAAAVPVEFQEHHLSEVQNMASEEKLEQVLSSMKENKVAIIGKIHTPMEYKGELASYDMRLRRKLDLFANVVHVKSLPGYMTRHNNLDLVIIREQTEGEYSSLEHESARGVIECLKIVTRAKSQRIAKFAFDYATKKGRGKVTAVHKANIMKLGDGLFLQCCEEVAELYPKIKFETMIIDNCCMQLVQNPYQFDVLVMPNLYGNIIDNLAAGLVGGAGVVPGESYSAEYAVFETGARHPFAQAVGRNIANPTAMLLSASNMLRHLNLEYHSSMIADAVKKVIKVGKVRTRDMGGYSTTTDFIKSVIGHLQTKGSNL

SEQ ID NO: 56945 - protein, 44 aa, Homo sapiens
ITYPAGFMDVISIDKMGENFCLICDTKGHFAVHRITPEEAKYKL

SEQ ID NO: 56946 - protein, 86 aa, Homo sapiens [sequence omitted]

SEQ ID NO: 56947 - protein, 313 aa, Homo sapiens
VAPVWYLVAAALLVGFILFLTRSRGRAASAGQEPLHNEELAGAGRVAQPGPLEPEEPRAGGRPRRRRDLGSRLQAQRRAQRVAWAEADENEEEAVILAQEEEGVEKPAETHLSGKIGAKKLRKLEEKQARKAQREAEEAEREERKRLESQREAEWKKEEERLRLEEEQKEEEERKAREEQAQREHEEYLKLKEAFVVEEEGVGETMTEEQSQSFLTEFINYIKQSKVVLLEDLASQVGLRTQDTINRIQDLLAEGTITGVIDDRGKFIYITPEELAAVANFIRQRGRVSIAELAQASNSLIAWGRESPAQAPA

SEQ ID NO: 56948 - protein, 4 aa, Homo sapiens
VSHC

SEQ ID NO: 56949 - protein, 53 aa, Homo sapiens
MESYNLPFGMNIIKKYRCFSYLPISPTFVGYTWKGLRKSDNSRSSDEDSQATG

SEQ ID NO: 56950 - protein, 69 aa, Homo sapiens
LFLIGAFLIIIGSLLLSGYISKGGADRAVPVLIIGILVFLPGFYHLRIAYYASKGYRGYSYDDIPDFDD

SEQ ID NO: 56951 - protein, 43 aa, Homo sapiens
KKKESEIEKESQRKSIDPALSMLIKSIKTKTEQFQARKKQKVK

SEQ ID NO: 56952 - protein, 232 aa, Homo sapiens
IFRRYRGPGIFEDLQNYILEKKWQSVEPLTGWKSPASLTMSGMAGLFSISGKIWHLHNYFTVTLGIPAWCSYVFFVIATLVFGLFMGLVLVVISECFYVPLPRHLSERSEQNRRSEEAHRAEQLQDAEEEKDDSNEEENKDSLVDDEEEKEDLGDEDEAEEEEEEDNLAAGVDEERSEANDQGPPGEDGVTREEVEPEEAEEGISEQPCPADTEVVEDSLRQRKSQHADKGL

SEQ ID NO: 56953 - protein, 93 aa, Homo sapiens
IEKHGANTVPIKDYENKNSKMSKIRTHNSEVEEDDMDKHQQKARFAKQPAYTLVDREEKPPNGTPTKHPNWTNKQDNRDLESAQSLNRMEYIV

SEQ ID NO: 56954 - protein, 287 aa, Homo sapiens [sequence omitted]

SEQ ID NO: 56955 - protein, 17 aa, Homo sapiens
KEVVLQHVRTERTPQRL

SEQ ID NO: 56956 - protein, 133 aa, Homo sapiens
IWLPFMETELHCDEKTIIIGHSSGAIAAMRYAETHRVYAIVLVSAYTSDLGDENERASGYFTRPWQWEKIKANCPYIVQFGSTDDPFLPWKEQQEVADRLETKLHKFTDCGHFQNTEFHELITVVKSLLKVPA

SEQ ID NO: 56957 - protein, 190 aa, Homo sapiens
VPEAVGGDMQQLNQLGAQQFSALTEVLFHFLTEPKEVERFLAQLSEFATTNQISLGSLRSIVKSLLLVPNGALKKSLTAKQVQADFITLGLSEEKATYFSEKWKQNAPTLARWAIGQTLMINQLIDMEWKFGVTSGSSELEKVGSIFLQLKLVVKKGNQTENVYIELTLPQFYSFLHEMERVRTSMECFC

SEQ ID NO: 56958 - protein, 49 aa, Homo sapiens; identical to SEQ ID NO: 53492

SEQ ID NO: 56959 - protein, 27 aa, Homo sapiens
MTYLYEDSNVWHDISDFLVYNKSRPSN

SEQ ID NO: 56960 - protein, 6 aa, Homo sapiens
MDFPES

SEQ ID NO: 56961 - protein, 21 aa, Homo sapiens
LPGRMIPPAGAGFFASHREAG

SEQ ID NO: 56962 - protein, 238 aa, Homo sapiens
IPIIKMSQSNRELVVDFLSYKLSQKGYSWSQFSDVEENRTEAPEGTESEMETPSAINGNPSWHLADSPAVNGATGHSSSLDAREVIPMAAVKQALREAGDEFELRYRRAFSDLTSQLHITPGTAYQSFEQVVNELFRDGVNWGRIVAFFSFGGALCVESVDKEMQVLVSRIAAWMATYLNDHLEPWIQENGGWDTFVELYGNNAAAESRKGQERFNRWFLTGMTVAGVVLLGSLFSRK

SEQ ID NO: 56963 - protein, 107 aa, Homo sapiens
KRQIVDLDTKRNQNREGLRALQKDLSLSEDVMVCFGNMFIKMPHPETKEMIEKDQDHLDKEIEKLRKQLKVKVNRLFEAQGKPELKGFNLNPLNQDELKALKVILKG

SEQ ID NO: 56964 - protein, 94 aa, Homo sapiens
LDFAVGEYNKASNDMYHSRALQVVRARKQIVAGVNYFLDVELGRTTCTKTQPNLDNCPFHDQPHLKRKAFCSFQIYAVPWQGTMTLSKSTCQDA

SEQ ID NO: 56965 - protein, 4 aa, Homo sapiens
RMPE

SEQ ID NO: 56966 - protein, 398 aa, Homo sapiens
LLQQQEEDRSKLRSVSVDLNVDPSLQIDIPDALSERDKVKFTVHTKTTLPTFQSPEFSVTRQHEDFVWLHDTLIETTDYAGLIIPPAPTKPDFDGPREKMQKLGEGEGSMTKEEFAKMKQELEAEYLAVFKKTVSSHEVFLQRLSSHPVLSKDRNFHVFLEYDQDLSVRRKNTKEMFGGFFKSVVKSADEVLFTGVKEVDDFFEQEKNFLINYYNRIKDSCVKADKMTRSHKNVADDYIHTAACLHSLALEEPTVIKKYLLKVAELFEKLRKVEGRVSSDEDLKLTELLRYYMLNIEAAKDLLYRRTKALIDYENSNKALDKARLKSKDVKLAEAHQQECCQKFEQLSESAKEELINFKRKRVAAFRKNLIEMSELEIKHARNNVSLLQSCIDLFKNN

SEQ ID NO: 56967 - protein, 25 aa, Homo sapiens
LEDPSIIAEILSVYQKCKDKQAAAK

SEQ ID NO: 56968 - protein, 48 aa, Homo sapiens
LASVRRVFSSTLQNWQTTRFMEVEVAIRLLYMLAEALPVSISWCSLLR

SEQ ID NO: 56969 - protein, 18 aa, Homo sapiens
IEKLAKNKQKPITPETAE

SEQ ID NO: 56970 - protein, 367 aa, Homo sapiens
IIYLFHFLIDYAELVFMITDALTAIALYFAIQDFNKVVFKKQKLLLELDQYAPDVAELIRTPMEMRYIPLKVALFYLLNPYTILSCVAKSTCAINNTLIAFFILTTIKGSAFLSAIFLALATYQSLYPLTLFVPGLLYLLQRQYIPVKMKSKAFWIFSWEYAMMYVGSLVVIICLSFFLLSSWDFIPAVYGFILSVPDLTPNIGLFWYFFAEMFEHFSLFFVCVFQINVFFYTIPLAIKLKEHPIFFMFIQIAVIAIFKSYPTVGDVALYMAFFPVWNHLYRFLRNIFVLTCIIIVCSLLFPVLWHLWIYAGSANSNFFYAITLTFNVGQILLISDYFYAFLRREYYLTHGLYLTAKDGTEAMLVLK

SEQ ID NO: 56971 - protein, 82 aa, Homo sapiens
LTLNRNLSDSLARGRLHPDLQSNLLQVDSEFTEEEIEFLEARGHHVEKVDVLSWVHGSRRTNNFIIAVKDPRSPDAAGATIL

SEQ ID NO: 56972 - protein, 457 aa, Homo sapiens
LARQAVDRALAEGVLLRTSQEPTSSEVVSYAPFTLFPSLVPSALLEQAYAVQMDFNLLVDAVSQNAAFLEQTLSSTIKQDDFTARLFDIHKQVLKEGIAQTVFLGLNRSDYMFQRSADGSPALKQIEINTISASFGGLASRTPAVHRHVLSVLSKTKEAGKILSNNPSKGLALGIAKAWELYGSPNALVLLIAQEKERNIFDQRAIENELLARNIHVIRRTFEDISEKGSLDQDRRLFVDGQEIAVVYFRDGYMPRQYSLQNWEARLLLERSHAAKCPDIATQLAGTKKVQQELSRPGMLEMLLPGQPEAVARLRATFAGLYSLDVGEEGDQAIAEALAAPSRFVLKPQREGGGNNLYGEEMVQALKQLKDSEERASYILMEKIEPEPFENCLLRPGSPARVVQCISELGIFGVYVRQEKTLVMNKHVGHLLRTKAIEHADGGVAAGVAVLDNPYPV

SEQ ID NO: 56973 - protein, 403 aa, Homo sapiens
VNLLHGVNPGETPVTCTAGIGTFIVEFATLSSLTGDPVFEDVARVALMRLWESRSDIGLVGNHIDVLTGKWVAQDAGIGAGVDSYFEYLVKGAILLQDKKLMAMFLEYNKAIRNYTRFDDWYLWVQMYKGTVSMPVFQSLEAYWPGLQSLIGDIDNAMRTFLNYYTVWKQFGGLPEFYNIPQGYTVEKREGYPLRPELIESAMYLYRATGDPTLLELGRDAVESIEKISKVECGFATIKDLRDHKLDNRMESFFLAETVKYLYLLFDPTNFIHNNGSTFDAVITPYGECILGAGGYIFNTEAHPIDPAALHCCQRLKEEQWEVEDLMREFYSLKRSRSKFQKNTVSSGPWEPPARPGTLFSPENHDQARERKPAKQKVPLLSCPSQPFTSKLALLGQVFLDSS

SEQ ID NO: 56974 - protein, 7 aa, Homo sapiens
IACTSWY

SEQ ID NO: 56975 - protein, 21 aa, Homo sapiens
VEKNPQSILKPHSPTYNDEGL

SEQ ID NO: 56976 - protein, 319 aa, Homo sapiens
LSMGPELPTSPLAMEYVNDFDLLKFDVKKEPLGRAERPGRPCTRLQPAGSVSSTPLSTPCSSVPSSPSFSPTEQKTHLEDLYWMASNYQQMNPEALNLTPEDAVEALIGSHPVPQPLQSFDSFRGAHHHHHHHHPHPHHAYPGAGVAHDELGPHAHPHHHHHHQASPPPSSAASPAQQLPTSHPGPGPHATASATAAGGNGSVEDRFSDDQLVSMSVRELNRHLRGFTKDEVIRLKQKRRTLKNRGYAQSCRYKRVQQKHHLENEKTQLIQQVEQLKQEVSRLARERDAYKVKCEKLANSGFREAGSTSDSPSSPEFFL

SEQ ID NO: 56977 - protein, 72 aa, Homo sapiens
LEPSYVLRAIGTDEDLAHSSIRFGIGRFTTEEEVDYTVEKCIQHVKRLREMSPLWEMVQDGIDLKSIKWTQH

SEQ ID NO: 56978 - protein, 601 aa, Homo sapiens
VHLLKDHVGRNNGNGLVKFLSPQDTFEALKRNRMLMIQRYVEVSPATERQWVAAGGHITFKQNMGPSGQTHPPPQTLPRSKSPSGQKRSRSRSPHEAGFCVYLKGLPFEAENKHVIDFFKKLDIVEDSIYIAYGPNGKATGEGFVEFRNEADYKAALCRHKQYMGNRFIQVHPITKKGMLEKIDMIRKRLQNFSYDQREMILNPEGDVNSAKVCAHITNIPFSITKMDVLQFLEGIPVDENAVHVLVDNNGQGLGQALVQFKNEDDARKSERLHRKKLNGREAFVHVVTLEDMREIEKNPPAQGKKGLKMPVPGNPAVPGMPNAGLPGVGLPSAGLPGAGLPSTGLPGSAITSAGLPGAGMPSAGIPSAGGEEHAFLTVGSKEANNGPPFNFPGNFGGSNAFGPPIPPPGLGGGAFGDARPGMPSVGNSGLPGLGLDVPGFGGGPNNLSGPSGFGGGPQNFGNGPGSLGGPPGFGSGPPGLGSAPGHLGGPPAFGPGPGPGPGPGPIHIGGPPGFASSSGKPGPTVIKVQNMPFTVSIDEILDFFYGYQVIPGSVCLKYNEKGMPTGEAMVAFESRDEATAAVIDLNDRPIGSRKVKLVLG

SEQ ID NO: 56979 - protein, 516 aa, Homo sapiens
IGSKSDPLCVLLQDVGGGSWAELGRTERVRNCSSPEFSKTLQLEYRFETVQKLRFGIYDIDNKTPELRDDDFLGGAECSLGQIVSSQVLTLPLMLKPGKPAGRGTITVSAQELKDNRVVTMEVEARNLDKKDFLGKSDPFLEFFRQGDGKWHLVYRSEVIKNNLNPTWKRFSVPVQHFCGGNPSTPIQVQCSDYDSDGSHDLIGTFHTSLAQLQAVPAEFECIHPEKQQKKKSYKNSGTIRVKICRVETEYSFLDYVMGGCQINFTVGVDFTGSNGDPSSPDSLHYLSPTGVNEYLMALWSVGSVVQDYDSDKLFPAFGFGAQVPPDWQVSHEFALNFNPSNPYCAGIQGIVDAYRQALPQVRLYGPTNFAPIINHVARFAAQAAHQGTASQYFMLLLLTDGAVTDVEATREAVVRASNLPMSVIIVGVGGADFEAMEQLDADGGPLHTRSGQAAARDIVQFVPYRRFQNAPREALAQTVLAEVPTQLVSYFRAQGWAPLKPLPPSAKDPAQAPQA

SEQ ID NO: 56980 - protein, 550 aa, Homo sapiens
ISSRTRAPQAPEGRNRRLEKMADDIDIEAMLEAPYKKDENKLSSANGHEERSKKRKKSKSRSRSHERKRSKSKERKRSRDRERKKSKSRERKRSRSKERRRSRSRSRDRRFRGRYRSPYSGPKFNSAIRGKIGLPHSIKLSRRRSRSKSPFRKDKSPVREPIDNLTPEERDARTVFCMQLAARIRPRDLEEFFSTVGKVRDVRMISDRNSRRSKGIAYVEFVDVSSVPLAIGLTGQRVLGVPIIVQASQAEKNRAAAMANNLQKGSAGPMRLYVGSLHFNITEDMLRGIFEPFGRIESIQLMMDSETGRSKGYGFITFSDSECAKKALEQLNGFELAGRPMKVGHVTERTDASSASSFLDSDELERTGIDLGTTGRLQLMARLAEGTGLQIPPAAQQALQMSGSLAFGAVAEFSFVIDLQTRLSQQTEASALAAAASVQPLATQCFQLSNMFNPQTEEEVGWDTEIKDDVIEECNKHGGVIHIYVDKNSAQGNVYVKCPSIAAAIAAVNALHGRWFAGKMITAAYVPLPTYHNLFPDSMTATQLLVPSRR

SEQ ID NO: 56981 - protein, 14 aa, Homo sapiens
KYTCSFCGKTKMKR

SEQ ID NO: 56982 - protein, 20 aa, Homo sapiens
VPRVFIGKDCIGGCSDLVTM

SEQ ID NO: 56983 - protein, 674 aa, Homo sapiens
LETNGRDHHTADLCREKLVVRRGQPFWLTLHFEGRNYEASVDSLTFSVVTGPAPSQEAGTKARFPLRDAVEEGDWTATVVDQQDCTLSLQLTTPANAPIGLYRLSLEASTGYQGSSFVLGHFILLFNAWCPADAVYLDSEEERQEYVLTQQGFIYQGSAKFIKNIPWNFGQFEDGILDICLILLDVNPKFLKNAGRDCSRRSSPVYVGRVVSGMVNCNDDQGVLLGRWDNNYGDGVSPMSWIGSVDILRRWKNHGCQRVKYGQCWVFAAVACTVLRCLGIPTRVVTNYNSAHDQNSNLLIEYFRNEFGEIQGDKSEMIWNFHCWVESWMTRPDLQPGYEGWQALDPTPQEKSEGTYCCGPVPVRAIKEGDLSTKYDAPFVFAEVNADVVDWIQQDDGSVHKSINRSLIVGLKISTKSVGRDEREDITHTYKYPEGSSEEREAFTRANHLNKLAEKEETGMAMRIRVGQSMNMGSDFDVFAHITNNTAEEYVCRLLLCARTVSYNGILGPECGTKYLLNLNLEPFSEKSVPLCILYEKYRDCLTESNLIKVRALLVEPVINSYLLAERDLYLENPEIKIRILGEPKQKRKLVAEVSLQNPLPVALEGCTFTVEGAGLTEEQKTVEIPDPVEAGEEVKVRMDLLPLHMGLHKLVVNFESDKLKAVKGFRNVIIGPA

SEQ ID NO: 56984 - protein, 697 aa, Homo sapiens
IDQKRPLASIIKEVCDGWSLPNPEYYTLRYADGPQLYITEQTRSDIKNGTILQLAISPSRAARQLMERTQSSNMETRLDAMKELAKLSADVTFATEFINMDGIIVLTRLVESGTKLLSHYSEMLAFTLTAFLELMDHGIVSWDMVSITFIKQIAGYVSQPMVDVSILQRSLAILESMVLNSQSLYQKIAEEITVGQLISHLQVSNQEIQTYAIALINALFLKAPEDKRQDMANAFAQKHLRSIILNHVIRGNRPIKTEMAHQLYVLQVLTFNLLEERMMTKMDPNDQAQRDIIFELRRIAFDAESDPSNAPGSGTEKRKAMYTKDYKMLGFTNHINPAMDFTQTPPGMLALDNMLYLAKVHQDTYIRIVLENSSREDKHECPFGRSAIELTKMLCEILQVGELPNEGRNDYHPMFFTHDRAFEELFGICIQLLNKTWKEMRATAEDFNKVMQVVREQITRALPSKPNSLDQFKSKLRSLSYSEILRLRQSERMSQDDFQSPPIVELREKIQPEILELIKQQRLNRLCEGSSFRKIGNRRRQERFWYCRLALNHKVLHYGDLDDNPQGEVTFESLQEKIPVADIKAIVTGKDCPHMKEKSALKQNKEVLELAFSILYDPDETLNFIAPNKYEYCIWIDGLSALLGKDMSSELTKSDLDTLLSMEMKLRLLDLENIQIPEAPPPIPKEPSSYDFVYHYG

SEQ ID NO: 56985 - protein, 193 aa, Homo sapiens
KYQQQTVVAIDLAGDETIPGSSLLPGHVQAYQEAVKSGIHRTVHAGEVGSAEVVKEAVDILKTERLGHGYHTLEDQALYNRLRQENMHFEICPWSSYLTGAWKPDTEHAVIRLKNDQANYSLNTDDPLIFKSTLDTDYQMTKRDMGFTEEEFKRLNINAAKSSFLPEDEKRELLDLLYKAYGMPPSASAGQNL

SEQ ID NO: 56986 - protein, 21 aa, Homo sapiens
KLCSEQREVFCQEADVEITIF

SEQ ID NO: 56987 - protein, 100 aa, Homo sapiens
KKAIEKYSESLLCSNLESATYSNRALCYLVLKQYTEAVKDCTEALKLDGKNVKAFYRRAQAHKALKDYKSSFADISNLLQIEPRNGPAQKLRQEVKQNLH

SEQ ID NO: 56988 - protein, 189 aa, Homo sapiens
LLFFVGGVAESIRETEVIDPQDLLEGRYFSGALPDDEDVVGPGQESDDFELSGSGDLDDLEDSMIGPEVVHPLVPLDNHIPERAGSGSQVPTEPKKLEENEVIPKRISPVEESEDVSNKVSMSSTVQGSNIFERTEVLAALIVGGIVGILFAVFLILLLMYRMKKKDEGSYDLGKKPIYKKAPTNEFYA

SEQ ID NO: 56989 - protein, 26 aa, Homo sapiens
KSELHKFMPNNQLNYKSTQLSHLVYR

SEQ ID NO: 56990 - protein, 319 aa, Homo sapiens
LCFSLIAHNLVHLLLLARWEDTPLVILGVVAGALIADFLSGLVHWGADTWGSVELPIVGKAFIRPFREHHIDPTAITRHDFIETNGDNCLVTLLPLLNMAYKFRTHSPEALEQLYPWECFVFCLIIFGTFTNQIHKWSHTYFGLPRWVTLLQDWHVILPRKHHRIHHVSPHETYFCITTGVKVPRNFRLLEELEEGQKGVGDGTVSWGLEDDEDMTLTRWTGMIIGPPRTIYENRIYSLKIECGPKYPEAPPFVRFVTKINMNGVNSSNGVVDPRAISVLAKWQNSYSIKVVLQELRRLMMSKENMKLPQPPEGQCYSN

SEQ ID NO: 56991 - protein, 357 aa, Homo sapiens
KNGTRNFQDFDCQEHDIETTHGVVHVTIRGLPKGNRPVILTYHDIGLNHKSCFNAFFNFEDMQEITQHFAVCHVDAPGQQEGAPSFPTGYQYPTMDELAEMLPPVLTHLSLKSIIGIGVGAGAYILSRFALNHPELVEGLVLINVDPCAKGWIDWAASKLSGLTTNVVDIILAHHFGQEELQANLDLIQTYRMHIAQDINQDNLQLFLNSYNGRRDLEIERPILGQNDNKSKTLKCSTLLVVGDNSPAVEAVVECNSRLNPINTTLLKMADCGGLPQVVQPGKLTEAFKYFLQGMGYIPSASMTRLARSRTHSTSSSLGSGESPFSRSVTSNQSDGTQESCESPDVLDRHQTMEVSC

SEQ ID NO: 56992 - protein, 51 aa, Homo sapiens
MDESTQCFQKVSVQLGKRSMQQLDPSPARKLLKLQLQNPPAIHGSGSGSCQ

SEQ ID NO: 56993 - protein, 22 aa, Homo sapiens
KCRLHPSESSWGGEERALPPSE

SEQ ID NO: 56994 - protein, 51 aa, Homo sapiens
TCPDCKEVIGGTNHTLERSNQLASEMDGAQHAAWSDTANNLMNFEEIQGMM

SEQ ID NO: 56995 - protein, 374 aa, Homo sapiens
LLAALFFFSLSSSLLYFVYVAPGIVNTYLFMMQAQGILIRDNVRTIGAQVYEQVLRSAYAKRNSSVNDSDYPLDLNHSETFLQTTTFLPEDFTYFANHTCPERLPSMKGPIDINMSEIGMDYIHELFSKDPTIKLGGHWKPSDCMPRWKVAILIPFRNRHEHLPVLFRHLLPMLQRQRLQFAFYVVEQVGTQPFNRAMLFNVGFQEAMKDLDWDCLIFHDVDHIPESDRNYYGCGQMPRHFATKLDKYMYLLPYTEFFGGVSGLTVEQFRKINGFPNAFWGWGGEDDDLWNRVQNAGYSVSRPEGDTGKYKSIPHHHRGEVQFLGRYALLRKSKERQGLDGLNNLNYFANITYDALYKNITVNLTPELAQVNEY

SEQ ID NO: 56996 - protein, 292 aa, Homo sapiens
LLLVLLAGAAQGGLYFRRGQTCYRPLRGDGLAPLGRSTYPRPHEYLSPADLPKSWDWRNVDGVNYASITRNQHIPQYCGSCWAHASTSAMADRINIKRKGAWPSTLLSVQNVIDCGNAGSCEGGNDLSVWDYAHQHGIPDETCNNYQAKDQECDKFNQCGTCNEFKECHAIRNYTLWRVGDYGSLSGREKMMAEIYANGPISCGIMATERLANYTGGIYAEYQDTTYINHVVSVAGWGISDGTEYWIVRNSWGEPWGERGWLRIVTSTYKDGKGARYNLAIEEHCTFGDPIV

SEQ ID NO: 56997 - protein, 39 aa, Homo sapiens
IRYSQICAKAVRDALKTEFKANAEKTSGSNVKIVKVKKE

SEQ ID NO: 56998 - protein, 75 aa, Homo sapiens
IQTWHWLMTVAELLSLACYIASLVFLHEFIDVYFIATLSFLWKVSVITLVSCLPLYVLKYLRRRFSPPSYSKLTS

SEQ ID NO: 56999 - protein, 14 aa, Homo sapiens
KVGAIQRWLKGQGV

SEQ ID NO: 57000 - protein, 43 aa, Homo sapiens
TAVDKRVNDLFRIIPGIGNFGDRYFGTDAVPDGSDEEEVAYTG

SEQ ID NO: 57001 - protein, 78 aa, Homo sapiens
LCGVPVLVLANKQDVETCLSIPDIKTAFSDCTSKIGRRDCLTQACSALTGKGVREGIEWMVKCVVRNVHRPPRQRDIT

SEQ ID NO: 57002 - protein, 153 aa, Homo sapiens
LTVEDPVTVEYITRYIASLKQRYTQSNGRRPFGISALIVGFDFDGTPRLYQTDPSGTYHAWKANAIGRGAKSVREFLEKNYTDEAIETDDLTIKLVIKALLEVVQSGGKNIELAVMRRDQSLKILNPEEIEKYVAEIEKEKEENEKKKQKKAS

SEQ ID NO: 57003 - protein, 196 aa, Homo sapiens
KGRIEKAANPSGKKKLKIFQPVIEAPGASKCIGPGCCHVAQPDSVYCSNDCILKHAAATMKFLSSGKEQKPKPKEKMKMKPEKPSLPKCGAQAGIKISSVHKRPAPEKKETTVKKAVVVPARSEALGKEAACESSTPSWASDHNYNAVKPEKTAAPSPSLLYKCMYHLGVGLLDPSRSFWIAIPWACPGLGVAALC

SEQ ID NO: 57004 - protein, 16 aa, Homo sapiens
IEAIKLAEQKHREERR

SEQ ID NO: 57005 - protein, 8 aa, Homo sapiens
IADCGQLE

SEQ ID NO: 57006 - protein, 443 aa, Homo sapiens
IEIDGTEKAECTEESIVEQTYAPAECVSQAIDINEPIGNLKKLLEPRLQCSLDAHEICLQDIQLDPERSLFDQGVKTDGTVQLSVQVISYQGIEPKLNILEIVKPADTVEVVIDPDAHHAESEAHLVEEAQVITLDGTKHITTISDETSEQVTRWAAALEGYRKEQERLGIPYDPIQWSTDQVLHWVVWVMKEFSMTDIDLTTLNISGRELCSLNQEDFFQRVPRGEILWSHLELLRKYVLASQEQQMNEIVTIDQPVQIIPASVQSATPTTIKVINSSAKAAKVQRAPRISGEDRSSPGNRTGNNGQIQLWQFLLELLTDKDARDCISWVGDEGEFKLNQPELVAQKWGQRKNKPTMNYEKLSRALRYYYDGDMICKVQGKRFVYKFVCDLKTLIGYSAAELNRLVTECEQKKLAKMQLHGIAQPVTAVALATASLQTEKDN

SEQ ID NO: 57007 - protein, 220 aa, Homo sapiens
KVYEVVNEDPETAFCTLANREVFNTDECSIQHCLYQFTRNEKLRDANKLLCEVCTRRQCNGPKANIKGERKHVYTNAKKQMLISLAPPVLTLHLKRFQQAGFNLRKVNKHIKFPEILDLAPFCTLKCKNVAEENTRVLYSLYGVVEHSGTMRSGHYTAYAKARTANSHLSNLVLHGDIPQDFEMESKGQWFHISDTHVQAVPTTKVLNSQAYLLFYERIL

SEQ ID NO: 57008 - protein, 311 aa, Homo sapiens
VSALGMVPPPENVRMNSVNFKNILQWESPAFAKGNLTFTAQYLSYRIFQDKCMNTTLTECDFSSLSKYGDHTLRVRAEFADEHSDWVNITFCPVDDTIIGPPGMQVEVLADSLHMRFLAPKIENEYETWTMKNVYNSWTYNVQYWKNGTDEKFQITPQYDFEVLRNLEPWTTYCVQVRGFLPDRNKAGEWSEPVCEQTTHDETVPSWMVAVILMASVFMVCLALLGCFALLWCVYKKTKYAFSPRNSLPQHLKEFLGHPHHNTLLFFSFPLSDENDVFDKLSVIAEDSESGKQNPGDSCSLGTPPGQGPQS

SEQ ID NO: 57009 - protein, 518 aa, Homo sapiens
IIDDNFILRWNRSDESVGNVTFSFDYQKTGMDNWIKLSGCQNITSTKCNFSSLKLNVYEEIKLRIRAEKENTSSWYEVDSFTPFRKAQIGPPEVHLEAEDKAIVIHISPGTKDSVMWALDGLSFTYSLVIWKNSSGVEERIENIYSRHKIYKLSPETTYCLKVKAALLTSWKIGVYSPVHCIKTTVENELPPPENIEVSVQNQNYVLKWDYTYANMTFQVQWLHAFLKRNPGNHLYKWKQIPDCENVKTTQCVFPQNVFQKGIYLLRVQASDGNNTSFWSEEIKFDTEIQAFLLPPVFNIRSLSDSFHIYIGAPKQSGNTPVIQDYPLIYEIIFWENTSNAERKIIEKKTDVTVPNLKPLTVYCVKARAHTMDEKLNKSSVFSDAVCEKTKPGNTSKIWLIVGICIALFALPFVIYAAKVFLRCINYVFFPSLKPSSSIDEYFSEQPLKNLLLSTSEEQIEKCFIIENISTIATVEETNQTDEDHKKYSSQTSQDSGNYSNEDESESKTSEELQQDFV

SEQ ID NO: 57010 - protein, 216 aa, Homo sapiens
LDIDDLQSIRALRDFLRKEYGGLNVLVNNAAVAFKSDDPMPFDIKAEMTLKTNFFATRNMCNELLPIMKPHGRVVNISSLQCLRAFENCSEDLQERFHSETLTEGDLVDLMKKFVEDTKNEVHEREGWPNSPYGVSKLGVTVLSRILARRLDEKRKADRILVNACCPGPVKTDMDGKDSIRTVEEGAETPVYLALLPPDATEPQGQLVHDKVVQNW

SEQ ID NO: 57011 - protein, 373 aa, Homo sapiens
LGIPKNPWLWSEQQVCQWLLWATNEFSLVNVNLQRFGMNGQMLCNLGKERFLELAPDFVGDILWEHLEQMIKENQEKTEDQYEENSHLTSVPHWINSNTLGFGTEQAPYGMQTQNYPKGGLLDSMCPASTPSVLSSEQEFQMFPKSRLSSVSVTYCSVSQDFPGSNLNLLTNNSGTPKDHDSPENGADSFESSDSLLQSWNSQSSLLDVQRVPSFESFEDDCSQSLCLNKPTMSFKDYIQERSDPVEQGKPVIPAAVLAGFTGSGPIQLWQFLLELLSDKSCQSFISWTGDGWEFKLADPDEVARRWGKRKNKPKMNYEKLSRGLRYYYDKNIIHKTSGKRYVYRFVCDLQNLLGFTPEELHAILGVQPDTED

SEQ ID NO: 57012 - protein, 300 aa, Homo sapiens
IRLYNAEQVLSWEPVALSNSTRPVVYQVQFKYTDSKWFTADIMSIGVNCTQITATECDFTAASPSAGFPMDFNVTLRLRAELGALHSAWVTMPWFQHYRNVTVGPPENIEVTPGEGSLIIRFSSPFDIADTSTAFFCYYVHYWEKGGIQQVKGPFRSNSISLDNLKPSRVYCLQVQAQLLWNKSNIFRVGHLSNISCYETMADASTELQQVILISVGTFSLLSVLAGACFFLVLKYRGLIKYWFHTPPSIPLQIEEYLKDPTQPILEALDKDSSPKDDVWDSVSIISFPEKEQEDVLQTL

SEQ ID NO: 57013 - protein, 2419 aa, Homo sapiens
IFRSFVVSKFREIQQELSSGRNEGQLNGETNTPIEGNQAGDAAASARSLPNEEIVQKIEEVLSGVLDTELRYKPDLKEGSRKSRCVSVQTDPTDEIPTKKSKKHKKHKNKKKKKKKEKEKKYKRQPEESESKTKSHDDGNIDLESDSFLKFDSEPSAVALELPTRAFGPSETNESPAVVLEPPVVSMEVSEPHILETLKPATKTAELSVVSTSVISEQSEQSVAVMPEPSMTKILDSFAAAPVPTTTLVLKSSEPVVTMSVEYQMKSVLKSVESTSPEPSKIMLVEPPVAKVLEPSETLVVSSETPTEVYPEPSTSTTMDFPESSAIEALRLPEQPVDVPSEIADSSMTRPQELPELPKTTALELQESSVASAMELPGPPATSMPELQGPPVTPVLELPGPSATPVPELPGPLSTPVPELPGPPATAVPELPGPSVTPVPQLSQELPGLPAPSMGLEPPQEVPEPPVMAQELPGLPLVTAAVELPEQPAVTVAMELTEQPVTTTELEQPVGMTTVEHPGHPEVTTATGLLGQPEATMVLELPGQPVATTALELPGQPSVTGVPELPGLPSATRALELSGQPVATGALELPGPLMAAGALEFSGQSGAAGALELLGQPLATGVLELPGQPGAPELPGQPVATVALEISVQSVVTTSELSTMTVSQSLEVPSTTALESYNTVAQELPTTLVGETSVTVGVDPLMAPESHILASNTMETHILASNTMDSQMLASNTMDSQMLASNTMDSQMLASSTMDSQMLATSSMDSQMLATSSMDSQMLATSTMDSQMLATSSMDSQMLATSSMDSQMLATSSMDSQMLATSSMDSQMLATSTMDSQMLATSTMDSQMLATSSMDSQMLASGTMDSQMLASGTMDAQMLASGTMDAQMLASSTQDSAMLGSKSPDPYRLAQDPYRLAQDPYRLGHDPYRLGHDAYRLGQDPYRLGHDPYRLTPDPYRMSPRPYRIAPRSYRIAPRPYRLAPRPLMLASRRSMMMSYAAERSMMSSYERSMMSYERSMMSPMAERSMMSAYERSMMSAYERSMMSPMAERSMMSAYERSMMSAYERSMMSPMADRSMMSMGADRSMMSSYSAADRSMMSSYSAADRSMMSSYTADRSMMSMAADSYTDSYTDTYTEAYMVPPLPPEEPPTMPPLPPEEPPMTPPLPPEEPPEGPALPTEQSALTAENTWPTEVPSSPSEESVSQPEPPVSQSEISEPSAVPTDYSVSASDPSVLVSEAAVTVPEPPPEPESSITLTPVESAVVAEEHEVVPERPVTCMVSETPAMSAEPTVLASEPPVMSETAETFDSMRASGHVASEVSTSLLVPAVTTPVLAESILEPPAMAAPESSAMAVLESSAVTVLESSTVTVLESSTVTVLEPSVVTVPEPPVVAEPDYVTIPVPVVSALEPSVPVLEPAVSVLQPSMIVSEPSVSVQESTVTVSEPAVTVSEQTQVIPTEVAIESTPMILESSIMSSHVMKGINLSSGDQNLAPEIGMQEIALHSGEEPHAEEHLKGDFYESEHGINIDLNINNHLIAKEMEHNTVCAAGTSPVGEIGEEKILPTSETKQRTVLDTYPGVSEADAGETLSSTGPFALEPDATGTSKGIEFTTASTLSLVNKYDVDLSLTTQDTEHDMVISTSPSGGSEADIEGPLPAKDIHLDLPSNNNLVSKDTEEPLPVKESDQTLAALLSPKESSGGEKEVPPPPKETLPDSGFSANIEDINEADLVRPLLPKDMERLTSLRAGIEGPLLASDVGRDRSAASPVVSSMPERASESSSEEKDDYEIFVKVKDTHEKSKKNKNRDKGEKEKKRDSSLRSRSKRSKSSEHKSRKRTSESRSRARKRSSKSKSHRSQTRSRSRSRRRRRSSRSRSKSRGRRSVSKEKRKRSPKHRSKSRERKRKRSSSRDNRKTVRARSRTPSRRSRSHTPSRRRRSRSVGRRRSFSISPSRRSRTPSRRSRTPSRRSRTPSRRSRTPSRRSRTPSRRSRTPSRRRRSRSVVRRRSFSISPVRLRRSRTPLRRRFSRSPIRRKRSRSSERGRSPKRLTDLDKAQLLEIAKANAAAMCAKAGVPLPPNLKPAPPPTIEEKVAKKSGGATIEELTEKCKQIAQSKEDDDVIVNKPHVSDEEEEEPPFYHHPFKLSEPKPIFFNLNIAAAKPTPPKSQVTLTKEFPVSSGSQHRKKEADSVYGEWVPVEKNGEENKDDDNVFSSNLPSEPVDISTAMSERALAQKRLSENAFDLEAMSMLNRAQERIDAWAQLNSIPGQFTGSTGVQVLTQEQLANTGAQAWIKKDQFLRAAPVTGGMGAVLMRKMGWREGEGLGKNKEGNKEPILVDFKTDRKGLVAVGERAQKRSGNFSAAMKDLSGKHPVSALMEICNKRRWQPPEFLLVHDSGPDHRKHFLFRVLRNGALTRPNCMFFLNRY

SEQ ID NO: 57014 - protein, 26 aa, Homo sapiens
VVLQAMGLVPKDLMANATCFRSASRR

SEQ ID NO: 57015 - protein, 164 aa, Homo sapiens
KENCSPKEEPYKMQEKSILRCSENNETINHIIPNGKSEDSIKGLQPEDVNLLVTCREEGNPVASLGHSEAETPVDAYSNGQAALMGEKERKKETDDGGRYWKFIDWFCGFKSKSLSKRSLRDLMEEEAVCLQMLEETRQVKVILNIGLFAVCSLGIFMFVYFSL

SEQ ID NO: 57016 - protein, 89 aa, Homo sapiens
RDLENLGERALPYRISAHSQQHNRGGYFLVDFYAPTAAVESMVEHLSRDIDVIRGNIVKHPLTQELKECEGIVPVPLAEKLYSTKKRKK

SEQ ID NO: 57017 - protein, 67 aa, Homo sapiens
LADCNLLPKLHIIKIVAKKYRDFEFPSEMTGIWRYLNNAYARDEFTNTCPADQEIEHAYSDVAKRMK

SEQ ID NO: 57018 - protein, 401 aa, Homo sapiens
VAGTPHSYIDTYFDTERSSTYRSKGFDVTVKYTQGSWTGFVGEDLVTIPKGFNTSFLVNIATIFESENFFLPGIKWNGILGLAYATLAKPSSSLETFFDSLVTQANIPNVFSMQMCGAGLPVAGSGTNGGSLVLGGIEPSLYKGDIWYTPIKEEWYYQIEILKLEIGGQSLNLDCREYNADKAIVDSGTTLLRLPQKVFDAVVEAVARASLIPEFSDGFWTGSQLACWTNSETPWSYFPKISIYLRDENSSRSFRITILPQLYIQPMMGAGLNYECYRFGISPSTNALVIGATVMEGFYVIFDRAQKRVGFAASPCAEIAGAAVSEISGPFSTEDVASNCVPAQSLSEPILWIVSYALMSVCGAILLVLIVLLLLPFRCQRRPRDPEVVNDESSLVRHRWK

SEQ ID NO: 57019 - protein, 28 aa, Homo sapiens
KRRILKERIYRLTQARHALCQFSSKEIH

SEQ ID NO: 57020 - protein, 18 aa, Homo sapiens
LAPAHISGLVLENSDSLQ

SEQ ID NO: 57021 - protein, 298 aa, Homo sapiens
IRGYVGNRAATFPLQVLGFEIDAVNSVQFSNHTGYAHWKGQVLNSDELQELYEGLRLNNMNKYDYVLTGYTRDKSFLAMVVDIVQELKQQNPRLVYVCDPVLGDKWDGEGSMYVPEDLLPVYKEKVVPLADIITPNQFEAELLSGRKIHSQEEALRVMDMLHSMGPDTVVITSSDLPSPQGSNYLIVLGSQRRRNPAGSVVMERIRMDIRKVDAVFVGTGDLFAAMLLAWTHKHPNNLKVACEKTVSTLHHVLQRTIQCAKAQAGEGVRPSPMQLELRMVQSKRDIEDPEIVVQATVL

SEQ ID NO: 57022 - protein, 16 aa, Homo sapiens
KAANVQEPEKKKKRRE

SEQ ID NO: 57023 - protein, 68 aa, Homo sapiens
LNFLSWATILLSPLFSFVLGVFASGSPLLILTFLGFVGAASFGVRRLIGVTEIEKGSSYGNQEFKKKE

SEQ ID NO: 57024 - protein, 250 aa, Homo sapiens
TSLSPGGRTPSQRAALHLSVPRPAARVALVLSGCGVYDGTEIHEASAILVHLSRGGAEVQIFAPDVPQMHVIDHTKGQPSEGESRNVLTESARIARGKITDLANLSAANHDAAIFPGGFGAAKNLSTFAVDGKDCKVNKEVERVLKEFHQAGKPIGLCCIAPVLAAKVLRGVEVTVGHEQEEGGKWPYAGTAEAIKALGAKHCVKEVVEAHVDQKNKVVTTPAFMCETALHYIHDGIGAMVRKVLELTGK

SEQ ID NO: 57025 - protein, 704 aa, Homo sapiens
IQLGGTIIGSARCKAFTTREGRRAAAYNLVQHGITNLCVIGGDGSLTGANIFRSEWGSLLEELVAEGKISETTARTYSHLNIAGLVGSIDNDFCGTDMTIGTDSALHRIMEVIDAITTTAQSHQRTFVLEVMGRHCGYLALVSALASGADWLFIPEAPPEDGWENFMCERLGETRSRGSRLNIIIIAEGAIDRNGKPISSSYVKDLVVQRLGFDTRVTVLGHVQRGGTPSAFDRILSSKMGMEAVMALLEATPDTPACVVTLSGNQSVRLPLMECVQMTKEVQKAMDDKRFDEATQLRGGSFENNWNIYKLLAHQKPPKEKSNFSLAILNVGAPAAGMNAAVRSAVRTGISHGHTVYVVHDGFEGLAKGQVQEVGWHDVAGWLGRGGSMLGTKRTLPKGQLESIVENIRIYGIHALLVVGGFEAYEGVLQLVEARGRYEELCIVMCVIPATISNNVPGTDFSLGSDTAVNAAMESCDRIKQSASGTKRRVFIVETMGGYCGYLATVTGIAVGADAAYVFEDPFNIHDLKVNVEHMTEKMKTDIQRGLVLRNEKCHDYYTTEFLYNLYSSEGKGVFDCRTNVLGHLQQGGAPTPFDRNYGTKLGVKAMLWLSEKLREVYRKGRVFANAPDSACVIGLKKKAVAFSPVTELKKDTDFEHRMPREQWWLSLRLMLKMLAQYRISMAAYVSGELEHVTRRTLSMDKGF

SEQ ID NO: 57026 - protein, 409 aa, Homo sapiens
LAAIFNLHLDQTPSRQPIPSEGLQLHLPQVLADAVSRLVLGKFGDLTDNFSSPHARRKVLAGVVMTTGTDVKDAKVISVSTGTKCINGEYMSDRGLALNDCHAEIISRRSLLRFLYTQLELYLNNKDDQKRSIFQKSERGGFRLKENVQFHLYISTSPCGDARIFSPHEPILEEPADRHPNRKARGQLRTKIESGEGTIPVRSNASIQTWDGVLQGERLLTMSCSDKIARWNVVGIQGSLLSIFVEPIYFSSIILGSLYHGDHLSRAMYQRISNIEDLPPLYTLNKPLLSGISNAEARQPGKAPNFSVNWTVGDSAIEVINATTGKDELGRASRLCKHALYCRWMRVHGKVPSHLLRSKITKPNVYHESKLAAKEYQAAKARLFTAFIKAGLGAWVEKPTEQDQFSLTP

SEQ ID NO: 57027 - protein, 259 aa, Homo sapiens
LQPRPPGLLSDPSTSTFQGAGTTEPADRHPNRKARGQLRTKIESGEGTIPVRSNASIQTWDGVLQGERLLTMSCSDKIARWNVVGIQGSLLSIFVEPIYFSSIILGSLYHGDHLSRAMYQRISNIEDLPPLYTLNKPLLSGISNAEARQPGKAPNFSVNWTVGDSAIEVINATTGKDELGRASRLCKHALYCRWMRVHGKVPSHLLRSKITKPNVYHESKLAAKEYQAAKARLFTAFIKAGLGAWVEKPTEQDQFSLTP

SEQ ID NO: 57028 - protein, 99 aa, Homo sapiens
IEIVRRILGVQKFDLGIICVDNKNIQHINRIYRDRNVPTDVLSFPFHEHLKAGEFPQPDFPDDYNLGDIFLGVEYIFHQCKENEDYNDVLTVSGDAEII

SEQ ID NO: 57029 - protein, 385 aa, Homo sapiens
IPGPKGESIRGQPGPPGPQGPPGIGYEGRQGPPGPPGPPGPPSFPGPHRQTISVPGPPGPPGPPGPPGTMGASSGVRLWATRQAMLGQVHEVPEGWLIFVAEQEELYVRVQNGFRKVQLEARTPLPRGTDNEVAALQPPVVQLHDSNPYPRREHPHPTARPWRADDILASPPRLPEPQPYPGAPHHSSYVHLRPARPTSPPAHSHRDFQPVLHLVALNSPLSGGMRGIRGADFQCFQQARAVGLAGTFRAFLSSRLQDLYSIVRRADRAAVPIVNLKDELLFPSWEALFSGSEGPLKPGARIFSFDGKDVLRHPTWPQKSVWHGSDPNGRRLTESYCETWRTEAPSATGQASSLLGGRLLGQSAASCHHAYIVLCIENSFMTASK

SEQ ID NO: 57030 - protein, 1018 aa, Homo sapiens
LLQACWTAAQDEPETPRAVAFQDCPVDLFFVLDTSESVALRLKPYGALVDKVKSFTKRFIDNLRDRYYRCDRNLVWNAGALHYSDEVEIIQGLTRMPGGRDALKSSVDAVKYFGKGTYTDCAIKKGLEQLLVGGSHLKENKYLIVVTDGHPLEGYKEPCGGLEDAVNEAKHLGVKVFSVAITPDHLEPRLSIIATDHTYRRNFTAADWGQSRDAEEAISQTIDTIVDMIKNNVEQVCCSFECQPARGPPGLRGDPGFEGERGKPGLPGEKGEAGDPGRPGDLGPVGYQGMKGEKGSRGEKGSRGPKGYKGEKGKRGIDGVDGVKGEMGYPGLPGCKGSPGFDGIQGPPGPKGDPGAFGLKGEKGEPGADGEAGRPGSSGPSGDEGQPGEPGPPGEKGEAGDEGNPGPDGAPGERGGPGERGPRGTPGTRGPRGDPGEAGPQGDQGREGPVGVPGDPGEAGPIGPKGYRGDEGPPGSEGARGAPGPAGPPGDPGLMGERGEDGPAGNGTEGFPGFPGYPGNRGAPGINGTKGYPGLKGDEGEAGDPGDDNNDIAPRGVKGAKGYRGPEGPQGPPGHQGPPGPDECEILDIIMKMCSCCECKCGPIDLLFVLDSSESIGLQNFEIAKDFVVKVIDRLSRDELVKFEPGQSYAGVVQYSHSQMQEHVSLRSPSIRNVQELKEAIKSLQWMAGGTFTGEALQYTRDQLLPPSPNNRIALVITDGRSDTQRDTTPLNVLCSPGIQVVSVGIKDVFDFIPGSDQLNVISCQGLAPSQGRPGLSLVKENYAELLEDAFLKNVTAQICIDKKCPDYTCPITFSSPADITILLDGSASVGSHNFDTTKRFAKRLAERFLTAGRTDPAHDVRVAVVQYSGTGQQRPERASLQFLQNYTALASAVDAMDFINDATDVNDALGYVTRFYREASSGAAKKRLLLFSDGNSQGATPAAIEKAVQEAQRAGIEIFVVVVGRQVNEPHIRVLVTGKTAEYDVAYGESHLFRVPSYQALLRGVFHQTVSRKVALG

SEQ ID NO: 57031 - protein, 133 aa, Homo sapiens
MTLFSDLVAEKFIDDMEDVLCPDPQIVCPDLPCQTDAPWPGGEPPVTFLRTEEGPDATFPRTIPLIQQLLNATELTQDPAAYSQLVAVLVYTAERAKFATGVERQDWMELFIDTFKLVHRDIVGDPETALALC

SEQ ID NO: 57032 - protein, 510 aa, Homo sapiens
LWIRPDAPSRCTWQLGRPASESPHHHTAPAKSPKILPDILKKIGDTPMVRINKIGKKFGLKCELLAKCEFFNAGGSVKDRISLRMIEDAERDGTLKPGDTIIEPTSGNTGIGLALAAAVRGYRCIIVMPEKMSSEKVDVLRALGAEIVRTPTNARFDSPESHVGVAWRLKNEIPNSHILDQYRNASNPLAHYDTTADEILQQCDGKLDMLVASVGTGGTITGIARKLKEKCPGCRIIGVDPEGSILAEPEELNQTEQTTYEVEGIGYDFIPTVLDRTVVDKWFKSNDEEAFTFARMLIAQEGLLCGGSAGSTVAVAVKAAQELQEGQRCVVILPDSVRNYMTKFLSDRWMLQKGFLKEEDLTEKKPWWWHLRVQELGLSAPLTVLPTITCGHTIEILREKGFDQAPVVDEAGVILGMVTLGNMLSSLLAGKVQPSDQVGKVIYKQFKQIRLTDTLGRLSHILEMDHFALVVHEQIQYHSTGKSSQRQMVFGVVTAIDLLNFVAAQERDQK

SEQ ID NO: 57033 - protein, 236 aa, Homo sapiens
LASIFGTEKDKVNCSFYFKIGACRHGDRCSRLHNKPTFSQTILIQNIYRNPQNSAQTADGSHCAVSDVEMQEHYDEFFEEVFTEMEEKYGEVEEMNVCDNLGDHLVGNVYVKFRREEDAEKAVIDLNNRWFNGQPIHAELSPVTDFREACCRQYEMGECTRGGFCNFMHLKPISRELRRELYGRRRKKHRSRSRSRERRSRSRDRGRGGGGGGGGGGGGRERDRRRSRDRERSGRF

SEQ ID NO: 57034 - protein, 236 aa, Homo sapiens
LASIFGTEKDKVNCSFYFKIGACRHGDRCSRLHNKPTFSQTIALLNIYRNPQNSSQSADGLRCAVSDVEMQEHYDEFFEEVFTEMEEKYGEVEEMNVCDNLGDHLVGNVYVKFRREEDAEKAVIDLNNRWFNGQPIHAELSPVTDFREACCRQYEMGECTRGGFCNFMHLKPISRELRRELYGRRRKKHRSRSRSRERRSRSRDRGRGGGGGGGGGGGGRERDRRRSRDRERSGRF

SEQ ID NO: 57035 - protein, 10 aa, Homo sapiens
KEKTFGRLSL

SEQ ID NO: 57036 - protein, 72 aa, Homo sapiens
MEGLALWKNNVDKRFEGVEDCMICFSVIHGFNYSLPKKACRTCKKKFHSACLYKWFTSSNKSTCPLCRETFF

SEQ ID NO: 57037 - protein, 59 aa, Homo sapiens
LLASMFPGENELIVNDQLAVAELKDCIEKKTMEGRSSKVYFTINMNLDVSDEKMISIIE

SEQ ID NO: 57038 - protein, 187 aa, Homo sapiens
LNTDLTAFLQKHCHGDVCILNATEWVREHASGYVSRDTSSSPTTGSTVQSVDLIFTRLWIYSHHIYNKCKRKNILEWAKELSLSGFSMPGKPGVVCVEGPQSACEEFWSRLRKLNWKRILIRHREDIPFDGTNDETERQRKFSIFEEKVFSVNGARGNHMDFGQLYQFLNTKGCGDVFQMFFGVEGQ

SEQ ID NO: 57039 - protein, 51 aa, Homo sapiens
ISQVGNVDTASELEKGVSEAAVLKPSEELPAEATSSVEPEKDSGSAAEAPR

SEQ ID NO: 57040 - protein, 155 aa, Homo sapiens
MEMVKDALDQLRGAVMIVYPMGLPPYDPIRMEFENKEDLSGTQAGLNVIKEAEAQLWWAAKELRRTKKLSDYVGKNEKTKIIAKIQQRGQGAPAREPIISSEEQKQLMLYYHRRQEELKRLEENDDDAYLNSPWADNTALKRHFHGVKDIKWRPR

SEQ ID NO: 57041 - protein, 6 aa, Homo sapiens
MDFCCV

SEQ ID NO: 57042 - protein, 50 aa, Homo sapiens
TTSRWRKHEEVFICYGPHDNQRLFLEYGFVSVHNPHACVYVSRGWNQLCS

SEQ ID NO: 57043 - protein, 25 aa, Homo sapiens
KAFTKYCKKWQDEDGKKQLEKTSAA

SEQ ID NO: 57044 - protein, 22 aa, Homo sapiens
MEEKKAFMGPLEKDRIAKEEGA

SEQ ID NO: 57045 - protein, 248 aa, Homo sapiens
IAAVVFFFTRLVRKHDKLKKEAVERFAEKLTLILQEKYKNHWYPEKPSKGQAYRCIRVNKFQRVDPDVLKACENSCILYSDLGLPKELTLWVDPCEVCCRYGEKNNAFIVASFENKDENKDEISRKVTRALDKVTSDYHSGSSSSDEETSKEMEVKPSSVTAAASPVYQISELIFPPLPMWHPLPRKKPGMYRGNGHQNHYPPPVPFGYPNQGRKNKPYRPIPVTWVPPPGMHCDRNHWINPHMLAPH

SEQ ID NO: 57046 - protein, 40 aa, Homo sapiens
KLSTGVFRPQLDEPIPLYEAKVSMEAVQKNQGRKKQVVQF

SEQ ID NO: 57047 - protein, 252 aa, Homo sapiens
VRLQLARKREVRLLRRQTKTSLEVSLLEKYPCSKFIIAIGNNAVAFLSSFVMNSGVWEEVGCAKLWNEWCRTTDTTHLSSTEAFCVFYHLKSNPSVFLCQCSCYVAEDQQYQWLEKVFGSCPRKNMQITILTCRHVTDYKTSESTGSLPSPFLRALKTQNFKDSACCPLLEQPNIVHDLPAAVLSYCQVWKIPAILYLCYTDVMKLDLITVEAFKPILSTRSLKGLVKNIPQSTEILKKLMTTNEIQSNIYT

SEQ ID NO: 57048 - protein, 48 aa, Homo sapiens
IQSLGFSLSVQLLCCRRSTVSVAGKGFWLLSKEEHADNYSHMSTCYRL

SEQ ID NO: 57049 - protein, 71 aa, Homo sapiens
KRLDWEGNEHNRSYEELVLSNKHVAPDHLLQICQRIGPMLDKEIPPSISRVTSLLGAGRQSLLRTAKGTLI

SEQ ID NO: 57050 - protein, 101 aa, Homo sapiens
TMPKRKVSSAEGAAKEEPKRRSARLSAKPPAKVEAKPKKAAAKDKSSDKKVQTKGKRGAKGKQAEVANQETKEDLPAENGETKTEESPASDEAGEKEAKSD

SEQ ID NO: 57051 - protein, 296 aa, Homo sapiens
MRNDLFNKEKARQLSLTPRTEKIEVKHVGKTDPGTVFVMNKNISTPYSCAMHLSEWYCRKSILALVDGQPWDMYKPLTKSCEIKFLTFKDCDPGEVNKAYWRSCAMMMGCVIERAFKDEYMVNLVRAPEVPVISGAFCYDVVLDSKLDEWMPTKENLRSFTKDAHALIYKDLPFETLEVEAKVALEIFQHSKYKVDFIEEKASQNPERIVKLHRIGDFIDVSEGPLIPRTSICFQYEVSAVHNLQPTQPSLIRRFQGVSLPVHLRAHFTIWDKLLERSRKMVTEDQSKATEECTST

SEQ ID NO: 57052 - protein, 510 aa, Homo sapiens; identical to SEQ ID NO: 57032

SEQ ID NO: 57053 - protein, 236 aa, Homo sapiens; identical to SEQ ID NO: 57033

SEQ ID NO: 57054 - protein, 236 aa, Homo sapiens; identical to SEQ ID NO: 57034

SEQ ID NO: 57055 - protein, 383 aa, Homo sapiens
LYDVNPPEGFNLRRDVYIRIASLLKTLLKTEEWVLVLPPWGRLYHWQSPDIHQVRIPWSEFFDLPSLNKNIPVIEYEQFIAESGGPFIDQVYVLQSYAEGWKEGTWEEKVDERPCIDQLLYSQDKHEYYRGWFWGYEETRGLNVSCLSVQGSASIVAPLLLRNTSARSVMLDRAENLLHDHYGGKEYWDTRRSMVFARHLREVGDEFRSRHLNSTDDADRIPFQEDWMKMKVKLGSALGGPYLGVHLRRKDFIWGHRQDVPSLEGAVRKIRSLMKTHRLDKVFVATDAVRKEYEELKKLLPEMVRFEPTWEELELYKDGGVAIIDQWICAHARFFIGTSVSTFSFRIHEEREILGLDPKTTYNRFCGDQEKACEQPTHWKITY

SEQ ID NO: 57056 - protein, 45 aa, Homo sapiens
IKEQEVVDKVMETLDNDGDGECDFQEFMAFVAMVTTACHEFFEHE

SEQ ID NO: 57057 - protein, 973 aa, Homo sapiens
VSPGAPMQRAVPEGFGRRKLGSDMGNAERAPGSRSFGPVPTLLLLAAALLAVSDALGRPSEEDEELVVPELERAPGHGTTRLRLHAFDQQLDLELRPDSSFLAPGFTLQNVGRKSGSETPLPETDLAHCFYSGTVNGDPSSAAALSLCEGVRGAFYLLGEAYFIQPLPAASERLATAAPGEKPPAPLQFHLLRRNRQGDVGGTCGVVDDEPRPTGKAETEDEDEGTEGEDEGAQWSPQDPALQGVGQPTGTGSIRKKRFVSSHRYVETMLVADQSMAEFHGSGLKHYLLTLFSVAARLYKHPSIRNSVSLVVVKILVIHDEQKGPEVTSNAALTLRNFCNWQKQHNPPSDRDAEHYDTAILFTRQDLCGSQTCDTLGMADVGTVCDPSRSCSVIEDDGLQAAFTTAHELGHVFNMPHDDAKQCASLNGVNQDSHMMASMLSNLDHSQPWSPCSAYMITSFLDNGHGECLMDKPQNPIQLPGDLPGTSYDANRQCQFTFGEDSKHCPDAASTCSTLWCTGTSGGVLVCQTKHFPWADGTSCGEGKWCINGKCVNKTDRKHFDTPFHGSWGMWGPWGDCSRTCGGGVQYTMRECDNPVPKNGGKYCEGKRVRYRSCNLEDCPDNNGKTFREEQCEAHNEFSKASFGSGPAVEWIPKYAGVSPKDRCKLICQAKGIGYFFVLQPKVVDGTPCSPDSTSVCVQGQCVKAGCDRIIDSKKKFDKCGVCGGNGSTCKKISGSVTSAKPGYHDIITIPTGATNIEVKQRNQRGSRNNGSFLAIKAADGTYILNGDYTLSTLEQDIMYKGVVLRYSGSSAALERIRSFSPLKEPLTIQVLTVGNALRPKIKYTYFVKKKKESFNAIPTFSAWVIEEWGECSKSCELGWQRRLVECRDINGQPASECAKEVKPASTRPCADHPCPQWQLGEWSSCSKTCGKGYKKRSLKCLSHDGGVLSHESCDPLKKPKHFIDFCTMAECS

SEQ ID NO: 57058 - protein, 922 aa, Homo sapiens
LLCAFRLPLAAVGPAATPAQDKAGQPPTAAAAAQPRRRQGEEVQERAEPPGHPHPLAQRRRSKGLVQNIDQLYSGGGKVGYLVYAGGRRFLLDLERDGSVGIAGFVPAGGGTSAPWRHRSHCFYRGTVDGSPRSLAVFDLCGGLDGFFAVKHARYTLKPLLRGPWAEEEKGRVYGDGSARILHVYTREGFSFEALPPRASCETPASTPEAHEHAPAHSNPSGRAALASQLLDQSALSPAGGSGPQTWWRRRRRSISRARQVELLLVADASMARLYGRGLQHYLLTLASIANRLYSHASIENHIRLAVVKVVVLGDKDKSLEVSKNAATTLKNFCKWQHQHNQLGDDHEEHYDAAILFTREDLCGHHSCDTLGMADVGTICSPERSCAVIEDDGLHAAFTVAHEIGHLLGLSHDDSKFCEETFGSTEDKRLMSSILTSIDASKPWSKCTSATITEFLDDGHGNCLLDLPRKQILGPEELPGQTYDATQQCNLTFGPEYSVCPGMDVCARLWCAVVRQGQMVCLTKKLPAVEGTPCGKGRICLQGKCVDKTKKKYYSTSSHGNWGSWGSWGQCSRSCGGGVQFAYRHCNNPAPRNNGRYCTGKRAIYRSCSLMPCPPNGKSFRHEQCEAKNGYQSDAKGVKTFVEWVPKYAGVLPADVCKLTCRAKGTGYYVVFSPKVTDGTECRLYSNSVCVRGKCVRTGCDGIIGSKLQYDKCGVCGGDNSSCTKIVGTFNKKSKGYTDVVRIPEGATHIKVRQFKAKDQTRFTAYLALKKKNGEYLINGKYMISTSETIIDINGTVMNYSGWSHRDDFLHGMGYSATKEILIVQILATDPTKPLDVRYSFFVPKKSTPKVNSVTSHGSNKVGSHTSQPQWVTGPWLACSRTCDTGWHTRTVQCQDGNRKLAKGCPLSQRPSAFKQCLLKKC

SEQ ID NO: 57059 - protein, 726 aa, Homo sapiens
LRRRGGPYKTEPATDLGRWRLNCERGRQTWTYLQDERAGREQTGLEAYALGLDTKNYFKDLPKAHTAFEGALNGMTFYVGLQAEDGHWTGDYGGPLFLLPGLLITCHVARIPLPAGYREEIVRYLRSVQLPDGGWGLHIEDKSTVFGTALNYVSLRILGVGPDDPDLVRARNILHKKGGAVAIPSWGKFWLAVLNVYSWEGLNTLFPEMWLFPDWAPAHPSTLWCHCRQVYLPMSYCYAVRLSAAEDPLVQSLRQELYVEDFASIDWLAQRNNVAPDELYTPHSWLLRVVYALLNLYEHHHSAHLRQRAVQKLYEHIVADDRFTKSISIGPISKTINMLVRWYVDGPASTAFQEHVSRIPDYLWMGLDGMKMQGTNGSQIWDTAFAIQALLEAGGHHRPEFSSCLQKAHEFLRLSQVPDNPPDYQKYYRQMRKGGFSFSTLDCGWIVSDCTAEALKAVLLLQEKCPHVTEHIPRERLCDAVAVLLNMRNPDGGFATYETKRGGHLLELLNPSEVFGDIMIDYTYVECTSAVMQALKYFHKRFPEHRAAEIRETLTQGLEFCRRQQRADGSWEGSWGVCFTYGTWFGLEAFACMGQTYRDGTACAEVSRACDFLLSRQMADGGWGEDFESCEERRYLQSAQSQIHNTCWAMMGLMAVRHPDIEAQERGVRCLLEKQLPNGDWPQENIAGVFNKSCAISYTSYRNIFPIWALGRFSQLYPERALAGHP

SEQ ID NO: 57060 - protein, 171 aa, Homo sapiens
TPYWRLRLGGAALLLLLIPVAAAQEPPGAACSQNTNKTCEECLKNVSCLWCNTNKACLDYPVTSVLPPASLCKLSSARWGVCWVNFEALIITMSVVGGTLLLGIAICCCCCCRRKRSRKPDRSEEKAMREREERRIRQEERRAEMKTRHDEIRKKYGLFKEENPYARFENN

SEQ ID NO: 57061 - protein, 76 aa, Homo sapiens
LYPSLIPSETASTSPAASGFFMWLQMAGFPKGFWLKHIPWCICTAVSSSLQLCLNRSFTMLSSRFNSMAPNDEISF

SEQ ID NO: 57062 - protein, 26 aa, Homo sapiens
MEKFNLDLSTVTQAFLKNSGELELES

SEQ ID NO: 57063 - protein, 202 aa, Homo sapiens
VLRSISLALRPTSGLLGTWQTQLRETHQRASLLSFWELIPMRSEPLRKKKKVDPKKDQEAKERLKRKIRKLEKATQELIPIEDFITPLKFLDKARERPQVELTFEETERRALLLKKWSLYKQQERKMERDTIRAMLEAQQEALEELQLESPKLHAEAIKRDPNLFPFEKEGPHYTPPIPNYQPPEGRYNDITKVYTQVEFKR

SEQ ID NO: 57064 - protein, 45 aa, Homo sapiens
LVLLRQMLLELTRRGQEPLSALLQFGVTYLEDYSAEYIIQQGGWV

SEQ ID NO: 57065 - protein, 28 aa, Homo sapiens
KSILLFGGAAAVAILAVAIGVALALRKK

SEQ ID NO: 57066 - protein, 76 aa, Homo sapiens
LSLPMLVRQLWDSAVSHFFSLPFKKSLLAALILCLLVVRFDPASPSSLHFLYKLAQLFRWIRKAAFSRLYQLRIRD

SEQ ID NO: 57067 - protein, 50 aa, Homo sapiens
IRNAVDGKWFCFNDSNICLVSWEDIQCTYGNPNYHWQETAYLLVYMKMEC

SEQ ID NO: 57068 - protein, 253 aa, Homo sapiens
LKQLSKYIEPLRRMINKIDKNEDRKKDLSKMKSLLDILTDPSKRCPLKTLQKCEIALEKLKNDMAVPTPPPPPVPPTKQQYLCQPLLDAVLANIRSPVFNHSLYRTFVPAMTAIHGPPITAPVVCTRKRRLEDDERQSIPSVLQGEVARLDPKFLVNLDPSHCSNNGTVHLICKLDDKDLPSVPPLELSVPADYPAQSPLWIDRQWQYDANPFLQSVHRCMTSRLLQLPDKHSVTALLNTWAQSVHQACLSAA

SEQ ID NO: 57069 - protein, 140 aa, Homo sapiens
LVNYFKSKPVETPPEQNGTLTSQPNNRLKEAISTSKEQEAKYQASHPNLRKLDDTDPVPRGAGSAMSTDAYPKNPHLRAYHQKIDSNLDELSMGLGRLKDIALGMQTEIEEQDDILDRLTTKVDKLDVNIKSTERKVRQL

SEQ ID NO: 57070 - protein, 131 aa, Homo sapiens
IPVPYVEKLVRSSPHGKHGNRNSNSYGIPEPAHAYAQPQTTTPLPAVSGSPGAAITPLPSTQNGPVFAKAIQKRVPCAYDKTALALEVGDIVKVTRMNINGQWEGEVNGRKGLFPFTHVKIFDPQNPDENE

SEQ ID NO: 57071 - protein, 64 aa, Homo sapiens
LEAADKTQALDMKRHCLHIIVHQFTKVSKLPTLRSLSQQLLLDIIDSLASHISDKQCAELGADI

SEQ ID NO: 57072 - protein, 16 aa, Homo sapiens
VSWEPRKPQGRQLASE

SEQ ID NO: 57073 - protein, 44 aa, Homo sapiens
RTNYNDRYDEIRRHWGGNILGPKSVARIAKLEKAKAKELATKLG

SEQ ID NO: 57074 - protein, 278 aa, Homo sapiens
LLRGALKMPEAPPLLLAAVLLGLVLLVVLLLLLRHWGWGLCLIGWNEFILQPIHNLLMGDTKEQRILNHVLQHAEPGNAQSVLEAIDTYCEQKEWAMNVGDKKGKIVDAVIQEHQPSVLLELGAYCGYSAVRMARLLSPGARLITIEINPDCAAITQRMVDFAGVKDKVTLVVGASQDIIPQLKKKYDVDTLDMVFLDHWKDRYLPDTLLLEECGLLRKGTVLLADNVICPGAPDFLAHVRGSSCFECTHYQSFLEYREVVDGLEKAIYKGPGSEAGP

SEQ ID NO: 57075 - protein, 172 aa, Homo sapiens
IVSLPEQEIKTLEEDEEELFKMRAKLFRFASENDLPEWKERGTGDVKLLKHKEKGAIRLLMRRDKTLKICANHYITPMMELKPNAGSDRAWVWNTHADFADECPKPELLAIRFLNAENAQKFKTKFEECRKEIEEREKKAGSGKNDHAEKVAEKLEALSVKEETKEDAEEKQ

SEQ ID NO: 57076 - protein, 186 aa, Homo sapiens
VTCGSVLKLLNTHHRVRLHSHDIKYGSGSGQQSVTGVEASDDANSYWRIRGGSEGGCPRGSPVRCGQAVRLTHVLTGKNLHTHHFPSPLSNNQEVSAFGEDGEGDDLDLWTVRCSGQHWEREAAVRFQHVGTSVFLSVTGEQYGSPIRGQHEVHGMPSANTHNTWKAMEGIFIKPSVEPSAGHDEL

SEQ ID NO: 57077 - protein, 85 aa, Homo sapiens
RLLARILQKNYPYIAKILKGLEELEFPQTSQYMDIFNDTSVHWFPVQKLEQLSIDIWEFREEPDYQDCEDLEIIRNKREDPSATD

SEQ ID NO: 57078 - protein, 354 aa, Homo sapiens
VGNYLRMFRGSLYKRYPSLWRRLATVEERKKIVASSHGKKTKPNTKDHGYTTLATSVTLLKASEVEEILDGNDEKYKAVSISTEPPTYLREQKAKRNSQWVPTLPNSSHHLDAVPCSTTINRNRMGRDKKRTFPLCFDDHDPAVIHENASQPEVLVPIRLDMEIDGQKLRDAFTWNMNEKLMTPEMFSEILCDDLDLNPLTFVPAIASAIRQQIESYPTDSILEDQSDQRVIIKLNIHVGNISLVDQFEWDMSEKENSPEKFALKLCSELGLGGEFVTTIAYSIRGQLSWHQKTYAFSENPLPTVEIAIRNTGDADQWCPLLETLTDAEMEKKIRDQDRNTRRMRRLANTAPAW

SEQ ID NO: 57079 - protein, 20 aa, Homo sapiens
LPRCLLVCRLKYCMRPRATL

SEQ ID NO: 57080 - protein, 31 aa, Homo sapiens
ILHNENSDRGGSSKHNTIKKPQAQGRRPICI

SEQ ID NO: 57081 - protein, 43 aa, Homo sapiens
KVPVPSQQLFEPSRVCKSCYSSLHPTSSSIDLELDKPIAATSN

SEQ ID NO: 57082 - protein, 360 aa, Homo sapiens
KEDLYLHSLKLGYQQCLLGSAFSEDDGDCQGKPSMGQLALYLLALRANCEFVRGHKGDRLVSQLKWFLEDEKRAIGHDHKGHPHTSYYQYGLGILALCLHQKRVHDSVVDKLLYAVEPFHQGHHSVDTAAMAGLAFTCLKRSNFNPGRRQRITMAIRTVREEILKAQTPEGHFGNVYSTPLALQFLMTSPMRGAELGTACLKARVALLASLQDGAFQNALMISQLLPVLNHKTYIDLIFPDCLAPRVMLEPAAETIPQTQEIISVTLQVLSLLPPYRQSISVLAGSTVEDVLKKAHELGGFTYETQASLSGPYLTSVMGKAAGEREFWQLLRDPNTPLLQGIADYRPKDGETIELRLVSW

SEQ ID NO: 57083 - protein, 32 aa, Homo sapiens
ILSILEQAAKKTLPTPSPEAYQAMLLRIARIP

SEQ ID NO: 57084 - protein, 676 aa, Homo sapiens
KVILMESLCQQSDKLEHFSRQIEYFRSLLDEHHISYVIDEDVKSGRYMELEQRYMDLAENARFEREQLLGVQQHLSNTLKMAEQDNKEAQEMIGALKERSHHMERIIESEQKGKAALAATLEEYKATVASDQIEMNRLKAQLENEKQKVAELYSIHNSGDKSDIQDLLESVRLDKEKAETLASSLQEDLAHTRNDANRLQDAIAKVEDEYRAFQEEAKKQIEDLNMTLEKLRSDLDEKETERSDMKETIFELEDEVEQHRAVKLHDNLIISDLENTVKKLQDQKHDMEREIKTLHRRLREESAEWRQFQADLQTAVVIANDIKSEAQEEIGDLKRRLHEAQEKNEKLTKELEEIKSRKQEEERGRVYNYMNAVERDLAALRQGMGLSRRSSTSSEPTPTVKTLIKSFDSASQVPNPAAAAIPRTPLSPSPMKTPPAAAVSPMQRHSISGPISTSKPLTALSDKRPNYGEIPVQEHLLRTSSASRPASLPRVPAMESAKTLSVSRRSSEEVKRDISAQEGASPASLMAMGTTSPQLSLSSSPTASVTPTTRSRIREERKDPLSALAREYGGSKRNALLKWCQKKTEGYQNIDITNFSSSWNDGLAFCALLHTYLPAHIPYQELNSQDKRRNFMLAFQAAESVGIKSTLDINEMVRTERPDWQNVMLYVTAIYKYFET

SEQ ID NO: 57085 - protein, 557 aa, Homo sapiens
TLEEYKATVASDQIEMNRLKAQLENEKQKVAELYSIHNSGDKSDIQDLLESVRLDKEKAETLASSLQEDLAHTRNDANRLQDAIAKVEDEYRAFQEEAKKQIEDLNMTLEKLRSDLDEKETERSDMKETIFELEDEVEQHRAVKLHDNLIISDLENTVKKLQDQKHDMEREIKTLHRRLREESAEWRQFQADLQTAVVIANDIKSEAQEEIGDLKRRLHEAQEKNEKLTKELEEIKSRKQEEERGRVYNYMNAVERDLAALRQGMGLSRRSSTSSEPTPTVKTLIKSFDSASQVPNPAAAAIPRTPLSPSPMKTPPAAAVSPMQRHSISGPISTSKPLTALSDKRPNYGEIPVQEHLLRTSSASRPASLPRVPAMESAKTLSVSRRSSEEVKRDISAQEGASPASLMAMGTTSPQLSLSSSPTASVTPTTRSRIREERKDPLSALAREYGGSKRNALLKWCQKKTEGYQNIDITNFSSSWNDGLAFCALLHTYLPAHIPYQELNSQDKRRNFMLAFQAAESVGIKSTLDINEMVRTERPDWQNVMLYVTAIYKYFET

SEQ ID NO: 57086 - protein, 129 aa, Homo sapiens
VQRSTSFGVPNANSIKQMLLDWCRAKTRGYEHVDIQNFSSSWSDGMAFCALVHNFFPEAFDYGQLSPQNRRQNFEVAFSSAETHADCPQLLDTEDMVRLREPDWKCVYTYIQEFYRCLVQKGLVKTKKS

SEQ ID NO: 57087 - protein, 150 aa, Homo sapiens
LDTAKDAVISLCGHLFCWPCLHQWLETRPNRQVCPVCKAGISRDKVIPLYGRGSTGQQDPREKTPPRPQGQRPEPENRGGFQGFGFGDGGFQMSFGIGAFPFGIFATAFNINDGRPPPAVPGTPQYVDEQFLSRLFLFVALVIMFWLLIA

SEQ ID NO: 57088 - protein, 360 aa, Homo sapiens
IAEIEAEMARTQKNKATAHHLGLLKARLAKLRRELITPKGGGGGGPGEGFDVAKTGDARIGFVGFPSVGKSTLLSNLAGVYSEVAAYEFTTLTTVPGVIRYKGAKIQLLDLPGIIEGAKDGKGRGRQVIAVARTCNLILIVLDVLKPLGHKKIIENELEGFGIRLNSKPPNIGFKKKDKGGINLTATCPQSELDAETVKSILAEYKIHNADVTLRSDATADDLIDVVEGNRVYIPCIYVLNKIDQISIEELDIIYKVPHCVPISAHHRWNFDDLLEKIWDYLKLVRIYTKPKGQLPDYTSPVVLPYSRTTVEDFCMKIHKNLIKEFKYALVWGLSVKHNPQKVGKDHTLEDEDVIQIVKK

SEQ ID NO: 57089 - protein, 23 aa, Homo sapiens
LNGCPKQVLSNTLDNIAYIMPGL

SEQ ID NO: 57090 - protein, 50 aa, Homo sapiens
IGSQVSEHSIIKDFTKQKYPEHAIHKVLQLMLRRGEIQHRMQRKVLYRLK

SEQ ID NO: 57091 - protein, 366 aa, Homo sapiens
RRAPWREENHLTPGDTDLLPQRLMDNQAERESEAGVGLQRDEDDAPLCEDVELQDGDLSPEEKIFLREFPRLKEDLKGNIDKLRALADDIDKTHKKFTKANMVATSTAVISGVMSLLGLALAPATGGGSLLLSTAGQGLATAAGVTSIVSGTLERSKNKEAQARAEDILPTYDQEDREDEEEKADYVTAAGKIIYNLRNTLKYAKKNVRAFWKLRANPRLANATKRLLTTGQVSSRSRVQVQKAFAGTTLAMTKNARVLGGVMSAFSLGYDLATLSKEWKHLKEGARTKFAEELRAKALELERKLTELTQLYKSLQQKVRSRARGVGKDLTGTCETEAYWKELREHVWMWLWLCVCLCVCVYVQFT

SEQ ID NO: 57092 - protein, 403 aa, Homo sapiens
RPCSDMEGAALLRVSVLCIWMSALFLGVGVRAEEAGARVQQNVPSGTDTGDPQSKPLGDWAAGTMDPESSIFIEDAIKYFKEKVSTQNLLLLLTDNEAWNGFVAAAELPRNEADELRKALDNLARQMIMKDKNWHDKGQQYRNWFLKEFPRLKSELEDNIRRLRALADGVQKVHKGTTIANVVSGSLSISSGILTLVGMGLAPFTEGGSLVLLEPGMELGITAALTGITSSTMDYGKKWWTQAQAHDLVIKSLDKLKEVREFLGENISNFLSLAGNTYQLTRGIGKDIRALRRARANLQSVPHASASRPRVTEPISAESGEQVERVNEPSILEMSRGVKLTDVAPVSFFLVLDVVYLVYESKHLHEGAKSETAEELKKVAQELEEKLNILNNNYKILQADQEL

SEQ ID NO: 57093 - protein, 126 aa, Homo sapiens
KKAARVIIEKYYTRLGNDFHTNKRVCKEIAIIPSKKLRNKIAGYVTHLMKWIQRGPVRGISIKLQEEERERRDNYVPEVSALDQEIIEVDPDTKEMLKLLDFGSLSNLQVTQPTVGMNFKMPRGPV

SEQ ID NO: 57094 - protein, 531 aa, Homo sapiens
RPLGPPAAVMRLRVRLLKRTWPLEVPETEPTLGHLRSHLRQSLLCTWGYSSNTRFTITLNYKDPLTGDEETLASYGIVSGDLICLILQDDIPAPNIPSSTDSEHSSLQNNEQPSLATSSNQTSMQDEQPSDSFQGQAAQSGVWNDDSMLGPSQNFEAESIQDNAHMAEGTGFYPSEPMLCSESVEGQVPHSLETLYQSADCSDANDALIVLIHLLMLESGYIPQGTEAKALSMPEKWKLSGVYKLQYMHPLCEGSSATLTCVPLGNLIVVNATLKINNEIRSVKRLQLLPESFICKEKLGENVANIYKDLQKLSRLFKDQLVYPLLAFTRQALNLPDVFGLVVLPLELKLRIFRLLDVRSVLSLSAVCRDLFTASNDPLLWRFLYLRDFRDNTVRVQDTDWKELYRKRHIQRKESPKGRFVMLLPSSTHTIPFYPNPLHPRPFPSSRLPPGIIGGEYDQRPTLPYVGDPISSLIPGPGETPSQFPPLRPRFDPVGPLPGPNPILPGRGGPNDRFPFRPSRGRPTDGRLSFM

SEQ ID NO: 57095 - protein, 207 aa, Homo sapiens [sequence omitted]

SEQ ID NO: 57096 - protein, 112 aa, Homo sapiens
VEEDEGLDDLENAEEEGQENVEILPSGERPQANQKRITTPYMTKYERARVLGTRALQIAMCAPVMVELEGETDPLLIAMKELKARKIPIIIRRYLPDGSYEDWGVDELIITD

SEQ ID NO: 57097 - protein, 34 aa, Homo sapiens
VAPASVITIVKSTPGSGSGPAHGPDPAHGPASCS

SEQ ID NO: 57098 - protein, 74 aa, Homo sapiens
KFENGQWIAETGVSGGVDRREVQRLRRRNQQLEEENNLLRLKVDILLDMLSESTAESHLMEKELDELRISRKRK

SEQ ID NO: 57099 - protein, 99 aa, Homo sapiens
LSERLWGLTEMFPERVRSAAGATFDLSLFVAQKMYRFSRAALWIGTTSFMILVLPVVFETEKLQMEQQQQLQQRQILLGPNTGLSGGMPGALPSLPGKI

SEQ ID NO: 57100 - protein, 193 aa, Homo sapiens
RLNMNPQIRNPMKAMYPGTFYFQFKNLWEANDRNETWLCFTVEGIKRRSVVSWKTGVFRNQVDSETHCHAERCFLSWFCDDILSPNTKYQVTWYTSWSPCPDCAGEVAEFLARHSNVNLTIFTARLYYFQYPCYQEGLRSLSQEGVAVEIMDYEDFKYCWENFVYNDNEPFKPWKGLKTNFRLLKRRLRESLQ

SEQ ID NO: 57101 - protein, 86 aa, Homo sapiens
LSDIGVSAFWAFLWFVGFCYLANQWQVSKPKDNPLNEGTDAARAAIAFSFFSIFTWSLTAALAVRRFKDLSFQEEYSTLFPASAQP

SEQ ID NO: 57102 - protein, 182 aa, Homo sapiens
MFRAFGHHAVSLLDGGLRHWLRQNLPLSSGKSQPAPAEFRAQLDPAFIKTYEDIKENLESRRFQVVDSRATGRFRGTEPEPRDGIEPGHIPGTVNIPFTDFLSQEGLEKSPEEIRHLFQEKKVDLSKPLVATCGSGVTACHVALGAYLCGKPDVPIYDGSWVEWYMRARPEDVISEGRGKTH

SEQ ID NO: 57103 - protein, 136 aa, Homo sapiens
IMACGLVASNLNLKPGECLRVRGEVAPDAKSFVLNLGKDSNNLCLHFNPRFNAHGDANTIVCNSKDGGAWGTEQREAVFPFQPGSVAEVCITFDQANLTVKLPDGYEFKFPNRLNLEAINYMAADGDFKIKCVAFD

SEQ ID NO: 57104 - protein, 558 aa, Homo sapiens
KKHWFVLTDSSLKYYRDSTAEEADELDGEIDLRSCTDVTEYAVQRNYGFQIHTKDAVYTLSAMTSGIRRNWIEALRKTVRPTSAPDVTKLSDSNKENALHSYSTQKGPLKAGEQRAGSEVISRGGPRKADGQRQALDYVELSPLTQASPQRARTPARTPDRLAKQEELERDLAQRSEERRKWFEATDSRTPEVPAGEGPRRGLGAPLTEDQQNRLSEEIEKKWQELEKLPLRENKRVPLTALLNQSRGERRGPPSDGHEALEKEVQALRAQLEAWRLQGEAPQSALRSQEDGHIPPGYISQEACERSLAEMESSHQQVMEELQRHHERELQRLQQEKEWLLAEETAATASAIEAMKKAYQEELSRELSKTRSLQQGPDGLRKQHQSDVEALKRELQVLSEQYSQKCLEIGALMRQAEEREHTLRRCQQEGQELLRHNQELHGRLSEEIDQLRGFIASQGMGNGCGRSNERSSCELEVLLRVKENELQYLKKEVQCLRDELQMMQKDKRFTSGKYQDVYVELSHIKTRSEREIEQLKEHLRLAMAALQEKESMRNSLAE

SEQ ID NO: 57105 - protein, 6 aa, Homo sapiens
TWSSRR

SEQ ID NO: 57106 - protein, 23 aa, Homo sapiens
VDFAEFYRLWSVDHGEQSVVTAP

SEQ ID NO: 57107 - protein, 17 aa, Homo sapiens
MGDPGRGTRPEASPAEW

SEQ ID NO: 57108 - protein, 32 aa, Homo sapiens
VNLFAELTPEEIDELGYTLYCSLSEPEVLLQT

SEQ ID NO: 57109 - protein, 6 aa, Homo sapiens
TATMAY

SEQ ID NO: 57110 - protein, 15 aa, Homo sapiens
LIEEVRKARGKKRVP

SEQ ID NO: 57111 - protein, 93 aa, Homo sapiens
RSGALRSGPSLRKDGDVSAAWSGSGRSLVPSRSVIVTRSGAILPKPVKMSFGLLRVFSIVIPFLYVGTLISKNFAALLEEHDIFVPEDDDDDD

SEQ ID NO: 57112 - protein, 286 aa, Homo sapiens
KGTTGTQASFLQLFEGDDHKVEQLDKMVTEKAGFKRAFIITGQTYTRKVDIEVLSVLASLGASVHKICTDIRLLANLKEMEEPFEKQQIGSSAMPYKRNPMRSERCCSLARHLMTLVMDPLQTASVQWFERTLDDSANRRICLAEAFLTADTILNTLQNISEGLVVYPKVIERRIRQELPFMATENIIMAMVKAGGSRQDCHEKIRVLSQQAASVVKQEGGDNDLIERIQVDAYFSPIHSQLDHLLDPSSFTGRASQQVQRFLEEEVYPLLKPYESVMKVKAELCL

SEQ ID NO: 57113 - protein, 46 aa, Homo sapiens
LVPAVANVRGLSGSYFVTQAGVQWRDPITLQPMSSRLKQSFYQLPE

SEQ ID NO: 57114 - protein, 43 aa, Homo sapiens
MLSQLASNPGMANLHGASATDLGLSTDNSDLNSNLSQSTLDIH

SEQ ID NO: 57115 - protein, 48 aa, Homo sapiens
KGQSPVSPETSCFSTLHDWYGQEIVELRQCWQKRAQGSHSKCEEQDRP

SEQ ID NO: 57116 - protein, 129 aa, Homo sapiens
VKMLEELVSRIDEQVHRHLDQHEVRYLQFAFRWMNNLLMREVPLRCTIRLWDTYQSEPDGFSHFHLYVCAAFLVRWRKEILEEKDFQELLLFLQNLPTAHWDDEDISLLLAEAYRLKFAFADAPNHYKK

SEQ ID NO: 57117 - protein, 237 aa, Homo sapiens
LAGCKLNVAEVTQSEIGQKQKLQTVLEAVHDLLRPRGWALRWSVDSIHGKNLVAILHLLVSLAMHFRAPIRLPEHVTVQVVVVRKREGLLHSSHISEELTTTTEMMMGRFERDAFDTLFDHAPDKLSVVKKSLITFVNKHLNKLNLEVTELETQFADGVYLVLLMGLLEDYFVPLHHFYLTPESFDQKVHNVSFAFELMLDGGLKKPKARPEDVVNLDLKSTLRVLYNLFTKYKNVE

SEQ ID NO: 57118 - protein, 246 aa, Homo sapiens
LKSEYPDLFEWFCVKTLKVCCSPGTYGPDCLACQGGSQRPCSGNGHCSGDGSRQGDGSCRCHMGYQGPLCTDCMDGYFSSLRNETHSICTACDESCKTCSGLTNRDCGECEVGWVLDEGACVDVDECAAEPPPCSAAQFCKNANGSYTCEECDSSCVGCTGEGPGNCKECISGYAREHGQCADVDECSLAEKTCVRKNENCYNTPGSYVCVCPDGFEETEDACVPPAEAEATEGESPTQLPSREDL

SEQ ID NO: 57119 - protein, 27 aa, Homo sapiens
TEADGADGRQRSYSSKPPLWAAELCVT

SEQ ID NO: 57120 - protein, 40 aa, Homo sapiens
VDQILESVDSDSEGIFIDFGRGRGSGMSDLEGSGGRQSVV

SEQ ID NO: 57121 - protein, 24 aa, Homo sapiens
LGVDSSYKMAARSVFGAVPPAVSG

SEQ ID NO: 57122 - protein, 65 aa, Homo sapiens
ILLNVLIPPNMPCTRTGKNNVLIVCVPNPPIDEKNATMPVTMLIRVKTSEDADELHKILLEKKDA

SEQ ID NO: 57123 - protein, 621 aa, Homo sapiens
MVQEQCCHSQLEELHCATGISLANEQDRCATPHGDNASLEATFVKRCCHCCLLGRAAQAQGQSCEYSLMVGYQCGQVFQACCVKSQETGDLDVGGLQETDKIIEVEEEQEDPYLNDRCRGGGPCKQQCRDTGDEVVCSCFVGYQLLSDGVSCEDVNECITGSHSCRLGESCINTVGSFRCQRDSSCGTGYELTEDNSCKDIDECESGIHNCLPDFICQNTLGSFRCRPKLQCKSGFIQDALGNCIDINECLSISAPCPIGHTCINTEGSYTCQKNVPNCGRGYHLNEEGTRCVDVDECAPPAEPCGKGHRCVNSPGSFRCECKTGYYFDGISRMCVDVNECQRYPGRLCGHKCENTLGSYLCSCSVGFRLSVDGRSCEDINECSSSPCSQECANVYGSYQCYCRRGYQLSDVDGVTCEDIDECALPTGGHICSYRCINIPGSFQCSCPSSGYRLAPNGRNCQDIDECVTGIHNCSINETCFNIQGGFRCLAFECPENYRRSAATRCERLPCHENRECSKLPLRITYYHLSFPTNIQAPAVVFRMGPSSAVPGDSMQLAITGGNEEGFFTTRKVSPHSGVVALTKPVPEPRDLLLTVKMDLSRHGTVSSFVAKLFIFVSAEL

SEQ ID NO: 57124 - protein, 465 aa, Homo sapiens
LSGVMVPAPIQDLEALRALTALFKEQRNRETAPRTIFQRVLDILKKSSHAVELACRDPSQVENLASSLQLITECFRCLRNACIECSVNQNSIRNLDTIGVAVDLILLFRELRVEQESLLTAFRCGLQFLGNIASRNEDSQSIVWVHAFPELFLSCLNHPDKKIVAYSSMILFTSLNHERMKELEENLNIAIDVIDAYQKHPESEWPFLIITDLFLKSPELVQAMFPKLNNQERVTLLDLMIAKITSDEPLTKDDIPVFLRHAELIASTFVDQCKTVLKLASEEPPDDEEALATIRLLDVLCEMTVNTELLGYLQVFPGLLERVIDLLRVIHVAGKETTNIFSNCGCVRAEGDISNVANGFKSHLIRLIGNLCYKNKDNQDKVNELDGIPLILDNCNISDSNPFLTQWVIYAIRNLTEDNSQNQDLIAKMEEQGLADASLLKKVGFEVEKKGEKLILKSTRDTPKP

SEQ ID NO: 57125 - protein, 20 aa, Homo sapiens
VNDVNEAVQLVFRKEGWALE

SEQ ID NO: 57126 - protein, 230 aa, Homo sapiens
IALAMALSDADVQKQIKHMMAFIEQEANEKAEEIDAKAEEEFNIEKGRLVQTQRLKIMEYYEKKEKQIEQQKKIQMSNLMNQARLKVLRARDDLITDLLNEAKQRLSKVVKDTTRYQVLLDGLVLQGLYQLLEPRMIVRCRKQDFPLVKAAVQKAIPMYKIATKNDVDVQIDQESYLPEDIAGGVEIYNGDRKIKVSNTLESRLDLIAQQMMPEVRGALFGANANRKFLD

SEQ ID NO: 57127 - protein, 113 aa, Homo sapiens
IRNIARHLAQVGDSMDRSIPPGLVNGLALQLRNTSRSEEDRNRDLATALEQLLQAYPRDMEKEKTMLVLALLLAKKVASHTPSLLRDVFHTTVNFINQNLRTYVRSLARNGMD

SEQ ID NO: 57128 - protein, 60 aa, Homo sapiens
LHFLGPNAGEVTQGFALGIKCGASYAQVMRTVGIHPTCSEEVVKLRISKRSGLDPTVTGC

SEQ ID NO: 57129 - protein, 37 aa, Homo sapiens
VEHPNGTGVLGPHSPPAQPTPGPPDNTLQETGTFPSS

SEQ ID NO: 57130 - protein, 23 aa, Homo sapiens
LGLGGPWQSPAAQCDQKGSPVPP

SEQ ID NO: 57131 - protein, 46 aa, Homo sapiens
MADSGHYCVYIRNAVDGKWFCFNDSNICLVSWEDIQCTYGNPNYHW

SEQ ID NO: 57132 - protein, 53 aa, Homo sapiens
RTTRGEACGWPTASGWTPAARACGTRHPSTSTSAPNTLRRTALSWWESVDITG

SEQ ID NO: 57133 - protein, 7 aa, Homo sapiens
RPFWPGL

SEQ ID NO: 57134 - protein, 6 aa, Homo sapiens
KKSNMC

SEQ ID NO: 57135 - protein, 308 aa, Homo sapiens
IMFSFNMFDHPIPRVFQNRFSTQYRCFSVSMLAGPNDRSDVEKGGKIIMPPSALDQLSRLNITYPMLFKLTNKNSDRMTHCGVLEFVADEGICYLPHWMMQNLLLEEGGLVQVESVNLQVATYSKFQPQSPDFLDITNPKAVLENALRNFACLTTGDVIAINYNEKIYELRVMETKPDKAVSIIECDMNVDFDAPLGYKEPERQVQHEESTEGEADHSGYAGELGFRAFSGSGNRLDGKKKGVEPSPSPIKPGDIKRGIPNYEFKLGKITFIRNSRPLVKKVEEDEAGGRFVAFSGEGQSLRKKGRKP

SEQ ID NO: 57136 - protein, 343 aa, Homo sapiens
VFDVGPRYTNLSYIGEGAYGMVCSAYDNVNKVRVAIKKISPFEHQTYCQRTLREIKILLRFRHENIIGINDIIRAPTIEQMKDVYIVQDLMETDLYKLLKTQHLSNDHICYFLYQILRGLKYIHSANVLHRDLKPSNLLLNTTCDLKICDFGLARVADPDHDHTGFLTEYVATRWYRAPEIMLNSKGYTKSIDIWSVGCILAEMLSNRPIFPGKHYLDQLNHILGILGSPSQEDLNCIINLKARNYLLSLPHKNKVPWNRLFPNADSKALDLLDKMLTFNPHKRIEVEQALAHPYLEQYYDPSDEPIAEAPFKFDMELDDLPKEKLKELIFEETARFQPGYRS

SEQ ID NO: 57137 - protein, 97 aa, Homo sapiens
KDFQYEAMQERREAENMAQRGIGVAASSVPMNFKDLIETKAEEHNIVFMPVIGKRHEGKQLYTFGRIVIYIDRGVVFVQGEKTWVPTSLQSLIDMAK

SEQ ID NO: 57138 - protein, 11 aa, Homo sapiens
VSLAGCPLTCR

SEQ ID NO: 57139 - protein, 95 aa, Homo sapiens
MATTAAGVAVGSAVGHVMGSALTGAFSGGSSEPSQPAVQQAPTPAAPQPLQMGPCAYEIRQFLDCSTTQSDLSLCEGFSEALKQCKYYHGLSSLP

SEQ ID NO: 57140 - protein, 32 aa, Homo sapiens; identical to SEQ ID NO: 57083

SEQ ID NO: 57141 - protein, 88 aa, Homo sapiens
LGKPADRVNVTVRPGLAMALSGSTEPCAQLSISSIGVVGTAEDNRSHSAHFFEFLTKELALGQDRILIRFFPLESWQIGKIGTVMTFL

SEQ ID NO: 57142 - protein, 609 aa, Homo sapiens
ICPPIRPSVCPPAAPLLLGCRAMARGYGATVSLVLLGLGLALAVIVLAVVLSRHQAPCGPQAFAHAAVAADSKVCSDIGRAILQQQGSPVDATIAALVCTSVVNPQSMGLGGGVIFTIYNVTTGKVEVINARETVPASHAPSLLDQCAQALPLGTGAQWIGVPGELRGYAEAHRRHGRLPWAQLFQPTIALLRGGHVVAPVLSRFLHNSILRPSLQASTLRQLFFNGTEPLRPQDPLPWPALATTLETVATEGVEVFYTGRLGQMLVEDIAKEGSQLTLQDLAKFQPEVVDALEVPLGDYTLYSPPPPAGGAILSFILNVLRGFNFSTESMARPEGRVNVYHHLVETLKFAKGQRWRLGDPRSHPKLQNASRDLLGETLAQLIRQQIDGRGDHQLSHYSLAEAWGHGTGTSHVSVLGEDGSAVAATSTINTPFGAMVYSPRTGIILNNELLDLCERCPRGSGTTPSPAVSGDRVGGAPGRCWPPVPGERSPSSMVPSILINKAQGSKLVIGGAGGELIISAVAQAIMSKLWLGFDLRAAIAAPILHVNSKGCVEYEPNFSQEVQRGLQDRGQNQTQRPFFLNVVQAVSQEGACVYAVSDLRKSGEAAGY

SEQ ID NO: 57143 - protein, 33 aa, Homo sapiens
RWWMPWRCPWGTIPCTHHRRLQGVPFSALSSTC

SEQ ID NO: 57144 - protein, 196 aa, Homo sapiens
IILNNELLDLCERCPRGSGTTPSPVSGDRVGGAPGRCWPPVPGERSPSSMVPSILINKAQGSKLVIGGAGGELIISAVAQAIMSKLWLGFDLRAAIAAPILHVNSKGCVEYEPNFSQKQDLAALPRLVSNSWPQVILLPQPPKLLALQEVQRGLQDRGQNQTQRPFFLNVVQAVSQEGACVYAVSDLRKSGEAAGY

SEQ ID NO: 57145 - protein, 46 aa, Homo sapiens
KQSDVMRFLLRVRCWQYRQLSALHRAPRPTRPDKVHRLGYKQGHGG

SEQ ID NO: 57146 - protein, 267 aa, Homo sapiens
KEFRVVLPCSVQEYQVGQLYSVAEASKNETGGGEGIEVLKNEPYEKDGEKGQYTHKIYHLKSKVPAFVRMIAPEGSLVFHEKAWNAYPYCRTIVTNEYMKDDFFIKIETWHKPDLGTLENVHGLDPNTWKTVEIVHIDIADRSQVEPADYKADEDPALFQSVKTKRGPLGPNWKKELANSPDCPQMCAYKLVTIKFKWWGLQSKVENFIQKQEKRIFTNFHRQLFCWIDKWIDLTMEDIRRMEDETQKELETMRKRGSVRGTSAADV

SEQ ID NO: 57147 - protein, 14 aa, Homo sapiens
MERLLYGMSVNSNT

SEQ ID NO: 57148 - protein, 82 aa, Homo sapiens
LSPLQNISPWILAVLTLQIQSLISCWAFWTTWTQSCSSNALPQSLPAWRSSQRSTQKDPVPYQPPFLCQWGRHQPSWKPLMN

SEQ ID NO: 57149 - protein, 68 aa, Homo sapiens
LSKSSVSSLRLQQLERMGFPTEQAVVALAATGRVEGAVSLLVGGQVGTETLVTHGKGGPAHSEGPGPP

SEQ ID NO: 57150 - protein, 26 aa, Homo sapiens
IAVMAFTNYSSLNRAQLTFEYLHTNS

SEQ ID NO: 57151 - protein, 96 aa, Homo sapiens [sequence omitted]

SEQ ID NO: 57152 - protein, 54 aa, Homo sapiens
IICGRVPMSLLLPPLALLLLLAALVAPATAATAYRPDWNRLSGLTRARVETCGG

SEQ ID NO: 57153 - protein, 96 aa, Homo sapiens
LNRLKEVKAFVTQDIPFYHNLVMKHLPGADPELVLLGRRYEELERIPLSEMTREEINALVQELGFYRKAAPDAQVPPEYVWAPAKPPEETSDHADL

SEQ ID NO: 57154 - protein, 294 aa, Homo sapiens
LATSSVQMGAVDLLGGGLDSLIGGTNFVAPPTAAVPANLGAPIGSGLSDLFDLTSGVGTLSGSYVAPKAVWLPAMKAKGLEISGTFTRQVGSISMDLQLTNKALQVMTDFAIQFNRNSFGLAPAAPLQVHAPLSPNQTVEISLPLSTVGSVMKMEPLNNLQVAVKNNIDVFYFSTLYPLHILFVEDGKMDRQMFLATWKDIPNENEAQFQIRDCPLNAEAASSKLQSSNIFTVAKRNVEGQDMLYQSLKLTNGIWVLAELRIQPGNPSCTLSLKCRAPEVSQHVYQAYETILKN

SEQ ID NO: 57155 - protein, 191 aa, Homo sapiens
LQVMTDFAIQFNRNSFGLAPAAPLQVHAPLSPNQTVEISLPLSTVGSVMKMEPLNNLQVAVKNNIDVFYFSTLYPLHILFVEDGKMDRQMFLATWKDIPNENEAQFQIRDCPLNAEAASSKLQSSNIFTVAKRNVEGQDMLYQSLKLTNGIWVLAELRIQPGNPSCTLSLKCRAPEVSQHVYQAYETILKN

SEQ ID NO: 57156 - protein, 41 aa, Homo sapiens
VKYLECSALTQRGLKTVFDEAIRAVLCPQPTRQQKRACSLL

SEQ ID NO: 57157 - protein, 105 aa, Homo sapiens
MGPNIYELRTYKLKPGTMIEWGNNWARAIKYRQENQEAVGGFFSQIGELYVVHHLWAYKDLQSREETRNAAWRKRGWDENVYYTVPLVRHMESRIMIPLKISPLQ

SEQ ID NO: 57158 - protein, 149 aa, Homo sapiens
KKHLNGLQHLKAKKVWYDMFRDAAAILLDEQNKRPCRKFLLTGQCDFGSNCRFSHMSERDLQELSIQVEEERRAREWLLDAPELPEGHLEDWLEKRAKRLSSAPSSRAEPIRTTVFQYPVGWPPVQELPPSLRAPPPGGWPLQPRVQWG

SEQ ID NO: 57159 - protein, 40 aa, Homo sapiens
VPPKDSAPKDSAPQDLAPQVSAHHRSQESLTSQESEDTYL

SEQ ID NO: 57160 - protein, 612 aa, Homo sapiens
LTQLMQKEQRNYQFDFLRPQHSLFNYFTKLVEQYTKILIPPKGLFSKLKKEAENPREVLDQVCYRVEWAKFQERERKKEEEEKEKERVAYAQIDWHDFVVVETVDFQPNEQGNFPPPTTPEELGARILIQERYEKFGESEEVEMEVESDEEDDKQEKAEEPPSQLDQDTQVQDMDEGSDDEEEGQKVPPPPETPMPPPLPPTPDQVIVRKDYDPKASKPLPPAPAPDEYLVSPITGEKIPASKMQEHMRIGLLDPRWLEQRDRSIREKQSDDEVYAPGLDIESSLKQLAERRTDIFGVEETAIGKKIGEEEIQKPEEKVTWDGHSGSMARTQQAAQANITLQEQIEAIHKAKGLVPEDDTKEKIGPSKPNEIPQQPPPPSSATNIPSSAPPITSVPRPPTMPPPVRTTVVSAVPVMPRPPMASVVRLPPGSVIAPMPPIIHAPRINVVPMPPSAPPIMAPRPPPMIVPTAFVPAPPVAPVPAPAPMPPVHPPPPMEDEPTSKKLKTEDSLMPEEEFLRRNKGPVSIKVQVPNMQDKTEWKLNGQVLVFTLPLTDQVSVIKVKIHEATGMPAGKQKLQYEGIFIKDSNSLAYYNMANGAVIHLALKERGGRKK

SEQ ID NO: 57161 - protein, 34 aa, Homo sapiens
KHEFHRDCVDPWLMLQQTCPLCKFNVLGNRYSDD

SEQ ID NO: 57162 - protein, 424 aa, Homo sapiens
LELPVPGAGGDGADPGLSKRPRTEEAAADGGGGMQNEPLTPGYHGFPARDSQGNQEPTTTPDAMVQPFTTIPFPPPPQNGIPTEYGVPHTQDYAGQTGEHNLTLYGSTQAHGEQSSNSPSTQNGSLTQTEGGAQTDGQQSQTQSSENSESKSTPKRLHVSNIPFRFRDPDLRQMFGQFGKILDVEIIFNERGSKGFGFVTFENSADADRAREKLHGTVVEGRKIEVNNATARVMTNKKMVTPYANGWKLSPVVGAVYGPELYAASSFQADVSLGNDAAVPLSGRGGINTYIPLISLPLVPGFPYPTAATTAAAFRGAHLRGRGRTVYGAVRAVPPTAIPAYPGVVYQDGFYGADLYGGYAAYRYAQPATATAATAAAAAAAAYSDGYGRVYTADPYHALAPAASYGVGAVASLYRGGYSRFAPY

SEQ ID NO: 57163 - protein, 124 aa, Homo sapiens
INTYIPLIIPGFPYPTAATTAAAFRGAHLRGRGRTVYGAVRAVPPTAIPAYPGVDMQPTDMHSLLLQPQPPLLQPLQPLTVTVMAGCTQPTPTMPLPLPLAMELALWRVYTEVATADLPPTEVT

SEQ ID NO: 57164 - protein, 53 aa, Homo sapiens
MQMHGWRWDPHSSEQLDLAHTLSREASLKRNALLKRPPNTSGRESAQCICKSC

SEQ ID NO: 57165 - protein, 327 aa, Homo sapiens
KKRFTEEATKYFRERVSPVHLQILLTNNEAWKRFVTAAELPRDEADALYEALKKLRTYAAIEDEYVQQKDEQFREWFLKEFPQVKRKIQESIEKLRALANGIEEVHRGCTISNVVSSSTGAASGIMSLAGLVLAPFTAGTSLALTAAGVGLGAASAVTGITTSIVEHSYTSSAEAEASRLTATSIDRLKVFKEVMRDITPNLLSLLNNYYEATQTIGSEIRAIRQARARARLPVTTWRISAGSGGQAERTIAGTTRAVSRGARILSATTSGIFLALDVVNLVYESKHLHEGAKSASAEELRRQAQELEENLMELTQIYQRLNPCHTH

SEQ ID NO: 57166 - skipped

SEQ ID NO: 57167 - protein, 65 aa, Homo sapiens
LAPDPASPTTAAASPSVSVIPEGSPTAMEQPVFLMTTAAQAISGFFVWTALLITCHQPRARLGQV

SEQ ID NO: 57168 - protein, 261 aa, Homo sapiens
IESKFYKMMQGGVGIPSIKWCGAEGDYNVMVMELLGPSLEDLFNFCSRKFSLKTVLLLADQMISRIEYIHSKNFIHRDVKPDNFLMGLGKKGNLVYIIDFGLAKKYRDARTHQHIPYRENKNLTGTARYASINTHLGIEQSRRDDLESLGYVLMYFNLGSLPWQGLKAATKRQKYERISEKKMSTPIEVLCKGYPSEFSTYLNFCRSLRFDDKPDYSYLRQLFRNLFHRQGFSYDYVFDWNMLKFTDTVQDGSHWPHATHF

SEQ ID NO: 57169 - protein, 100 aa, Homo sapiens [sequence omitted]

SEQ ID NO: 57170 - protein, 721 aa, Homo sapiens
ILCVLLPSPTREAATVASATGDSASERESAAPAAAPTAEAPPPSVVTRPEPQALPSPAIRAPLPDLYPFGTMRGGGFGDRDRDRDRGGFGARGGGGLPPKKFGNPGERLRKKKWDLSELPKFEKNFYVEHPEVARLTPYEVDELRRKKEITVRGGDVCPKPVFAFHHANFPQYVMDVLMDQHFTEPTPIQCQGFPLALSGRDMVGIAQTGSGKTLAYLLPAIVHINHQPYLERGDGPICLVLAPTRELAQQVQQVADDYGKCSRLKSTCIYGGAPKGPQIRDLERGVEICIATPGRLIDFLESGKTNLRRCTYLVLDEADRMLDMGFEPQIRKIVDQIRPDRQTLMWSATWPKEVRQLAEDFLRDYTQINVGNLELSANHNILQIVDVCMESEKDHKLIQLMEEIMAEKENKTIIFVETKRRCDDLTRRMRRDGWPAMCIHGDKSQPERDWVLNEFRSGKAPILIATDVASRGLDVEDVKFVINYDYPNSSEDYVHRIGRTARSTNKGTAYTFFTPGNLKQARELIKVLEEANQAINPKLMQLVDHRGGGGGGGGRSRYRTTSSANNPNLMYQDECDRRLRGVKDGGRRDSASYRDRSETDRAGYANGSGYGSPNSAFGAQAGQYTYGQGTYGAAAYGTSSYTAQEYGAGTYGASSTTSTGRSSQSSSQQFSGIGRSGQQPQPLMSQQFAQPPGATNMIGYMGQTAYQYPPPPPPPPPSRK

SEQ ID NO: 57171 - protein, 6 aa, Homo sapiens
MKPLKW

SEQ ID NO: 57172 - protein, 57 aa, Homo sapiens
VGGAYYNLDSKLKMPEWIGGESELRKFLKHHLRGKNCELLLVVPEEVEAHQSWRTDV

SEQ ID NO: 57173 - protein, 353 aa, Homo sapiens
KQDPSVLHTEEMRFLREWVESMGGKVPPATQKAKSEENTKEEKPDSKKVEEDLKADEPSSEESDLEIDKEGVIEPDTDAPQEMGDENAEITEEMMDQANDKKVAAIEALNDGELQKAIDLFTDAIKLNPRLAILYAKRASVFVKLQKPNAAIRDCDRAIEINPDSAQPYKWRGKAHRLLGHWEEAAHDLALACKLDYDEDASAMLKEVQPRAQKIAEHRRKYERKREEREIKERIERVKKAREEHERAQREEEARRQSGAQYGSFPGGFPGGMPGNFPGGMPGMGGGMPGMAGMPGLNEILSDPEVLAAMQDPEVMVAFQDVAQNPANMSKYQSNPKVMNLISKLSAKFGGQA

SEQ ID NO: 57174 - protein, 173 aa, Homo sapiens
LDPNTGEPAPVLSSPPPADVSTFLAFPSPEKLLRLGPKSSVLIAQQTDTSDPEKVVSAFLKVSSVFKDEATVRMAVQDAVDALMQKAFNSSSFNSNTFLTRLLVHMGLLKSEDKVKAIANLYGPLMALNHMVQQDYFPKALAPLLLAFVTKPNSALESCSFARHSLLQTLYKV

SEQ ID NO: 57175 - protein, 21 aa, Homo sapiens
LEPKAVHVPCADSLPRKGPCS

SEQ ID NO: 57176 - protein, 338 aa, Homo sapiens
VALNFIISYLYNKLPRRRADLFGEELERLLKKKYEGHWYPEKPLKGSGFRCVHIGEMVDPVVELAAKRSGLAVEDVRANVPEELSVWIDPFEVSYQIGEKGAVKVLYLDDSEGCGAPELDKEIKSSFNPDAQVFVPIGSQDSSLSNSPSPSFGQSPSPTFIPRSAQPITFTTASFAATKFGSTKMKKGGGAASGGGVASSGAGGQQPPQQPRMARSPTNSLLKHKSLSLSMHSLNFITANPAPQSQLSPNAKEFVYNGGGSPSLFFDAADGQGSGTPGPFGGSGAGTCNSSSFDMAQVFGGGANSLFLEKTPFVEGLSYNLNTMQYPSQQFQPVVLAN

SEQ ID NO: 57177 - protein, 45 aa, Homo sapiens
TSPTGPSSADATTSSEELPKKEAPYTLVGSISEPGLGLLSWWTSN

SEQ ID NO: 57178 - protein, 180 aa, Homo sapiens
VQYKHGRLLSKQTIQNHLGEELLQDLINFCLSYMALLRLPKKRGTFIEFRNGMLNISPIGRSCTLEERIEFSELDKKEKIREKFVEALKTEFAGKGLRFSRGGMISFDVFPEGWDKRYCLDSLDQDSFDTIHFFGNETSPGGNDFEIFADPRTVGHSVVSPQDTVQRCREIFFPETAHEA

SEQ ID NO: 57179 - protein, 9 aa, Homo sapiens
LGTECTIHA

SEQ ID NO: 57180 - protein, 260 aa, Homo sapiens
MLKLDGCFSTPEERAQGYPKMAAALNATGRPIAFSCSWPAYEGGLPPRVNYSLLADICNLWRNYDDIQDSWWSVLSILNWFVEHQDILQPVAGPGHWNDPDMLLIGNFGLSLEQSRAQMALWTVLAAPLLMSTDLRTISAQNMDILQNPLMIKINQDPLGIQGRRIHKEKSLIEVYMRPLSNKASALVFFSCRTDMPYRYHSSLGQLNFTGSVIYEAQDVYSGDIISGLRDETNFTVIINPSGVVMWYLYPIKNLEMSQQ

SEQ ID NO: 57181 - protein, 39 aa, Homo sapiens
IFHLTRAFEDDDITHVEESVDPIRDIEIIHEELQLKDEE

SEQ ID NO: 57182 - protein, 206 aa, Homo sapiens
LSRLLSTCGLVQSVELQEKPDLAESPKESRSKFFHPKPVPGFQVAYVVFQKPSGVSAALALKGPLLVSTESHPVKSGIHKWISDYADSVPDPEALRVEVDTFMEAYDQKIAEEEAKAKEEEGVPDEEGWVKVTRRGRRPVLPRTEAASLRVLERERRKRSRKELLNFYAWQHRESKMEHLAQLRKKFEEDKQRIELLRAQRKFRPY

SEQ ID NO: 57183 - protein, 30 aa, Homo sapiens
MEHLAQLRKKFEEDKQRIELLRAQRKFRPY

SEQ ID NO: 57184 - protein, 427 aa, Homo sapiens
KRGAAAKGRLNARPGVGGVRSRVGIQQGLLSQSTRTATFQQRFDARQKIGLSDARLKLGVKDAREKLLQKDARFRIKGKVQDAREMLNSRKQQTTVPQKPRQVADAREKISLKRSSPAAFINPPIGTVTPALKLTKTIQRMHVDPVGWILTTECFQVPQQKAMAPLHPHPAGMRINVVNNHQAKQNLYDLDEDDDGIASVPTKQMKFAASGGFLHHMAGLSSSKLSMSKALPLTKVVQNDAYTAPALPSSIRTKALTNMSRTLVNKEEPPKELPAAEPVLSPLEGTKMTVNNLHPRVTEEDIVELFCVCGALKRARLVHPGVAEVVFVKKDDAITAYKKYNNRCLDGQPMKCNLHMNGNVITSDQPILLRLSDSPSMKKESELPRRVNSASSSNPPAEVDPDTILKALFKSSGASVTTQPTEFKIKL

SEQ ID NO: 57185 - protein, 50 aa, Homo sapiens
RKTSASNRAVRERQMLCRQLASAGTGPCPVHPASNGTSPAPALPARARNL

SEQ ID NO: 57186 - protein, 52 aa, Homo sapiens
IVFWTWMFSTYFMEKWAPRQDDMLFYVRRKLAYSGSESGADGRKMRKRRARR

SEQ ID NO: 57187 - protein, 253 aa, Homo sapiens
KGEESKISYPNIFFMIDSFEEVFSDMTVGEGEMVCVELVASDKTNTFQGVIFQGSIRYEALKKVYDNRVSVAARMAQKMSFGFYKYSNMEFVRMKGPQGKGHAEMAVSRVSTGDTSPCGTEEDSSPASPMHERVTSFSTPPTPERNNRPAFFSPSLKRKVPRNRIAEMKKSHSANDSEEFFREDDGGADLHNATNLRSRSLSGTGRSLVGSWLKLNRADGNFLLYAHLTYVTLPLHRILTDILEVRQKPILMT

SEQ ID NO: 57188 - protein, 15 aa, Homo sapiens
LYFGGTLAVCVWKCS

SEQ ID NO: 57189 - protein, 415 aa, Homo sapiens
LSKMELSAVGERVFAAESIIKRRIRKGRIEYLVKWKGWAIKYSTWEPEENILDSRLIAAFEQKERERELYGPKKRGPKPKTFLLKARAQAEALRISDVHFSVKPSASASSPKLHSSAAVHRLKKDIRRCHRMSRRPLPRPDPQGGSPGLRPPISPFSETVRIINRKVKPREPKRNRIILNLKVIDKGAGGGGAGQGAGALARPKVPSRNRVIGKSKKFSESVLRTQIRHMKFGAFALYKPPPAPLVAPSPGKAEASAPGPGLLLAAPAAPYDARSSGSSGCPSPTPQSSDPDDTPPKLLPETVSPSAPSWREPEVLDLSLPPESAATSKRAPPEVTAAAGPAPPTAPEPAGASSEPEAGDWRPEMSPCSNVVVTDVTSNLLTVTIKEFCNPEDFEKVAAGVAGAAGGGGSIGASK

SEQ ID NO: 57190 - protein, 124 aa, Homo sapiens
LAASEAPRDPPGQAKPRGAPVKRPRKTKAIQAQKLRNSAKGKVPKSALDEYRKRECRDHLRVNLKFLTRTRSTVAESVSQQILRQNRGRKACDRPVAKTKKKKAEGTVFTEEDFQKFQQEYFGS

SEQ ID NO: 57191 - protein, 66 aa, Homo sapiens
LHFVPEPSSTMGLDLADGHLDSMDWLELSSGGPVLSLAPLSTTAPSLFSTDFLDGHDLQLHWDSCL

SEQ ID NO: 57192 - protein, 76 aa, Homo sapiens
LPLYFVSAADGTNVVKLFNDAIRLAVSYKQNSQDFMDEIFQELENFSLEQEEEDVPDQEQSSSIETPSEEAASPHS

SEQ ID NO: 57193 - protein, 7 aa, Homo sapiens
MDIFISC

SEQ ID NO: 57194 - protein, 13 aa, Homo sapiens
VKLAAKCILADTR

SEQ ID NO: 57195 - protein, 40 aa, Homo sapiens
LECFETSVKEMENFEAPFHCLAKQFHQLYREKVEVFRALA

SEQ ID NO: 57196 - protein, 29 aa, Homo sapiens
TRRVYNFCAQDVPSAQQWVDRIQSCLSDA

SEQ ID NO: 57197 - protein, 693 aa, Homo sapiens
VAAVFMFAFASLYTQIPGLYGPEGILPARRTLRPQGKGRWQQLWETPTLLWEAPRLGLDTAQGLELLSLLGALVALGALLLSPLRHPVIYLLLWAAYLSACQVGQVFLYFQWDSLLLETGFLAVLVAPLRPASHRKEAPQGRQAGALPHEDLPFWLVRWLLFRLMFASGVVKLTSRCPAWWGLTALTYHYETQCLPTPAAWFAHHLPVWLHKLSVVATFLIEIAVPPLFFAPIRRLRLAAFYSQVLLQVLIIITGNYNFFNLMTLVLTTALLDDQHLAAEPGHGSRKKTATSWPKALLATLSLLLELAVYGLLAYGTVHYFGLEVDWQQRTIHSRTTFTFHQFSQWLKTLTLPTVWLGVASLVWELLSALWRWTQVRGWLRKLSAVVQLSLVGTATVALFLISLVPYSYVEPGTHGRLWTGAHRLFGAVEHLQLANSYGLFRRMTGLGGRPEVVLEGSYDGHHWTEIEFMYKPGNLSRPPPVVVPHQPRLDWQMWFAALGPHTHSPWFTSLVLRLLQGKEPVIRLVQSQVARYPFHKQPPTYVRAQRYKYWFSQPGEQGQWWRRQWVEEFFPSVSLGDPTLETLLRQFGLQEKSPPRTRSANSTLAQALHWTRSQLSPLEAPALLWGLLMAVGAVRFVQALLAPCSLRSSPLAPVSGEKRRPASQKDSGAASEQATAAPNPCSSSSRTTRRKK

SEQ ID NO: 57198 - protein, 368 aa, Homo sapiens
KHSTGGVGDKVSLVLAPALAACGCKVPMISGRGLGHTGGTLDKLESIPGFNVIQSPEQMQVLLDQAGCCIVGQSEQLVPADGILYAARDVTATVDSLPLITASILSKKLVEGLSALVVDVKFGGAAVFPNQEQARELAKTLVGVGASLGLRVAAALTAMDKPLGRCVGHALEVEEALLCMDGAGPPDLRDLVTTLGGALLWLSGHAGTQAQGAARVAAALDDGSALGRFERMLAAQGVDPGLARALCSGSPAERRQLLPRAREQEELLAPADGTVELVRALPLALVLHELGAGRSRAGEPLRLGVGAELLVDVGQRLRRGTPWLRVHRDGPALSGPQSRALQEALVLSDRAPFAAPSPFAELVLPPQQ

SEQ ID NO: 57199 - protein, 100 aa, Homo sapiens
VDPERDDVEAMARYVQDFHPRLLGLTGSTKQVAQASHSYRVYYNAGPKDEDQDYIVDHSIAIYLLNPDGLFTDYYGRSRSAEQISDSVRRHMAAFRSVLS

SEQ ID NO: 57200 - protein, 529 aa, Homo sapiens
RCPGPGGVPSQPAVSRPLGPMSMGAPRSLLLALAAGLAVARPPNIVLIFADDLGYGDLGCYGHPSSTTPNLDQLAAGGLRFTDFYVPVSLCTPSRAALLTGRLPVRMGMYPGVLVPSSRGGLPLEEVTVAEVLAARGYLTGMAGKWHLGVGPEGAFLPPHQGFHRFLGIPYSHDQGPCQNLTCFPPATPCDGGCDQGLVPIPLLANLSVEAQPPWLPGLEARYMAFAHDLMADAQRQDRPFFLYYASHHTHYPQFSGQSFAERSGRGPFGDSLMELDAAVGTLMTAIGDLGLLEETLVIFTADNGPETMRMSRGGCSGLLRCGKGTTYEGGVREPALAFWPGHIAPGVTHELASSLDLLPTLAALAGAPLPNVTLDGFDLSPLLLGTGKSPRQSLFFYPSYPDEVRGVFAVRTGKYKAHFFTQGSAHSDTTADPACHASSSLTAHEPPLLYDLSKDPGENYNLLGGVAGATPEVLQALKQLQLLKAQLDAAVTFGPSQVARGEDPALQICCHPGCTPRPACCHCPDPHA

SEQ ID NO: 57201 - protein, 22 aa, Homo sapiens
MDLQPLQVCGRAVFVLAKKVGC

SEQ ID NO: 57202 - protein, 34 aa, Homo sapiens
RSAAEPGRVSRRPVGCQDPHLSAMGCPGWSVTSQ

SEQ ID NO: 57203 - protein, 323 aa, Homo sapiens
TFFVSIMIYWHVVGEPKEKGQLYNLPAEIPCPTLTPPTPPSHGPTPGNIFFLETSDRTNPNFLFMCSVESAARTHPESHVLVLMKGLPGGNASLPRHLGISLLSCFPNVQMLPLDLRELFRDTPLADWYAAVQGRWEPYLLPVLSDASRIALMWKFGGIYLDTDFIVLKNLRNLTNVLGTQSRYVLNGAFLAFERRHEFMALCMRDFVDHYNGWIWGHQGPQLLTRVFKKWCSIRSLAESRACRGVTTLPPEAFYPIPWQDWKKYFEDINPEELPRLLSATYAVHVWNKKSQGTRFEATSRALLAQLHARYCPTTHEAMKMYL

SEQ ID NO: 57204 - protein, 456 aa, Homo sapiens
IDDGHRLCSDLMNCLHERARIEKAYAQQLTEWARRWRQLVEKGPQYGTVEKAWMAFMSEAERVSELHLEVKASLMNDDFEKIKNWQKEAFHKQMMGGFKETKEAEDGFRKAQKPWAKKLKEVEAAKKAHHAACKEEKLAISREANSKADPSLNPEQLKKLQDKIEKCKQDVLKTKEKYEKSLKELDQGTPQYMENMEQVFEQCQQFEEKRLRFFREVLLEVQKHLDLSNVAGYKAIYHDLEQSIRAADAVEDLRWFRANHGPGMAMNWPQFEEWSADLNRTLSRREKKKATDGVTLTGINQTGDQSLPSKPSSTLNVPSNPAQSAQSQSSYNPFEDEDDTGSTVSEKDDTKAKNVSSYEKTQSYPTDWSDDESNNPFSSTDANGDSNPFDDDATSGTEVRVRALYDYEGQEHDELSFKAGDELTKMEDEDEQGWCKGRLDNGQVGLYPANYVEAIQ

SEQ ID NO: 57205 - protein, 505 aa, Homo sapiens
IFKRLRSVPTNKVCFDCGAKNPSWASITYGVFLCIDCSGSHRSLGVHLSFIRSTELDSNWSWFQLRCMQVGGNASASSFFHQHGCSTNDTNAKYNSRAAQLYREKIKSLASQATRKHGTDLWLDSCVVPPLSPPPKEEDFFASHVSPEVSDTAWASAIAEPSSLTSRPVETTLENNEGGQEQGPSVEGLNVPTKATLEVSSIIKKKPNQAKKGLGAKKGSLGAQKLANTCFNEIEKQAQAADKMKEQEDLAKVVSKEESIVSSLRLAYKDLEIQMKKDEKMNISGKKNVDSDRLGMGFGNCRSVISHSVTSDMQTIEQESPIMAKPRKKYNDDSDDSYFTSSSSYFDEPVELRSSSFSSWDDSSDSYWKKETSKDTETVLKTTGYSDRPTARRKPDYEPVENTDEAQKKFGNVKAISSDMYFGRQSQADYETRARLERLSASSSISSADLFEEPRKQPAGNYSLSSVLPNAPDMAQFKQGVRSVAGKLSVFANGVVTSIQDRYGS

SEQ ID NO: 57206 - protein, 32 aa, Homo sapiens
KSCNMQAWKSYSAVDVLQTLEHVDLDPQEPPR

SEQ ID NO: 57207 - protein, 26 aa, Homo sapiens
IIAGDFIGADGFVSDVIALNQKLLWC

SEQ ID NO: 57208 - protein, 57 aa, Homo sapiens
TSPDHTRSRRSHSKDRHRRERSRERRGSASRKHSRHRRRSERSRSRSPSRHRSTWNR

SEQ ID NO: 57209 - protein, 177 aa, Homo sapiens
LLLFGLLGVLVAAPDGGFDLSDALPDNENKKPTAIPKKPSAGDDFDLGDAVVDGENDDPRPPNPPKPMPNPNPNHPSSSGSFSDADLADGVSGGEGKGGSDGGGSHRKEGEEADAPGVIPGIVGAVVVAVAGAISSFIAYQKKKLCFKENAEQGEVDMESHRNANAEPAVQRTLLEK

SEQ ID NO: 57210 - protein, 65 aa, Homo sapiens
IASLPSKLGDQKSTTGGWRGRVSQSAWLGSPLRFLHPEANHGELVGTSLSCVPVFSNARPRSKRL

SEQ ID NO: 57211 - protein, 200 aa, Homo sapiens
RGTAAENKENLDPSNLMPPPNQTPAPDQPFALSTVREESSIPRADSEKKWVYPSEQMFWNAMLKKGWKWKDEDISQKDMYNIIRIHNQNNEQAWKEILKWEALHAAECPCGPSLIRFGGKAKEYSPRARIRSWMGYELPFDRHDWIINRCGTEVRYVIDYYDGGEVNKDYQFTILDVRPALDSLSAVWDRMKVAWWRWTS

SEQ ID NO: 57212 - protein, 40 aa, Homo sapiens
KHFDLFLRFLAEYHDDFFPESAYVAACEAHYSTKNPRAIY

SEQ ID NO: 57213 - protein, 15 aa, Homo sapiens
VAARHSCTPVMSLAL

SEQ ID NO: 57214 - protein, 208 aa, Homo sapiens
LKLLRLTMAGKSSLFKVILLGDGGVGKSSLMNRYVTNKFDTQLFHTIGVEFLNKDLEVDGHFVTMQIWDTAGQERFRSLRTPFYRGSDCCLLTFSVDDSQSFQNLSNWKKEFIYYADVKEPESFPFVILGNKIDISERQVSTEEAQAWCRDNGDYPYFETSAKDATNVAAAFEEAVRRVLATEDRSDHLIQTDTVNLHRKPKPSSSCC

SEQ ID NO: 57215 - protein, 70 aa, Homo sapiens
INSQGVICLDILKDNWSPALTVSKVLLSICSLLMDCNPVDPLVGSIATQYLTNRAEHDRIARQRTKRYAT

SEQ ID NO: 57216 - protein, 494 aa, Homo sapiens
VTDKSDKYDARDVERLQQDDNWVESYLSWRHNIVDETLKMLDESFQWRKEISVNDLNESSIPRWLLEIGVIYLHGYDKEGNKLFWIRVKYHVKDQKTILDKKKLIAFWLERYAKRENGKPVTVMFDLSETGINSIDMDFVRFIINCFKVYYPKYLSKIVIFDMPWLMNAAFKIVKTWLGPEAVSLLKFTSKNEVQDYVSVEYLPPHMGGTDPFKYSYPPLVDDDFQTPLCENGPITSEDETSSKEDIESDGKETLETISNEEQTPLLKKINPTESTSKAEENEKVDSKVKAFKKPLSVFKGPLLHISPAEELYFGSTESGEKKTLIVLTNVTKNIVAFKVRTTAPEKYRVKPSNSSCDPGASVDIVVSPHGGLTVSAQDRFLIMAAEMEQSSGTGPAELTQFWKEVPRNKVMEHRLRCHTVESSKPNTLTLKDNAFNMSDKTSEDICLQLSRLLESNRKLEDQVQRCIWFQQLLLSLTMLLLAFVTSFFYLLYS

SEQ ID NO: 57217 - protein, 396 aa, Homo sapiens
RKMLAAVSRVLSGASQKPASRVLVASRNFANDATFEIKKCDLHRLEEGPPVTTVLTREDGLKYYRMMQTVRRMELKADQLYKQKIIRGFCHLCDGQFLLPLTQEACCVGLEAGINPTDHLITAYRAHGFTFTRGLSVREILAELTGRKGGCAKGKGGSMHMYAKNFYGGNGIVGAQVPLGAGIALACKYNGKDEVCLTLYGDGAANQGQIFEAYNMAALWKLPCIFICENNRYGMGTSVERAAASTDYYKRGDFIPGLRVDGMDILCVREATRFAAAYCRSGKGPILMELQTYRYHGHSMSDPGVSYRTREEIQEVRSKSDPIMLLKDRMVNSNLASVEELKEIDVEVRKEIEDAAQFATADPEPPLEELGYHIYSSDPPFEVRGANQWIKFKSVS

SEQ ID NO: 57218 - protein, 516 aa, Homo sapiens
VSLVVVVVGGWTVVYLTDLVLKSSVYFKHSYEDWLENNGLSISPFHIRWQTAVFNRAFYSWGRRKARMLYQWFNFGMVFGVIAMFSSFFLLGKTLMQTLAQMMADSPSSYSSSSSSSSSSSSSSSSSSSSSSSLHNEQVLQVVVPGINLPVNQLTYFFTAVLISGVVHEIGHGIAAIREQVRFNGFGIFLFIIYPGAFVDLFTTHLQLISPVQQLRIFCAGIWHNFVLALLGILALVLLPVILLPFYYTGVGVLITEVAEDSPAIGPRGLFVGDLVTHLQDCPVTNVQDWNECLDTIAYEPQIGYCISASTLQQLSFPVRAYKRLDGSTECCNNHSLTDVCFSYRNNFNKRLHTCLPARKAVEATQVCRTNKDCKKSSSSSFCIIPSLETHTRLIKVKHPPQIDMLYVGHPLHLHYTVSITSFIPRFNFLSIDLPVVVETFVKYLISLSGALAIVNAVPCFALDGQWILNSFLDATLTSVIGDNDVKDLIGFFILLGGSVLLAANVTLGLWMVTAR

SEQ ID NO: 57219 - protein, 24 aa, Homo sapiens
RSSSTRPKTSATIYLTLHLLPQKR

SEQ ID NO: 57220 - protein, 46 aa, Homo sapiens
LDSHKELNTSSKRALGAHLEAEPKSQRSAVQKPPSTGSAPAIESVD

SEQ ID NO: 57221 - protein, 29 aa, Homo sapiens
LKHLGVKLGTAVKLCYYIDRLKQGKCFEN

SEQ ID NO: 57222 - protein, 366 aa, Homo sapiens
LKRHMKNHPEHLAKKKYRCTDCDYTTNKKISLHNHLESHKLTSKAEKAIECDECGKHFSHAGALFTHKMVHKEKGANKMHKCKFCEYETAEQGLLNRHLLAVHSKNFPHICVECGKGFRHPSELKKHMRIHTGEKPYQCQYCEYRSADSSNLKTHVKTKHSKEMPFKCDICLLTFSDTKEVQQHALIHQESKTHQCLHCDHKSSNSSDLKRHIISVHTKDYPHKCDMCDKGFHRPSELKKHVAAHKGKKMHQCRHCDFKIADPFVLSRHILSVHTKDLPFRCKRCRKGFRQQSELKKHMKTHSGRKVYQCEYCEYSTTDASGFKRHVISIHTKDYPHRCEYCKKGFRRPSEKNQHIMRHHKEVGLP

SEQ ID NO: 57223 - protein, 45 aa, Homo sapiens
IPDCQRRLEAAYLDLQQILESEKDLEEAEEYKEARLVLDSVKLEA

SEQ ID NO: 57224 - protein, 228 aa, Homo sapiens [sequence omitted]

SEQ ID NO: 57225 - protein, 268 aa, Homo sapiens
LPLLAATTPDHGRHRRLLLLPLLLFLLPAGAVQGWETEERPRTREEECHFYAGGQVYPGEASRVSVADHSLHLSKAKISKPAPYWEGTAVIDGEFKELKLTDYRGKYLVFFFYPLDFTFVCPTEIIAFGDRLEEFRSINTEVVACSVDSQFTHLAWINTPRRQGGLGPIRIPLLSDLTHQISKDYGVYLEDSGHTLRGLFIIDDKGILRQITLNDLPVGRSVDETLRLVQAFQYTDKHGEVCPAGWKPGSETIIPDPAGKLKYFDKLN

SEQ ID NO: 57226 - protein, 176 aa, Homo sapiens
KQKTKMAKFVIRPATAADCSDILRLIKELAKYEYMEEQVILTEKDLLEDGFGEHPFYHCLVAEVPKEHWTPEGHSIVGFAMYYFTYDPWIGKLLYLEDFFVMSDYRGFGIGSEILKNLSQVAMRCRCSSMHFLVAEWNEPSINFYKRRGASDLSSEEGWRLFKIDKEYLLKMATEE

SEQ ID NO: 57227 - protein, 437 aa, Homo sapiens
ISRQATINIGTIGHVAHGKSTVVKAISGVHTVRFKNELERNITIKLGYANAKIYKLDDPSCPRPECYRSCGSSTPDEFPTDIPGTKGNFKLVRHVSFVDCPGHDILMATMLNGAAVMDAALLLIAGNESCPQPQTSEHLAAIEIMKLKHILILQNKIDLVKESQAKEQYEQILAFVQGTVAEGAPIIPISAQLKYNIEVVCEYIVKKIPVPPRDFTSEPRLIVIRSFDVNKPGCEVDDLKGGVAGGSILKGVLKVGQEIEVRPGIVSKDSEGKLMCKPIFSKIVSLFAEHNDLQYAAPGGLIGVGTKIDPTLCRADRMVGQVLGAVGALPEIFTELEISYFLLRRLLGVRTEGDKKAAKVQKLSKNEVLMVNIGSLSTGGRVSAVKADLGKIVLTNPVCTEVGEKIALSRRVEKHWRLIGWGQIRRGVTIKPTVDDD

SEQ ID NO: 57228 - protein, 153 aa, Homo sapiens
KFHAAGTHLGGTNLDFQMEQYIYKRKSDGIYIINLKRTWEKFLLAARAVVAIENPADVSVISSGNTGQRAVLKFAAATGATPIAGHFTPGTFTNQIQAAFREPRLLVVTDPRADHQPLTESSYVNLPTIALCNTDSPLRYVDIATTRELTQWV

SEQ ID NO: 57229 - protein, 212 aa, Homo sapiens
TGEKANSILKRYPRANGFFEEIRQGNIERECKEEFCTFEEAREAFENNEKTKEFWSTYTKAQQGESNRGSDWFQFYLTFPLIFGLFIILLVIFLIWRCFLRNKTRRQTVTEGHIPFPQHLNIITPPPPPDEVFDSSGLSPGFLGYVVGRSDSVSTRLSNCDPPPTYEEATGQVNLQRSETEPHLDPPPEYEDIVNSNSASAIPMVPVVTTIK

SEQ ID NO: 57230 - protein, 31 aa, Homo sapiens
KMVFYGKYLSVGLNVKERGRERNPFIMFSLP

SEQ ID NO: 57231 - protein, 13 aa, Homo sapiens
LGVKGIAPYSYAG

SEQ ID NO: 57232 - protein, 53 aa, Homo sapiens
VHFFDVERAAKAAVNKLQGHSAPVLDVSFNCDESLLASSDASGMVIVWRREQK

SEQ ID NO: 57233 - protein, 129 aa, Homo sapiens
KSDRDRERGYDKVDRERERDRERDRDRGYDKADREEGKERRHHRREELAPYPKSKKAVSRKDEELDPMDPSSYSDAPRGTWSTGLPKRNEAKTGADTTAAGPLFQQRPYPSPGAVLRANAEASRTKQQD

SEQ ID NO: 57234 - protein, 47 aa, Homo sapiens
VDIFRKLGLRQCLVTHNGRLLGIITKKDVLKHIAQMANQDPDSILFN

SEQ ID NO: 57235 - protein, 44 aa, Homo sapiens
IHKLPDTTSIFALKEIQLQKEASLRSSSMPDSGRPAFRVVDTEF

SEQ ID NO: 57236 - protein, 757 aa, Homo sapiens
LGKSHTVQFSHTDSIGLVLRTARERFLVEPQEDTRLWAKNSEGSLDRLYDTHITVLDAALETGQLIIMETRKKDGTWPSAQLHVMNNNMSEEDEDFKGQPGICGLTNLGNTCFMNSALQCLSNVPQLTEYFLNNCYLEELNFRNPLGMKGEIAEAYADLVKQAWSGHHRSIVPHVFKNKVGHFASQFLGYQQHDSQELLSFLLDGLHEDLNRVKKKEYVELCDAAGRPDQEVAQEAWQNHKRRNDSVIVDTFHGLFKSTLVCPDCGNVSVTFDPFCYLSVPLPISHKRVLEVFFIPMDPRRKPEQHRLVVPKKGKISDLCVALSKHTGISPERMMVADVFSHRFYKLYQLEEPLSSILDRDDIFVYEVSGRIEAIEGSREDIVVPVYLRERTPARDYNNSYYGLMLFGHPLLVSVPRDRFTWEGLYNVLMYRLSRYVTKPNSDDEDDGDEKEDDEEDKDDVPGPSTGGSLRDPEPEQAGPSSGVTNRCPFLLDNCLGTSQWPPRRRRKQLFTLQTVNSNGTSDRTTSPEEVHAQPYIAIDWEPEMKKRYYDEVEAEGYVKHDCVGYVMKKAPVRLQECIELFTTVETLEKENPWYCPSCKQHQLATKKLDLWMLPEILIIHLKRFSYTKFSREKLDTLVEFPIRDLDFSEFVIQPQNESNPELYKYDLIAVSNHYGGMRDGHYTTFACNKDSGQWHYFDDNSVSPVNENQIESKAAYVLFYQRQDVARRLLSPAGSSGAPASPACSSPPSSEFMDVN

SEQ ID NO: 57237 - protein, 109 aa, Homo sapiens
IAPLDGEELIVEVLEDVPLTMHNFVRKTFFSLAFCDFCLKFLFHGFRCQTCGYKFHQHCSSKVPTVCVDMSTNRQQFYHSVQDLSGGSRQHEAPSNRPLNELLTPQGPR

SEQ ID NO: 57238 - protein, 41 aa, Homo sapiens
KKQKEITKAIKRAQIMGFMPVTYKDPAYLKDPKVCNIRYQE

SEQ ID NO: 57239 - protein, 41 aa, Homo sapiens
IEEFLEEVLCPPKYLKLSPKHPESNTAGMDIFAKFSAFIKN

SEQ ID NO: 57240 - protein, 15 aa, Homo sapiens
VAMCSSGKTNMEMLS

SEQ ID NO: 57241 - protein, 138 aa, Homo sapiens
IEKLRAICLDHAKLGESSLSPSLDSLFFGPSASQVLYLTEVVYALLMPAGAPLADDSSDFQFHFLKSGGLPLVLSMLTRNNFLPNADMETRRGAYLNALKIAKLLLTAIGYGHVRAVAEACQPGVEGVNPMTQVIQTF

SEQ ID NO: 57242 - protein, 846 aa, Homo sapiens
MLSKVLGGSFADQKICQGCPHRYECEESFTTLNVDIRNHQNLLDSLEQYVKGDLLEGANAYHCEKCNKKVDTVKRLLIKKLPPVLAIQLKRFDYDWERECAIKFNDYFEFPRELDMEPYTVAGVAKLEGDNVNPESQLIQQSEQSESETAGSTKYRLVGVLVHSGQASGGHYYSYIIQRNGGDGERNRWYKFDDGDVTECKMDDDEEMKNQCFGGEYMGEVFDHMMKRMSYRRQKRWWNAYILFYERMDTIDQDDELIRYISELAITTRPHQIIMPSAIERSVRKQNVQFMHNRMQYSMEYFQFMKKLLTCNGVYLNPPPGQDHLLPEAEEITMISIQLAARFLFTTGFHTKKVVRGSASDWYDALCILLRHSKNVRFWFAHNVLFNVSNRFSEYLLECPSAEVRGAFAKLIVFIAHFSLQDGPCPSPFASPGPSSQAYDNLSLSDHLLRAVLNLLRREVSEHGRHLQQYFNLFVMYANLGVAEKTQLLKLSVPATFMLVSLDEGPGPPIKYQYAELGKLYSVVSQLIRCCNVSSRMQSSINGNPPLPNPFGDPNLSQPIMPIQQNVADILFVRTSYVKKIIEDCSNSEETVKLLRFCCWENPQFSSTVLSELLWQVAYSYTYELRPYLDLLLQILLIEDSWQTHRIHNALKGIPDDRDGLFDTIQRSKNHYQKRAYQCIKCMVALFSNCPVAYQILQGNGDLKRKWTWAVEWLGDELERRPYTGNPQYTYNNWSPPVQSNETSNGYFLERSHSARMTLAKACELCPEEEPDDQDAPDEHESPPPEDAPLYPHSPGSQYQQNNHVHGQPYTGPAAHHMNNPQRTGQRAQENYEGSEEVSPPQTKDQ

SEQ ID NO: 57243 - protein, 91 aa, Homo sapiens
IRHYQKSTELLIRKLPFQRLVREIAQDFKTDLRFQRAAIGTLQEASEAYLVGLFEDTNLCAIHATRVTIMPKDIQLARHIRGERVSEYTMM

SEQ ID NO: 57244 - protein, 121 aa, Homo sapiens
ILCDPSNLCHSGRTFDVQIVIIEHKSIICPGYNAVLHIHTCIEEVEITALISLVDKKSGEKSKTRPRFVKQDQVCIARLRTAGTICLETFKDFPQMGRFTLRDEGKTIAIGKVLKLVPEKD

SEQ ID NO: 57245 - protein, 47 aa, Homo sapiens
KPPKKRCLLAPRWDYPEGTPNGGSTTLPSAPPPASAGLKSHPPPPEK

SEQ ID NO: 57246 - protein, 18 aa, Homo sapiens
VNMFTNQGTVIHFNNPKV

SEQ ID NO: 57247 - protein, 172 aa, Homo sapiens
LEAWPALQIAVENGFGGVHSQEKAKWLGGAVEDYFMRNADLELDEVEDFLGELLTNEFDTVVEDGSLPQVSQQLQTMFHHFQRGDGAALREMASCITQRKCKVTATALKTARETDEDEDDVDSVEEMEVTATNDGAATDGVCPQPEPSDPDAQTIKEEDIVEDGWTIVRRKK

SEQ ID NO: 57248 - protein, 498 aa, Homo sapiens
IESYCQDVLRRQEEFEHKEEVLQELNMFPQLDDEATRKAYYKEFRKVVEYSDVILEVLDARDPLGCRCFQMEEAVLRAQGNKKLVLVLNKIDLVPKEVVEKWLDYLRNELPTVAFKASTQHQVKNLNRCSVPVDQASESLLKSKACFGAENLMRVLGNYCRLGEVRTHIRVGVVGLPNVGKSSLINSLKRSRACSVGAVPGITKFMQEVYLDKFIRLLDAPGIVPGPNSEVGTILRNCVHVQKLADPVTPVETILQRCNLEEISNYYGVSGFQTTEHFLTAVAHRLGKKKKGGLYSQEQAAKAVLADWVSGKISFYIPPPATHTLPTHLSAEIVKEMTEVFDIEDTEQANEDTMECLATGESDELLGDTDPLEMEIKLLHSPMTKIADAIENKTTVYKIGDLTGYCTNPNRHQMGWAKRNVDHRPKSNSMVDVCSVDRRSVLQRIMETDPLQQGQALASALKNKKKMQKRADKIASKLSDSMMSALDLSGNADDGVGD

SEQ ID NO: 57249 - protein, 49 aa, Homo sapiens
LRRVEEQQEQEKWDVVGNDVATILSRRIAVEYSDSEDDSSEFDGDDWSN

SEQ ID NO: 57250 - protein, 57 aa, Homo sapiens
IKNVEMLASVLVAISVTLLLVVLALGGVVWYQHRQRKLRRNRRSILDDSFKLLSFKQ

SEQ ID NO: 57251 - protein, 214 aa, Homo sapiens
KSRRRRNARAAEENRNNRKIQASEASETPMAASVVASTPEDDLSGPEEDPSTPEEASTTPEEASSTAQAQKPSVPRSNFQGTKKSLLMSILALIFIMGNSAKEALVWKVLGKLGMQPGRQHSIFGDPKKIVTEEFVRRGYLIYKPVPRSSPVEYEFFWGPRAHVESSKLKVMHFVARVRNRCSKDWPCNYDWDSDDDAEVEAILNSGARGYSAP

SEQ ID NO: 57252 - protein, 163 aa, Homo sapiens
LSRPLECSCFRTSIWDETLYKAWSSIVYQLIPNVQQLEMNLRNFAEIIEADEVLLFERATFLVISHYQCKEQRDAHRFEKISNIIKQFKLSCSKLAASFQSMEVRNSNFAAFIDIFTSNTYVMVVMSDPSIPSAATLINIRNARKHFEKLERVDGPKQCLLMR

SEQ ID NO: 57253 - protein, 25 aa, Homo sapiens
LPGVEAEACTVSTLFPLPSFFRTMK

SEQ ID NO: 57254 - protein, 171 aa, Homo sapiens
MGWRSFTNVNSRMLYFAPDLVFNEYRMHKSRMYSQCVRMRHLSQEFGWLQITPQEFLCMKALLLFSIIPVDGLKNQKFFDELRMNYIKELDRIIACKRKNPTSCSRRFYQLTKLLDSVQPIARELHQFTFDLLIKSHMVSVDFPEMMAEIISVQVPKILSGKVKPIYFHTQ

SEQ ID NO: 57255 - protein, 218 aa, Homo sapiens
LFAGLSDISISQDIPVEGEITIPMRSRIREFDSSTLNESVRNTIMRDLKAVGKKFMHVLYPRKSNTLLRDWDLWGPLILCVTLALMLQRDSADSEKDGGPQFAEVFVIVWFGAVTITLNSKLLGGNISFFQSLCVLGYCILPLTVAMLICRLVLLADPGPVNFMVRLFVVIVMFAWSIVASTAFLADSQPPNRRALAVYPVFLFYFVISWMILTFTPQ

SEQ ID NO: 57256 - protein, 19 aa, Homo sapiens
LARSAASPRSSKYTEQGPR

SEQ ID NO: 57257 - protein, 315 aa, Homo sapiens
LEPVSWSSLNPKFLSGKGLVIYPKIGDKLDIICPRAEAGRPYEYYKLYLVRPEQAAACSTVLDPNVLVTCNRPEQEIRFTIKFQEFSPNYMGLEFKKHHDYYITSTSNGSLEGLENREGGVCRTRTMKIIMKVGQDPNAVTPEQLTTSRPSKEADNTVKMATQAPGSRGSLGDSDGKHETVNQEEKSGPGASGGSSGDPDGFFNSKVALFAAVGAGCVIFLLIIIFLTVLLLKLRKRHRKHTQQRAAALSLSTLASPKGGSGTAGTEPSDIIIPLRTTENNYCPHYEKVSGDYGHPVYIVQEMPPQSPANIYYKV

SEQ ID NO: 57258 - protein, 12 aa, Homo sapiens
KDVNFEFPEFQL

SEQ ID NO: 57259 - protein, 180 aa, Homo sapiens
ISSVDPQFLKLTKVDDQIYSEFRKNFETLRIDVLDPEELKSESAKEKWRPFCLKFNGIVEDFNYGTLLRLDCSQGYTEENTIFAPRIQFFAIEIARNREGYNKAVYISVQDKEGEKGVNNGGEKRADSGEEENTKNGGEKGADSGEEKEEGINREDKTDKGGEKGKEADKEINKSGEKAM

SEQ ID NO: 57260 - protein, 482 aa, Homo sapiens [sequence omitted]

SEQ ID NO: 57261 - protein, 93 aa, Homo sapiens
KWSWTICHSVESSCVCALPAIVHPLQFETFLRNESSHPDLHSLAPLSMNMPCAGRHSLRWRSSSRTKWTATSRRLVRSWRWRWKLHAMSTRSC

SEQ ID NO: 57262 - protein, 115 aa, Homo sapiens
RMVIRVYIASSSGSTAIKKKQQDVLGFLEANKIGFEEKDIAANEENRKWMRENVPENSRPATGYPLPPQIFNESQYRGDYDAFFEARENNAVYAFLGLTAPPGSKEAEVQAKQQA

SEQ ID NO: 57263 - protein, 1064 aa, Homo sapiens
VAAAGPITSFLLSLEKLQMASSVGNVADSTEPTKRMLSFQGLAELAHREYQAGDFEAAERHCMQLWRQEPDNTGVLLLLSSIHFQCRRLDRSAHFSTLAIKQNPLLAEAYSNLGNVYKERGQLQEAIEHYRHALRLKPDFIDGYINLAAALVAAGDMEGAVQAYVSALQYNPDLYCVRSDLGNLLKALGRLEEAKACYLKAIETQPNFAVAWSNLGCVFNAQGEIWLAIHHFEKAVTLDPNFLDAYINLGNVLKEARIFDRAVAAYLRALSLSPNHAVVHGNLACVYYEQGLIDLAIDTYRRAIELQPHFPDAYCNLANALKEKGSVAEAEDCYNTALRLCPTHADSLNNLANIKREQGNIEEAVRLYRKALEVFPEFAAAHSNLASVLQQQGKLQEALMHYKEAIRISPTFADAYSNMGNTLKEMQDVQGALQCYTRAIQINPAFADAHSNLASIHKDSGNIPEAIASYRTALKLKPDFPDAYCNLAHCLQIVCDWTDYDERMKKLVSIVADQLEKNRLPSVHPHHSMLYPLSHGFRKAIAERHGNLCLDKINVLHKPPYEHPKDLKLSDGRLRVGYVSSDFGNHPTSHLMQSIPGMHNPDKFEVFCYALSPDDGTNFRVKVMAEANHFIDLSQIPCNGKAADRIHQDGIHILVNMNGYTKGARNELFALRPAPIQAMWLGYPGTSGALFMDYIITDQETSPAEVAEQYSEKLAYMPHTFFIGDHANMFPHLKKKAVIDFKSNGHIYDNRIVLNGIDLKAFLDSLPDVKIVKMKCPDGGDNADSSNTALNMPVIPMNTIAEAVIEMINRGQIQITINGFSISNGLATTQINNKAATGEEVPRTIIVTTRSQYGLPEDAIVYCNFNQLYKIDPSTLQMWANILKRVPNSVLWLLRFPAVGEPNIQQYAQNMGLPQNRIIFSPVAPKEEHVRRGQLADVCLDTPLCNGHTTGMDVLWAGTPMVTMPGETLASRVAASQLTCLGCLELIAKNRQEYEDIAVKLGTDLEYLKKVRGKVWKQRISSPLFNTKQYTMELERLYLQMWEHYAAGNKPDHMIKPVEVTESA

SEQ ID NO: 57264 - protein, 79 aa, Homo sapiens
KKFVIRNIVEAAAVRDISEVSVFDAYVLPKLYVKLHYCVSCAIHSKVVRNRSREACKDRTPPPRFRPAGAAPRPPPKPM

SEQ ID NO: 57265 - protein, 176 aa, Homo sapiens
LERDIKKFPQAENQHDKFVEKMTSFTKTAREQYEKLSTMHNNMMKLYENLGEYFIFDSKTVSIEEFFGDLNNFRTLFLEAVRENNKRREMEEKTRRAKLAKEKAEQEKLERQKKKKQLIDINKEGDETGVMDNLLEALQSGAAFRDRRKRIPRNPDNRRVPLERSRSRHNGAISSK

SEQ ID NO: 57266 - protein, 5 aa, Homo sapiens
LMADF

SEQ ID NO: 57267 - protein, 36 aa, Homo sapiens
MQVLQLTADQIAMLPPEQRQSILILKEQIQKSTGAP

SEQ ID NO: 57268 - protein, 124 aa, Homo sapiens
IQRRISKKEKKEGREVDRYKMKSCQKMEGKPENESEPKHEEEPKPEEKPEEEEKLEEEAKAKGTFRERLIQSLQEFKEDIHNRHLSNEDMFREVDEIDEIRRVRNKLIVMRWKVNRNHPYPYLM

SEQ ID NO: 57269 - protein, 21 aa, Homo sapiens
ILKLWKPTFLATIEVSPEQKR

SEQ ID NO: 57270 - protein, 51 aa, Homo sapiens
LGLLDRIVNYSRASINSLLSDKRSLNSVVTSEPDKHSLLVGDFREDDDTAL

SEQ ID NO: 57271 - protein, 58 aa, Homo sapiens
INFQFKTKAKLFTKEKFTKSELISIFQEAKQFGQKLQDLAEHSDPEVRDKVIRLILKL

SEQ ID NO: 57272 - protein, 14 aa, Homo sapiens
LSRTKSSCLRAGPQ

SEQ ID NO: 57273 - protein, 438 aa, Homo sapiens
IGAGACYCVYRLAWGRDENEKIWDEDEESTDTSEIGVETVKGAKTNAGAGSGAKLQGDSEVKPEVSLGLEDCPGVKEKAHSGSHSGGGLEAKAKALFNTLKEQASAKAGKGARVGTISGNRTLAPSLPCPGGRGGGCHPTRSGSRAGGRASGKSKGKARSKSTRAPATTWPVRRGKFNFPYKIDDILSAPDLQKVLNILERTNDPFIQEVALVTLGNNAAYSFNQNAIRELGGVPIIAKLIKTKDPIIREKTYNALNNLSVNAENQGKIKTYISQVCDDTMVCRLDSAVQMAGLRLLTNMTVTNHYQHLLSYSFPDFFALLFLGNHFTKIQIMKLIINFTENPAMTRELVSCKVPSELISLFNKEWDREILLNILTLFENINDNIKNEGLASSRKEFSRSSLFFLFKESGVCVKKIKALANHNDLVVKVKVLKVLTKL

SEQ ID NO: 57274 - protein, 147 aa, Homo sapiens
ITKRGLENRAHSEQFNAFFRLPKGESLKEVHECFLWVPFSHFNTHGKMCISENYICFASQDGNQCSVIIPLREVLAIDKTNDSSKSVIISIKGKTAFRFHEVKDFEQLVAKLRLRCGAASTQYHDISTEVINYTAIKSFGKKGVCLV

SEQ ID NO: 57275 - protein, 35 aa, Homo sapiens
LLNEPALVRFFEKPIDVKAKLENARISQLRSRTKM

SEQ ID NO: 57276 - protein, 104 aa, Homo sapiens
RYKDSLKEDIQKADLVISHAGAGSCLETLEKGKPLVVVINEKLMNNHQLELAKQLHKEGHLFYCTCSTLPGLLQSMDLSTLKCYPPGQPEKFSAFLDKVVGLQK

SEQ ID NO: 57277 - protein, 112 aa, Homo sapiens
IMANIHQENEEMEQPMQNGEEDRPLGGGEGHQPAGNRRGQARRLAPNFRWAIPNRQINDGMGGDGDDMEIFMEEMREIRRKLRELQLRNCLRILMGELSNHHDHHDEFCLMP

SEQ ID NO: 57278 - protein, 30 aa, Homo sapiens
LRSLKRRSNLSRIPAGQEKEGKSRHGKTLQ

SEQ ID NO: 57279 - protein, 223 aa, Homo sapiens
RKRRGNLDMEKLYSENEGMASNQGKMENEEQPQDERKPEVTCTLEDKKLENEGKTENKGKTGDEEMLKDKGKPESEGEAKEGKSEREGESEMEGGSEREGKPEIEGKPESEGEPGSETRAAGKRPAEDDVPRKAKRKTNKGLAHYLKEYKEAIHDMNFSNEDMIREFDNMAKVQDEKRKSKQKLGAFLWMQRNLQDPFYPRGPREFRGGCRAPRRDIEDIPYV

SEQ ID NO: 57280 - protein, 162 aa, Homo sapiens
IPNMDKPRKENEEEPQSAPKTDEERPPVEHSPEKQSPEEQSSEEQSSEEEFFPEELLPELLPEMLLSEERPPQEGLSRKDLFEGRPPMEQPPCGVGKHKLEEGSFKERLARSRPQFRGDIHGRNLSNEEMIQAADELEEMKRVRNKLMIMHWKAKRSRPYPI

SEQ ID NO: 57281 - protein, 82 aa, Homo sapiens
MFFYHFSVLQILGLVTEVNLNNMLCPAISDPFYGPWYRIWASGHQTLMTMTHGKLVILFSYMAGPLCKYLLDLLRLPAKKID

SEQ ID NO: 57282 - protein, 30 aa, Homo sapiens
IMKTDNTEVLLSADFTGAIKVFVNKRKNVS

SEQ ID NO: 57283 - protein, 73 aa, Homo sapiens
LTANLLKIVPYFGIMFSTFEFCKRICLYQNGYILSPLSYKLTPGVDQSLQPQELRELKKFFKTRKPKPKKPTL

SEQ ID NO: 57284 - protein, 256 aa, Homo sapiens
KQITADKQYKGIIDCVVRIPKEQGVLSFWRGNLANVIRYFPTQALNFAFKDKYKQIFLGGVDKRTQFWLYFAGNLASGGAAGATSLCFVYPLDFARTRLAADVGKAGAEREFRGLGDCLVKIYKSDGIKGLYQGFNVSVQGIIIYRAAYFGIYDTAKGMLPDPKNTHIVISWMIAQTVTAVAGLTSYPFDTVRRRMMMQSGRKGTDIMYTGTLDCWRKIARDEGGKAFFKGAWSNVLRGMGGAFVLVLYDEIKKYT

SEQ ID NO: 57285 - protein, 176 aa, Homo sapiens
IVCKRSYVCLTSLRRHFNIHSWEKKYPCRYCEKVFPLAEYRTKHEIHHTGERRYQCLACGKSFINYQFMSSHIKSVHSQDPSGDSKLYRLHPCRSLQIRQYAYLSDRSSTIPAMKDDGIGYKVDTGKEPPVGTTTSTQNKPMTWEDIFIQQENDSIFKQNVTDGSTEFEFIIPESY

SEQ ID NO: 57286 - protein, 38 aa, Homo sapiens
LATKAARKSAPSTGGVKKPHRYRPGTVALREIRRSEVH

SEQ ID NO: 57287 - protein, 36 aa, Homo sapiens
LDPGSEETQMLVREYFSWEGAFQHVGKPFNQGKIFK

SEQ ID NO: 57288 - protein, 502 aa, Homo sapiens
VADREDDPNFFKMVEGFFDRGASIVEDKLVKDLRTQESEEQKRNRVRGILRIIKPCNHVLSLSFPIRRDDGSWEVIEGYRAQHSQHRTPCKGGIRYSTDVSVDEVKALASLMTYKCAVVDVPFGGAKAGVKINPKNYTENELEKITRRFTMELAKKGFIGPGVDVPAPDMNTGEREMSWIADTYASTIGHYDINAHACVTGKPISQGGIHGRISATGRGVFHGIENFINEASYMSILGMTPGFRDKTFVVQGFGNVGLHSMRYLHRFGAKCIAVGESDGSIWNPDGIDPKELEDFKLQHGSILGFPKAKPYEGSILEVDCDILIPAATEKQLTKSNAPRVKAKIIAEGANGPTTPEADKIFLERNILVIPDLYLNAGGVTVSYFEWLKNLNHVSYGRLTFKYERDSNYHLLLSVQESLERKFGKHGGTIPIVPTAEFQDSISGASEKDIVHSALAYTMERSARQIMHTAMKYNLGLDLRTAAYVNAIEKVFKVYSEAGVTFT

SEQ ID NO: 57289 - protein, 329 aa, Homo sapiens
VWCYPSTTATLRNLLLRKCCLTDENKLLHPFVFGQYRRTWFYITIIEVPDSSILKKVTHFSIVLTAKDFNPEKYAAFTRILCRMYLKHGSPVKMMESYIAVLTKGICQSEENGSFLSKDFDARKAYPAGSIKDIVSQFGMETVILHTALMLKKRIVVYHPKIEAVQEFTRTLPALVWHRQDWTILHSYVHLNADELEALQMCTGYVAGFVDLEVSNRPDLYDVFVNLAESEITIAPLAKEAMAMGKLHKEMGQLIVQSAEDPEKSESQVIQDIALKTREIFTNLAPFSEVSADGEKRVLNLEALKQKRFPPATENFLYHLAAAEQMLKI

SEQ ID NO: 57290 - protein, 87 aa, Homo sapiens [sequence omitted]

SEQ ID NO: 57291 - protein, 451 aa, Homo sapiens
LARAGFLYTGEGDTVRCFSCHAAVDRWQYGDSAVGRHRKVSPNCRFINGFYLENSATQSTNSGIQNGQYKVENYLGSRDHFALDRPSETHADYLLRTGQVVDISDTIYPRNPAMYSEEARLKSFQNWPDYAHLTPRELASAGLYYTGIGDQVQCFCCGGKLKNWEPCDRAWSEHRRHFPNCFFVLGRNLNIRSESDAVSSDRNFPNSTNLPRNPSMADYEARIFTFGTWIYSVNKEQLARAGFYALGEGDKVKCFHCGGGLTDWKPSEDPWEQHAKWYPGCKYLLEQKGQEYINNIHLTHSLEECLVRTTEKTPSLTRRIDDTIFQNPMVQEAIRMGFSFKDIKKIMEEKIQISGSNYKSLEVLVADLVNAQKDSMQDESSQTSLQKEISTEEQLRRLQEEKLCKICMDRNIAIVFVPCGHLVTCKQCAEAVDKCPMCYTVITFKQKIFMS

SEQ ID NO: 57292 - protein, 277 aa, Homo sapiens
RRHFPNCFFVLGRNLNIRSESDAVSSDRNFPNSTNLPRNPSMADYEARIFTFGTWIYSVNKEQLARAGFYALGEGDKVKCFHCGGGLTDWKPSEDPWEQHAKWYPGCKYLLEQKGQEYINNIHLTHSLEECLVRTTEKTPSLTRRIDDTIFQNPMVQEAIRMGFSFKDIKKIMEEKIQISGSNYKSLEVLVADLVNAQKDSMQDESSQTSLQKEISTEEQLRRLQEEKLCKICMDRNIAIVFVPCGHLVTCKQCAEAVDKCPMCYTVITFKQKIFMS

SEQ ID NO: 57293 - protein, 31 aa, Homo sapiens
ISGQHLVAVEEDAESEDEEEEDVKLLSISGK

SEQ ID NO: 57294 - protein, 29 aa, Homo sapiens
LYRDAERQQGKVQKLEFPQEANSKTSCPC

SEQ ID NO: 57295 - protein, 55 aa, Homo sapiens
VHHFMELCWDKCVEKPGNRLDSCTENCLSSCVDHFIDTTLAITSRFAQIVQKGGQ

SEQ ID NO: 57296 - protein, 157 aa, Homo sapiens
IVALCVLKGGYKFFADLLDYIKALNRNSDRSIPMTVDFIRLKSYCNDQSTGDIKVIGGDDLSTLTGKNVLIVEDIIDTGKTMQTLLSLVRQYNPKMVKVASLLVKRTPRSVGYKPDFVGFEIPDKFVVGYALDYNEYFRDLNHVCVISETGKAKYKA

SEQ ID NO: 57297 - protein, 55 aa, Homo sapiens
LSRPQGTRGSYGAFCKTLTRTLLTFFDLAWRLRKNFFYFYILASVILNVHLQVYI

SEQ ID NO: 57298 - protein, 7 aa, Homo sapiens
KGQVIQF

SEQ ID NO: 57299 - protein, 76 aa, Homo sapiens
IAGLVDIGETLQCPEDLTPDEVVELENQAVLTNLKQKYLTVISNPRWLLEPIPRKGGKDVFQVDIPEHLIPLGHEV

SEQ ID NO: 57300 - protein, 62 aa, Homo sapiens
MAFLRELLKFSEYNSVNANMIATLFTSLLLRPPPNLMARQTPSDRQRAIQFLLGFLLGSEED

SEQ ID NO: 57301 - protein, 148 aa, Homo sapiens
VDLTLPGWGEWGGVGLKPSAKKRRRFLIKAPEGPPRKDKNLPNVIINEKRNIHAAAHQVRVLPYPFTHHWQFERTIQTPIGSTWNTQRAFQKLTTPKVVTKPGHIINPIKAEDVGYRSSSRSDLSVIQRNPKRITTRHKKQLKKCSVD

SEQ ID NO: 57302 - protein, 23 aa, Homo sapiens
KETGFHRGLGWVQFSSEELQNAL

SEQ ID NO: 57303 - protein, 30 aa, Homo sapiens
MEPKVRLWGFQLVEELRSLQLQGGHHGGEV

SEQ ID NO: 57304 - protein, 284 aa, Homo sapiens
KVGTMAEKFDCHYCRDPLQGKKYVQKDGHHCCLKCFDKFCANTCVECRKPIGADSKEVHYKNRFWHDTCFRCAKCLHPLANETFVAKDNKILCNKCTTREDSPKCKGCFKAIVAGDQNVEYKGTVWHKDCFTCSNCKQVIGTGSFFPKGEDFYCVTCHETKFAKHCVKCNKAITSGGITYQDQPWHADCFVCVTCSKKLAGQRFTAVEDQYYCVDCYKNFVAKKCAGCKNPITGFGKGSSVVAYEGQSWHDYCFHCKKCSVNLANKRFVFHQEQVYCPDCAKKL

SEQ ID NO: 57305 - protein, 710 aa, Homo sapiens
TDTPYEWDLDKKAWFPKITEDFIATYQANYGFSNDGASSSTANVEDVHARTAEEPPQEKAPEPTDARKKGEKRKAESGWFHVEEDRNTNVYVSGLPPDITVDEFIQLMSKFGIIMRDPQTEEFKVKLYKDNQGNLKGDGLCCYLKRESVELALKLLDEDEIRGYKLHVEVAKFQLKGEYDASKKKKKCKDYKKKLSMQQKQLDWRPERRAGPSRMRHERVVIIKNMFHPMDFEDDPLVLNEIREDLRVECSKFGQIRKLLLFDRHPDGVASVSFRDPEEADYCIQTLDGRWFGGRQITAQAWDGTTDYQVEETSREREERLRGWEAFLNAPEANRGLRRSDSVSASERAGPSRARHFSEHPSTSKMNAQETATGMAFEEPIDEKKFEKTEDGGEFEEGASENNAKESSPEKEAEEGCPEKESEEGCPKRGFEGSCSQKESEEGNPVRGSEEDSPKKESKKKTLKNDCEENGLAKESEDDLNKESEEEVGPTKESEEDDSEKESDEDCSEKQSEDGSEREFEENGLEKDLDEEGSEKELHENVLDKELEENDSENSEFEDDGSEKVLDEEGSEREFDEDSDEKEEEEDTYEKVFDDESDEKEDEEYADEKGLEAADKKAEEGDADEKLFEESDDKEDEDADGKEVEDADEKLFEDDDSNEKLFDEEEDSSEKLFDDSDERGTLGGFGSVEEGPLSTGSSFILSSDDDDDDI

SEQ ID NO: 57306 - protein, 384 aa, Homo sapiens
LITNGTIFCFEMEPAVSEPMRDQVARTHLTEDTPKVNADIEKVNQNQAKRCTVIGGSGFLGQHMVEQLLARGYAVNVFDIQQGFDNPQVRFFLGDLCSRQDLYPALKGVNTVFHCASPPPSSNNKELFYRVNYIGTKNVIETCKEAGVQKLILTSSASVIFEGVDIKNGTEDLPYAMKPIDYYTETKILQERAVLGANDPEKNFLTTAIRPHGIFGPRDPQLVPILIEAARNGKMKFVIGNGKNLVDFTFVENVVHGHILAAEQLSRDSTLGGKAFHITNDEPIPFWTFLSRILTGLNYEAPKYHIPYWVAYYLALLLSLLVMVISPVIQLQPTFTPMRVALAGTFHYYSCERAKKAMGYQPLVTMDDAMERTVQSFRHLRRVK

SEQ ID NO: 57307 - protein, 8 aa, Homo sapiens
MLCWSSSS

SEQ ID NO: 57308 - protein, 170 aa, Homo sapiens
MASLGALALLLLSSLSRCSAEACLEPQITPSYYTTSDAVISTETVFIVEISLTCKNRVQNMALYADVGGKQFPVTRGQDVGRYQVSWSLDHKSAHAGTYEVRFFDEESYSLLRKAQRNNEDISIIPPLFTVSVDHRGTWNGPWVSTEVLAAAIGLVIYYLAFSAKSHIQA

SEQ ID NO: 57309 - protein, 64 aa, Homo sapiens
VLSCLGFVVLKLCDHQLARWRLFQCLTGHFWSKVCDVLQFHFAFLFLTHFNTHPRFHPSGGKTR

SEQ ID NO: 57310 - protein, 423 aa, Homo sapiens
INLDKPSNPSSHEVVAWIRRILRVEKTGHSGTLDPKVTGCLIVCIERATRLVKSQQSAGKEYVGIVRLHNAIEGGTQLSRALETLTGALFQRPPLIAAVKRQLRVRTIYESKMIEYDPERRLGIFWVSCEAGTYIRTLCVHLGLLLGVGGQMQELRRVRSGVMSEKDHMVTMHDVLDAQWLYDNHKDESYLRRVVYPLEKLLTSHKRLVMKDSAVNAICYGAKIMLPGVLRYEDGIEVNQEIVVITTKGEAICMAIALMTTAVISTCDHGIVAKIKRVIMERDTYPRKWGLGPKASQKKLMIKQGLLDKHGKPTDSTPATWKQEYVDYSESAKKEVVAEVVKAPQVVAEAAKTAKRKRESESESDETPPAAPQLIKKEKKKSKKDKKAKAGLESGAEPGDGDSDTTKKKKKKKKAKEVELVSE

SEQ ID NO: 57311 - protein, 86 aa, Homo sapiens
KLLPEHAQTLEKYSWEAFDSHGQESSGQLPEELFLLLQSLVMATHEKDTEAIKSLQVEMWPLLTAEQNHLLHLVLQETISPSGQGV

SEQ ID NO: 57312 - protein, 5 aa, Homo sapiens
LGLQA

SEQ ID NO: 57313 - protein, 86 aa, Homo sapiens; identical to SEQ ID NO: 57311

SEQ ID NO: 57314 - protein, 10 aa, Homo sapiens
LQIHVMECIE

SEQ ID NO: 57315 - protein, 39 aa, Homo sapiens
LYKEATVQEVDVIPEDGAADVRVIISNSAYGKFRKLFPG

SEQ ID NO: 57316 - protein, 48 aa, Homo sapiens
VEAALAAGMQVVMVPDGNLSRDLTTKATLVLNSLQDFQPELFGLPSYE

SEQ ID NO: 57317 - protein, 66 aa, Homo sapiens
LDISPQDKGQLDLYVNIAKQDIMLSLANLVRLNQALFPPSKRKMESLYQCGFDDTVKFLLKENWFE

SEQ ID NO: 57318 - protein, 25 aa, Homo sapiens
ILGKMGKLIADQLPWVLLMTQESFA

SEQ ID NO: 57319 - protein, 37 aa, Homo sapiens
KHLARLGMHVIIAGNNDSKAKQVVSKIKEETLNDKET

SEQ ID NO: 57320 - protein, 20 aa, Homo sapiens
LQQQLWSKSCEMTGVLDVTL

SEQ ID NO: 57321 - protein, 114 aa, Homo sapiens
TEYGPSVTSIPVIVIAYPPRITSEPTPVIYTRPGNTVKLNCMAMGIPKADITWELPDKSHLKAGVQARLYGNRFLHPQGSLTIQHATQRDAGFYKCMAKNILGSDSKTTYIHVF

SEQ ID NO: 57322 - protein, 15 aa, Homo sapiens
MPFETIFSSCLMSTA

SEQ ID NO: 57323 - protein, 357 aa, Homo sapiens
IFKMYREWVVVNVFMMLYVQLVQGSSNEHGPVKRSSQSTLERSEQQIRAASSLEELLRITHSEDWKLWRCRLRLKSFTSMDSRSASHRSTRFAATFYDIETLKVIDEEWQRTQCSPRETCVEVASELGKSTNTFFKPPCVNVFRCGGCCNEESLICMNTSTSYISKQLFEISVPLTSVPELVPVKVANHTGCKCLPTAPRHPYSIIRRSIQIPEEDRCSHSKKLCPIDMLWDSNKCKCVLQEENPLAGTEDHSHLQEPALCGPHMMFDEDRCECVCKTPCPKDLIQHPKNCSCFECKESLETCCQKHKLFHPDTCSCEDRCPFHTRPCASGKTACAKHCRFPKEKRAAQGPHSRKNP

SEQ ID NO: 57324 - protein, 70 aa, Homo sapiens
VSTKNFSFKREDSVLQGYDINSQGEESMGNAEPLRKPIKNRSIKLKKVNSQEIHMLPIKKQRLATFFPRK

SEQ ID NO: 57325 - protein, 63 aa, Homo sapiens
VENKDPKRSHFVLIAGEPLREPVIQHGPFVMNTNEEISQAILDFRNAKNGFERAKTWKSKIGN

SEQ ID NO: 57326 - protein, 29 aa, Homo sapiens
LAQLADPWQKMAVESPSDSAEDYIFILEI

SEQ ID NO: 57327 - protein, 196 aa, Homo sapiens
ILYVDESGNPESIRICDFGFAKQLRAENGLLMTPCYTANFVAPEVLKRQGYDAACDIWSLGVLLYTMLTGYTPFANGPDDTPEEILARIGSGKFSLSGGYWNSVSDTAKDLVSKMLHVDPHQRLTAALVLRHPWIVHWDQLPQYQLNRQDAPHLVKGAMAATYSALNRNQSPVLEPVGRSTLAQRRGIKKITSTAL

SEQ ID NO: 57328 - protein, 140 aa, Homo sapiens
IWSLGVLLYTMLTGYTPFANGPDDTPEEILARIGSGKFSLSGGYWNSVSDTAKDLVSKMLHVDPHQRLTAALVLRHPWIVHWDQLPQYQLNRQDAPHLVKGAMAATYSALNRNQSPVLEPVGRSTLAQRRGIKKITSTAL

SEQ ID NO: 57329 - protein, 458 aa, Homo sapiens
KKVKGVGFGDIFKDKPIKLRPRSIEVENDFLPVEKTIGKKLPATTATPDSSKTEMDSRTKSKDYCKVIFPYEAQNDDELTIKEGDIVTLINKDCIDVGWWEGELNGRRGVFPDNFVKLLPPDFEKEGNRPKKPPPPSAPVIKQGAGTTERKHEIKKIPPERPEMLPNRTEEKERPEREPKLDLQKPSVPAIPPKKPRPPKTNSLSRPGALPPRRPERPVGPLTHTRGDSPKIDLAGSSLSGILDKDLSDRSNDIDLEGFDSVVSSTEKLSHPTTSRPKATGRRPPSQSLTSSSLSSPDIFDSPSPEEDKEEHISLAHRGVDASKKTSKTVTISQVSDNKASLPPKPGTMAAGGGGPAPLSSAAPSPLSSSLGTAGHRANSPSLFGTEGKPKMEPAASSQAAVEELRTQVRELRSIIETMKDQQKREIKQLLSELDEEKKIRLRLQMEVNDIKKALQSK

SEQ ID NO: 57330 - protein, 77 aa, Homo sapiens
INQWTASIVEQSLTHLVKLGKAYKYIVTCAVVQKSAYGFHTASSCFWDTTSDGTCTVRWENRTMNCIVNVFAIAIVL

SEQ ID NO: 57331 - protein, 153 aa, Homo sapiens
LALCLDLGAVLSPAWVTADHQYYLSLWESCRKPASLDIWHCESTLSSDWQIATLALLLGGAAIILIAFLVGLISICVGSRRRFYRPVAVMLFAAVVLQVCSLVLYPIKFIETVSLKIYHEFNWGYGLAWGATIFSFGGAILYCLNPKNYEDYY

SEQ ID NO: 57332 - protein, 110 aa, Homo sapiens
RNNGRAKKGRGHVQPIRCTKCARCVPKDKAIKKFVIRNIVEAAAIRDISEASVFDAYVLPKLYVKLHYCVSCAIHSKVVRNRSREARKDRTPPPRFRPAGAAPRPPPKPM

SEQ ID NO: 57333 - protein, 15 aa, Homo sapiens
LDSQEPGRQTPDRKA

SEQ ID NO: 57334 - protein, 89 aa, Homo sapiens
LFQKVGKLAATAVGGGFLLLQIASHSGYVQIDWKRVEKDVNKAKRQIKKRANKAAPEINNLIEEATEFIKQNIVISSGFVGGFLLGLAS

SEQ ID NO: 57335 - protein, 96 aa, Homo sapiens
LKSKMLFFLQLTQKTSVPPQEPVSIIVPIIYDMASGTTQQADIPRQQNSSVAAPMMVSNILKRFAEMNPPRQGECTIFAAVRDLMANLTLPPGGRP

SEQ ID NO: 57336 - protein, 110 aa, Homo sapiens
VTGRCGSVLVRLIPAPRGTGIVSAPVPKKLLMMAGIDDCYTSARGCTATLGNFAKATFDAISKTYSYLTPDLWKETVFTKSPYQEFTDHLVKTHTRVSVQRTQAPAVATT

SEQ ID NO: 57337 - protein, 33 aa, Homo sapiens
KISRLDAELVKYKDQIKKMREGPAKSMVKQKAS

SEQ ID NO: 57338 - protein, 141 aa, Homo sapiens
VLRYETFISDVLQRDLRKVLDHRDKVYEQLAKYLQLRNVIERLQEAKHSELYMQVDLGCNFFVDTVVPDTSRIYVALGYGFFLELTLAEALKFIDRKSSLLTELSNSLTKDSMNIKAHIHMLLEGLRELQGLQNFPEKPHH

SEQ ID NO: 57339 - protein, 29 aa, Homo sapiens
LRVGIPKETPALTINRLCGSGFQSTVNRC

SEQ ID NO: 57340 - protein, 94 aa, Homo sapiens
KLGSDIKLEDSLWIGLTDQHVQLPMAMTAENLAVKHKISREECDKYGLQSQQRWKAANDAGYFNDEMAPIEVKTKKGKQTMQVDEHAGPQTTLE

SEQ ID NO: 57341 - protein, 54 aa, Homo sapiens
ISKTNVNGGAIALGHPLGGSGLVDELRRRGGKYAVGSACIGGGQGIAVIIQSTA

SEQ ID NO: 57342 - protein, 134 aa, Homo sapiens
LAHIGIRHRLRGSANAVRIRAPQIGGSFAVWGGLFSTIDCGLVRLRGKEDPWNSITSGALTGAVLAARSGPLAMVGSAMMGGILLALIEGVGILLTRYTAQQFRNAPPFLEDPSQLPPKDGTPAPGYPSYQQYH

SEQ ID NO: 57343 - protein, 24 aa, Homo sapiens
LSSHRGDLITEPFLPKLLTKVKGS

SEQ ID NO: 57344 - protein, 25 aa, Homo sapiens
LEKLKLGGSPTNGNSMAPSSPDSDP

SEQ ID NO: 57345 - protein, 49 aa, Homo sapiens
IQQMSPSAFGLNDWDDDEILASVLAVSQQEYLDSMKKNKVHRDPPPDKS

SEQ ID NO: 57346 - protein, 348 aa, Homo sapiens
LPAPEAAHTTGPTGSAPNSPMALLTIGSSSEKEIDDVIDEIISLESSYNDEMLSYLPGGTTGLQLPSTLPVSGNLLDVYSSQGVATPAITVSNSCPAELPNIKREISETEAKALLKERQKKDNHNLIERRRRFNINDRIKELGTLIPKSSDPEMRWNKGTILKASVDYIRKLQKEQQRSKDLESRQRSLEQANRSLQLRIQELELQAQIHGLPVPPTPGLLSLATTSASDSLKPEQLDIEEEGRPGAATFHVGGGPAQNAPHQQPPAPPSDALLDLHFPSDHLGDLGDPFHLGLEDILMEEEEGVVGGLSGGALSPLRAASDPLLSSVSPAVSKASSRRSSFSMEEES

SEQ ID NO: 57347 - protein, 187 aa, Homo sapiens
LKASVDYIRKLQKEQQRSKDLESRQRSLEQANRSLQLRIQELELQAQIHGLPVPPTPGLLSLATTSASDSLKPEQLDIEEEGRPGAATFHVGGGPAQNAPHQQPPAPPSDALLDLHFPSDHLGDLGDPFHLGLEDILMEEEEGVVGGLSGGALSPLRAASDPLLSSVSPAVSKASSRRSSFSMEEES

SEQ ID NO: 57348 - protein, 327 aa, Homo sapiens
VEPLMEKGHLDHEQVGSMGLVEMLHRSNLLALVGGGSSPKFSEISVLIWDDAREGKDSKEKLVLEFTFTKPVLSVRMRHDKIVIVLKNRIYVYSFPDNPRKLFEFDTRDNPKGLCDLCPSLEKQLLVFPGHKCGSLQLVDLASTKPGTSSAPFTINAHQSDIACVSLNQPGTVVASASQKGTLIRLFDTQSKEKLVELRRGTDPATLYCINFSHDSSFLCASSDKGTVHIFALKDTRLNRRSALARVGKVGPMIGQYVDSQWSLASFTVPAESACICAFGRNTSKNVNSVIAICVDGTFHKYVFTPDGNCNREAFDVYLDICDDDDF

SEQ ID NO: 57349 - protein, 250 aa, Homo sapiens
LGLCDLCPSLEKQLLVFPGHKCGSLQLVDLASTKPGTSSAPFTINAHQSDIACVSLNQPGTVVASASQKGTLIRLFDTQSKEKLVELRRGTDPATLYCINFSHDSSFLCASSDKGTVHIFALKDTRLNRRSAYVRPLHTLLSALVVAVALGVLVWAAETRAAVRRCRRSHPAACLAAVLAVGLLVLWVAGGACTFLFSIAGPVLLILVHASLRLRNLKNKIENKIESIGLKRTPMGLLLEALGQEQEAGS

SEQ ID NO: 57350 - protein, 37 aa, Homo sapiens
IYEIFQKLNTSIQVVLLSATMPTDVLEVTKKFMRDPI

SEQ ID NO: 57351 - protein, 15 aa, Homo sapiens
ILASLSTFQQMWISN

SEQ ID NO: 57352 - protein, 25 aa, Homo sapiens
VESDMQLDGGDCVVWKKIQLKFARK

SEQ ID NO: 57353 - protein, 18 aa, Homo sapiens
LDQINVIEEQVAALEQTA

SEQ ID NO: 57354 - protein, 85 aa, Homo sapiens
MNFNMSSSRGPLPVKRGPPPRSGGLPPKRSAPSGPVRSSSGMGGRAPVSRGRDSYRGPPRRESLPSCRELHLHEGAPILWWKQSL

SEQ ID NO: 57355 - protein, 51 aa, Homo sapiens
LLGKDVLFLKDCVGPEVEKACANPAAGSVILLENLHFHVEEEGKGKLWEQG

SEQ ID NO: 57356 - protein, 33 aa, Homo sapiens
VKITLPIDFVTAEKFDENAKTGQATVASGIPAG

SEQ ID NO: 57357 - protein, 9 aa, Homo sapiens
RRNSLAPVP

SEQ ID NO: 57358 - protein, 33 aa, Homo sapiens
LPCHHYFHKPCVSIWLQKSGTCPVCRCMFPPPL

SEQ ID NO: 57359 - protein, 26 aa, Homo sapiens
INNKQLFGRVIKASIAIDNGRAAVFI

SEQ ID NO: 57360 - protein, 63 aa, Homo sapiens
RNQNRVPLLEGLPGTNSPFYSSPQLIRRTGRLGQRQVRRRPPVLFRLTPRQGGHRAARGRIRV

SEQ ID NO: 57361 - protein, 94 aa, Homo sapiens
LLFAIHSYKPAPFFVLDEIDAALDNTNIGKVANYIKEQSTCNFQAIVISLKEEFYTKAESLIGVYPEQGDCVISKVLTFDLTKYPDANPNPNEQ

SEQ ID NO: 57362 - protein, 247 aa, Homo sapiens
ITGGASGLGLATAERLVGQGASAVLLDLPNSGGEAQAKKLGNNCVFAPADVTSEKDVQTALALAKGKFGRVDVAVNCAGIAVASKTYNLKKGQTHTLEDFQRVLDVNLMGTFNVIRLVAGEMGQNEPDQGGQRGVIINTASVAAFEGQVGQAAYSASKGGIVGMTLPIARDLAPIGIRVMTIAPGLFGTPLLTSLPEKVCNFLASQVPFPSRLGDPAEYAHLVQAIIENPFLNGEVIRLDGAIRMQP

SEQ ID NO: 57363 - protein, 15 aa, Homo sapiens
MPHSIRNYATAEEVY

SEQ ID NO: 57364 - protein, 177 aa, Homo sapiens
VPAEEPGTFAVRVIELCSSTMTCMKGTYLVHLTCTSSKTAREDLESVVQKLFVPYTEMEIENEQVEKPRILWALYFNMRDSSDISRSCYNDLPSNVYVCSGPDCGLGNDNAVKQAETLFQEICPNEDFCPPPPNPEDIILDGDSLQPEASESSAIPEANSETFKESTNLGNLEESSE

SEQ ID NO: 57365 - protein, 279 aa, Homo sapiens
KFLAAGTHLGGTNLDFQMEQYIYKRKSDGIYIINLKRTWEKLLLTARAIVAIENPADVSVISSRNTGQRAVLKFAAATGATPIAGRFTPGTFTNQIQAAFREPRLLVVSDPRADHQPLTEASYVNLPTIALCNTDSPLHYVDIAIPCNNKGTHSVGLMWWMLAREVLRMRGTISREHPWEVMPDLYFYRDPEEIEKEEQAAAEKAMTREELQGEWTAPAPEFTATQPEVADWSEGVQVPSVPIQQFPTEDWSTQRATEDWSAAPTAQATEWVGATTDWS

SEQ ID NO: 57366 - protein, 453 aa, Homo sapiens
LLLPPLLLLLLLRVPPSRSFPGSGDSPLEDDEVGYSHPRYKDTPWCSPIKVKYGDVYCRAPQGGYYKTALGTRCDIRCQKGYELHGSSLLICQSNKRWSDKVICKQKRCPTLAMPANGGFKCVDGAYFNSRCEYYCSPGYTLKGERTVTCMDNKAWSGRPASCVDMEPPRIKCPSVKERIAEPNKLTVRVSWETPEGRDTADGILTDVILKGLPPGSNFPEGDHKIQYTVYDRAENKGTCKFRVKVRVKRCGKLNAPENGYMKCSSDGDNYGATCEFSCIGGYELQGSPARVCQSNLAWSGTEPTCAAMNVNVGVRTAAALLDQFYEKRRLLIVSTPTARNLLYRLQLGMLQQAQCGLDLRHITVVELVGVFPTLIGRIGAKIMPPALALQLRLLLRIPLYSFSMVLVDKHGMDKERYVSLVMPVALFNLIDTFPLRKEEMVLQAEMSQTCNT

SEQ ID NO: 57367 - protein, 41 aa, Homo sapiens
LVGVFPTLIGRIGAKIMPPALALQLSFITLTKLEPWILVSE

SEQ ID NO: 57368 - protein, 23 aa, Homo sapiens
MSQNHQNIPPTNTERRSKSCTIL

SEQ ID NO: 57369 - protein, 20 aa, Homo sapiens
LEQCGEFPTRMSMIGCDFRS

SEQ ID NO: 57370 - protein, 1673 aa, Homo sapiens
IMKVDRTKLKKTPTEAPADCRALIDKLKVCNDEQLLLELQQIKTWNIGKCELYHWVDLLDRFDGILADAGQTVENMSWMLVCDRPEREQLKMLLLAVLNFTALLIEYSFSRHLYSSIEHLTTLLASSDMQVVLAVLNLLYVFSKRSNYITRLGSDKRTPLLTRLQHLAESWGGKENGFGLAECCRDLHMMKYPPSATTLHFEFYADPGAEVKIEKRTTSNTLHYIHIEQLDKISESPSEIMESLTKMYSIPKDKQMLLFTHIRLAHGFSNHRKRLQAVQARLHAISILVYSNALQESANSILYNGLIEELVDVLQITDKQLMEIKAASLRTLTSIVHLERTPKLSSIIDCTGTASYHGFLPVLVRNCIQAMIDPSMDPYPHQFATALFSFLYHLASYDAGGEALVSCGMMEALLKVIKFLGDEQDQITFVTRAVRVVDLITNLDMAAFQSHSGLSIFIYRLEHEVDLCRKECPFVIKPKIQRPNTTQEGEEMETDMDGVQCIPQRAALLKSMLNFLKKAIQDPAFSDGIRHVMDGSLPTSLKHIISNAEYYGPSLFLLATEVVTVFVFQEPSLLSSLQDNGLTDVMLHALLIKDVPATREVLGSLPNVFSALCLNARGLQSFVQCQPFERLFKVLLSPDYLPAMRRRRSSDPLGDTASNLGSAVDELMRHQPTLKTDATTAIIKLLEEICNLGRDPKYICQKPSIQKADGTATAPPPRSNHAAEEASSEDEEEEEVQAMQSFNSTQQNETEPNQQVVGTEERIPIPLMDYILNVMKFVESILSNNTTDDHCQEFVNQKGLLPLVTILGLPNLPIDFPTSAACQAVAGVCKSILTLSHEPKVLQEGLLQLDSILSSLEPLHRPIESPGGSVLLRELACAGNVADATLSAQATPLLHALTAAHAYIMMFVHTCRVGQSEIRSISVNQWGSQLGLSVLSKLSQLYCSLVWESTVLLSLCTPNSLPSGCEFGQADMQKLVPKDEKAGTTQGGKRSDGEQDGAAGSMDASTQGLLEGIGLDGDTLAPMETDEPTASDSKGKSKITPAMAARIKQIKPLLSASSRLGRALAELFGLLVKLCVGSPVRQRRSHHAASTTTAPTPAARSTASALTKLLTKGLSWQPPPYTPTPRFRLTFFICSVGFTSPMLFDERKYPYHLMLQKFLCSGGHNALFETFNWALSMGGKVPVSEGLEHSDLPDGTGEFLDAWLMLVEKMVNPTTVLESPHSLPAKLPGGVQNFPQFSALRFLVVTQKAAFTCIKNLWNRKPLKVYGGRMAESMLAILCHILRGEPVIRERLSKEKEGSRGEEDTGQEEGGSRREPQVNQQQLQQLMDMGFTREHAMEALLNTSTMEQATEYLLTHPPPIMGGVVRDLSMSEEDQMMRAIAMSLGQDIPMDQRAESPEEVACRKEEEERKAREKQEEEEAKCLEKFQDADPLEQDELHTFTDTMLPGCFHLLDELPDTVYRVCDLIMTAIKRNGADYRDMILKQVVNQVWEAADVLIKAALPLTTSDTKTVSEWISQMATLPQASNLATRILLLTLLFEELKLPCAWVVESSGILNVLIKLLEVVQPCLQAAKEQKEVQTPKWITPVLLLIDFYEKTAISSKRRAQMTKYLQSNSNNWRWFDDRSGRWCSYSASNNSTIDSAWKSGETSVRFTAGRRRYTVQFTTMVQGTSAE

SEQ ID NO: 57371 - protein, 1194 aa, Homo sapiens
LDHEALSCLLVLLFVDEPKLNTSRLHRVLRNLCYHAQTRHWVIRSLLSILQRSSESELCIETPKLTTSEEKGKKSSKSCGSSSHENRPLDLLHKMESKSSNQLSWLSVSMDAALGCRTNIFQIQRSGGRKHTEKHASGGSTVHIHPQAAPVVCRHVLDTLIQLAKVFPSHFTQQRTKETNCESDRERGNKACSPCSSQSSSSGICTDFWDLLVKLDNMNVSRKGKNSVKSVPVSAGGEGETSPYSLEASPLGQLMNMLSHPVIRRSSLLTEKLLRLLSLISIALPENKVSEAQANSGSGASSTTTATSTTSTTTTTAASTTPTPPTAPTPVTSAPALVAATAISTIVVAASTTVTTPTTATTTVSISPTTKGSKSPAKVSDGGSSSTDFKMVSSGLTENQLQLSVEVLTSHSCSEEGLEDAANVLLQLSRGDSGTRDTVLKLLLNGARHLGYTLCKQIGTLLAELREYNLEQQRRAQCETLSPDGLPEEQPQTTKLKGKMQSRFDMAENVVIVASQKRPLGGRELQLPSMSMLTSKTSTQKFFLRVLQVIIQLRDDTRRANKKAKQTGRLGSSGLGSASSIQAAVRQLEAEADAIIQMVREGQRARRQQQAATSESSQSEASVRREESPMDVDQPSPSAQDTQSIASDGTPQGEKEKEERPPELPLLSEQLSLDELWDMLGECLKELEESHDQHAVLVLQPAVEAFFLVHATERESKPPVRDTRESQLAHIKDEPPPLSPAPLTPATPSSLDPFFSREPSSMHISSSLPPDTQKFLRFAETHRTVLNQILRQSTTHLADGPFAVLVDYIRVLDFDVKRKYFRQELERLDEGLRKEDMAVHVRRDHVFEDSYRELHRKSPEEMKNRLYIVFEGEEGQDAGGLLREWYMIISREMFNPMYALFRTSPGDRVTYTINPSSHCNPNHLSYFKFVGRIVAKAVYDNRLLECYFTRSFYKHILGKSVRYTDMESEDYHFYQGLVYLLENDVSTLGYDLTFSTEVQEFGVCEVRDLKPNGANILVTEENKKEYVHLVCQMRMTGAIRKQLAAFLEGFYEIIPKRLISIFTEQELELLISGLPTIDIDDLKSNTEYHKYQSNSIQIQWFWRALRSFDQADRAKFLQFVTGTSKVPLQGFAALEGMNGIQKFQIHRDDRSTDRLPSAHTCFNQLDLPAYESFEKLRHMLLLAIQECSEGFGLA

SEQ ID NO: 57372 - protein, 67 aa, Homo sapiens
IQAMHPTLAGKITGVLLEIDNSELLHMLKSPESLHSKVDEAVAVLQAHQAKETAQKAVNSATGVPTV

SEQ ID NO: 57373 - protein, 70 aa, Homo sapiens
VVREDLVAVEEIRDVSNLGIFIYQLCNNRKSFRLRRRDLLLGFNKRAIDKCWKIRHFPNEFIVETKICQE

SEQ ID NO: 57374 - protein, 26 aa, Homo sapiens
KKPGGFDISLFYRDIISMAKDEDLIL

SEQ ID NO: 57375 - protein, 40 aa, Homo sapiens
KLVINGNPITIFQERDPSKIKWGDAGAEYVMESTGVFTTM

SEQ ID NO: 57376 - protein, 69 aa, Homo sapiens
VEIVTIAEAEFYRQVSASLLFSCSKDLEAFNPESKELLDLVEFTNEIQTLLGSSVEWLHPSDLASDNYW

SEQ ID NO: 57377 - protein, 7 aa, Homo sapiens
IFKAGNR

SEQ ID NO: 57378 - protein, 318 aa, Homo sapiens
LLIVCDVPSASAQRKKEMVLSEKVSQLMEWTNKRPVIRMNGDKFRRLVKAPPRNYSVIVMFTALQLHRQCVVCKQADEEFQILANSWRYSSAFTNRIFFAMVDFDEGSDVFQMLNMNSAPTFINFPAKGKPKRGDTYELQVRGFSAEQIARWIADRTDVNIRVIRPPNYAGPLMLGLLLAVIGGLVYLRRSNMEFLFNKTGWAFAALCFVLAMTSGQMWNHIRGPPYAHKNPHTGHVNYIHGSSQAQFVAETHIVLLFNGGVTLGMVLLCEAATSDMDIGKRKIMCVAGIGLVVLFFSWMLSIFRSKYHGYPYSFLMS

SEQ ID NO: 57379 - protein, 39 aa, Homo sapiens
MDSTGEEVSLWQKMRQYPGSWAEGTLQLRSSMAKQKLGL

SEQ ID NO: 57380 - protein, 411 aa, Homo sapiens
LALVSWDIPGARALDNGLARTPTMGWLHWERFMCNLDCQEEPDSCISEKLFMEMAELMVSEGWKDAGYEYLCIDDCWMAPQRDSEGRLQADPQRFPHGIRQLANYVHSKGLKLGIYADVGNKTCAGFPGSFGYYDIDAQTFADWGVDLLKFDGCYCDSLENLADGYKHMSLALNRTGRSIVYSCEWPLYMWPFQKPNYTEIRQYCNHWRNFADIDDSWKSIKSILDWTSFNQERIVDVAGPGGWNDPDMLVIGNFGLSWNQQVTQMALWAIMAAPLFMSNDLRHISPQAKALLQDKDVIAINQDPLGKQGYQLRQGDNFEVWERPLSGLAWAVAMINRQEIGGPRSYTIAVASLGKGVACNPACFITQLLPVKRKLGFYEWTSRLRSHINPTGTVLLQLENTMQMSLKDLL

SEQ ID NO: 57381 - protein, 9 aa, Homo sapiens
VQVCRSVGL

SEQ ID NO: 57382 - protein, 470 aa, Homo sapiens
VAEAPREAETSRAAVPPGTVVPTEAAAPTEVTEGPGVAAPTKVAEAPGVASPTEAAEAPVPATPTGAAAPTGAAESPGTSGSPRTAVVPGTSAAKKATPGAHTGAIPKATSATGAVPKGGGKGVTRSRNGGKGKGKKSKVEVDELGMGFRPGDGAAAAAAASANGGQAFLAEVPDSEEGESGWTDTESDSDSEPETQRRGRGRRPVAMQKRPFPYEIDEILGVRDLRKVLALLQKSDDPFIQQVALLTLSNNANYSCNQETIRKLGGLPIIANMINKTDPHIKEKALMAMNNLSENYENQGRLQVYMNKVMDDIMASNLNSAVQVVGLKFLTNMTITNDYQHLLVNSIANFFRLLSQGGGKIKVEILKILSNFAENPDMLKKLLSTQVPASFSSLYNSYVESEILINALTLFEIIYDNLRAEVFNYREFNKGSLFYLCTTSGVCVKKIRALANHHDLLVKVKVIKLVNKF

SEQ ID NO: 57383 - protein, 68 aa, Homo sapiens
RGTDDSPKDSQEDLQERHLSSEEMMRECGDVSRAQEELRKKQKMGGFHWMQRDVQDPFAQGDNGVSGE

SEQ ID NO: 57384 - protein, 20 aa, Homo sapiens
TGSLETKYRWTEYGLTFTEK

SEQ ID NO: 57385 - protein, 51 aa, Homo sapiens
IDLFTDAIKLNPHLALLYAKRASVFVKLQKPNTAIRDCDRAIEINPDSAQP

SEQ ID NO: 57386 - protein, 104 aa, Homo sapiens
REEEARRQSGAQYGCFPGGFPGGMPGNFPGGMPGMGGGMPGMAGMPGLNEILSDPEVLAAMQDPEVMVAFQDVAQNPANMSKYQSNPKVMNLISKLSAKFGGQA

SEQ ID NO: 57387 - protein, 18 aa, Homo sapiens
TYPRQLSPYFCPPSLGAS

SEQ ID NO: 57388 - protein, 139 aa, Homo sapiens
ILPTAPRAAREPNIDRSRLPKSPPYTAFLGNLPYDVTEESIKEFFRGLNISAVRLPREPSNPERLKGFGYAEFEDLDSLLSALSLNEESLGNRRIRVDVADQAQDKDRDDRSFGRDRNRDSDKTDTDWRACPATDSFDD

SEQ ID NO: 57389 - protein, 74 aa, Homo sapiens
VAGQDGSVVQFKIKRHTPLSKLMKAYCERQGLSVRQIRFRFDGQPINETDTPAQLEMEDEDTIDVFQQQTGGVY

SEQ ID NO: 57390 - protein, 56 aa, Homo sapiens [sequence omitted]

SEQ ID NO: 57391 - protein, 52 aa, Homo sapiens
IAQKYGLKSKSHGVGHDRYLVVGRKRRKEDLLDQLKQEGQVGHYELVMPQAN

SEQ ID NO: 57392 - protein, 17 aa, Homo sapiens
LERLLGFGFVLQPSPRS

SEQ ID NO: 57393 - protein, 18 aa, Homo sapiens
KKEESEESDDDMGFGLFD

SEQ ID NO: 57394 - protein, 29 aa, Homo sapiens
LQNAQHDPLLTGVSSSTNPFRPQKVCSFL

SEQ ID NO: 57395 - protein, 30 aa, Homo sapiens
LSYAEYLAHRQHHHFQNGIGHPLPPYNHYS

SEQ ID NO: 57396 - protein, 466 aa, Homo sapiens
LSPFAVVQMRKKWKMGGMKYIFSLLFFLLLEGGKTEQVKHSETYCMFQDKKYRVGERWHPYLEPYGLVYCVNCICSENGNVLCSRVRCPNVHCLSPVHIPHLCCPRCPEDSLPPVNNKVTSKSCEYNGTTYQHGELFVAEGLFQNRQPNQCTQCSCSEGNVYCGLKTCPKLTCAFPVSVPDSCCRVCRGDGELSWEHSDGDIFRQPANREARHSYHRSHYDPPPSRQAGGLSRFPGARSHRGALMDSQQASGTIVQIVINNKHKHGQVCVSNGKTYSHGESWHPNLRAFGIVECVLCTCNVTKQECKKIHCPNRYPCKYPQKIDGKCCKVCPGKKAKEELPGQSFDNKGYFCGEETMPVYESVFMEDGETTRKIALETERPPQVEVHVWTIRKGILQHFHIEKISKRMFEELPHFKLVTRTTLSQWKIFTEGEAQISQMCSSRVCRTELEDLVKVLYLERSEKGHC

SEQ ID NO: 57397 - protein, 163 aa, Homo sapiens
VQFVTGTFIEKYDPTIEDFYRKEIEVDSSPSVLEILDTAGTEQFASMRDLYIKNGQGFILVYSLVNQQSFQDIKPMRDQIVRVKRYEKVPLILVGNKVDLEPEREVMSSEGRALAQEWGCPFMETSAKSKSMVDELFAEIVRQMNYSSLPEKQDQCCTTCVVQ

SEQ ID NO: 57398 - protein, 49 aa, Homo sapiens
IFYLRDKVVVGIVLWNIFNRMPIARKIIKDGEQHEDLNEVAKLFNIHED

SEQ ID NO: 57399 - protein, 604 aa, Homo sapiens
LPSPGTALAPAATLPRSPSSLRSRMAGTVRTACLVVAMLLSLDFPGQAQPPPPPPDATCHQVRSFFQRLQPGLKWVPETPVPGSDLQVCLPKGPTCCSRKMEEKYQLTARLNMEQLLQSASMELKFLIIQNAAVFQEAFEIVVRHAKNYTNAMFKNNYPSLTPQAFEFVGEFFTDVSLYILGSDINVDDMVNELFDSLFPVIYTQLMNPGLPDSALDINECLRGARRDLKVFGNFPKLIMTQVSKSLQVTRIFLQALNLGIEVINTTDHLKFSKDCGRMLTRMWYCSYCQGLMMVKPCGGYCNVVMQGCMAGVVEIDKYWREYILSLEELVNGMYRIYDMENVLLGLFSTIHDSIQYVQKNAGKLTTTIGKLCAHSQQRQYRSAYYPEDLFIDKKVLKVAHVEHEETLSSRRRELIQKLKSFISFYSALPGYICSHSPVAENDTLCWNGQELVERYSQKAARNGMKNQFNLHELKMKGPEPVVSQIIDKLKHINQLLRTMSMPKGRVLDKNLDEEGFESGDCGDDEDECIGGSGDGMIKVKNQLRFLAELAYDLDVDDAPGNSQQATPKDNEISTFHNLGNVHSPLKLLTSMAISVVCFFFLVH

SEQ ID NO: 57400 - protein, 1014 aa, Homo sapiens
KEKNVSSFQLKLAAKAPKSEKEMDPEYEEKMKADRAKRFEFLLKQTELFAHFIQPSAQKSPTSPLNMKLGRPRIKKDEKQSLISAGDYRHRRTEQEEDEELLSESRKTSNVCIRFEVSPSYVKGGPLRDYQIRGLNWLISLYENGVNGILADEMGLGKTLQTIALLGYLKHYRNIPGPHMVLVPKSTLHNWMNEFKRWVPSLRVICFVGDKDARAAFIRDEMMPGEWDVCVTSYEMVIKEKSVFKKFHWRYLVIDEAHRIKNEKSKLSEIVREFKSTNRLLLTGTPLQNNLHELWALLNFLLPDVFNSADDFDSWFDTKNCLGDQKLVERLHAVLKPFLLRRIKTDVEKSLPPKKEIKIYLGLSKMQREWYTKILMKDIDVLNSSGKMDKMRLLNILMQLRKCCNHPYLFDGAEPGPPYTTDEHIVSNSGKMVVLDKLLAKLKEQGSRVLIFSQMTRLLDILEDYCMWRGYEYCRLDGQTPHEEREDKFLEVEFLGQREAIEAFNAPNSSKFIFMLSTRAGGLGINLASADVVILYDSDWNPQVDLQAMDRAHRIGQKKPVRVFRLITDNTVEERIVERAEIKLRLDSIVIQQGRLIDQQSNKLAKEEMLQMIRHGATHVFASKESELTDEDITTILERGEKKTAEMNERLQKMGESSLRNFRMDIEQSLYKFEGEDYREKQKLGMVEWIEPPKRERKANYAVDAYFREALRVSEPKIPKAPRPPKQPNVQDFQFFPPRLFELLEKEILYYRKTIGYKVPRNPDIPNPALAQREEQKKIDGAEPLTPEETEEKEKLLTQGFTNWTKRDFNQFIKANEKYGRDDIDNIAREVEGKSPEEVMEYSAVFWERCNELQDIEKIMAQIERGEARIQRRISIKKALDAKIARYKAPFHQLRIQYGTSKGKNYTEEEDRFLICMLHKMGFDRENVYEELRQCVRNAPQFRFDWFIKSRTAMEFQRRCNTLISLIEKENMEIEERERAEKKKRATKTPMSQKRKAESATESSGKKDVKKVKS

SEQ ID NO: 57401 - protein, 105 aa, Homo sapiens
KALLAGPLRPAARRWRNPIPFPETFDGDTDRLPEFIVQTSSYMFVDENTFSNDALKVTFLITRLTGPALQWVIPYIRKESPLLNDYRGFLAEMKRVFGWEEDEDF

SEQ ID NO: 57402 - protein, 60 aa, Homo sapiens
RNPIPFPETFDGDTDRLPEFIVQTSSYMFVDENTFSNDALKTYATTAIAIHRISPTDCGS

SEQ ID NO: 57403 - protein, 139 aa, Homo sapiens
LGCCSFGIMAPSLWKGLVGIGLFALAHAAFSAAQHRSYMRLTEKEDESLPIDIVLQTLLAFAVTCYGIVHIAGEFKDMDATSELKNKTFDTLRNHPSFYVFNHRGRVLFRPSDTANSSNQDALSSNTSLKLRKLESLRR

SEQ ID NO: 57404 - protein, 204 aa, Homo sapiens
LEQHINIDTLTSDPRLYMKISGNAMLQLGPFLYWTFLAAFEGTVFFFGTYFLFQTASLEENGKVYGNWTFGTIVFTVLVFTVTLKLALDTRFWTWINHFVIWGSLAFYVFFSFFWGGIIWPFLKQQRMYFVFAQMLSSVSTWLAIILLIFISLFPEILLIVLKNVRRRSARRNLSCRRASDSLSARPSVRPLLLRTFSDESNVL

SEQ ID NO: 57405 - protein, 191 aa, Homo sapiens
LEQHINIDTLTSDPRLYMKISGNAMLQLGPFLYWTFLAAFEGTVFFFGTYFLFQTASLEENGKVYGNWTFGTIVFTVLVFTVTLKLALDTRFWTWINHFVIWGSLAFYVFFSFFWGGIIWPFLKQQRMYFVFAQMLSSVSTWLAIILLIFISLFPEILLIVLKNVRRRSARNPNLELPMLLSYKHTDSGYS

SEQ ID NO: 57406 - protein, 145 aa, Homo sapiens
VDELVLLLHALLMRHRALSIENSQLMEQLRLLVCERASLLRQVRPPSCPVPFPETFNGESSRLPEFIVQTASYMLVNENRFCNDAMKVAFLISLLTGEAEEWVVPYIEMDSPILGDYRAFLDEMKQCFGWDDDEDDDDEEEEDDY

SEQ ID NO: 57407 - protein, 426 aa, Homo sapiens
KTSLEASMEASPKAKARDAPKKSEMDKQALIPIAKKRLSSYTECYKWSSSPENACGLPSPISTNRQIQKNCPPSPLPLISKQSPQTSFPYKIMPIQHTLSVQSASSTVKKKKETVSKTTNRCEALSQRHMIYEESGNKSTAGIMNAEAATKILTELRRLAREQREKEEEERQREEMQQRVIKKSKDMAKEAVGGQAEDHLKLKDGQQQNETKKKKGWLDQEDQEAPLQKGDAKIKAQEEADKRKKEHERIMLQNLQERLERKKRIEEIMKRTRKTDVNASKVTETSSHDIYEEAEADNEESDKDSLNEMFPSAILNGTGSPTKFKMPFNNAKKMTHKLVFLEDGTSQVRKEPKTYFNGDLKNFRQKSMKDTSIQEVVSRPSSKRMTSHTTKTRKADETNTTSRSSAQTKSEGFHDILPKSSDTFRQ

SEQ ID NO: 57408 - protein, 383 aa, Homo sapiens
KLFIGGLNTETNEKALEAVFGKYGRIVEVLLMKDRETNKSRGFAFVTFESPADAKDAARDMNGKSLDGKAIKVEQATKPSFESGRRGPPPPPRSRGPPRGLRGGRGGSGGTRGPPSRGGHMDDGGYSMNFNMSSSRGPLPVKRGPPPRSGGPPPKRSAPSGPVRSSSGMGGRAPVSRGRDSYGGPPRREPLPSRRDVYLSPRDDGYSTKDSYSSRDYPSSRDTRDYAPPPRDYTYRDYGHSSSRDDYPSRGYSDRDGYGRDRDYSDHPSGGSYRDSYESYGNSRSAPPTRGPPPSYGGSSRYDDYSSSRDGYGGSRDSYSSSRSDLYSSGRDRVGRQERGLPPSMERGYPPPRDSYSSSSRGAPRGGGRGGSRSDRGGGRSRY

SEQ ID NO: 57409 - protein, 76 aa, Homo sapiens
IAGLVDIGETLQCPEDLTPDEVVELENQAALTNLKQKYLTVISNPRWLLEPIPRKGGKDVFQVDIPEHLIPLGHEV

SEQ ID NO: 57410 - protein, 36 aa, Homo sapiens
VYISKIISSDRDLLAVVFYGTEKDKNSVNFKNIYVL

SEQ ID NO: 57411 - protein, 244 aa, Homo sapiens
LVQRGSGDFDDFNLEDAVKETSSVKQPWDHTTTTTTNRPGTTRAPAKPPGSGLDLADALDDQDDGRRKPGIGGRERWNHVTTTTKRPVTTRAPANTLGNDFDLADALDDRNDRDDGRRKPIAGGGGFSDKDLEDIVGGGEYKPDKGKGDGRYGSNDDPGSGMVAEPGTIAGVASALAMALIGAVSSYISYQQKKFCFSIQQGLNADYVKGENLEAVVCEEPQVKYSTLHTQSAEPPPPPEPARI

SEQ ID NO: 57412 - protein, 33 aa, Homo sapiens
VETVKKQQGEQICWGGSSSVMSLATKMNELMEK

SEQ ID NO: 57413 - protein, 72 aa, Homo sapiens
IASFECSGYVMSGSRHRRMEAVRLRKENQIYSADEKRALASFNQEERRKRENKILASFREMVYRKTKGKDDK

SEQ ID NO: 57414 - protein, 12 aa, Homo sapiens
RKVFYSSRLQCR

SEQ ID NO: 57415 - protein, 811 aa, Homo sapiens
LGVSVAASSHVPIQKKLRFEDTLEFVGFDAKMAEESSSSSSSSSPTAATSQQQQLKNKSILISSVASVHHANGLAKSSTTVSSFANSKPGSAKKLVIKNFKDKPKLPENYTDETWQKLKEAVEAIQNSTSIKYNLEELYQAVENLCSYKISANLYKQLRQICEDHIKAQIHQFREDSLDSVLFLKKIDRCWQNHCRQMIMIRSIFLFLDRTYVLQNSMLPSIWDMGLELFRAHIISDQKVQNKTIDGILLLIERERNGEAIDRSLLRSLLSMLSDLQIYQDSFEQRFLEETNRLYAAEGQKLMQEREVPEYLHHVNKRLEEEADRLITYLDQTTQKSLIATVEKQLLGEHLTAILQKGLNNLLDENRIQDLSLLYQLFSRVRGGVQVLLQQWIEYIKAFGSTIVINPEKDKTMVQELLDFKDKVDHIIDICFLKNEKFINAMKEAFETFINKRPNKPAELIAKYVDSKLRAGNKEATDEELEKMLDKIMIIFRFIYGKDVFEAFYKKDLAKRLLVGKSASVDAEKSMLSKLKHECGAAFTSKLEGMFKDMELSKDIMIQFKQYMQNQNVPGNIELTVNILTMGYWPTYVPMEVHLPPEMVKLQEIFKTFYLGKHSGRKLQWQSTLGHCVLKAEFKEGKKELQVSLFQTLVLLMFNEGEEFSLEEIKQATGIEDGELRRTLQSLACGKARVLAKNPKGKDIEDGDKFICNDDFKHKLFRIKINQIQMKETVEEQASTTERVFQDRQYQIDAAIVRIMKMRKTLSHNLLVSEVYNQLKFPVKPADLKKRIESLIDRDYMERDKENPNQYNYIA

SEQ ID NO: 57416 - protein, 62 aa, Homo sapiens
VNDAGRPKVQVEYKGETKSFYPEDVSSMVLTKMKEIAEAYLGKTVTNAVVTVPAYFNDSVSG

SEQ ID NO: 57417 - protein, 45 aa, Homo sapiens
KESGGGHVKDEVFGTVKEDVSLHGYKKCLLSQSSPAPLTAAEEEL

SEQ ID NO: 57418 - protein, 86 aa, Homo sapiens; identical to SEQ ID NO: 57311

SEQ ID NO: 57419 - protein, 109 aa, Homo sapiens
IGIGPVLNIYPWNKELYLIRYNNYDRAVINTVPYDVVHRWYTAHRTLTIELRRPENEFWVKLKPGRVLFIDNWRVLHGRECFTGYRQLCGCYLTRDDVLNTARLLGLQA

SEQ ID NO: 57420 - protein, 259 aa, Homo sapiens
KLTSSCGKPSSNRMSLQWTAVATFLYAEVFVVLLLCIPFISPKRWQKIFKSRLVELLVSYGNTFFVVLIVILVLLVIDAVREIRKYDDVTEKVNLQNNPGAMEHFHMKLFRAQRNLYIAGFSLLLSFLLRRLVTLISQQATLLASNEAFKKQAESASEAAKKYMEENDQLKKGAAVDGGKLDVGNAEVKLEEENRSLKADLQKLKDELASTKQKLEKAENQVLAMRKQSEGLTKEYDRLLEEHAKLQAAVDGPMDKKEE

SEQ ID NO: 57421 - protein, 229 aa, Homo sapiens
RPEDLMNMQHCNLLCLPENYQMKYYFYHGLSWPQLSYIAEDENGKIVGYVLAKMEEDPDDVPHGHITSLAVKRSHRRLGLAQKLMDQASRAMIENFNAKYVSLHVRKSNRAALHLYSNTLNFQISEVEPKYYADGEDAYAMKRDLTQMADELRRHLELKEKGRHVVLGAIENKVESKGNSPPSSGEACREEKGLAAEDSGGDSKDLSEVSETTESTDVKDSSEASDSAS

SEQ ID NO: 57422 - protein, 65 aa, Homo sapiens
IDYTTKPAIIFRIAARNEKGYGPATQVRWLQETSKDSSGTKPANKRPMSSPEMKSAPKKSKADGQ

SEQ ID NO: 57423 - protein, 2625 aa, Homo sapiens
TRDAEMPATEKDLAEDAPWKKIQQNTFTRWCNEHLKCVSKRIANLQTDLSDGLRLIALLEVLSQKKMHRKHNQRPTFRQMQLENVSVALEFLDRESIKLVSIDSKAIVDGNLKLILGLIWTLILHYSISMPMWDEEEDEEAKKQTPKQRLLGWIQNKLPQLPITNFSRDWQSGRALGALVDSCAPGLCPDWDSWDASKPVTNAREAMQQADDWLGIPQVITPEEIVDPNVDEHSVMTYLSQFPKAKLKPGAPLRPKLNPKKARAYGPGIEPTGNMVKKRAEFTVETRSAGQGEVLVYVEDPAGHQEEAKVTANNDKNRTFSVWYVPEVTGTHKVTVLFAGQHIAKSPFEVYVDKSQGDASKVTAQGPGLEPSGNIANKTTYFEIFTAGAGTGEVEVVIQDPMGQKGTVEPQLEARGDSTYRCSYQPTMEGVHTVHVTFAGVPIPRSPYTVTVGQACNPSACRAVGRGLQPKGVRVKETADFKVYTKGAGSGELKVTVKGPKGEERVKQKDLGDGVYGFEYYPMVPGTYIVTITWGGQNIGRSPFEVKVGTECGNQKVRAWGPGLEGGVVGKSADFVVEAIGDDVGTLGFSVEGPSQAKIECDDKGDGSCDVRYWPQEAGEYAVHVLCNSEDIRLSPFMADIRDAPQDFHPDRVKARGPGLEKTGVAVNKPAEFTVDAKHGGKAPLRVQVQDNEGCPVEALVKDNGNGTYSCSYVPRKPVKHTAMVSWGGVSIPNSPFRVNVGAGSHPNKVKVYGPGVAKTGLKAHEPTYFTVDCAEAGQGDVSIGIKCAPGVVGPAEADIDFDIIRNDNDTFTVKYTPRGAGSYTIMVLFADQATPTSPIRVKVEPSHDASKVKAEGPGLSRTGVELGKPTHFTVNAKAAGKGKLDVQFSGLTKGDAVRDVDIIDHHDNTYTVKYTPVQQGPVGVNVTYGGDPIPKSPFSVAVSPSLDLSKIKVSGLGEKVDVGKDQEFTVKSKGAGGQGKVASKIVGPSGAAVPCKVEPGLGADNSVVRFLPREEGPYEVEVTYDGVPVPGSPFPLEAVAPTKPSKVKAFGPGLQGGSAGSPARFTIDTKGAGTGGLGLTVEGPCEAQLECLDNGDGTCSVSYVPTEPGDYNINILFADTHIPGSPFKAHVVPCFDASKVKCSGPGLERATAGEVGQFQVDCSSAGSAELTIEICSEAGLPAEVYIQDHGDGTHTITYIPLCPGAYTVTIKYGGQPVPNFPSKLQVEPAVDTSGVQCYGPGIEGQGVFREATTEFSVDARALTQTGGPHVKARVANPSGNLTETYVQDRGDGMYKVEYTPYEEGLHSVDVTYDGSPVPSSPFQVPVTEGCDPSRVRVHGPGIQSGTTNKPNKFTVETRGAGTGGLGLAVEGPSEAKMSCMDNKDGSCSVEYIPYEAGTYSLNVTYGGHQVPGSPFKVPVHDVTDASKVKCSGPGLSPGMVRANLPQSFQVDTSKAGVAPLQVKVQGPKGLVEPVDVVDNADGTQTVNYVPSREGPYSISVLYGDEEVPRSPFKVKVLPTHDASKVKASGPGLNTTGVPASLPVEFTIDAKDAGEGLLAVQITDPEGKPKKTHIQDNHDGTYTVAYVPDVTGRYTILIKYGGDEIPFSPYRVRAVPTGDASKCTVTVSIGGHGLGAGIGPTIQIGEETVITVDTKAAGKGKVTCTVCTPDGSEVDVDVVENEDGTFDIFYTAPQPGKYVICVRFGGEHVPNSPFQVTALAGDQPSVQPPLRSQQLAPQYTYAQGGQQTWAPERPLVGVNGLDVTSLRPFDLVIPFTIKKGEITGEVRMPSGKVAQPTITDNKDGTVTVRYAPSEAGLHEMDIRYDNMHIPGSPLQFYVDYVNCGHVTAYGPGLTHGVVNKPATFTVNTKDAGEGGLSLAIEGPSKAEISCTDNQDGTCSVSYLPVLPGDYSILVKYNEQHVPGSPFTARVTGDDSMRMSHLKVGSAADIPINISETDLSLLTATVVPPSGREEPCLLKRLRNGHVGISFVPKETGEHLVHVKKNGQHVASSPIPVVISQSEIGDASRVRVSGQGLHEGHTFEPAEFIIDTRDAGYGGLSLSIEGPSKVDINTEDLEDGTCRVTYCPTEPGNYIINIKFADQHVPGSPFSVKVTGEGRVKESITRRRRAPSVANVGSHCDLSLKIPEISIQDMTAQVTSPSGKTHEAEIVEGENHTYCIRFVPAEMGTHTVSVKYKGQHVPGSPFQFTVGPLGEGGAHKVRAGGPGLERAEAGVPAEFSIWTREAGAGGLAIAVEGPSKAEISFEDRKDGSCGVAYVVQEPGDYEVSVKFNEEHIPDSPFVVPVASPSGDARRLTVSSLQESGLKVNQPASFAVSLNGAKGAIDAKVHSPSGALEECYVTEIDQDKYAVRFIPRENGVYLIDVKFNGTHIPGSPFKIRVGEPGHGGDPGLVSAYGAGLEGGVTGNPAEFVVNTSNAGAGALSVTIDGPSKVKMDCQECPEGYRVTYTPMAPGSYLISIKYGGPYHIGGSPFKAKVTGPRLVSNHSLHETSSVFVDSLTKATCAPQHGAPGPGPADASKVVAKGLGLSKAYVGQKSSFTVDCSKAGNNMLLVGVHGPRTPCEEILVKHVGSRLYSVSYLLKDKGEYTLVVKWGDEHIPGSPYRVVVP

SEQ ID NO: 57424 - protein, 60 aa, Homo sapiens
LISKVLARHFSAADASRVLEQLQRDYERSLSRLTLDDIERLASRFLHPEVTETMEKGFSK

SEQ ID NO: 57425 - protein, 14 aa, Homo sapiens
MGDSARQCQSWDWA

SEQ ID NO: 57426 - protein, 8 aa, Homo sapiens
VVKRNGVR

SEQ ID NO: 57427 - protein, 30 aa, Homo sapiens
IFSPEGRLYQVEYAFKAINQGGLTSVAVRG

SEQ ID NO: 57428 - protein, 175 aa, Homo sapiens
ITENIGCVMTGMTADSRSQVQRARYEAANWKYKYGYEIPVDMLCKRIADISQVYTRNAEMRPLGCCMILIGIDEEQGPQVCKCDPAGYYCGCKATAVGVKQTESTSFLEKKVKKKFDWTFEQTLETAITCLSTVLSIDFKPSEIEVGVVTVENPKFRILTEAEIDAHLVALAERD

SEQ ID NO: 57429 - protein, 47 aa, Homo sapiens
MLDLKTKSENGLEFTSSGSANTETTKVTGSLETKYRWTEYGLTFTEK

SEQ ID NO: 57430 - protein, 11 aa, Homo sapiens
LGSAGLEAQRG

SEQ ID NO: 57431 - protein, 23 aa, Homo sapiens
KKSLEPKTKDGVSLYHPGWSAVA

SEQ ID NO: 57432 - protein, 262 aa, Homo sapiens
TEYETQVKVMSQRHMIDGRWCDCKLPNSKQSQDEPLRSRKVFVGRCTEDMTEDELREFFSQYGDVMDVFIPKPFRAFAFVTFADDQIAQSLCGEDLIIKGISVHISNAEPKHNSNRQLERSGRFGGNPGGFGNQGGFGNSRGGGAGLGNNQGSNMGGGMNFGAFSINPAMMAAAQAALQSSWGMMGMLASQQNQSGPSGNNQNQGNMQREPNQAFGSGNNSYSGSNSGAAIGWGSASNAGSGSGFNGGFGSSMDSKSSGWGM

SEQ ID NO: 57433 - protein, 28 aa, Homo sapiens
RTAKLNLLLGLFYVFGIILAPAGSLPKI

SEQ ID NO: 57434 - protein, 273 aa, Homo sapiens
LDLLPPPPPPPPVLLPSEEEAPAPMGASLIADLEQLHLSPPPPPPQAPAEGPSVQPGPLRPMEEELPPPPAEPVEKGASTDICAFCHKTVSPRELAVEAMKRQYHAQCFTCRTCRRQLAGQSFYQKDGRPLCEPCYQDTLERCGKCGEVVRDHIIRALGQAFHPSCFTCVTCARCIGDESFALGSQNEVYCLDDFYRKFAPVCSICENPIIPRDGKDAFKIECMGRNFHENCYRCEDCRILLSVEPTDQGCYPLNNHLFCKPCHVKRSAAGCC

SEQ ID NO: 57435 - protein, 19 aa, Homo sapiens
IAPMMAKTIKAFKNRFSRR

SEQ ID NO: 57436 - protein, 181 aa, Homo sapiens
ISDFYYTVMFRIHAEFQLSEPPDFPFWFSPAQFTGHIILSKDATHVRDFRLFVPNHRSLNVDMEWLYGASESSNMEVDIGYIPQMELEATGPSVPSVILDEDGSMIDSHLPSGEPLQFVFEEIKWQQELSWEEAARRLEVAMYPFKKVSYLPFTEAFDRAKAENKLVHSILLWGALDDQSC

SEQ ID NO: 57437 - protein, 68 aa, Homo sapiens
VEMMICLPNGTVVHHINANYFLDITSVKPEEIESNLFSFSSTFEDPSTATYMQFLKEGLRRGLPLLQP

SEQ ID NO: 57438 - protein, 19 aa, Homo sapiens
LRLKCTQRHKEIQKSRMIK

SEQ ID NO: 57439 - protein, 49 aa, Homo sapiens
MPKHIAFIMDGNRRYAKKCQVERQEGHSQGFNKLAELLAFSPLRLCGGV

SEQ ID NO: 57440 - protein, 213 aa, Homo sapiens
IDQKKDAENHEAQLKNGSLDSPGKQDTEEDEEEDEKDKGKLKPNLGNGADLPNYRWTQTLSELDLAVPFCVNFRLKGKDMVVDIQRRHLRVGLKGQPAIIDGELYNEVKVEESSWLIEDGKVVTVHLEKINKMEWWSRLVSSDPEINTKKINPENSKLSDLDSETRSMVEKMMYDQRQKSMGLPTSDEQKKQEILKKFMDQHPEMDFSKAKFN

SEQ ID NO: 57441 - protein, 742 aa, Homo sapiens
LRAPPGRPIVPHTSAMRPLLLLALLGWLLLAEAKGDAKPEDNLLVLTVATKETEGFRRFKRSAQFFNYKIQALGLGEDWNVEKGTSAGGGQKVRLLKKALEKHADKEDLVILFADSYDVLFASGPRELLKKFRQARSQVVFSAEELIYPDRRLETKYPVVSDGKRFLGSGGFIGYAPNLSKLVAEWEGQDSDSDQLFYTKIFLDPEKREQINITLDHRCRIFQNLDGALDEVVLKFEMGHVRARNLAYDTLPVLIHGNGPTKLQLNYLGNYIPRFWTFETGCTVCDEGLRSLKGIGDEALPTVLVGVFIEQPTPFVSLFFQRLLRLHYPQKHMRLFIHNHEQHHKAQVEEFLAQHGSEYQSVKLVGPEVRMANADARNMGADLCRQDRSCTYYFSVDADVALTEPNSLRLLIQQNKNVIAPLMTRHGRLWSNFWGALSADGYYARSEDYVDIVQGRRVGVWNVPYISNIYLIKGSALRGELQSSDLFHHSKLDPDMAFCANIRQQDVFMFLTNRHTLGHLLSLDSYRTTHLHNDLWEVFSNPEDWKEKYIHQNYTKALAGKLVETPCPDVYWFPIFTEVACDELVEEMEHFGQWSLGNNKDNRIQGGYENVPTIDIHMNQIGFEREWHKFLLEYIAPMTEKLYPGYYTRAQFDLAFVVRYKPDEQPSLMPHHDASTFTINIALNRVGVDYEGGGCRFLRYNCSIRAPRKGWTLMHPGRLTHYHEGLPTTRGTRYIAVSFVDP

SEQ ID NO: 57442 - protein, 151 aa, Homo sapiens
VTFSEDDEIINPEDVDPSVGRFRNMVQTAVVPVKKKRVEGPGSLGLEESGSRRMQNFAFSGGLYGGLPPTHSEAGSQPHGIHGTALIGGLPMPYPNLAPDVDLTPVVPSAVNMNPAPNPAVYNPEAVNEPKKKKYAKEAWPGKKPTPSLLI

SEQ ID NO: 57443 - protein, 72 aa, Homo sapiens
LKSLGLLSNLCAEETQMLASAPRLNSADRPMKTSVLRQRKGSVRKQHLLSWAWQQGRGQVVEILQSEKQTER

SEQ ID NO: 57444 - protein, 14 aa, Homo sapiens
IMTFQLKTLLKVQV

SEQ ID NO: 57445 - protein, 6 aa, Homo sapiens
KELYLV

SEQ ID NO: 57446 - protein, 90 aa, Homo sapiens
MEMGFRMDHEFVAKGHLFRKGIMKIMVYKIFRILVPGNTDSTEALSLSYLVELSVVAPAGQDMVSDDMKNFAEQLKPLVHLEKIDPKRLM

SEQ ID NO: 57447 - protein, 19 aa, Homo sapiens
MDCHWQPLDTVSSEIPAMM

SEQ ID NO: 57448 - protein, 554 aa, Homo sapiens
KDGLNDDDFEPYLSPQARPNNAYTAMSDSYLPSYYSPSIGFSYSLGEAAWSTGGDTAMPYLTSYGQLSNGEPHFLPDAMFGQPGALGSTPFLGQHGFNFFPSGIDFSAWGNNSSQGQSTQSSGYSSNYAYAPSSLGGAMIDGQSAFANETLNKAPGMNTIDQGMAALKLGSTEVASNVPKVVGSAVGSGSITSNIVASNSLPPATIAPPKPASWADIASKPAKQQPKLKTKNGIAGSSLPPPPIKHNMDIGTWDNKGPVAKAPSQALVQNIGQPTQGSPQPVGQQANNSPPVAQASVGQQTQPLPPPPPQPAQLSVQQQAAQPTRWVAPRNRGSGFGHNGVDGNGVGQSQAGSGSTPSEPHPVLEKLRSINNYNPKDFDWNLKHGRVFIIKSYSEDDIHRSIKYNIWCSTEHGNKRLDAAYRSMNGKGPVYLLFSVNGSGHFCGVAEMKSAVDYNTCAGVWSQDKWKGRFDVRWIFVKDVPNSQLRHIRLENNENKPVTNSRDTQEVPLEKAKQVLKIIASYKHTTSIFDDFSHYEKRQEEEESVKKERQGRGK

SEQ ID NO: 57449 - protein, 116 aa, Homo sapiens
MYRSRWESSNKALLEMAEEKTVRDKELEGLQVKIQRLEKLCRALQTERNDLNKRVQDLSAGGQGSLTDSGPERRPEGPGAQAPSSPRVTEAPCYPGAPSTEASGQTGPQEPTSARA

SEQ ID NO: 57450 - protein, 66 aa, Homo sapiens
LLEGAVIVYQLYSLMSSEKWHQTISLALILFSNYYAFFKLLRDRLVLGKAYSYSASPQRDLDHRFS

SEQ ID NO: 57451 - protein, 52 aa, Homo sapiens
IKNSVTPDMMEEMYKKAHAAIRENPVYEKKPKKQKRRGGTIPKYPLLRRKIR

SEQ ID NO: 57452 - protein, 126 aa, Homo sapiens
MKRTRKSEVSETKQKQDSKEANANGSSPEPVKAVEARSPGLQKEAVQKEEPIPQEPQWSLPSKELPASLVNGLQPLPAHQENGFSTNGPSGDKSLSRTPETLLPFAEAEAFLKKAVVQSPQVTEVL

SEQ ID NO: 57453 - protein, 607 aa, Homo sapiens
LSLTGGSEAGRRSKSKMKYILVTGGVISGIGKGIIASSVGTILKSCGLHVTSIKIDPYINIDAGTFSPYEHGEVFVLDDGGEVDLDLGNYERFLDIRLTKDNNLTTGKIYQYVINKERKGDYLGKTVQVVPHITDAIQEWVMRQALIPVDEDGLEPQVCVIELGGTVGDIESMPFIEAFRQFQFKVKRENFCNIHVSLVPQPSSTGEQKTKPTQNSVRELRGLGLSPDLVVCRCSNPLDTSVKEKISMFCHVEPEQVICVHDVSSIYRVPLLLEEQGVVDYFLRRLDLPIERQPRKMLMKWKEMADRYDRLLETCSIALVGKYTKFSDSYASVIKALEHSALAINHKLEIKYIDSADLEPITSQEEPVRYHEAWQKLCSAHGVLVPGGFGVRGTEGKIQAIAWARNQKKPFLGVCLGMQLAVVEFSRNVLGWQDANSTEFDPTTSHPVVVDMPEHNPGQMGGTMRLGKRRTLFQTKNSVMRKLYGDADYLEERHRHRFEVNPVWKKCLEEQGLKFVGQDVEGERMEIVELEDHPFFVGVQYHPEFLSRPIKPSPPYFGLLLASVGRLSHYLQKGCRLSPRDTYSDRSGSSSPDSEITELKFPSINHD

SEQ ID NO: 57454 - protein, 95 aa, Homo sapiens
LVKDWAPKAFIISFKLETDPAIVINRARKALEIYQHQVVVANILESRQSFVFIVTKDSETKLLLSEEEIEKGVEIEEKIVDNLQSRHTAFIGDRN

SEQ ID NO: 57455 - protein, 24 aa, Homo sapiens
LGAKKLCPQCNTITAPGDLRRIYL

SEQ ID NO: 57456 - protein, 68 aa, Homo sapiens
LLDAVEQRQRQLLDTIAACEEMLRQLGRRRPEPAGGGNVSAKPGAPPQPAVSARGGFPKDAGDGAAEP

SEQ ID NO: 57457 - protein, 344 aa, Homo sapiens
ITPREEPQLPQPAPVTITATMSSEAETQQPPAAPPAAPALSAADTKPGTTGSGAGSGGPGGLTSAAPAGGDKKVIATKVLGTVKWFNVRNGYGFINRNDTKEDVFVHQTAIKKNNPRKYLRSVGDGETVEFDVVEGEKGAEAANVTGPGGVPVQGSKYAADRNHYRRYPRRRGPPRNYQQNYQNSESGEKNEGSESAPEGQAQQRRPYRRRRFPPYYMRRPYGRRPQYSNPPVQGEVMEGADNQGAGEQGRPVRQNMYRGYRPRFRRGPPRQRQPREDGNEEDKENQGDETQGQQPPQRRYRRNFNYRRRRPENPKPQDGKETKAADPPAENSSAPEAEQGGAE

SEQ ID NO: 57458 - protein, 36 aa, Homo sapiens
IDAKAEEEFNIEKGQLVETQRLKIMEYHEKKEKQIE

SEQ ID NO: 57459 - protein, 43 aa, Homo sapiens
KCLSSGPGLLLRLFSFSPCNAGKSQSRHRNMPLIQCLCLAVTC

SEQ ID NO: 57460 - protein, 21 aa, Homo sapiens
IITLVVKSSFPEKGHKRPGQV

SEQ ID NO: 57461 - protein, 52 aa, Homo sapiens
LEKCVKARERLELCDERVSSRSHTEEDCTEELFDFLHARDHCVAHKLFNNLK

SEQ ID NO: 57462 - protein, 198 aa, Homo sapiens
KKALEKNPDEFYYKMTRVKLQDGVHIIKETKEEVTPEQLKLMRTQDVKYIEMKRVAEAKKIERLKSELHLLDFQGKQQNKHVFFFDTKKEVEQFDVATHLQTAPELVDRVFNRPRIETLQKEKVKGVTNQTGLKRIAKERQKQYNCLTQRIEREKKLFVIAQKIQTRKDLMDKTQKVKVKKETVNSPAIYKFQSRRKR

SEQ ID NO: 57463 - protein, 249 aa, Homo sapiens
VTSKLWNTKHHPEDVEPALRKTLADLQLEYLDLYLMHWPYAFERGDNPFPKNADGTICYDSTHYKETWKALEALVAKGLVQALGLSNFNSRQIDDILSVASVRPAVLQVECHPYLAQNELIAHCQARGLEVTAYSPLGSSDRAWRDPDEPVLLEEPVVLALAEKYGRSPAQILLRWQVQRKVICIPKSITPSRILQNIKVFDFTFSPEEMKQLNALNKNWRYIVPMLTVDGKRVPRDAGHPLYPFNDPY

SEQ ID NO: 57464 - protein, 24 aa, Homo sapiens
LGCSPDLRQRLRYALRLLRDRSPA

SEQ ID NO: 57465 - protein, 81 aa, Homo sapiens
IGLIQHLPKGVYDPGRDGSEKKIRECVICMMDFVYGDPIRFLPCMHIYHLDCIDDWLMRSFTCPSCMEPVDAALLSSYETN

SEQ ID NO: 57466 - protein, 46 aa, Homo sapiens
ILTVPWVELGGECNINCSKTGYSANIIFHTKPFYGGKKHRITAEIL

SEQ ID NO: 57467 - protein, 182 aa, Homo sapiens
LRQPSFSCRVLVLEDPPCFRFTNSMNQEKLAKLQAQVRIGGKGTARRKKKVVHRTATADDKKLQSSLKKLAVNNIAGIEEVNMIKDDGTVIHFNNPKVQASLSANTFAITGHAEAKPITEMLPGILSQLGADSLTSLRKLAEQFPRQVLDSKAPKPEDIDEEDDDVPDLVENFDEASKNEAN

SEQ ID NO: 57468 - protein, 389 aa, Homo sapiens
VRSTRKSEPPPLDRVYEIPGLEPITFAGKMHFVPWLARPIFPPWDRGYKDPRFYRSPPLHEHPLYKDQACYIFHHRCRLLEGVKQALWLTKTKLIEGLPEKVLSLVDDPRNHIENQDECVLNVISHARLWQTTEEIPKRETYCPVIVDNLIQLCKSQILKHPSLARRICVQNSTFSATWNRESLLLQVRGSGGARLSTKDPLPTIASREEIEATKNHVLETFYPISPIIDLHECNIYDVKNDTGFQEGYPYPYPHTLYLLDKANLRPHRLQPDQLRAKMILFAFGSALAQARLLYGNDAKVLEQPVVVQSVGTDGRVFHFLVFQLNTTDLDCNEGVKNLAWVDSDQLLYQHFWCLPVIKKRVVVEPVGPVGFKPETFRKFLALYLHGAA

SEQ ID NO: 57469 - protein, 144 aa, Homo sapiens
KMGFPEAASSFRTHQIEAVPTSSASDGFKANLVFKEIEKKLEEEGEQFVKKIGGIFAFKVKDGPGGKEATWVVDVKNGKGSVLPNSDKKADCTITMADSDFLALMTGKMNPQSAFFQGKLKITGNMGLAMKLQNLQLQPGNAKL

SEQ ID NO: 57470 - protein, 43 aa, Homo sapiens
LKHLQVLDIEGNLEFGDISKDRGRLGKEKEEEEEEEEEEEETR

SEQ ID NO: 57471 - protein, 335 aa, Homo sapiens
LGFISDNVDHIDSLIGFPEQIAEKLFSAAEARQKFTEPGAGLRALQKFTEAYGSLVLCSLCLRNRYLVISEKLEEIKSFRELTCLDLSCCKLGDEHELLEHLTNEALSSVTQLHLKDNCLSDAGVRKMTAPVRVMKRGLENLTLLDLSCNPEITDAGIGYLFSFRKLNCLDISGTGLKDIKTVKHKLQTHIGLVHSKVPLKEFDHSNCKTEGWADQIVLQWERVTAEAVKPRETSEPRAAAQRFYGKRSRAEAPLKCPLADTHMNSSEKLQFYKEKAPDCHGPVLKHEAISSQESKKSKKRPFEESETEQNNSSQPSKQKYVCLAVEDWDLLNSY

SEQ ID NO: 57472 - protein, 5 aa, Homo sapiens
IRSGG

SEQ ID NO: 57473 - protein, 20 aa, Homo sapiens
ISPRRRSMWARIQSNGPPGL

SEQ ID NO: 57474 - protein, 274 aa, Homo sapiens
ISFVDCSKIKLLEAAITPETKLVWIETPTNPTQKVIDIEGCAHIVHKHGDIILVVDNTFMSPYFQRPLALGADISMYSATKYMNGHSDVVMGLVSVNCESLHNRLRFLQNSLGAVPSPIDCYLCNRGLKTLHVRMEKHFKNGMAVAQFLESNPWVEKVIYPGLPSHPQHELVKRQCTGCTGMVTFYIKGTLQHAEIFLKNLKLFTLAESLGGFESLAELPAIMTHASVLKNDRDVLGISDTLIRLSVGLEDEEDLLEDLDQALKAAHPPSGSHS

SEQ ID NO: 57475 - protein, 59 aa, Homo sapiens
IDELRLFPPDDSPLPVSSRVCFVKFHDPDSAVVAQHLTNTVFVDRALIVVPYAEGLCFV

SEQ ID NO: 57476 - protein, 297 aa, Homo sapiens
LKLMSTVDPKLNHVAAGLVSPSLKSDTSSKEIEEAMKRVREAQSLISAAIEPDKKEEKRRHSRSRSRSRRRRTPSSSRHRRSRSRSRRRSHSKSRSRRRSKSPRRRRSHSRERGRRSRSTSKTRDKKKEDKEKKRSKTPPKSYSTARRSRSASRERRRRRSRSGTRSPKKPRSPKRKLSRSPSPRRHKKEKKKDKDKERSRDERERSTSKKKKSKDKEKDRERKSESDKDVKQVTRDYDEEEQGYDSEKEKKEEKKPIETGSPKTKECSVEKGTGDSLRESKVNGDDHHEEDMDMSD

SEQ ID NO: 57477 - protein, 41 aa, Homo sapiens
KKKRNPEKTRAQCITKESDEELENDDDDDLGINVTIFPEDY

SEQ ID NO: 57478 - protein, 148 aa, Homo sapiens
MGAFDKTRPVVAAGAVGLAQRALDEATKYALERKTFGKLLVEHQAISFMLAEMAMKVELARMSYQRAAWEVDSGRRNTYYASIAKAFAGDIANQLATDAVQILGGNGFNTEYPVEKLMRDAKIYQIYEGTSQIQRLIVAREHIDKYKN

SEQ ID NO: 57479 - protein, 712 aa, Homo sapiens
TRTVPPRGKKYLRRSPAPAGCKYIQSFIISPRPHRANMNDISQKAEILLSSSKPVPKTYVPKLGKGDVKDKFEAMQRAREERNQRRSRDEKQRRKEQYIREREWNRRKQEIKEMLASDDEEDVSSKVEKAYVPKLTGTVKGRFAEMEKQRQEEQRKRTEEERKRRIEQDMLEKRKIQRELAKRAEQIEDINNTGTESASEEGDDSLLITVVPVKSYKTSGKMKKNFEDLEKEREEKERIKYEEDKRIRYEEQRPSLKEAKCLSLVMDDEIESEAKKESLSPGKLKLTFEELERQRQENRKKQAEEEARKRLEEEKRAFEEARRQMVNEDEENQDTAKIFKGYRPGKLKLSFEEMERQRREDEKRKAEEEARRRIEEEKKAFAEARRNMVVDDDSPEMYKTISQEFLTPGKLEINFEELLKQKMEEEKRRTEEERKHKLEMEKQEFEQLRQEMGEEEEENETFGLSREYEELIKLKRSGSIQAKNLKSKFEKIGQLSEKEIQKKIEEERARRRAIDLEIKEREAENFHEEDDVDVRPARKSEAPFTHKVNMKARFEQMAKAREEEEQRRIEEQKLLRMQFEQREIDAALQKKREEEEEEEGSIMNGSTAEDEEQTRSGAPWFKKPLKNTSVVDSEPVRFTVKVTGEPKPEITWWFEGEILQDGEDYQYIERGETYCLYLPETFPEDGGEYMCKAVNNKGSAASTCILTIESKN

SEQ ID NO: 57480 - protein, 5 aa, Homo sapiens
LYSYH

SEQ ID NO: 57481 - protein, 318 aa, Homo sapiens
IKKAYRKQALKFHPDKNKSPQAEEKFKEVAEAYEVLSDPKKREIYDQFGEEGLKGGAGGTDGQGGTFRYTFHGDPHATFAAFFGGSNPFEIFFGRRMGGGRDSEEMEIDGDPFSAFGFSMNGYPRDRNSVGPSRLKQDPPVIHELRVSLEEIYSGCTKRMKISRKRLNADGRSYRSEDKILTIEIKKGWKEGTKITFPREGDETPNSIPADIVFIIKDKDHPKFKRDGSNIIYTAKISLREALCGCSINVPTLDGRNIPMSVNDIVKPGMRRRIIGYGLPFPKNPDQRGDLLIEFEVSFPDTISSSSKEVLRKHLPAS

SEQ ID NO: 57482 - protein, 219 aa, Homo sapiens
LICITVFLSYLPEAGQYSSFFLYLRQTIVLSLLMRSIGNKNTILLGLGFQILQLAWYGFGSEPWMMWAAGAVAAMSSITFPAVSALVSRTADADQQGVVQGMITGIRGLCNGLGPALYGFIFYIFHVELKELPITGTDLGTNTSPQHHFEQNSIIPGPPFLFGACSVLLALLVALFIPEHTNLSLRSSSWRKHCGSHSHPHNTQAPGEAKEPLLQDTNV

SEQ ID NO: 57483 - protein, 373 aa, Homo sapiens
LGPRVSPMAGPRVEVDGSIMEGGGQILRVSTALSCLLGLPLRVQKIRAGRSTPGLRPQHLSGLEMIRDLCDGQLEGAEIGSTEITFTPEKIKGGIHTADTKTAGSVCLLMQVSMPCVLFAASPSELHLKGGTNAEMAPQIDYTVMVFKPIVEKFGFIFNCDIKTRGYYPKGGGEVIVRMSPVKQLNPINLTERGCVTKIYGRAFVAGVLPFKVAKDMAAAAVRCIRKEIRDLYVNIQPVQEPKDQAFGNGNGIIIIAETSTGCLFAGSSLGKRGVNADKVGIEAAEMLLANLRHGGTVDEYLQDQLIVFMALANGVSRIKTGPVTLHTQTAIHFAEQIAKAKFIVKKSEDEEDAAKDTYIIECQGIGMTNPNL

SEQ ID NO: 57484 - protein, 375 aa, Homo sapiens
LPLSIKDDEYKPPKFNLFGKISGWFRSILSDKTSRNLFFFLCLNLSFAFVELLYGIWSNCLGLISDSFHMFFDSTAILAGLAASVISKWRDNDAFSYGYVRAEVLAGFVNGLFLIFTAFFIFSEGVERALAPPDVHHERLLLVSILGFVVNLIGIFVFKHGGHGHSHGSGHGHSHSLFNGALDQAHGHVDHCHSHEVKHGAAHSHDHAHGHGHFHSHDGPSLKETTGPSRQILQGVFLHILADTLGSIGVIASAIMMQNFGLMIADPICSILIAILIVVSVIPLLRESVGILMQRTPPLLENSLPQCYQRVQQLQGVYSLQEQHFWTLCSDVYVGTLKLIVAPDADARWILSQTHNIFTQAGVRQLYVQIDFAAM

SEQ ID NO: 57485 - protein, 84 aa, Homo sapiens
IDRRSGKKLEDGPKFLKSGDAAIADMVPGKPMCVESFSDYPPLGRFTVHDMRQTLAVGVIKAVDKKAAGAGKVTKSAQKAQKAK

SEQ ID NO: 57486 - protein, 140 aa, Homo sapiens
LVEPFGVISNHLILNKINEAFIERATTEDAQAAVDYYTTTPALVLGKPVRVHLSQKYKRIKKPEGKPDQKFDRRQELGCVIHRSNLPHSAYSDSAVLKLAEPYGKIKNYILMRMKSQAFIEMETREDAMAMVDHCLKKAL

SEQ ID NO: 57487 - protein, 22 aa, Homo sapiens
LAGPAGECRCLTRCRCPGSGRS

SEQ ID NO: 57488 - protein, 374 aa, Homo sapiens
LSRHQLKRLEEHRYQSAGRSLLEPLMQGYWEWLVRRVPSWIAPNLITIIGLSINICTTILLVFYCPTATEQAPLWAYIACACGLFIYQSLDAIDGKQARRTNSSSPLGELFDHGCDSLSTVFVVLGTCIAVQLGTNPDWMFFCCFAGTFMFYCAHWQTYVSGTLRFGIIDVTEVQIFIIIMHLLAVIGGPPFWQSMIPVLNIQMKIFPALCTVAGTIFSCTNYFRVIFTGGVGKNGSTIAGTSVLSPFLHIGSVITLAAMIYKKSAVQLFEKHPCLYILTFGFVSAKITNKLVVAHMTKSEMHLHDTAFIGPALLFLDQYFNSFIDEYIVLWIALVFSFFDLIRYCVSVCNQIASHLHIHVFRIKVSTAHSNHH

SEQ ID NO: 57489 - protein, 14 aa, Homo sapiens
MALNRQYLNRSHHA

SEQ ID NO: 57490 - protein, 18 aa, Homo sapiens
IDPKSHKFVLRLQSETSV

SEQ ID NO: 57491 - protein, 35 aa, Homo sapiens
TVSETFMSKPSIAKRRANQQETEQFYFTVRECYGF

SEQ ID NO: 57492 - protein, 106 aa, Homo sapiens
LMMGVLFCCGAGFFIRRRMYPPPLIEEPAFNVSYTRQPPNPGPGAQQPGPPYYTDPGGPGMNPVGNSMAMAFQVPPNSPQGSVACPPPPAYCNTPPPPYEQVVKAK

SEQ ID NO: 57493 - protein, 322 aa, Homo sapiens
RTEEEFKKFISDKDASIVGFFDDSFSEAHSEFLKAASNLRDNYRFAHTNVESLVNEYDDNGDGIILFRPSHLTNKLEDKTVAYTVQKMTSGKIKKFIQENIFGICPHMTEDNKDLIQGKDLLIAYYDVDYEKNAKGSNYWRNRVMMVAKKFLDAGHKLNFAVASRKTFSHELSDFGLESTAGEIPVVAIRTAKGEKFVMQEDFSRDGNALERFLQDYFDGNLKRYLKSEPIPESNDGPVKVVVAENFDEIVNNENKDVLIEFYAPWCGHCKNLEPKYKELGEKLSKDLNIVIAKMDATANDVPSPYEVRVFLPYTSLQPTRS

SEQ ID NO: 57494 - protein, 66 aa, Homo sapiens
VKFHAHPESSERDRTLQVELEGAQVLRSRLEEVLGRSLERLNRLETLAAIGGGELESVRIHHKHAY

SEQ ID NO: 57495 - protein, 133 aa, Homo sapiens
IAVMSGRGKQGGKARAKAKSRSSRAGLQFPVGRVHRLLRKGNYAERVGAGAPVYMAAVLEYLTAEILELAGNAARDNKKTRIIPRHLQLAIRNDEELNKLLGKVTIAQGGVLPNIQAVLLPKKTESHHKAKGK

SEQ ID NO: 57496 - protein, 145 aa, Homo sapiens
LLRGSERCLCLTLISVMSGRGKQGGKARAKAKSRSSRAGLQFPVGRVHRLLRKGNYAERVGAGAPVYMAAVLEYLTAEILELAGNAARDNKKTRIIPRHLQLAIRNDEELNKLLGKVTIAQGGVLPNIQAVLLPKKTESHKAKSK

SEQ ID NO: 57497 - protein, 4 aa, Homo sapiens
TRVL

SEQ ID NO: 57498 - protein, 572 aa, Homo sapiens
IPRRGRTGLKESQAAEGEGAAKMASASSGPSSSVGFSSFDPAVPSCTLSSAASGIKRPMASEVPYASGMPIKKIGHRSVDSSGETTYKKTTSSALKGAIQLGITHTVGSLSTKPERDVLMQDFYVVESIFFPSEGSNLTPAHHYNDFRFKTYAPVAFRYFRELFGIRPDDYLYSLCSEPLIELCSSGASGSLFYVSSDDEFIIKTVQHKEAEFLQKLLPGYYMNLNQNPRTLLPKFYGLYCVQAGGKNIRIVVMNNLLPRSVKMHIKYDLKGSTYKRRASQKEREKPLPTFKDLDFLQDIPDGLFLDADMYNALCKTLQRDCLVLQSFKIMDYSLLMSIHNIDHAQREPLSSETQYSVDTRRPAPQKALYSTAMESIQGEARRGGTMETDDHMGGIPARNSKGERLLLYIGIIDILQSYRFVKKLEHSWKALVHDGDTVSVHRPGFYAERFQRFMCNTVFKKIPLKPSPSKKFRSGSSFSRRAGSSGNSCITYQPSVSGEHKAQVTTKAEVEPGVHLGRPDVLPQTPPLEEISEGSPIPDPSFSPLVGETLQMLTTSTTLEKLEVAESEFTH

SEQ ID NO: 57499 - protein, 50 aa, Homo sapiens
LKNKQPTPVNIRASMQQQQQLASARNRRLAQQMENRPSVQAALKLKQVGV

SEQ ID NO: 57500 - protein, 13 aa, Homo sapiens
LDSGIYPPGSPGK

SEQ ID NO: 57501 - protein, 824 aa, Homo sapiens
VSSVPLPAENVTITAGQRIDLAVLLGKTPSTMENDSSNLDPSQAPSLAQPLVFSNSKQTAISQPASGNTFSHHSMVSMLGKGFGDVGEAKGGSTTGSQFLEQFKTAQALAQLAAQHSQSGSTTTSSWDMGSTTQSPSLVQYDLKNPSDSAVHSPFTKRQAFTPSSTMMEVFLQEKSPAVATSTAAPPPPSSPLPSKSTSAPQMSPGSSDNQSSSPQPAQQKLKQQKKKASLTSKIPALAVEMPGSADISGLNLQFGALQFGSEPVLSDYESTPTTSASSSQAPSSLYTSTASESSSTISSNQSQESGYQSGPIQSTTYTSQNNAQGPLYEQRSTQTRRYPSSISSSPQKDLTQAKNGFSSVQATQLQTTQSVEGATGSAVKSDSPSTSSIPPLNETVSAASLLTTTNQHSSSLGGLSHSEEIPNTTTTQHSSTLSTQQNTLSSSTSSGRTSTSTLLHTSVESEANLHSSSSTFSTTSSTVSAPPPVVSVSSSLNSGSSLGLSLGSNSTVTASTRSSVATTSGKAPPNLPPGVPPLLPNPYIMAPGLLHAYPPQVYGYDDLQMLQTRFPLDYYSIPFPTPTTPLTGRDGSLASNPYSGDLTKFGRGDASSPAPATTLAQPQQNQTQTHHTTQQTFLNPALPPGYSYTSLPYYTGVPGLPSTFQYGPAVFPVAPTSSKQHGVNVSVNASATPFQQPSGYGSHGYNTGVSVTSSNTGVPDISGSVYSKTQQSFEKQGFHSGTPAASFNLPSALGSGGPINPATAAAYPPAPFMHILTPHQQPHSQILHHHLQQDGQTGSGQRSQTSSIPQKPQTNKSAYNSYSWGAN

SEQ ID NO: 57502 - protein, 88 aa, Homo sapiens
LLGVLLLGYGYFWLLVPNPEARLQQLGLFCSVFTISMYLSPLADLAKVIQTKSTQCLSYPLTIATLLTSASWCLYGFRLRDPYIMQFL

SEQ ID NO: 57503 - protein, 112 aa, Homo sapiens
LGYGYFWLLVPNPEARLQQLGLFCSVFTISMYLSPLADLAKVIQTKSTQCLSYPLTIATLLTSASWCLYGFRLRDPYIMVSNFPGIVTSFIRFWLFWKYPQEQDRNYWLLQT

SEQ ID NO: 57504 - protein, 311 aa, Homo sapiens
VMQVKTFSEACLMVRKPALELLHYLKNTSFAYPAIRYLLYGEKGTGKTLSLCHVIHFCAKQDWLILHIPDAHLWVKNCRDLLQSSYNKQRFDQPLEASTWLKNFKTTNERFLNQIKVQEKYVWNKRESTEKGSPLGEVVEQGITRVRNATDAVGIVLKELKRQSSLGMFHLLVAVDGINALWGRTTLKREDKSPIAPEELALVHNLRKMMKNDWHGGAIVSALSQTGSLFKPRKAYLPQELLGKEGFDALDPFIPILVSNYNPKEFESCIQYYLENNWLQHEKAPTEEGKKELLFLSNANPSLLERHCAYL

SEQ ID NO: 57505 - protein, 66 aa, Homo sapiens
LTQTVAHLKQQVSGLEGVQDDLFWLTFEGKPLEDQLPLGEYGLKPLSTVFMNLRLRGGGTEPGGRS

SEQ ID NO: 57506 - protein, 445 aa, Homo sapiens
IAAQARLKDLEALLNSKEAALSTALSEKRTLEGELHDLRGQVAKLEAALGEAKKQLQDEMLRRVDAENRLQTMKEELDFQKNIYSEELRETKRRHETRLVEIDNGKQREFESRLADALQELRAQHEDQVEQYKKELEKTYSAKLDNARQSAERNSNLVGAAHEELQQSRIRIDSLSAQLSQLQKQLAAKEAKLRDLEDSLARERDTSRRLLAEKEREMAEMRARMQQQLDEYQELLDIKLALDMEIHAYRKLLEGEEERLRLSPSPTSQRSRGRASSHSSQTQGGGSVTKKRKLESTESRSSFSQHARTSGRVAVEEVDEEGKFVRLRNKSNEDQSMGNWQIKRQNGDDPLLTYRFPPKFTLKAGQVVTIWAAGAGATHSPPTDLVWKAQNTWGCGNSLRTALINSTGEEVAMRKLVRSVTVVEDDEDEDGDDLLHHHHVSGSRR

SEQ ID NO: 57507 - protein, 20 aa, Homo sapiens
KNRVDEMKILPVLGSQTGKI

SEQ ID NO: 57508 - protein, 542 aa, Homo sapiens
MSPLSLYGENSNSLSSAEPLKEDKPVTGPRNKTENGLTPKKKIQVNSKPSIQPKPLLLPAAPKTQTNSSVPAKTIIIQTVPTLMPLAKQQPIISLQPAPTKGQTVLLSQPTVVQLQAPGVLPSAQPVLAVAGGVTQLPNHVVNVVPAPSANSPVNGKLSVTKPVLQSTMRNVGSDIAVLRRQQRMIKNRESACQSRKKKKEYMLGLEARLKAALSENEQLKKENGTLKRQLDEVVSENQRLKVPSPKRRVVCVMIVLAFIILNYGPMSMLEQDSRRMNPSVSPANQRRHLLGFSAKEAQDTSDGIIQKNSYRYDHSVSNDKALMVLTEEPLLYIPPPPCQPLINTTESLRLNHELRGWVHRHEVERTKSRRMTNNQQKTRILQGALEQGSNSQLMAVQYTETTSSISRNSGSELQVYYASPRSYQDFFEAIRRRGDTFYVVSFRRDHLLLPATTHNKTTRPKMSIVLPAININENVINGQDYEVMMQIDCQVMDTRILHIKSSSVPPYLRDQQRNQTNTFFGSPPAATEATHVVSTIPESLQ

SEQ ID NO: 57509 - protein, 5 aa, Homo sapiens
MYLSC

SEQ ID NO: 57510 - protein, 221 aa, Homo sapiens
VQLLGQNEVDYRQKQVVILSQDSFYRVLTSEQKAKALKGQFNFDHPDAFDNELILKTLKEITEGKTVQIPVYDFVSHSRKEETVTVYPADVVLFEGILAFYSQEVRDLFQMKLFVDTDADTRLSRRVLRDISERGRDLEQILSQYITFVKPAFEEFCLPTKKYADVIIPRGADNLVAINLIVQHIQDILNGGPSKRQTNGCLNGYTPSRKRQASESSSRPH

SEQ ID NO: 57511 - protein, 125 aa, Homo sapiens
KSEYSEENIDFWISCEEYKKIKSPSKLSPKAKKIYNEFISVQATKEVNLDSCTREETSRNMLEPTITCFDEAQKKIFNLMEKDSYRRFLKSRFYLDLVNPSSCGAEKQKGAKSSADCASLVPQCA

SEQ ID NO: 57512 - protein, 44 aa, Homo sapiens
IYAAKTAVTATNVSAHGSQANSPSTPNSAGGYPSPCYQPDRRIQ

SEQ ID NO: 57513 - protein, 457 aa, Homo sapiens
LCGFRGVAAQVLRPGAGVRLPIQPSRGVRQWQPDVEWAQQFGGAVMYPSKETAHWKPPPWNDVDPPKDTIVKNITLNFGPQHPAAHGVLRLVMELSGEMVRKCDPHIGLLHRGTEKLIEYKTYLQALPYFDRLDYVSMMCNEQAYSLAVEKLLNIRPPPRAQWIRVLFGEITRLLNHIMAVTTHALDLGAMTPFFWLFEEREKMFEFYERVSGARMHAAYIRPGGVHQDLPLGLMDDIYQFSKNFSLRLDELEELLTNNRIWRNRTIDIGVVTAEEALNYGFSGVMLRGSGIQWDLRKTQPYDVYDQVEFDVPVGSRGDCYDRYLCRVEEMRQSLRIIAQCLNKMPPGEIKVDDAKVSPPKRAEMKTSMESLIHHFKLYTEGYQVPPGATYTAIEAPKGEFGVYLVSDGSSRPYRCKIKAPGFAHLAGLDKMSKGHMLADVVAIIGTQDIVFGEVDR

SEQ ID NO: 57514 - protein, 8 aa, Homo sapiens
LLIFGCSG

SEQ ID NO: 57515 - protein, 327 aa, Homo sapiens
MEVKAVRILVPKAAITHDIPNKNTKVKSLGHHKGEFLGQSEGVIEPNKELSEVKNVLEKLKNSERRLLQDKEGLSNQLRVQTEVNRELKKLLVASVGDDLQYHFERLAREKNQLILENEALGRNTAQLSEQLERMSIQCDVWRSKFLASRVMADELTNSRAALQRQNRDAHGAIQDLLSEREQFRQEMIATQKLLEELLVSLQWGREQTYSPSVQPHSTAELALTNHKLAKAVNSHLLGNVGINNQKKIPSTVEFCSTPAEKMAETVLRILDPVTCKESSPDNPFFESSPTTLLATKKNIGRFHPYTRYENITFNCCNHCRGELIAL

SEQ ID NO: 57516 - protein, 8 aa, Homo sapiens
IVMEKGGL

SEQ ID NO: 57517 - protein, 233 aa, Homo sapiens
LIRAGRGGWVGSVGETMTSSYGHVLERQPALGGRLDSPGNLDTLQAKKNFSVSHLLDLEEAGDMVAAQADENVGEAGRSLLESPGLTSGSDTPQQDNDQLNSEEKKKRKQRRNRTTFNSSQLQALERVFERTHYPDAFVREDLARRVNLTEARVQVWFQNRRAKFRRNERAMLANKNASLLKSYSGDVTAVEQPIVPRPAPRPTDYLSWGTASPYRSSSLPRCCLHEGLHNGF

SEQ ID NO: 57518 - protein, 261 aa, Homo sapiens
LIRAGRGGWVGSVGETMTSSYGHVLERQPALGGRLDSPGNLDTLQAKKNFSVSHLLDLEEAGDMVAAQADENVGEAGRSLLESPGLTSGSDTPQQDNDQLNSEEKKKRKQRRNRTTFNSSQLQALERVFERTHYPDAFVREDLARRVNLTEARVQVWFQNRRAKFRRNERAMLANKNASLLKSYSGDVTAVEQPIVPRPAPRPTDYLSWGTASPYSAMATYSATCANNSPAQGINMANSIANLRLKAKEYSLQRNQVPTVN

SEQ ID NO: 57519 - protein, 235 aa, Homo sapiens
LSQRRPLITVAMPGGLLLGDVAPNFEANTTVGRIRFHDFLGDSWGILFSHPRDFTPVCTTELGRAAKLAPEFAKRNVKLIALSIDSVEDHLAWSKDINAYNCEEPTEKLPFPIIDDRNRELAILLGMLDPAEKDEKGMPVTARVVFVFGPDKKLKLSILYPATTGRNFDEILRVVISLQLTAEKRVATPVDWKDGDSVMVLPTIPEEEAKKLFPKGVFTKELPSGKKYLRYTPQP

SEQ ID NO: 57520 - protein, 509 aa, Homo sapiens
IDIKQLIAKKIKLTAEAEELKPFFMKEVGSHFDDFVTNLIEKSASLDNGGCALTTFSVLEGEKNNHRAKDLRAPPEQGKIFIARRSLLDELLEVDHIRTIYHMFIALLILFILSTLVVDYIDEGRLVLEFSLLSYAFGKFPTVVWTWWIMFLSTFSVPYFLFQHWATGYSKSSHPLIRSLFHGFLFMIFQIGVLGFGPTYVVLAYTLPPASRFIIIFEQIRFVMKAHSFVRENVPRVLNSAKEKSSTVPIPTVNQYLYFLFAPTLIYRDSYPRNPTVRWGYVAMKFAQVFGCFFYVYYIFERLCAPLFRNIKQEPFSARVLVLCVFNSILPGVLILFLTFFAFLHCWLNAFAEMLRFGDRMFYKDWWNSTSYSNYYRTWNVVVHDWLYYYAYKDFLWFFSKRFKSAAMLAVFAVSAVVHEYALAVCLSFFYPVLFVLFMFFGMAFNFIVNDSRKKPIWNVLMWTSLFLGNGVLLCFYSQEWYARQHCPLKNPTFLDYVRPRSWTCRYVF

SEQ ID NO: 57521 - protein, 240 aa, Homo sapiens
IAALASGSFWFFSTPEVETTAVQEFQNQMNQLKNKYQGQDEKLWKRSQTFLEKHLNSSHPRSQPAILLLTAARDAEEALRCLSEQIADAYSSFRSVRAIRIDGTDKATQDSDTVKLEVDQELSNGFKNGQNAAVVHRFESFPAGSTLIFYKYCDHENAAFKDVALVLTVLLEEETLGTSLGLKEVEEKVRDFLKVKFTNSNTPNSYNHMDPDKLNGLWSRISHLVLPVQPENALKRGICL

SEQ ID NO: 57522 - protein, 18 aa, Homo sapiens
MQVRVMTCFLLALRIISI

SEQ ID NO: 57523 - protein, 30 aa, Homo sapiens
LPSFVVSQRCAGLLLAALRIQGVGCQVQVS

SEQ ID NO: 57524 - protein, 475 aa, Homo sapiens
LDSILFLLNNVHLSHPVYVRRAATENIPVVRRPDRKDLLGYLNGEASTSASIDRSAPLEIGLQRSTQVKRAADEVLAEAKKPRIEDEECVRLDKERLAARLEGHKEGIVQTEQIRSLSEAMSVEKIAAIKAKIMAKKRSTIKTDLDDDITALKQRSFVDAEVDVTRDIVSRERVWRTRTTILQSTGKNFSKNIFAILQSVKAREEGRAPEQRPAPNAAPVDPTLRTKQPIPAAYNRYDQERFKGKEETEGFKIDTMGTYHGMTLKSVTEGASARKTQTPAAQPVPRPVSQARPPPNQKKGSRTPIIIIPAATTSLITMLNAKDLLQDLKFVPSDEKKKQGCQRENETLIQRRKDQMQPGGTAISVTVPYRVVDQPLKLMPQDWDRVVAVFVQGPAWQFKGWPWLLPDGSPVDIFAKIKAFHLKYDEVRLDPNVQKWDVTVLELSYHKRHLDRPVFLRFWETLDRYMVKHKSHLRF

SEQ ID NO: 57525 - protein, 543 aa, Homo sapiens
VSFYTQPFSHYGQALCVSFPQPCRAAERLQVLLTYRVGEGPGVCWLAPEQTAGKKKPFVYTQGQAVLNRAFFPCFDTPAVKYKYSALIEVPDGFTAVMSASTWEKRGPNKFFFQMCQPIPSYLIALAIGDLVSAEVGPRSRVWAEPCLIDAAKEEYNGVIEEFLATGEKLFGPYVWGRYDLLFMPPSFPFGGMENPCLTFVTPCLLAGDRSLADVIIHEISHSWFGNLVTNANWGEFWLNEGFTMYAQRRISTILFGAAYTCLEAATGRALLRQHMDITGEENPLNKLRVKIEPGVDPDDTYNETPYEKGFCFVSYLAHLVGDQDQFDSFLKAYVHEFKFRSILADDFLDFYLEYFPELKKKRVDIIPGFEFDRWLNTPGWPPYLPDLSPGDSLMKPAEELAQLWAAEELDMKAIEAVAISPWKTYQLVYFLDKILQKSPLPPGNVKKLGDTYPSISNARNAELRLRWGQIVLKNDHQEDFWKVKEFLHNQGKQKYTLPLYHAMMGGSEVAQTLAKETFASTASQLHSNVVNYVQQIVAPKGS

SEQ ID NO: 57526 - protein, 1939 aa, Homo sapiens
KPPSCPGKDQRDINYKSSGTPRSLEPDEGAASWASSPVCSPVQGKRPSPSPGAISFSSVHQQSQPVTATVAPFQYRLQTDQKPGPLSQGSWPLDGYAEPLHETEESFSCMDARIVHALLAGRMLGSSVKSVQPEVELSSGGGDEGADEPRGAGRKAAAADGRGMLPKRAKAPGGGGGMAKASAAELKVFKSGSVDSRVPGGPPASNLRKQKSLTNLSFLTDSEKKLQLYEPEWSDDMAKAPKGLGKVGSKGREAPLMSKTLSKSEHSLFQAKGSPAGGAKTPLAPLAPNLGKPSRIPRGPYAEVKPLSKAPEAAVSEDGKSDDELLSSKAKAQKSSGPVPSAKGQEERAFLKVDPELVVTVLGDLEQLLFSQMLDPESQRKRTVQNVLDLRQNLEETMSSLRGSQVTHSSLEMTCYDSDDANPRSVSSLSNRSSPLSWRYGQSSPRLQAGDAPSVGGSCRSEGTPAWYMHGERAHYSHTMPMRSPSKLSHISRLELVESLDSDEVDLKSGYMSDSDLMGKTMTEDDDITTGWDESSSISSGLSDASDNLSSEEFNASSSLNSLPSTPTASRRNSTIVLRTDSEKRSLAESGLSWFSESEEKAPKKLEYDSGSLKMEPGTSKWRRERPESCDDSSKGGELKKPISLGHPGSLKKGKTPPVAVTSPITHTAQSALKVAGKPEGKATDKGKLAVKNTGLQRSSSDAGRDRLSDAKKPPSGIARPSTSGSFGYKKPPPATGTATVMQTGGSATLSKIQKSSGIPVKPVNGRKTSLDVSNSAEPGFLAPGARSNIQYRSLPRPAKSSSMSVTGGRGGPRPVSSSIDPSLLSTKQGGLTPSRLKEPTKVASGRTTPAPVNQTDREKEKAKAKAVALDSDNISLKSIGSPESTPKNQASHPTATKLAELPPTPLRATAKSFVKPPSLANLDKVNSNSLDLPSSSDTTHASKVPDLHATSSASGGPLPSCFTPSPAPILNINSASFSQGLELMSGFSVPKETRMYPKLSGLHRSMESLQMPMSLPSAFPSSTPVPTPPAPPAAPTEEETEELTWSGSPRAGQLDSNQRDRNTLPKKGLRYQLQSQEETKERRHSHTIGGLPESDDQSELPSPPALPMSLSAKGQLTNIVHGSVLSLASSASSTYSSAEERMQSEQIRKLRRELESSQEKVATLTSQLSANANLVAAFEQSLVNMTSRLRHLAETAEEKDTELLDLRETIDFLKKKNSEAQAVIQGALNASETTPKELRIKRQNSSDSISSLNSITSHSSIGSSKDADAKKKKKKSWLRSSFNKAFSIKKGPKSASSYSDIEEIATPDSSAPSSPKLQHGSTETASPSIKSSTSSSVGTDVTEGPAHPAPHTRLFHANEEEEPEKKEVSELRSELWEKEMKLTDIRLEALNSAHQLDQLRETMHNMQLEVDLLKAENDRLKVAPGPSSGSTPGQVPGSSALSSPRRSLGLALTHSFGPSLADTDLSPMDGISTCGPKEEVTLRVVVRMPPQHIIKGDLKQQEFFLGCSKVSGKVDWKMLDEAVFQVFKDYISKMDPASTLGLSTESIHGYSISHVKRVLDAEPPEMPPCRRGVNNISVSLKGLKEKCVDSLVFETLIPKPMMQHYISLLLKHRRLVLSGPSGTGKTYLTNRLAEYLVERSGREVTEGIVSTFNMHQQSCKDLQLYLSNLANQIDRETGIGDVPLVILLDDLSEAGSISELVNGALTCKYHKCPYIIGTTNQPVKMTPNHGLHLSFRMLTFSNNVEPANGFLVRYLRRKLVESDSDINANKEELLRVLDWVPKLWYHLHTFLEKHSTSDFLIGPCFFLSCPIGIEDFRTWFIDLWNNSIIPYLQEGAKDGIKVHGQKAAWEDPVEWVRDTLPWPSAQQDQSKLYHLPPPTVGPHSIASPPEDRTVKDSTPSSLDSDPLMAMLLKLQEAANYIESPDRETILDPNLQATL

SEQ ID NO: 57527 - protein, 6 aa, Homo sapiens
VYPSHR

SEQ ID NO: 57528 - protein, 43 aa, Homo sapiens
TAAPRRATRPPKVSRGRENGKLPTSWKRKLLISLDEYASTLEF

SEQ ID NO: 57529 - protein, 12 aa, Homo sapiens
LSSKVPVASDNG

SEQ ID NO: 57530 - protein, 47 aa, Homo sapiens
LDLEKEAVELEIAMLFRVNVCRYWGKGRDQSKNGSGLKFIFHFLLSL

SEQ ID NO: 57531 - protein, 50 aa, Homo sapiens
IMSLDFDNIEQLMFLKMNLKNVNYDYSTLVLSWDPEQNEVVQSSEKEILP

SEQ ID NO: 57532 - protein, 5 aa, Homo sapiens
MRQRS

SEQ ID NO: 57533 - protein, 23 aa, Homo sapiens
VNAIINSGPREDSIRIGRAEPGP

SEQ ID NO: 57534 - protein, 68 aa, Homo sapiens
IKNGKHTFSEVEVFEYLNAVTDSCDPAPGPDPFSLIGESTIYCGDNSVWNHAAPECKSHLSIYFLLHL

SEQ ID NO: 57535 - protein, 347 aa, Homo sapiens
IKKNAIIDDYKVTSQVLGLGINGKVLQIFNKRTQEKFALKMLQDCPKARREVELHWRASQCPHIVRIVDVYENLYAGRKCLLIVMECLDGGELFSRIQDRGDQAFTEREASEIMKSIGEAIQYLHSINIAHRDVKPENLLYTSKRPNAILKLTDFGFAKETTSHNSLTTPCYTPYYVAPEVLGPEKYDKSCDMWSLGVIMYILLCGYPPFYSNHGLAISPGMKTRIRMGQYEFPNPEWSEVSEEVKMLIRNLLKTEPTQRMTITEFMNHPWIMQSTKVPQTPLHTSRVLKEDKERWEDVKEEMTSALATMRVDYEQIKIKKIEDASNPLLLKRRKKARALEAAALAH

SEQ ID NO: 57536 - skipped

SEQ ID NO: 57537 - protein, 354 aa, Homo sapiens
LIIGATVFKALEQPHEISQRTTIVIQKQTFISQHSCVNSTELDELIQQIVAAINAGIIPLGNTSNQISHWDLGSSFFFAGTVITTIGFGNISPRTEGGKIFCIIYALLGIPLFGFLLAGVGDQLGTIFGKGIAKVEDTFIKWNVSQTKIRIISTIIFILFGCVLFVALPAIIFKHIEGWSALDAIYFVVITLTTIGFGDYVAGGSDIEYLDFYKPVVWFWILVGLAYFAAVLSMIGDWLRVISKKTKEEVGEFRAHAAEWTANVTAEFKETRRRLSVEIYDKFQRATSIKRKLSAELAGNHNQELTPCRRTLSVNHLTSERDVLPPLLKTESIYLNGLTPHCAGEEIAVIENIK

SEQ ID NO: 57538 - protein, 687 aa, Homo sapiens
KTIMKENTELVQKLSNYEQKIKESKKHVQETRKQNMILSDEAIKYKDKIKTLEKNQEILDDTAKNLRVMLESEREQNVKNQDLISENKKSIEKLKDVISMNASEFSEVQIALNEAKLSEEKVKSECHRVQEENARLKKKKEQLQQEIEDWSKLHAELSEQIKSFEKSQKDLEVALTHKDDNINALTNCITQLNLLECESESEGQNKGGNDSDELANGEVGGDRNEKMKNQIKQMMDVSRTQTAISVVEEDLKLLQLKLRASVSTKCNLEDQVKKLEDDRNSLQAAKAGLEDECKTLRQKVEILNELYQQKEMALQKKLSQEEYERQEREHRLSAADEKAVSAAEEVKTYKRRIEEMEDELQKTERSFKNQIATHEKKAHENWLKARAAERAIAEEKREAANLRHKLLELTQKMAMLQEEPVIVKPMPGKPNTQNPPRRGPLSQNGSFGPSPVSGGECSPPLTVEPPVRPLSATLNRRDMPRSEFGSVDGPLPHPRWSAEASGKPSPSDPGSGTATMMNSSSRGSSPTRVLDEGKVNMAPKGPPPFPGVPLMSTPMGGPVPPPIRYGPPPQLCGPFGPRPLPPPFGPGMRPPLGLREFAPGVPPGRRDLPLHPRGFLPGHAPFRPLGSLGPREYFIPGTRLPPPTHGPQEYPPPPAVRDLLPSGSRDEPPPASQSTSQDCSQALKQSP

SEQ ID NO: 57539 - protein, 376 aa, Homo sapiens
LRSSRARLLELFTDLSCNPEMMKNAADSYFSLLQGFINSLDESTQESKLRYIQNFKWTDTLQGQVPSAQQDAVFELISMGFNVALWYTKYASRLAGKENITEDEAKEVHRSLKIAAGIFKHLKESHLPKLITPAEKGRDLESRLIEAYVIQCQAEAQEVTIARAIELKHAPGLIAALAYETANFYQKADHTLSSLEPAYSAKWRKYLHLKMCFYTAYAYCYHGETLLASDKCGEAIRSLQEAEKLYAKAEALCKEYGETKGPGPTVKPSGHLFFRKLGNLVKNTLEKCQRENGFIYFQKIPTEAPQLELKANYGLVEPIPFEFPPTSVQWTPETLAAFDLTKRPKDDSTKPKPEEEVKPVKEPDIKPQKDTGCYIS

SEQ ID NO: 57540 - protein, 558 aa, Homo sapiens
LWVLGIAYYMYSGGGSALAGGAGGGAGRKEDWNEIDPIKKKDLHHSNGEEKAQSMETLPPGKVRWPDFNQEAYVGGTMVRSGQDPYARNKFNQVESDKLRMDRAIPDTRHDQCQRKQWRVDLPATSVVITFHNEARSALLRTVVSVLKKSPPHLIKEIILVDDYSNDPEDGALLGKIEKVRVLRNDRREGLMRSRVRGADAAQAKVLTFLDSHCECNEHWLEPLLERVAEDRTRVVSPIIDVINMDNFQYVGASADLKGGFDWNLVFKWDYMTPEQRRSRQGNPVAPIKTPMIAGGLFVMDKFYFEELGKYDMMMDVWGGENLEISFRVWQCGGSLEIIPCSRVGHVFRKQHPYTFPGGSGTVFARNTRRAAEVWMDEYKNFYYAAVPSARNVPYGNIQSRLELRKKLSCKPFKWYLENVYPELRVPDHQDIAFGALQQGTNCLDTLGHFADGVVGVYECHNAGGNQEWALTKEKSVKHMDLCLTVVDRAPGSLIKLQGCRENDSRQKWEQIEGNSKLRHVGSNLCLDSRTAKSGGLSVEVCGPALSQQWKFTLNLQQ

SEQ ID NO: 57541 - protein, 33 aa, Homo sapiens
IQKLGLQASDIKSFSALAELVAAAKDQATAEQP

SEQ ID NO: 57542 - protein, 157 aa, Homo sapiens
RNPRPGEENGKDYYFVTREVMQRDIAAGDFIEHAEFSGNLYGTSKVAVQAVQAMNRICVLDVDLQGVRNIKATDLRPIYISVQPPSLHVLEQRLRQRNTETEESLVKRLAAAQADMESSKEPGLFDVVIINDSLDQAYAELKEALSEEIKKAQRTGA

SEQ ID NO: 57543 - protein, 192 aa, Homo sapiens
IYRVLRYVNSTRAPQRAHEVLQELRDISSMAMEYFDEKIVPILKRKLPGSDVSGRLMGSPPVPGPSAALTTMQLFSKQNPSRQEVTKLQQQVKTNGAGVTVLRREISELRTKVQEQQKQLQDQDQKLLEQTQIIGEQNARLAELERKLREVMESAVGNSSGSGQNEESPRKRKKATEAIDSLRKSKRLRNRK

SEQ ID NO: 57544 - protein, 115 aa, Homo sapiens
KYSAAKSKVEKKKKEKVFATVTKPVGGDKNGGTRVVKLRKMPRYYPTEDVPGKLLSHGNKPFSQHVRKLRASITPGTILILLTGGHRGKRVVFLKQLASGLLLVTGPLALNRVPL

SEQ ID NO: 57545 - protein, 6 aa, Homo sapiens
MRQRSK

SEQ ID NO: 57546 - protein, 30 aa, Homo sapiens
VNSLSVKSEALSLPTVRDWTLEDSSQELWK

SEQ ID NO: 57547 - protein, 223 aa, Homo sapiens
TPFKREKSFEIVIMVLKDKFQVAVNGKHTLLYGHRIGPEKIDTLGIYGKVNIHSIGFSFSSDLQSTQASSLELTEISRENVPKSGTPQLRLPFAARLNTPMGPGRTVVVKGEVNANAKSFNVDLLAGKSKDIALHLNPRLNIKAFVRNSFLQESWGEEERNITSFPFSPGMYFEMIIYCDVREFKVAVNGVHSLEYKHRFKELSSIDTLEINGDIHLLEVRSW

SEQ ID NO: 57548 - protein, 8 aa, Homo sapiens
MPVLWMWP

SEQ ID NO: 57549 - protein, 89 aa, Homo sapiens [sequence omitted]

SEQ ID NO: 57550 - protein, 85 aa, Homo sapiens
MELDIGDATQVYVAFLVYLDLMESKSWHEVNCVGLPELQLICLVGTEIEGEGLQTVVPTPITASLSHNRIREILKASRKLQEYFS

SEQ ID NO: 57551 - protein, 6 aa, Homo sapiens
VPLPSP

SEQ ID NO: 57552 - protein, 380 aa, Homo sapiens
LPLPLPLPAPGPHPAARPMVWPWVAMASRWGPLIGLAPCCLWLLGAVLLMDASARPANHSSTRERVANREENEILPPDHLNGVKLEMDGHLNRGFHQEVFLGKDLGGFDEDAEPRRSRRKLMVIFSKVDVNTDRKISAKEMQRWIMEKTAEHFQEAMEESKTHFRAVDPDGDGHVSWDEYKVKFLASKGHSEKEVADAIRLNEELKVDEETQEVLENLKDRWYQADSPPADLLLTEEEFLSFLHPEHSRGMLRFMVKEIVRDLDQDGDKQLSVPEFISLPVGTVENQQGQDIDDNWVKDRKKEFEELIDSNHDGIVTAEELESYMDPMNEYNALNEAKQMIAVADENQNHHLEPEEVLKYSEFFTGSKLVDYARSVHEEF

SEQ ID NO: 57553 - protein, 29 aa, Homo sapiens
VVDLEGSLKVVYPSKADLATAPPHVTVVR

SEQ ID NO: 57554 - protein, 255 aa, Homo sapiens
LPLLTRAGLQGRTGLALYVAGLNALLLLLYRPPRYQIAIRACFLGFVFGCGTLLSFSQSSWSHFGWYMCSLSLFHYSEYLVTAVNNPKSLSLDSFLLNHSLEYTVAALSSWLEFTLENIFWPELKQITWLSVTGLLMVVFGECLRKAAMFTAGSNFNHVVQNEKSDTHTLVTSGVYAWFRHPSYVGWFYWSIGTQVMLCNPICGVSYALTVWRFFRDRTEEEEISLIHFFGEEYLEYKKRVPTGLPFIKGVKVDL

SEQ ID NO: 57555 - protein, 69 aa, Homo sapiens
VAGLNALLLLLYRPPRYQIAIRACFLGFVFGCGTLLSFSQSSWSHFGWSHLVHPHSHCRIFPYTMISVP

SEQ ID NO: 57556 - protein, 8 aa, Homo sapiens
LGIILVTG

SEQ ID NO: 57557 - protein, 218 aa, Homo sapiens
VPLSLKNVDKVLEVPPVVYSRQEQEEEGRKRYEAQKLERMETKWRNGDIVQPVLNPEPNTVSYSQSSLIHLVGPSDCTLHGFVHGGVTMKLMDEVAGIVAARHCKTNIVTASVDAINFHDKIRKGCVITISGRMTFTSNKSMEIEVLVDADPVVDSSQKRYRAASAFFTYVSLSQEGRSLPVPQLVPETEDEKKRFEEGKGRYLQMKAKRQGHAEPQP

SEQ ID NO: 57558 - protein, 73 aa, Homo sapiens
VLVDADPVVDSSQKRYRAASAFFTYVSLSQEGRSLPVPQLVPETEDEKKRFEEGKGRYLQMKAKRQGHAEPQP

SEQ ID NO: 57559 - protein, 1053 aa, Homo sapiens
LPSARRCSEAGRAPRPERAAQRHGGGGGGSSLDPRSSPRRGAASPRPLEPRELRELRSASRAPPCRSRPGLAMLRRPAPALAPAARLLLAGLLCGGGVWAARVNKHKPWLEPTYHGIVTENDNTVLLDPPLIALDKDAPLRFAESFEVTVTKEGEICGFKIHGQNVPFDAVVVDKSTGEGVIRSKEKLDCELQKDYSFTIQAYDCGKGPDGTNVKKSHKATVHIQVNDVNEYAPVFKEKSYKATVIEGKQYDSILRVEAVDADCSPQFSQICSYEIITPDVPFTVDKDGYIKNTEKLNYGKEHQYKLTVTAYDCGKKRATEDVLVKISIKPTCTPGWQGWNNRIEYEPGTGALAVFPNIHLETCDEPVASVQATVELETSHIGKGCDRDTYSEKSLHRLCGAAAGTAELLPSPSGSLNWTMGLPTDNGHDSDQVFEFNGTQAVRIPDGVVSVSPKEPFTISVWMRHGPFGRKKETILCSSDKTDMNRHHYSLYVHGCRLIFLFRQDPSEEKKYRPAEFHWKLNQVCDEEWHHYVLNVEFPSVTLYVDGTSHEPFSVTEDYPLHPSKIETQLVVGACWQEFSGVENDNETEPVTVASAGGDLHMTQFFRGNLAGLTLRSGKLADKKVIDCLYTCKEGLDLQVLEDSGRGVQIQAHPSQLVLTLEGEDLGELDKAMQHISYLNSRQFPTPGIRRLKITSTIKCFNEATCISVPPVDGYVMVLQPEEPKISLSGVHHFARAASEFESSEGVFLFPELRIISTITREVEPEGDGAEDPTVQESLVSEEIVHDLDTCEVTVEGEELNHEQESLEVDMARLQQKGIEVSSSELGMTFTGVDTMASYEEVLHLLRYRNWHARSLLDRKFKLICSELNGRYISNEFKVEVNVIHTANPMEHANHMAAQPQFVHPEHRSFVDLSGHNLANPHPFAVVPSTATVVIVVCVSFLVFMIILGVFRIRAAHRRTMRDQDTGKENEMDWDDSALTITVNPMETYEDQHSSEEEEEEEEEEESEDGEEEDDITSAESESSEEEEGEQGDPQNATRQQQLEWDDSTLSY

SEQ ID NO: 57560 - protein, 74 aa, Homo sapiens
LMVGKLERDLYTQQKVEILTALRKLGEKLTADDEAFLSANAGAILSQFEKVSTDLGSGDKILALASFEVEKTKK

SEQ ID NO: 57561 - protein, 25 aa, Homo sapiens
LLAIRSRLSNFLSPRIAMSRETFAG

SEQ ID NO: 57562 - protein, 325 aa, Homo sapiens
VFFNSCIARPGEFRPLPGSAARRMVWKRLGALVMFPLQMIYLVVKAAVGLVLPAKLRDLSRENVLITGGGRGIGRQLAREFAERGARKIVLWGRTEKCLKETTEEIRQMGTECHYFICDVGNREEVYQTAKAVREKVGDITILVNNAAVVHGKSLMDSDDDALLKSQHINTLGQFWTTKAFLPRMLELQNGHIVCLNSVLALSAIPGAIDYCTSKASAFAFMESLTLGLLDCPGVSATTVLPFHTSTEMFQGMRVRFPNLFPPLKPETVARRTVEAVQLNQALLLLPWTMHALVILKSILPQAALEEIHKFSGTYTCMNTFKGRT

SEQ ID NO: 57563 - protein, 24 aa, Homo sapiens
VKGIYKQMPGCFNFLRKKLFFKTS

SEQ ID NO: 57564 - protein, 68 aa, Homo sapiens
MSHRTSSTFRAERSFHSSSSSSSSSTSSSASRALPAQDPPMEKALSMFSDDFGSFMRPHSEPLAFPGK

SEQ ID NO: 57565 - protein, 96 aa, Homo sapiens
IKTLGDAYEFAVDVRDFSPEDIIVTTSNNHIEVRAEKLAADGTVMNTFAHKCQLPEDVDPTSVTSALREDGSLTIRARRHPHTEHVQQTFRTEIKI

SEQ ID NO: 57566 - protein, 43 aa, Homo sapiens
LDDGWDPFAALPLEAPVGGAAAAPALQPGPRRNTRYRNKRQRG

SEQ ID NO: 57567 - protein, 416 aa, Homo sapiens
LIFGATNWDLIGRKEVPKQQAAYRNLGQNLWGPHRYGCLAGVRVRTVVSGSCAAHSLLITTEGKLWSWGRNEKGQLGHGDTKRVEAPRLIEGLSHEVIVSAACGRNHTLALTETGSVFAFGENKMGQLGLGNQTDAVPSPAQIMYNGQPITKMACGAEFSMIMDCKGNLYSFGCPEYGQLGHNSDGKFIARAQRIEYDCELVPRRVAIFIEKTKDGQILPVPNVVVRDVACGANHTLVLDSQKRVFSWGFGGYGRLGHAEQKDEMVPRLVKLFDFPGRGASQIYAGYTCSFAVSEVGGLFFWGATNTSRESTMYPKAVQDLCGWRIRSLACGKSSIIVAADESTISWGPSPTFGELGYGDHKPKSSTAAQEVKTLDGIFSEQVAMGYSHSLVIARDESETEKEKIKKLPEYNPRTL

SEQ ID NO: 57568 - protein, 112 aa, Homo sapiens
VGRFFGNSWAETYRNRFWKEHHFEAIALVEKALQAAYGASAPSVTSAALRWMYHHSQLQGAHGDAVILGMSSLEQLEQNLAATEEGPLEPAVVDAFNQAWHLVAHECPNYFR

SEQ ID NO: 57569 - protein, 257 aa, Homo sapiens
LPPQQIEKNLSDLIDLVPSLCEDLLSSVDQPLKIARDKVVGKDYLLCDYNRDGDSYRSPWSNKYDPPLEDGAMPSARLRKLEVEANNAFDQYRDLYFEGGVSSVYLWDLDHGFAGVILIKKAGDGSKKIKGCWDSIHVVEVQEKSSGRTAHYKLTSTVMLWLQTNKSGSGTMNLGGSLTRQMEKDETVSDCSPHIANIGRLVEDMENKIRSTLNEIYFGKTKDIVNGLRSVQTFADKSKQEALKNDLVEALKRKQQC

SEQ ID NO: 57570 - protein, 5 aa, Homo sapiens
MKATG

SEQ ID NO: 57571 - protein, 437 aa, Homo sapiens
KFTMSILKIHAREIFDSRGNPTVEVDLFTSKGLFRAAVPSGASTGIYEALELRDNDKTRYMGKGVSKAVEHINKTIAPALVSKKLNVTEQEKIDKLMIEMDGTENKSKFGANAILGVSLAVCKAGAVEKGVPLYRHIADLAGNSEVILPVPAFNVINGGSHAGNKLAMQEFMILPVGAANFREAMRIGAEVYHNLKNVIKEKYGKDATNVGDEGGFAPNILENKEGLELLKTAIGKAGYTDKVVIGMDVAASEFFRSGKYDLDFKSPDDPSRYISPDQLADLYKSFIKDYPVVSIEDPFDQDDWGAWQKFTASAGIQVVGDDLTVTNPKRIAKAVNEKSCNCLLLKVNQIGSVTESLQACKLAQANGWGVMVSHRSGETEDTFIADLVVGLCTGQIKTGAPCRSERLAKYNQLLRIEEELGSKAKFAGRNFRNPLAK

SEQ ID NO: 57572 - protein, 134 aa, Homo sapiens
MIFGLLQAHGNLVNFHRMIKLTTGKEAALSYGFYGCHCGVGGRGSPKDATDRCCVTHDCCYKRLEKRGCGTKFLSYKFSNSGSRITCAKQDSCRSQLCECDKAAATCFARNKTTYNKKYQYYSNKHCRGSTPRC

SEQ ID NO: 57573 - protein, 38 aa, Homo sapiens
LECGHVCSCTECYRALPEPKKCPICRQAITRVIPLYNS

SEQ ID NO: 57574 - protein, 33 aa, Homo sapiens
VKKPHRYRPGTVTLGDIRHYQKSTELLIRKLPF

SEQ ID NO: 57575 - protein, 757 aa, Homo sapiens
TRAMMSTYKRATLDEEDLVDSLSEGDAYPNGLQVNFHSPRSGQRCWAARTQVEKRLVVLVVLLAAGLVACLAALGIQYQTRSPSVCLSEACVSVTSSILSSMDPTVDPCHDFFSYACGGWIKANPVPDGHSRWGTFSNLWEHNQAIIKHLLENSTASVSEAERKAQVYYRACMNETRIEELRAKPLMELIERLGGWNITGPWAKDNFQDTLQVVTAHYRTSPFFSVYVSADSKNSNSNVIQVDQSGLGLPSRDYYLNKTENEKVLTGYLNYMVQLGKLLGGGDEEAIRPQMQQILDFETALANITIPQEKRRDEELIYHKVTAAELQTLAPAINWLPFLNTIFYPVEINESEPIVVYDKEYLEQISTLINTTDRCLLNNYMIWNLVRKTSSFLDQRFQDADEKFMEVMYGTKKTCLPRWKFCVSDTENNLGFALGPMFVKATFAEDSKSIATEIILEIKKAFEESLSTLKWMDEETRKSAKEKADAIYNMIGYPNFIMDPKELDKVFNDYTAVPDLYFENAMRFFNFSWRVTADQLRKAPNRDQWSMTPPMVNAYYSPTKNEIVFPAGILQAPFYTRSSPKALNFGGIGVVVGHELTHAFDDQGREYDKDGNLRPWWKNSSVEAFKRQTECMVEQYSNYSVNGEPVNGRHTLGENIADNGGLKAAYRAYQNWVKKNGAEHSLPTLGLTNNQLFFLGFAQVWCSVRTPESSHEGLITDPHSPSRFRVIGSLSNSKEFSEHFRCPPGSPMNPPHKCEVW

SEQ ID NO: 57576 - protein, 188 aa, Homo sapiens
VEEDKRLKLPANWEAKKARLEWELKEEEKKKECAARGEDYEKVKLLEISAEDAERWERKKKRKNPDLGFSDYAAAQLRQYHRLTKQIKPDMETYERLREKHGEEFFPTSNSLLHGTHVPSTEEIDRMVIDLEKQIEKRDKYSRRRPYNDDADIDYINERNAKFNKKAERFYGKYTAEIKQNLERGTAV

SEQ ID NO: 57577 - protein, 13 aa, Homo sapiens
VGICKAVAMLWKL

SEQ ID NO: 57578 - protein, 466 aa, Homo sapiens
LANVIRQLGSLSKYAEDIFGELFTQANTFASRVSSLAERVDRLQVKVTQLDPKEEEVSLQGINTRKAFRSSTIQDQKLFDRNSLPVPVLETYNTCDTPPPLNNLTPYRDDGKEALKFYTDPSYFFDLWKEKMLQDTKDIMKEKRKHRKEKKDNPNRGNVNPRKIKTRKEEWEKMKMGQEFVESKEKLGTSGYPPTLVYQNGSIGCVENVDASSYPPPPQSDSASSPSPSFSEDNLPPPPAEFSYPVDNQRGSGLAGPKRSSVVSPSHPPPAPPLGSPPGPKPGFAPPPAPPPPPPPMIGIPPPPPPVGFGSPGTPPPPSPPSFPPHPDFAAPPPPPPPPAADYPTLPPPPLSQPTGGAPPPPPPPPPPGPPPPPFTGADGQPAIPPPLSDTTKPKSSLPAVSDARSDLLSAIRQGFQLRRVEEQREQEKRDVVGNDVATILSRRIAVEYSDSEDDSSEFDEDDWSD

SEQ ID NO: 57579 - protein, 35 aa, Homo sapiens
LQSLGAGGSSVVIGNIGALMGYATHKYLDSEEDEE

SEQ ID NO: 57580 - protein, 12 aa, Homo sapiens
VDDDHFKSTDAE

SEQ ID NO: 57581 - protein, 187 aa, Homo sapiens
KIDDKPVKIDKWDGSAVKNSLDDSAKKVLLEKYKYVENFGLIDGRLTICTISCFFAIVALIWDYMHPFPESKPVLALCVISYFVMMGILTIYTSYKEKSIFLVAHRKDPTGMDPDDIWQLSSSLKGFDDKYTLKLTFISGRTKQQREAEFTKSIAKFFDHSGTLVMDAYEPEISRLHDSLAIERKIK

SEQ ID NO: 57582 - protein, 21 aa, Homo sapiens
VVKKEPRVTVFLDGRRSVCCN

SEQ ID NO: 57583 - protein, 7 aa, Homo sapiens
ISISSMS

SEQ ID NO: 57584 - protein, 131 aa, Homo sapiens
MANSTAVVKIPGTPGAGGRLSPENNQVLTKKKLQDLVREVDPNEQLDEDVEEMLLQIADDFIESVVTAACQLARHRKSSTLEVKDVQLHLERQWNMWIPGFGSEEIRPYKKACTTEAHKQRMALIRKTTKK

SEQ ID NO: 57585 - protein, 364 aa, Homo sapiens
MPSGRSRLLEDFRNNRYPNLQLREIAGHIMEFSQDQHGSRFIQLKLERATPAERQLVFNEILQAAYQLMVDVFGNYVIQKFFEFGSLEQKLALAERIRGHVLSLALQMYGCRVIQKALEFIPSDQQVINEMVRELDGHVLKCVKDQNGNHVVQKCIECVQPQSLQFIIDAFKGQVFALSTHPYGCRVIQRILEHCLPDQTLPILEELHQHTEQLVQDQYGNYVIQHVLEHGRPEDKSKIVAEIRGNVLVLSQHKFASNVVEKCVTHASRTERAVLIDEVCTMNDGPHSALYTMMKDQYANYVVQKMIDVAEPGQRKIVMHKIRPHIATLRKYTYGKHILAKLEKYYMKNGVDLGPICGPPNGII

SEQ ID NO: 57586 - protein, 15 aa, Homo sapiens
LQSWRRKRKMLEITI

SEQ ID NO: 57587 - protein, 29 aa, Homo sapiens
LTEEQKAIKAKYPPVNRKYEYLDHTADVQ

SEQ ID NO: 57588 - protein, 22 aa, Homo sapiens
ITYSAMQVYNEENPEVFVIIDI

SEQ ID NO: 57589 - protein, 69 aa, Homo sapiens
LRCSWSPDGSKIAAGSADRFVYVWDTTSRRILYKLPGHAGSINEVAFHPDEPIIISASSDKRLYMGEIQ

SEQ ID NO: 57590 - protein, 21 aa, Homo sapiens
MAILSVRADFCQAQHSIFADK

SEQ ID NO: 57591 - protein, 233 aa, Homo sapiens
LPGGGSAKFPFNQWGLQPRSLLLQAARGYVVRKPAQSRLDDDPPPSTLLKDYQNVPGIEKVDDVVKRLLSLEMANKKEMLKIKQEQFMKKIVANPEDTRSLEARIIALSVKIRSYEEHLEKHRKDKAHKRYLLMSIDQRKKMLKNLRNTNYDVFEKICWGLGIEYTFPPLYYRRAHRRFVTKKALCIRVFQETQKLKKRRRALKAAAAAQKQAKRRNPDSPAKAIPKTLKDSQ

SEQ ID NO: 57592 - protein, 396 aa, Homo sapiens [sequence omitted]

SEQ ID NO: 57593 - protein, 136 aa, Homo sapiens
KGAHYCVPCYENKFAPRCARCSKTLTQGGVTYRDQPWHRECLVCTGCQTPLAGQQFTSRDEDPYCVACFGELFAPKCSSCKRPIVGLGGGKYVSFEDRHWHHNCFSCARCSTSLVGQGFVPDGDQVLCQGCSQAGP

SEQ ID NO: 57594 - protein, 40 aa, Homo sapiens
LLRLELAEMKEKYEAIVEENKKLKAKLAQYEPPQEEKRAE

SEQ ID NO: 57595 - protein, 417 aa, Homo sapiens
LARPGLACQGAGGGGSSTMSLQYGAEETPLAGSYGAADSFPKDFGYGVEEEEEEAAAAGGGVGAGAGGGCGPGGADSSKPRILLMGLRRSGKSSIQKVVFHKMSPNETLFLESTNKIYKDDISNSSFVNFQIWDFPGQMDFFDPTFDYEMIFRGTGALIYVIDAQDDYMEALTRLHITVSKAYKVNPDMNFEVFIHKVDGLSDDHKIETQRDIHQRANDDLADAGLEKLHLSFYLTSIYDHSIFEAFSKVVQKLIPQLPTLENLLNIFISNSGIEKAFLFDVVSKIYIATDSSPVDMQSYELCCDMIDVVIDVSCIYGLKEDGSGSAYDKESMAIIKLNNTTVLYLKEVTKFLALVCILREESFERKGLIDYNFHCFRKAIHEVFEVGVTSHRSCGHQTSASSLKALTHNGTPRNAI

SEQ ID NO: 57596 - protein, 171 aa, Homo sapiens
LMAGRVPQGADRIAVKAEMEAVFLENLRHAAGVLAQEDLVGLLEPINTRITDPQYFLDTPQQAAAILQKVGRPNLQLQMDIFHWQIMDGNLTGNIREFLPIVGHVQVAQVPGRGEPSSPGELNFPYLFQLLEDEGYKGFVGCEYQPRGDTVEGLSWLRSYWDRRGHPEAGQ

SEQ ID NO: 57597 - protein, 160 aa, Homo sapiens
IMYIYGHRNYFQDIQMMLGFPPPLFFQICWRFVSPAIIFFILVFTVIQYQPITYNHYQYPGWAVAIGFLMALSSVLCIPLYAMFRLCRTDGDTLLQRLKNATKPSRDWGPALLEHRTGRYAPTIAPSPEDGFEVQPLHPDKAQIPIVGSNGSSRLQDSRI

SEQ ID NO: 57598 - protein, 90 aa, Homo sapiens
VGFLELLAGLLLVMGPPMLQEISNLFLILLMMGAIFTLAALKESLSTCIPAIVCLGFLLLLNVGQLLAQTKKVVRPTRKKTLSTFKESWK

SEQ ID NO: 57599 - protein, 243 aa, Homo sapiens
LEWVERLDVTLGPVPEIGGSEAPAPQNKDQKAVDPEDDFQREMSFYRQAQAAVLAVLPRLHQLKVPTKRPTDYFAEMAKSDLQMQKIRQKLQTKQAAMERSEKAKQLRALRKYGKKVQTEVLQKRQQEKAHMMNAIKKYQKGFSDKLDFLEGDQKPLAQRKKAGAKGQQMRKGPSAKRRYKNQKFGFGGKKKGSKWNTRESYDDVSSFRAKTAHGRGLKRPGKKGSNKRPGKRTREKMKNRTH

SEQ ID NO: 57600 - protein, 76 aa, Homo sapiens
LDISSNCIKPDGLLEFAKRLERWGRGAFGHLRLFQNWLDQDAVTAREAIRRLRATCHVVSDSWDSSQAFADYVSTM

SEQ ID NO: 57601 - protein, 20 aa, Homo sapiens
KRVLPPSWKYESSTASALVA

SEQ ID NO: 57602 - protein, 35 aa, Homo sapiens
LSTFPRRDVTQLDPNKSLLEVKLFPQETLFLEAKE

SEQ ID NO: 57603 - protein, 1188 aa, Homo sapiens
TRGRCEDSAAARPFPILAMPGRNKAKSTCSCPDLQPNGQDLGENSRVARLGADESEEEGRRGSLSNAGDPEIVKSPSDPKQYRYIKLQNGLQALLISDLSNMEGKTGNTTDDEEEEEVEEEEEDDDEDSGAEIEDDDEEGFDDEDEFDDEHDDDLDTEDNELEELEERAEARKKTTEKQQLQSLFLLWSKLTDRLWFKSTYSKMSSTLLVETRNLYGVVGAESRSAPVQHLAGWQAEEQQGETDTVLSAAALCVGVGSFADPDDLPGLAHFLEHMVFMGSLKYPDENGFDAFLKKHGGSDNASTDCERTVFQFDVQRKYFKEALDRWAQFFIHPLMIRDAIDREVEAVDSEYQLARPSDANRKEMLFGSLARPGHPMGKFFWGNAETLKHEPRKNNIDTHARLREFWMRYYSSHYMTLVVQSKETLDTLEKWVTEIFSQIPNNGLPRPNFGHLTDPFDTPAFNKLYRVVPIRKIHALTITWALPPQQQHYRVKPLHYISWLVGHEGKGSILSFLRKKCWALALFGGNGETGFEQNSTYSVFSISITLTDEGYEHFYEVAYTVFQYLKMLQKLGPEKRIFEEIRKIEDNEFHYQEQTDPVEYVENMCENMQLYPLQDILTGDQLLFEYKPEVIGEALNQLVPQKANLVLLSGANEGKCDLKEKWFGTQYSIEDIENSWAELWNSNFELNPDLHLPAENKYIATDFTLKAFDCPETEYPVKIVNTPQGCLWYKKDNKFKIPKAYIRFHLISPLIQKSAANVVLFDIFVNILTHNLAEPAYEADVAQLEYKLVAGEHGLIIRVKGFNHKLPLLFQLIIDYLAEFNSTPAVFTMITEQLKKTYFNILIKPETLAKDVRLLILEYARWSMIDKYQALMDGLSLESLLSFVKEFKSQLFVEGLVQGNVTSTESMDFLKYVVDKLNFKPLEQEMPVQFQVVELPSGHHLCKVKALNKGDANSEVTVYYQSGTRSLREYTLMELLVMHMEEPCFDFLRTKQTLGYHVYPTCRNTSGILGFSVTVGTQATKYNSEVVDKKIEEFLSSFEEKIENLTEEAFNTQVTALIKLKECEDTHLGEEVDRNWNEVVTQQYLFDRLAHEIEALKSFSKSDLVNWFKAHRGPGSKMLSVHVVGYGKYELEEDGTPSSEDSNSSCEVMQLTYLPTSPLLADCIIPITDIRAFTTTLNLLPYHKIVK

SEQ ID NO: 57604 - protein, 238 aa, Homo sapiens
LPSRRPSGSEPVVPHSESAMASVTDGKTGVKDASDQNFDYMFKLLIIGNSSVGKTSFLFRYADDTFTPAFVSTVGIDFKVKTVYRHEKRVKLQIWDTAGQERYRTITTAYYRGAMGFILMYDITNEESFNAVQDWATQIKTYSWDNAQVILVGNKCDMEEERVVPTEKGQLLAEQLGFDFFEASAKENISVRQAFERLVDAICDKMSDSLDTDPSMLGSSKNTRLSDTPPLLQQNCSC

SEQ ID NO: 57605 - protein, 40 aa, Homo sapiens
IALQLKATLENITNLRPVGEDFRWYLKVRPGRGPGRGGPS

SEQ ID NO: 57606 - protein, 4 aa, Homo sapiens
IKPI

SEQ ID NO: 57607 - protein, 314 aa, Homo sapiens
VRTQLGLPPLLLLTMALAGGSGTASAEAFDSVLGDTASCHRACQLTYPLHTYPKEEELYACQRGCRLFSICQFVDDGIDLNRTKLECESACTEAYSQSDEQYACHLGCQNQLPFAELRQEQLMSLMPKMHLLFPLTLVRSFWSDMMDSAQSFITSSWTFYLQADDGKIVIFQSKPEIQYAPHLEQEPTNLRESSLSKMSYLQMRNSQAHRNFLEDGESDGFLRCLSLNSGWILTTTLVLSVMVLLWICCATVATAVEQYVPSEKLSIYGDLEFMNEQKLNRYPASSLVVVRSKTEDHEEAGPLPTKVNLAHSEI

SEQ ID NO: 57608 - protein, 110 aa, Homo sapiens [sequence omitted]

SEQ ID NO: 57609 - protein, 35 aa, Homo sapiens
IEYYRKRGIHSAINASQTPDVVFASILAAFSKATS

SEQ ID NO: 57610 - protein, 8 aa, Homo sapiens
MSLRKMDL

SEQ ID NO: 57611 - protein, 125 aa, Homo sapiens
LKSFQKIQIRLVSELEKKFSGKHVVFIAQRRILPKPTRKSCTKNKQKRPRSSTVTAVHDAILEDLVFPSEIVGKKIRVKLDGSRLIKVHLDKAQQNNVEHKVETFSGVYKKLMGKDVNCEFPEFQ

SEQ ID NO: 57612 - protein, 190 aa, Homo sapiens
KKKYRGKAVGPASILKEVEDKESEGEEEDEDEDLSKYKLDEDEDEDDADLSKYNLDASEEEDSNKKKSNRRSRSKSRSSHSRSSSRSSSPSSSRSRSRSRSRSSSSSQSRSRSSSRERSRSRGSKSRSSSRSHRGSSSPRKRSYSSSSSSPERNRKRSRSRSSSSGDRKKRRTRSRSPESQVIGENTKQP

SEQ ID NO: 57613 - protein, 200 aa, Homo sapiens
KKKYRGKAVGPASILKEVEDKESEGEEEDEDEDLSKYKLDEDEDEDDADLSKYNLDASEEEDSNKKKSNRRSRSKSRSSHSRSSSRSSSPSSSRSRSRSRSRSSSSSQSRSRSSSRERSRSRGSKSRSSSRSHRGSSSPRKRSYSSSSSSPERNRKRSRSRSSSSGDRKKRRTRSRSPERRHRSSSGSSHSGSRSSSKKK

SEQ ID NO: 57614 - protein, 296 aa, Homo sapiens
RCYLEDGASKGAWLNRSSIIFAGGDKWSVDPRVSISTLNKRDYSLQIQNVDVTDDGPYTCSVQTQHTPRTMQVHLTVQVPPKIYDISNDMTVNEGTNVTLTCLATGKPEPSISWRHISPSAKPFENGQYLDIYGITRDQAGEYECSAENDVSFPDVRKVKVVVNFAPTIQEIKSGTVTPGRSGLIRCEGAGVPPPAFEWYKGEKKLFNGQQGIIIQNFSTRSILTVTNVTQEHFGNYTCVAANKLGTTNASLPLNPPSTAQYGITGSADVLFSCWYLVLTLSSFTSIFYLKNAILQ

SEQ ID NO: 57615 - protein, 121 aa, Homo sapiens
IKKYVGEKGIDIIIEMLANVNLSKDLSLLSHGGRVIVVGSRGTIEINPRDTMAKESSIIGVTLFSSTKEEFQQYAAALQAGMEIGWLKPVIGSQYPLEKVAEAHENIIHGSGATGKMILLL

SEQ ID NO: 57616 - protein, 10 aa, Homo sapiens
MWKWIIEVTR

SEQ ID NO: 57617 - protein, 305 aa, Homo sapiens
VATFGKYDSELMCYAHSKGARVVLKGDVSLKDIIDPAFRASWIAQKLNLAKTQYMDGINIDIEQEVNCLSPEYDALTALVKETTDSFHREIEGSQVTFDVAWSPKNIDRRCYNYTGIADACDFLFVMSYDEQSQIWSECIAAANAPYNQTLTGYNDYIKMSINPKKLVMGVPWYGYDYTCLNLSEDHVCTIAKVPFRGAPCSDAAGRQVPYKTIMKQINSSISGNLWDKDQRAPYYNYKDPAGHFHQVWYDNPQSISLKATYIQNYRLRGIGMWNANCLDYSGDAVAKQQTEEMWEVLKPKLLQR

SEQ ID NO: 57618 - protein, 56 aa, Homo sapiens
RFTSTKCFAFMEMDEIKPGPIVIELYKKPTDFKRKKLQLLTKKPLYLHLHQTLHKE

SEQ ID NO: 57619 - protein, 21 aa, Homo sapiens
IDTLIGNLERELNKNKLNMSF

SEQ ID NO: 57620 - protein, 43 aa, Homo sapiens
VQMFMVSSVWKRSSGNFGQDFSVGNASKYKARAIFKKDLLNLY

SEQ ID NO: 57621 - protein, 8 aa, Homo sapiens
MNFAALFI

SEQ ID NO: 57622 - protein, 40 aa, Homo sapiens
MSSRESALQIKILDLETELRKKNEEQNQLVCKMNSDPETP

SEQ ID NO: 57623 - protein, 104 aa, Homo sapiens
LLLATVLQAVSAFGAEFSSEACRELGFSSNLLCSSCDLLGQFNLLQLDPDCRGCCQEEAQFETKKLYAGAILEVCGKLGRFPQVQVCPWFRPCIKAFGRQWEHC

SEQ ID NO: 57624 - protein, 92 aa, Homo sapiens
IFSDSSTCFSWILIAEDAVRRKHNLKPKSCMQELFLKFVENWEGSLKSKYVRGSDPVLKLLDDNGNIAEELSILKWNTDSVEEFLSEKLERI

SEQ ID NO: 57625 - protein, 217 aa, Homo sapiens
KYQNRRTMSSSDRAMMNAFKEITTMADRINLPRNIVDRTNNLFKQVYEQKSLKGRANDAIASACLYIACRQEGVPRTFKEICAVSRISKKEIGRCFKLILKALETSVDLITTGDFMSRFCSNLCLPKQVQMAATHIARKAVELDLVPGRSPISVAAAAIYMASQASAEKRTQKEIGDIAGVADVTIRQSYRLIYPRAPDLFPTDFKFDTPVDKLPQL

SEQ ID NO: 57626 - protein, 146 aa, Homo sapiens
TIYTCATPLQEALAQAFWIDIKRMDDPECYFNSLPKELEVKRDRMVRLLESVGLKPIVPDGGYFIIADVSLLDPDLSDMKNNEPYDYKFVKWMTKHKKLSAIPVSAFCNSETKSQFEKFVRFCFIKKDSTLDAAEEIIKAWSVQKS

SEQ ID NO: 57627 - protein, 54 aa, Homo sapiens
MTKHKKLSAIPVSAFCNSETKSQFEKFVRFCFIKKDSTLDAAEEIIKAWSVQKS

SEQ ID NO: 57628 - protein, 475 aa, Homo sapiens
VPMSKIADFLKAGCEVTILFADLHAYLDNMKAPWELLELRVSYYENVIKAMLESIGVPLEKLKFIKGTDYQLSKEYTLDVYRLSSVVTQHDSKKAGAEVVKQVEHPLLSGLLYPGLQALDEEYLKVDAQFGGIDQRKIFTFAEKYLPALGYSKRVHLMNPMVPGLTGSKMSSSEEESKIDLLDRKEDVKKKLKKAFCEPGNVENNGVLSFIKHVLFPLKSEFVILRDEKWGGNKTYTAYVDLEKDFAAEVVHPGDLKNSVEVALNKLLDPIREKFNTPALKKLASAAYPDPSKQKPMAKGPAKNSEPEEVIPSRLDIRVGKIITVEKHPDADSLYVEKIDVGEAEPRTVVSGLVQFVPKEELQDRLVVVLCNLKPQKMRGVESQGMLLCASIEGINRQVEPLDPPAGSAPGEHVFVKGYEKGQPDEELKPKKKVFEKLQADFKISEECIAQWKQTNFMTKLGSISCKSLKGGNIS

SEQ ID NO: 57629 - protein, 296 aa, Homo sapiens [sequence omitted]

SEQ ID NO: 57630 - protein, 39 aa, Homo sapiens
MVDALCCAPRPARARASTCTPCSTWGVWSLPCHCPRPPT

SEQ ID NO: 57631 - protein, 5 aa, Homo sapiens
ISSSA

SEQ ID NO: 57632 - protein, 26 aa, Homo sapiens
IYHTINTSPFTIFPITVESRRLRTPG

SEQ ID NO: 57633 - protein, 14 aa, Homo sapiens
RNLFIKGYPITLEQ

SEQ ID NO: 57634 - protein, 185 aa, Homo sapiens
KECFYQPMPLKASLEIEYQVLDGAGLDIDFHLASPEGKTLVFEQRKSDGVHTVETEVGDYMFCFDNTFSTISEKVIFFELILDNMGEQAQEQEDWKKYITGTDILDMKLEDILESINSIKSRLSKSGHIQTLLRAFEARDRNIQESNFDRVNFWSMVNLVVMVVVSAIQVYMLKSLFEDKRKSRT

SEQ ID NO: 57635 - protein, 415 aa, Homo sapiens
IFTTGDVNKDGKLDFEEFMKYLKDHEKKMKLAFKSLDKNNDGKIEASEIVQSLQTLGLTISEQQAELILQSIDVDGTMTVDWNEWRDYFLFNPVTDIEEIIRFWKHSTGIDIGDSLTIPDEFTEDEKKSGQWWRQLLAGGIAGAVSRTSTAPLDRLKIMMQVHGSKSDKMNIFGGFRQMVKEGGIRSLWRGNGTNVIKIAPETAVKFWAYEQYKKLLTEEGQKIGTFERFISGSMAGATAQTFIYPMEVMKTRLAVGKTGQYSGIYDCAKKILKHEGLGAFYKGYVPNLLGIIPYAGIDLAVYELLKSYWLDNFAKDSVNPGVMVLLGCGALSSTCGQLASYPLALVRTRMQAQAMLEGSPQLNMVGLFRRIISKEGIPGLYRGITPNFMKVLPAVGISYVVYENMKQTLGVTQK

SEQ ID NO: 57636 - skipped

SEQ ID NO: 57637 - protein, 59 aa, Homo sapiens
MAPVLSKDSADIESILALNPRTQTHATLCSTSAKKLDKKHWKRNPDKNCFKSAGTCAWA

SEQ ID NO: 57638 - protein, 183 aa, Homo sapiens
IEELQDWDGQSPATVSHQKGKPVPRIAELMDKKLPSFGPYLEQRKKIIAENKIRLKEQNVAFSPLKRNCFIPKRPIPTIKDVIGKALQYLGTFGELSNVEQVVAMIDEEMCINCGKCYMTCNDSGYQAIQFDPETHLPTITDTCTGCTLCLSVCPIVDCIKMVSRTTPYEPKRGVPLSVNPVC

SEQ ID NO: 57639 - protein, 8 aa, Homo sapiens
VLGMFMPL

SEQ ID NO: 57640 - protein, 229 aa, Homo sapiens
KPVTMSCESSMVLGYWDIRGLAHAIRLLLEFTDTSYEEKRYTCGEAPDYDRSQWLDVKFKLDLDFPNLPYLLDGKNKITQSNAILRYIARKHNMCGETEEEKIRVDIIENQVMDFRTQLIRLCYSSDHEKLKPQYLEELPGQLKQFSMFLGKFSWFAGEKLTFVDFLTYDILDQNRIFDPKCLDEFPNLKAFMCRFEALEKIAAYLQSDQFCKMPINNKMAQWGNKPVC

SEQ ID NO: 57641 - protein, 32 aa, Homo sapiens
IPIPNLPPLDFPSPELPLMELSEDILKGFMNN

SEQ ID NO: 57642 - protein, 46 aa, Homo sapiens
MLYLIGLGLGDAKDITVKGLEVVRRCSRVYLEAYTSVLTVGKEALG

SEQ ID NO: 57643 - protein, 221 aa, Homo sapiens
LKQDIEHMKFPMGTQTNPARTCKDLQLSHPDFPDGEYWIDPNQGCSGDSFKVYCNFTSGGETCIYPDKKSEGVRISSWPKEKPGSWFSEFKRGKLLSYLDVEGNSINMVQMTFLKLLTASARQNFTYHCHQSAAWYDVSSGSYDKALRFLGSNDEEMSYDNNPFIKTLYDGCASRKGYEKTVIEINTPKIDQVPIVDVMINDFGDQNQKFGFEVGPVCFLG

SEQ ID NO: 57644 - protein, 38 aa, Homo sapiens
LADSEFRRYNRRKYSEIMAEKAANAAGKKFRKKKKFRN

SEQ ID NO: 57645 - protein, 241 aa, Homo sapiens
KCPSTHSEELHDCIQKTLNEWSSQINPDLVREFPDVLECTVSHAVEKINPDEREEMKVSAKLFIVESNSSSSTRSAVDMACSVLGVAQLDSVIIASPPIEDGVNLSLEHLQPYWEELENLVQSKKIVAIGTSDLDKTQLEQLYQWAQVKPNSNQVNLASCCVMPPDLTAFAKQFDIQLLTHNDPKELLSEASFQEALQESIPDIQAHEWVPLWLLRYSVIVKSRGIIKSKGYILQAKRRGS

SEQ ID NO: 57646 - protein, 14 aa, Homo sapiens
IMTFQLKTLLKVQV

SEQ ID NO: 57647 - protein, 9 aa, Homo sapiens
KMKFSGHSL

SEQ ID NO: 57648 - protein, 5 aa, Homo sapiens
RTHQS

SEQ ID NO: 57649 - protein, 119 aa, Homo sapiens
LESNKGKSMLEFQELMTVFQLLHWNGSLKAMRERQCSRQEVLAHYSHRALDDDIRHQMALDWVSREQSVPGALSRELASTERELDEARLAGKELRFHKEKKDILVLAAGQLGNMHSSNC

SEQ ID NO: 57650 - protein, 67 aa, Homo sapiens; identical to SEQ ID NO: 50826

SEQ ID NO: 57651 - protein, 71 aa, Homo sapiens
KAMGIMNSFVNDIFERIAGEASRLAHYNKRSTITSREIQTAVRLLLPGKLAKHAVSEGTKAVTKYTSSNIF

SEQ ID NO: 57652 - protein, 49 aa, Homo sapiens
LAFAYLEDLHSEFDEQHGKKVPTVSQPYSFIEFDTFIQKTKKLYIDSCA

SEQ ID NO: 57653 - protein, 74 aa, Homo sapiens
LQDVQRLMVANIEEVLQRGEALSALDSKANNLSSLSKKYRQDAKYLNMRSTYAKLAAVAVFFIMLIVYVRFWWL

SEQ ID NO: 57654 - protein, 47 aa, Homo sapiens
VEALSKSKAELMKISEDKTKIRRSSSKPLPEVTDEYKNDVKKQICLY

SEQ ID NO: 57655 - protein, 2472 aa, Homo sapiens
KMPALRPALLWALLALWLCCAAPAHALQCRDGYEPCVNEGMCVTYHNGTGYCKCPEGFLGEYCQHRDPCEKNRCQNGGTCVAQAMLGKATCRCASGFTGEDCQYSTSHPCFVSRPCLNGGTCHMLSRDTYECTCQVGFTGKECQWTDACLSHPCANGSTCTTVANQFSCKCLTGFTGQKCETDVNECDIPGHCQHGGTCLNLPGSYQCQCPQGFTGQYCDSLYVPCAPSPCVNGGTCRQTGDFTFECNCLPGFEGSTCERNIDDCPNHRCQNGGVCVDGVNTYNCRCPPQWTGQFCTEDVDECLLQPNACQNGGTCANRNGGYGCVCVNGWSGDDCSENIDDCAFASCTPGSTCIDRVASFSCMCPEGKAGLLCHLDDACISNPCHKGALCDTNPLNGQYICTCPQGYKGADCTEDVDECAMANSNPCEHAGKCVNTDGAFHCECLKGYAGPRCEMDINECHSDPCQNDATCLDKIGGFTCLCMPGFKGVHCELEINECQSNPCVNNGQCVDKVNRFQCLCPPGFTGPVCQIDIDDCSSTPCLNGAKCIDHPNGYECQCATGFTGVLCEENIDNCDPDPCHHGQCQDGIDSYTCICNPGYMGAICSDQIDECYSSPCLNDGRCIDLVNGYQCNCQPGTSGVNCEINFDDCASNPCIHGICMDGINRYSCVCSPGFTGQRCNIDIDECASNPCRKGATCINGVNGFRCICPEGPHHPSCYSQVNECLSNPCIHGNCTGGLSGYKCLCDAGWVGINCEVDKNECLSNPCQNGGTCDNLVNGYRCTCKKGFKGYNCQVNIDECASNPCLNQGTCFDDISGYTCHCVLPYTGKNCQTVLAPCSPNPCENAAVCKESPNFESYTCLCAPGWQGQRCTIDIDECISKPCMNHGLCHNTQGSYMCECPPGFSGMDCEEDIDDCLANPCQNGGSCMDGVNTFSCLCLPGFTGDKCQTDMNECLSEPCKNGGTCSDYVNSYTCKCQAGFDGVHCENNINECTESSCFNGGTCVDGINSFSCLCPVGFTGSFCLHEINECSSHPCLNEGTCVDGLGTYRCSCPLGYTGKNCQTLVNLCSRSPCKNKGTCVQKKAESQCLCPSGWAGAYCDVPNVSCDIAASRRGVLVEHLCQHSGVCINAGNTHYCQCPLGYTGSYCEEQLDECASNPCQHGATCSDFIGGYRCECVPGYQGVNCEYEVDECQNQPCQNGGTCIDLVNHFKCSCPPGTRGLLCEENIDDCARGPHCLNGGQCMDRIGGYSCRCLPGFAGERCEGDINECLSNPCSSEGSLDCIQLTNDYLCVCRSAFTGRHCETFVDVCPQMPCLNGGTCAVASNMPDGFICRCPPGFSGARCQSSCGQVKCRKGEQCVHTASGPRCFCPSPRDCESGCASSPCQHGGSCHPQRQPPYYSCQCAPPFSGSRCELYTAPPSTPPATCLSQYCADKARDGVCDEACNSHACQWDGGDCSLTMENPWANCSSPLPCWDYINNQCDELCNTVECLFDNFECQGNSKTCKYDKYCADHFKDNHCDQGCNSEECGWDGLDCAADQPENLAEGTLVIVVLMPPEQLLQDARSFLRALGTLLHTNLRIKRDSQGELMVYPYYGEKSAAMKKQRMTRRSLPGEQEQEVAGSKVFLEIDNRQCVQDSDHCFKNTDAAAALLASHAIQGTLSYPLVSVVSESLTPERTQLLYLLAVAVVIILFIILLGVIMAKRKRKHGSLWLPEGFTLRRDASNHKRREPVGQDAVGLKNLSVQVSEANLIGTGTSEHWVDDEGPQPKKVKAEDEALLSEEDDPIDRRPWTQQHLEAADIRRTPSLALTPPQAEQEVDVLDVNVRGPDGCTPLMLASLRGGSSDLSDEDEDAEDSSANIITDLVYQGASLQAQTDRTGEMALHLAARYSRADAAKRLLDAGADANAQDNMGRCPLHAAVAADAQGVFQILIRNRVTDLDARMNDGTTPLILAARLAVEGMVAELINCQADVNAVDDHGKSALHWAAAVNNVEATLLLLKNGANRDMQDNKEETPLFLAAREGSYEAAKILLDHFANRDITDHMDRLPRDVARDRMHHDIVRLLDEYNVTPSPPGTVLTSALSPVICGPNRSFLSLKHTPMGKKSRRPSAKSTMPTSLPNLAKEAKDAKGSRRKKSLSEKVQLSESSVTLSPVDSLESPHTYVSDTTSSPMITSPGILQASPNPMLATAAPPAPVHAQHALSFSNLHEMQPLAHGASTVLPSVSQLLSHHHIVSPGSGSAGSLSRLHPVPVPADWMNRMEVNETQYNEMFGMVLAPAEGTHPGIAPQSRPPEGKHITTPREPLPPIVTFQLIPKGSIAQPAGAPQPQSTCPPAVAGPLPTMYQIPEMARLPSVAFPTAMMPQQDGQVAQTILPAYHPFPASVGKYPTPPSQHSYASSNAAERTPSHSGHLQGEHPYLTPSPESPDQWSSSSPHSASDWSDVTTSPTPGGAGGGQRGPGTHMSEPPHNNMQVYA

SEQ ID NO: 57656 - protein, 6 aa, Homo sapiens
LDPCSL

SEQ ID NO: 57657 - protein, 29 aa, Homo sapiens
KGVTKNWEDVPGDQVKPDQYTEALAQRDK

SEQ ID NO: 57658 - protein, 133 aa, Homo sapiens; identical to SEQ ID NO: 57495

SEQ ID NO: 57659 - protein, 16 aa, Homo sapiens
IFKPKKKGRGWCPTSI

SEQ ID NO: 57660 - protein, 30 aa, Homo sapiens
RTKWTLTLTLMKGMNHPVMEKQKSQEGSAE

SEQ ID NO: 57661 - protein, 206 aa, Homo sapiens
VSAMAKAYDHLFKLLLIGDSGVGKTCLIIRFAEDNFNNTYISTIGIDFKIRTVDIEGKKIKLQVWDTAGQERFKTITTAYYRGAMGIILVYDITDEKSFENIQNWMKSIKENASAGVERLLLGNKCDMEAKRKVQKEQADKLAREHGIRFFETSAKSSMNVDEAFSSLARDILLKSGGRRSGNGNKPPSTDLKTCDKKNTNKCSLG

SEQ ID NO: 57662 - protein, 18 aa, Homo sapiens
ILLLAGFALLTGLLFIQI

SEQ ID NO: 57663 - protein, 81 aa, Homo sapiens
VDGPRNELSRVSKKNIFLLFKKLCSFRYRRDLLRLSYGEAKKAARDYETAKNYFKKGLKDMGYGNWISKPQEEKNFYLCPV

SEQ ID NO: 57664 - protein, 13 aa, Homo sapiens
ILLDALRAHRPRL

SEQ ID NO: 57665 - protein, 32 aa, Homo sapiens
RQRFLGFCLVLSLQKVLPVPPALGTRLCIASP

SEQ ID NO: 57666 - protein, 31 aa, Homo sapiens
ISVSGMTMCYACNKSITAKEALICPSKLFGP

SEQ ID NO: 57667 - protein, 59 aa, Homo sapiens
INSGHWDTVLQAIQSLKLPDKTLIDLYEQIVLELIELRELGAAKSLLRQTDPMIMLKQT

SEQ ID NO: 57668 - protein, 205 aa, Homo sapiens
IPGSMDLSLLWVLLPLVTMAWGQYGDYGYPYQQYHDYSDDGWVNLNRQGFSYQCPQGQVIVAVRSIFSKKEGSDRQWNYACMPTPQSLGEPTECWWEEINRAGMEWYQTCSNNGLVAGFQSRYFESVLDREWQFYCCRYSKRCPYSCWLTTEYPGHYGEEMDMISYNYDYYIRGATTTFSAVERDRQWKFIMCRMTEYDCEFANV

SEQ ID NO: 57669 - protein, 41 aa, Homo sapiens
RIPEPLLRVSAGSGVAVLLLSLQQEVPIFLLANNRISRSLW

SEQ ID NO: 57670 - protein, 27 aa, Homo sapiens
LNLSEDPEGGGDNNDSQRSGVTPSSAP

SEQ ID NO: 57671 - protein, 16 aa, Homo sapiens
LGFEGAILRSVLLVSD

SEQ ID NO: 57672 - protein, 21 aa, Homo sapiens
ISHLVLPVQPVSSIEEQGCLF

SEQ ID NO: 57673 - protein, 156 aa, Homo sapiens
LVGIGMSKNTVSSARFRKVDVDEYDENKFVDEEDGGDGQAGPDEGEVDSCLRQGNMTAALQAALKNPPINTKSQAVKDRAGSIVLKVLISFKANDIEKAVQSLDKNGVDLLMKYIYKGFESPSDNSSAMLLQWHEKALAAGGVGSIVRVLTARKTV

SEQ ID NO: 57674 - protein, 798 aa, Homo sapiens [sequence omitted]

SEQ ID NO: 57675 - protein, 25 aa, Homo sapiens
MIFGCTTELFQKHLGVPMISTSKEC

SEQ ID NO: 57676 - protein, 38 aa, Homo sapiens
IPARFLLLPIEALEMNVSISSEMNQIMMHHYHRRNSCL

SEQ ID NO: 57677 - protein, 51 aa, Homo sapiens
MTSPRSNAGIATVGNTIYAVGGFDGNEFLNTVEVYNLESNEWSPYTKIFQF

SEQ ID NO: 57678 - protein, 637 aa, Homo sapiens
KALTEKNKELEIAQDRNIAIQSQFTRTKEELEAEKRDLIRTNERLSQELEYLTEDVKRLNEKLKESNTTKGELQLKLDELQASDVSVKYREKRLEQEKELLHSQNTWLNTELKTKTDELLALGREKGNEILELKCNLENKKEEVSRLEEQMNGLKTSNEHLQKHVEDLLTKLKEAKEQQASMEEKFHNELNAHIKLSNLYKSAADDSEAKSNELTRAVEELHKLLKEAGEANKAIQDHLLEVEQSKDQMEKEMLEKIGRLEKELENANDLLSATKRKGAILSEEELAAMSPTAAAVAKIVKPGMKLTELYNAYVETQDQLLLEKLENKRINKYLDEIVKEVEAKAPILKRQREEYERAQKAVASLSVKLEQAMKEIQRLQEDTDKANKQSSVLERDNRRMEIQVKDLSQQIRVLLMELEEARGNHVIRDEEVSSADISSSSEVISQHLVSYRNIEELQQQNQRLLVALRELGETREREEQETTSSKITELQLKLESALTELEQLRKSRQHQMQLVDSIVRQRDMYRILLSQTTGVAIPLHASSLDDVSLASTPKRPSTSQTVSTPAPVPVIESTEAIEAKAALKQLQEIFENYKKEKAENEKIQNEQLEKLQEQVTDLRSQNTKISTQLDFASKRYL

SEQ ID NO: 57679 - protein, 254 aa, Homo sapiens
TIFFAKQVINNACATQAIVSVLLNCTHQDVHLGETLSEFKEFSQSFDAAMKGLALSNSDVIRQVHNSFARQQMFEFDTKTSAKEEDAFHFVSYVPVNGRLYELDGLREGPIDLGACNQDDWISAVRPVIEKRIQKYSEGEIRFNLMAIVSDRKMIYEQKIAELQRQLAEEEPMDTDQGNSMLSAIQSEVAKNQMLIEEEVQKLKRYKIENIRRKHNYLPFIMELLKTLAEHQQLIPLVEKAKEKQNAKKAQETK

SEQ ID NO: 57680 - protein, 137 aa, Homo sapiens
LELSANLGAPMTAAATATVLKEGVLEKRSGGLLQLWKRKRCVLTERGLQLFEAKGTGGRPKELSFARIKAVECVESTGRHIYFTLVTEGGGEIDFRCPLEDPGWNAQITLGLVKFKNQQAIQTVRARQSLGTGTLVS

SEQ ID NO: 57681 - protein, 138 aa, Homo sapiens
MIPTVGFNMRKITKGNVTIKLWDIGGQPRFRSMWERYCRGVSAIVYMVDAADQEKIEASKNELHNLLDKPQLQGIPVLVLGNKRDLPGALDEKELIEKMNLSAIQDREICCYSISCKEKDNIDITLQWLIQHSKSRRS

SEQ ID NO: 57682 - protein, 37 aa, Homo sapiens
LPFSVENKWSLLAKMCLYFGSAFAIPFLVVRHQLLKT

SEQ ID NO: 57683 - protein, 32 aa, Homo sapiens [sequence omitted]

SEQ ID NO: 57684 - protein, 27 aa, Homo sapiens
MTKKRRNNGRAKKGHSHVQPICCTNCA

SEQ ID NO: 57685 - protein, 15 aa, Homo sapiens
RASVFVKLQKPNAAI

SEQ ID NO: 57686 - protein, 15 aa, Homo sapiens
MGFCYQILTEPNADL

SEQ ID NO: 57687 - protein, 11 aa, Homo sapiens
LYTSLHNLSIT

SEQ ID NO: 57688 - protein, 52 aa, Homo sapiens
LMIYCLEHNEKVEVPMMLRLLREQRMFMIQTIAQYKFVYQVLIQFLQNSRLI

SEQ ID NO: 57689 - protein, 178 aa, Homo sapiens
LEFEEDEEEGGAGAGSPDSFPARVPGTLLPRLPSEPGMTLLTIRIEKIGLKDAGQCIDPYITVSVKDLNGIDLTPVQDTPVASRKEDTYVHFNVDIELQKHVEKLTKGAAIFFEFKHYKPKKRFTSTKCFAFMEMDEIKPGPIVIELYKKPTDFKRKKLQLLTKKPLYLHLHQTLHKE

SEQ ID NO: 57690 - protein, 379 aa, Homo sapiens
LDKLQTYLPPSVMLPPRRLQTLLRQAVELQRDRCLYHNTKLDNNLDSVSLLIDHVCSRRQFPCYTQQILTEHCNEVWFCKFSNDGTKLATGSKDTTVIIWQVDPDTHLLKLLKTLEGHAYGVSYIAWSPDDNYLVACGPDDCSELWLWNVQTGELRTKMSQSHEDSLTSVAWNPDGKRFVTGGQRGQFYQCDLDGNLLDSWEGVRVQCLWCLSDGKTVLASDTHQRIRGYNFEDLTDRNIVQEDHPIMSFTISKNGRLALLNVATQGVHLWDLQDRVLVRKYQGVTQGFYTIHSCFGGHNEDFIASGSEDHKVYIWHKRSELPIAELTGHTRTVNCVSWNPQIPSMMASASDDGTVRIWGPAPFIDHQNIEEECSSMDS

SEQ ID NO: 57691 - protein, 565 aa, Homo sapiens
ICQARAAVMVYDDANKKWVPAGGSTGFSRVHIYHHTGNNTFRVVGRKIQDHQVVINCAIPKGLKYNQATQTFHQWRDARQVYGLNFGSKEDANVFASAMMHALEVLNSQETGPTLPRQNSQLPAQVQNGPSQEELEIQRRQLQEQQRQKELERERLERERMERERLERERLERERLERERLEQEQLERERQERERQERLERQERLERQERLERQERLDRERQERQERERLERLERERQERERQEQLEREQLEWERERRISSAAAPASVETPLNSVLGDSSASEPGLQAASQPAETPSQQGIVLGPLAPPPPPPLPPGPAQASVALPPPPGPPPPPPLPSTGPPPPPPPPPLPNQVPPPPPPPPAPPLPASGFFLASMSEDNRPLTGLAAAIAGAKLRKVSRMEDTSFPSGGNAIGVNSASSKTDTGRGNGPLPLGGSGLMEEMSALLARRRRIAEKGSTIETEQKEDKGEDSEPVTSKASSTSTPEPTRKPWERTNTMNGSKSPVISRPKSTPLSQPSANGVQTEGLDYDRLKQDILDEMRKELTKLKEELIDAIRQELSKSNTA

SEQ ID NO: 57692 - protein, 283 aa, Homo sapiens
IMAALNSQTAVQFQQYAAQQYPGNYEQQQILIRQLQEQHYQQYMQQLYQVQLAQQQAALQKQQEVVVAGSSLPTSSKVNATVPSNMMSVNGQAKTHTDSSEKELEPEAAEEALENGPKESLPVIAAPSMWTRPQIKDFKEKIQQDADSVITVGRGEVVTVRVPTHEEGSYLFWEFATDNYDIGFGVYFEWTDSPNTAVSVHVSESSDDDEEEEENIGCEEKAKKNANKPLLDEIVPVYRRDCHEEVYAGSHQYPGRGVYLLKFDNSYSLWRSKSVYYRVYYTR

SEQ ID NO: 57693 - protein, 10 aa, Homo sapiens
LHIGKPKSQK

SEQ ID NO: 57694 - protein, 11 aa, Homo sapiens
LKTGFDFLDNW

SEQ ID NO: 57695 - protein, 64 aa, Homo sapiens
IEVSKDSIFVKILQKLLKDGIQLSEYLPEVKDLLQADQLGSLKSNPYFEFVLKANYEYYVQGQI

SEQ ID NO: 57696 - protein, 131 aa, Homo sapiens
TKAMVACYPGNGTGYVRHVDNPNGDGRCVTCIYYLNKDWDAKVSGGILRIFPEGKAQFADIEPKFDRLLFFWSDRRNPHEVQPAYATRYAITVWYFDADERARAKVKYLTGEKGVRVELNKPSDSVGKDVF

SEQ ID NO: 57697 - protein, 56 aa, Homo sapiens
RELNIMAAKEIEVGGGQKAIIIFVPVPQLKSFQKIQVRLVCELEKKFSGKHVVFIA

SEQ ID NO: 57698 - protein, 28 aa, Homo sapiens
IGEKAVLLKTKKKGQKKSGRPKKQRKQK

SEQ ID NO: 57699 - protein, 51 aa, Homo sapiens
MSSHKTFRIKRFLAKKQKQNHPIPQWIQMKTRNKIRYNSKRRHWRRTKLGL

SEQ ID NO: 57700 - protein, 23 aa, Homo sapiens
REELLHRQGFSSRNPTDNLNLNL

SEQ ID NO: 57701 - protein, 565 aa, Homo sapiens
IEENKYSRAKSPQPPVEEEDEHFDDTVVCLDTYNCDLHFKISRDRLSASSLTMESFAFLWAGGRASYGVSKGKVCFEMKVTEKIPVRHLYTKDIDIHEVRIGWSLTTSGMLLGEEEFSYGYSLKGIKTCNCETEDYGEKFDENDVITCFANFESDEVELSYAKNGQDLGVAFKISKEVLAGRPLFPHVLCHNCAVEFNFGQKEKPYFPIPEEYTFIQNVPLEDRVRGPKGPEEKKDCEVVMMIGLPGAGKTTWVTKHAAENPGKYNILGTNTIMDKMMVAGFKKQMADTGKLNTLLQRAPQCLGKFIEIAARKKRNFILDQTNVSAAAQRRKMCLFAGFQRKAVVVCPKDEDYKQRTQKKAEVEGKDLPEHAVLKMKGNFTLPEVAECFDEITYVELQKEEAQKLLEQYKEESKKALPPEKKQNTGSKKSNKNKSGKNQFNRGGGHRGRGGFNMRGGNFRGGAPGNRGGYNRRGNMPQRGGGGGGSGGIGYPYPRAPVFPGRGSYSNRGNYNRGGMPNRGNYNQNFRGRGNNRGYKNQSQGYNQWQQGQFWGQKPWSQHYHQGYY

SEQ ID NO: 57702 - protein, 111 aa, Homo sapiens
RELLDQLQQKLYLIQMIPRQNLFTKNLTPMNYNIFFHLLKHCFGRRSATVIDHLRSLTPLDARDILMQIGKQEDEKVVNMHPQDFKTLFETIERSKDCAYKWLYDETLEDR

SEQ ID NO: 57703 - protein, 47 aa, Homo sapiens
LISPLASPADGVKSKPRKTTEVTGTGLGRNRKKLSSYPKQILRRKML

SEQ ID NO: 57704 - protein, 12 aa, Homo sapiens
KKYVTTLLYKPI

SEQ ID NO: 57705 - protein, 50 aa, Homo sapiens [sequence omitted]

SEQ ID NO: 57706 - protein, 49 aa, Homo sapiens
MANCLLLMKDYVLAVEAYHSVIKYYPEQEPQLLSGIGRISLQVPVHGQT

SEQ ID NO: 57707 - protein, 103 aa, Homo sapiens
IIQGCKLNRLNSVVGEYANACLQVAQDCGTDVLDLWTLMQDSQDFSSYLSDGLHLSPKGNEFLFSHLWPLIEKKVSSLPLLLPYWRDVAEAKPELSLLGDGDH

SEQ ID NO: 57708 - protein, 152 aa, Homo sapiens
LSFRAASSLPVSPSLAVSMKAFSPVRSVRKNSLSDHSLGISRSKTPVDDPMSLLYNMNDCYSKLKELVPSIPQNKKVSKMEILQHVIDYILDLQIALDSHPTIVSLHHQRPGQNQASRTPLTTLNTDISILSLQASEFPSELMSNDSKALCG

SEQ ID NO: 57709 - protein, 8 aa, Homo sapiens
RISKSCRL

SEQ ID NO: 57710 - protein, 34 aa, Homo sapiens
LMWDLGKGLKIPQLYQSGVVVLVLTVLFVGLAAV

SEQ ID NO: 57711 - protein, 55 aa, Homo sapiens
IRFFETSAKANINIEKAFLTLAEDILRKTPVKEPNSENVDISSGGGVTGWKSKCC

SEQ ID NO: 57712 - protein, 362 aa, Homo sapiens
LAGLMLVTGSINTLSAKWADNFMAEGCGGSKEHSFQHPFLQAVGMFLGEFSCLAAFYLLRCRAAGQSDSSVDPQQPFNPLLFLPPALCDMTGTSLMYVALNMTSASSFQMLRGAVIIFTGLFSVAFLGRRLVLSQWLGILATIAGLVVVGLADLLSKHDSQHKLSEVITGDLLIIMAQIIVAIQMVLEEKFVYKHNVHPLRAVGTEGLFGFVILSLLLVPMYYIPAGSFSGNPRGTLEDALDAFCQVGQQPLIAVALLGNISSIAFFNFAGISVTKELSATTRMVLDSLRTVVIWALSLALGWEAFHALQILGFLILLIGTALYNGLHRPLLGRLSRGRPLAEESEQERLLGGTRTPINDAS

SEQ ID NO: 57713 - protein, 682 aa, Homo sapiens
VGRWEVVKKGRRPGVGAGAGGRGGGRNRRALGEANGVWKYDLTPAIQTTSTLYERGFENIMKRQNKEQVPPPAVEPKKPGNKKQPKKVATPPNQNQKQGRFRSLEEALKALDVADLQKELDKSQSVFSGNPSIWLKDLASYLNYKLQAPLSEPTLSQHTHDYPYSLVSRELRGIIRGLLAKAAGSLELFFDHCLFTMLQELDKTPGESLHGYRICIQAILQDKPKIATANLGKFLELLRSHQSRPAKCLTIMWALGQAGFANLTEGLKVWLGIMLPVLGIKSLSPFAITYLDRLLLMHPNLTKGFGMIGPKDFFPLLDFAYMPNNSLTPSLQEQLCQLYPRLKVLAFGAKPDSTLHTYFPSFLSRATPSCPPEMKKELLSSLTECLTVDPLSASVWRQLYPKHLSQSSLLLEHLLSSWEQIPKKVQKSLQETIQSLKLTNQELLRKGSSNNQDVVTCDMACKGLLQQVQGPRLPWTRLLLLLLVFAVGFLCHDLRSHSSFQASLTGRLLRSSGFLPASQQACAKLYSYSLQGYSWLGETLPLWGSHLLTVVRPSLQLAWAHTNATVSFLSAHCASHLAWFGDSLTSLSQRLQIQLPDSVNQLLRYLRELPLLFHQNVLLPLWHLLLEALAWAQEHCHEACRGEVTWDCMKTQLSEAVHWTWLCLQDITVAFLDWALALISQQ

SEQ ID NO: 57714 - protein, 373 aa, Homo sapiens
VGEKPRSEAQSPRRGRRTNERAAAGARPRRGRGKKNTLFPLRPPPRIMYQDYPGNFDTSSRGSSGSPAHAESYSSGGGGQQKFRVDMPGSGSAFIPTINAITTSQDLQWMVQPTVITSMSNPYPRSHPYSPLPGLASVPGHMALPRPGVIKTIGTTVGRRRRDEQLSPEEEEKRRIRRERNKLAAAKCRNRRRELTEKLQAETEELEEEKSGLQKEIAELQKEKEKLEFMLVAHGPVCKISPEERRSPPAPGLQPMRSGGGSVGAVVVKQEPLEEDSPSSSSAGLDKAQRSVIKPISIAGGFYGEEPLHTPIVVTSTPAVTPGTSNLVFTYPSVLEQESPASPSESCSKAHRRSSSSGDQSSDSLNSPTLLAL

SEQ ID NO: 57715 - protein, 123 aa, Homo sapiens
IKMGRIFLDHIGGTRLFSCANCDTILTNRSELISTRFTGATGRAFLFNKVVNLQYSEVQDRVMLTGRHMVRDVSCKNCNSKLGWIYEFATEDSQRYKEGRVILERALVRESEGFEEHVPSDNS

SEQ ID NO: 57716 - protein, 801 aa, Homo sapiens
TAFNGRQQPADAAARPGVHETLNEIQHQLQLLDTRVSTHDQELGHLNNHHGGSSSSGGSRAPAPASAPPGPSEELLRQLEQRLQESCSVCLAGLDGFRRQQQEDRERLRAMEKLLASVEERQRHLAGLAVGRRPPQECCSPELGRRLAELERRLDVVAGSVTVLSGRRGTELGGAAGQGGHPPGYTSLASRLSRLEDRFNSTLGPSEEQEESWPGAPGGLSHWLPAARGRLEQLGGLLANVSGELGGRLDLLEEQVAGAMQACGQLCSGAPGEQDSQVSEILSALERRVLDSEGQLRLVGSGLHTVEAAGEARQATLEGLQEVVGRLQDRVDAQDETAAEFTLRLNLTAARLGQLEGLLQAHGDEGCGACGGVQEELGRLRDGVERCSCPLLPPRGPGAGPGVGGPSRGPLDGFSVFGGSSGSALQALQGELSEVILSFSSLNDSLNELQTTVEGQGADLADLGATKDRIISEINRLQQEATEHATESEERFRGLEEGQAQAGQCPSLEGRLGRLEGVCERLDTVAGGLQGLREGLSRHVAGLWAGLRETNTTSQMQAALLEKLVGGQAGLGRRLGALNSSLQLLEDRLHQLSLKDLTGPAGEAGPPGPPGLQGPPGPAGPPGSPGKDGQEGPIGPPGPQGEQGVEGAPAAPVPQVAFSAALSLPRSEPGTVPFDRVLLNDGGYYDPETGVFTAPLAGRYLLSAVLTGHRHEKVEAVLSRSNQGVARVDSGGYEPEGLENKPVAESQPSPGTLGVFSLILPLQAGDTVCVDLVMGQLAHSEEPLTIFSGALLYGDPELEHA

SEQ ID NO: 57717 - protein, 444 aa, Homo sapiens
VNGVLHCRVRYSQLLGLHEQLRKEYGANVLPAFPPKKLFSLTPAEVEQRREQLEKYMQAVRQDPLLGSSETFNSFLRRAQQETQQVPTEEVSLEVLLSNGQKVLVNVLTSDQTEDVLEAVAAKLDLPDDLIGYFSLFLVREKEDGAFSFVRKLQEFELPYVSVTSLRSQEYKIVLRKSYWDSAYDDDVMENRVGLNLLYAQTVSDIERGWILVTKEQHRQLKSLQEKVSKKEFLRLAQTLRHYGYLRFDACVADFPEKDCPVVVSAGNSELSLQLRLPGQQLREGSFRVTRMRCWRVTSSVPLPSGSTSSPGRGRGEVRLELAFEYLMSKDRLQWVTITSPQAIMMSICLQSMVDELMVKKSGGSIRKMLRRRVGGTLRRSDSQQAVKSPPLLESPDATRESMVKLSSKLSAVSLRGIGSPSTDASASDVHGNFAFEGIGDEDL

SEQ ID NO: 57718 - protein, 27 aa, Homo sapiens
KEPEQEPVPAQFQKVKPPKTNHKRGRK

SEQ ID NO: 57719 - protein, 159 aa, Homo sapiens
IRRDANEQMVLAHVTNRLYTLVSTLTVQIFKDDWIRPALLSGPVAANVLNFSDHHVIPMPLLKGTDDLNPVTSTPAKPSSPPPEFSFNTPGKNVNPVILLNTQTRPYGFGLNHGHTPYSSMLNQGLGVPGIGATQGLRTGFTNIPSRYGTNNRIGQPRP

SEQ ID NO: 57720 - protein, 129 aa, Homo sapiens
KDDWIRPALLSGPVAANVLNFSDHHVIPMPLLKGTDDLNPVTSTPAKPSSPPPEFSFNTPGKNVNPVILLNTQTRPYGFGLNHGHTPYSSMLNQGLGVPGIGATQGLRTGFTNIPSRYGTNNRIGQPRP

SEQ ID NO: 57721 - protein, 60 aa, Homo sapiens
LEREQGEKIIQEFLSKVKQMPFTEMSEENITIKLKQLKAEVIAKNNSFVNEIISRIKVTT

SEQ ID NO: 57722 - protein, 19 aa, Homo sapiens
IKFEFDGIEVVELLMKFCI

SEQ ID NO: 57723 - protein, 11 aa, Homo sapiens
IKNSIRLTLNR

SEQ ID NO: 57724 - protein, 8 aa, Homo sapiens
LSGWISAR

SEQ ID NO: 57725 - protein, 24 aa, Homo sapiens
IDRTNFSNEKTISKLEYSNFSIRY

SEQ ID NO: 57726 - protein, 442 aa, Homo sapiens
LPLVVCSLVSGAASLDASCLGRLGGIAVAYFGLTTLSASALAVALAFIIKPGSGAQTLQSSDLGLEDSGPPPVPKETVDSFLDLARNLFPSNLVVAAFRTYATDYKVVTQNSSSGNVTHEKIPIGTEIEGMNILGLVLFALVLGVALKKLGSEGEDLIRFFNSLNEATMVLVSWIMWYVPVGIMFLVGSKIVEMKDIIVLVTSLGKYIFASILGHVIHGGIVLPLIYFVFTRKNPFRFLLGLLAPFATAFATCSSSATLPSMMKCIEENNGVDKRISRFILPIGATVNMDGAAIFQCVAAVFIAQLNNVELNAGQIFTILVTATASSVGAAGVPAGGVLTIAIILEAIGLPTHDLPLILAVDWIVDRTTTVVNVEGDALGAGILHHLNQKATKKGEQELAEVKVEAIPNCKSEEETSPLVTHQNPAGPVASAPELESKESVL

SEQ ID NO: 57727 - protein, 7 aa, Homo sapiens
MRFGSWV

SEQ ID NO: 57728 - protein, 177 aa, Homo sapiens
RKIPVPANRYTPLKENWMKIFTPIVEHLGLQIRFNLKSRNVEIRTCKETKDVSALTKAADFVKAFILGFQVEDALALIRLDDLFLESFEITDVKPLKGDHLSRAIGRIAGKGGKTKFTIENVTRTRIVLADVKVHILGSFQNIKMARTAICNLILGNPPSKVYGNIRAVASRSADRF

SEQ ID NO: 57729 - protein, 182 aa, Homo sapiens
MDSLFLKLDALSNFHFIPKPPVPEIKVVSNLPAITMEEVAPVSVSDAALLAPEEIKEKNKAGDIKTAAEKTATDKKRERRKKKYQKRMKIKEKEKRRKLLEKSSVDQAGKYSKTVASEKLKQLTKTGKASFIKDEGKDKALKSSQAFFSKLQDQVKMQINDAKKTEKKKKKRQDISVHKLKL

SEQ ID NO: 57730 - protein, 312 aa, Homo sapiens
VLICAGQGGRREDGGPACYGGFDLYFILDKSGSVLHHWNEIYYFVEQLAHKFISPQLRMSFIVFSTRGTTLMKLTEDREQIRQGLEELQKVLPGGDTYMHEGFERASEQIYYENRQGYRTASVIIALTDGELHEDLFFYSEREANRSRDLGAIVYCVGVKDFNETQLARIADSKDHVFPVNDGFQALQGIIHSILKKSCIEILAAEPSTICAGESFQVVVRGNGFRHARNVDRVLCSFKINDSVTLNEKPFSVEDTYLLCPAPILKEVGMKAALQVSMNDGLSFISSSVIITTTHCSLHKIASGPTTAACME

SEQ ID NO: 57731 - protein, 18 aa, Homo sapiens
MKSITLWNSWLTNSSAHS

SEQ ID NO: 57732 - protein, 503 aa, Homo sapiens
IYYFVEQLAHKFISPQLRMSFIVFSTRGTTLMKLTEDREQIRQGLEELQKVLPGGDTYMHEGFERASEQIYYENRQGYRTASVIIALTDGELHEDLFFYSEREANRSRDLGAIVYCVGVKDFNETQLARIADSKDHVFPVNDGFQALQGIIHSILKKSCIEILAAEPSTICAGESFQVVVRGNGFRHARNVDRVLCSFKINDSVTLNEKPFSVEDTYLLCPAPILKEVGMKAALQVSMNDGLSFISSSVIITTTHCSDGSILAIALLILFLLLALALLWWFWPLCCTVIIKEVPPPPAEESEEEDDDGLPKKKWPTVDASYYGGRGVGGIKRMEVRWGEKGSTEEGAKLEKAKNARVKMPEQEYEFPEPRNLNNNMRRPSSPRKWYSPIKGKLDALWVLLRKGYDRVSVMRPQPGDTGRCINFTRVKNNQPAKYPLNNAYHTSSPPPAPIYTPPPPAPHCPPPPPSAPTPPIPSPPSTLPPPPQAPPPNRAPPPSRPPPRPSV

SEQ ID NO: 57733 - protein, 89 aa, Homo sapiens
LKERRDEEKKETKETKSKERQITEEDLEGKTEEEIEMMKLMGFASFDSTKGKKVDGSVNAYAINVSQKRKYRQYMNRKGGFNRPLDFIA

SEQ ID NO: 57734 - protein, 27 aa, Homo sapiens
RKTLQRRDLDNAIEAVDEFAFLEGTLD

SEQ ID NO: 57735 - protein, 212 aa, Homo sapiens
IPRRGRTDPLKFQIERKDMLERRKVLHIPEFYVGSILRVTTADPYASGKISQFLGICIQRSGRGLGATFILRNVIEGQGVEICFELYNPRVQEIQVVKLEKRLDDSLLYLRDALPEYSTFDVNMKPVVQEPNQKVPVNELKVKMKPKPWSKRWERPNFNIKGIRFDLCLTEQQMKEAQKWNQPWLEFDMMREYDTSKIEAAIWKEIEASKRS

SEQ ID NO: 57736 - protein, 29 aa, Homo sapiens
VLDVNDDFSEEVTKQEDLMREVNTFVKNL

SEQ ID NO: 57737 - protein, 42 aa, Homo sapiens
LVVVGVLLIILIVLLVVFLPQSSDSSSAPRTQDAGIASGPGN

SEQ ID NO: 57738 - protein, 50 aa, Homo sapiens
KMDTSHKLHCEPGHSAPMPPACGSLKGPPPNRTAKFSGLPRDIIENYLYE

SEQ ID NO: 57739 - protein, 62 aa, Homo sapiens
VFQEDPNSDPQQPTFSLTAHLHQAHSQDVNCVAWNPKEPGLLASCSDDGEVAFWKYQRPEGL

SEQ ID NO: 57740 - protein, 54 aa, Homo sapiens
ILRQQTTDNNPPMKLVCGHIISRDALNKMFNGSKLKCPYCPMEQSPGDAKQIFF

SEQ ID NO: 57741 - protein, 38 aa, Homo sapiens
VDQQRLQSPASFPTLMNCILKRTLSDWLCRLPVLEQDG

SEQ ID NO: 57742 - protein, 425 aa, Homo sapiens
MIVHDDVESEPAMTPSKEGTLIVRQTQSASSTLQKHKSSSSFTPFIDPRLLQISPSSGTTVTSVVGFSCDGMRPEAIRQDPTRKGSVVNVNPTNTRPQSDTPEIRKYKKRFNSEILCAALWGVNLLVGTESGLMLLDRSGQGKVYPLINRRRFQQMDVLEGLNVLVTISGKKDKLRVYYLSWLRNKILHNDPEVEKKQGWTTVGDLEGCVHYKVVKYERIKFLVIALKSSVEVYAWAPKPYHKFMAFKSFGELVHKPLLVDLTVEEGQRLKVIYGSCAGFHAVDVDSGSVYDIYLPTHIQCSIKPHAIIILPNTDGMELLVCYEDEGVYVNTYGRITKDVVLQWGEMPTSVAYIRSNQTMGWGEKAIEIRSVETGHLDGVFMHKRAQRLKFLCERNDKVFFASVRSGGSSQVYFMTLGRTSLLSW

SEQ ID NO: 57743 - protein, 79 aa, Homo sapiens
RNLPTIFVYLEGDIKAQFIGPLVFGGMNLTRDELEWKLSESGAIMTDLEENPKKPIEDVLLSSVRRSVLMKRDSDSEGD

SEQ ID NO: 57744 - protein, 83 aa, Homo sapiens
LLELEKIQDYEKMPESIKFIKQKHGAIRWSGDFTQGPQSAKTRFWKNVRYHMPVQRRSPSSKHQLLSPATKEKLQREAHVPLG

SEQ ID NO: 57745 - protein, 536 aa, Homo sapiens
IKNFDRENVRIPGMLIIDTPGHESFSNLRNRGSSLCDIAILVVDIMHGLEPQTIESINLLKSKKCPFIVALNKIDRLYDWKKSPDSDVAATLKKQKKNTKDEFEERAKAIIVEFAQQGLNAALFYENKDPRTFVSLVPTSAHTGDGMGSLIYLLVELTQTMLSKRLAHCEELRAQVMEVKALPGMGTTIDVILINGRLKEGDTIIVPGVEGPIVTQIRGLLLPPPMKELRVKNQYEKHKEVEAAQGVKILGKDLEKTLAGLPLLVAYKEDEIPVLKDELIHELKQTLNAIKLEEKGVYVQASTLGSLEALLEFLKTSEVPYAGINIGPVHKKDVMKASVMLEHDPQYAVILAFDVRIERDAQEMADSLGVRIFSAEIIYHLFDAFTKYRQDYKKQKQEEFKHIAVFPCKIKILPQYIFNSRDPIVMGVTVEAGQVKQGTPMCVPSKNFVDIGIVTSIEINHKQVDVAKKGQEVCVKIEPIPGESPKMFGRHFEATDILVSKISRQSIDALKDWFRDEMQKSDWQLIVELKKVFEII

SEQ ID NO: 57746 - protein, 55 aa, Homo sapiens
IEGDMIVCAAYAHELPKYGVKVGLTNYAAEYCTGLLLARRLLNRFGTDNIYEGQV

SEQ ID NO: 57747 - protein, 584 aa, Homo sapiens
IRTRLPGAVLHQVRVWQASRSARCSFLVKMVAACRSVAGLLPRRRRCFPARAPLLRVALCLLCWTPAAVRAVPELGLWLETVNDKSGPLIFRKTMFNSTDIKLSVKSFHCSGPVKFTIVWHLKYHTCHNEHSNLEELFQKHKLSVDEDFCHYLKNDNCWTTKNENLDCNSDSQVFPSLNNKELINIRNVSNQERSMDVVARTQKDGFHIFIVSIKTENTDASWNLNVSLSMIGPHGYISASDWPLMIFYMVMCIVYILYGILWLTWSACYWKDILRIQFWIAAVIFLGMLEKAVFYSEYQNISNTGLSTQGLLIFAELISAIKRTLARLLVIIVSLGYGIVKPRLGTVMHRVIGLGLLYLIFAAVEGVMRVIGGSNHLAVVLDDIILAVIDSIFVWFIFISLAQTMKTLRLRKNTVKFSLYRHFKNTLIFAVLASIVFMGWTTKTFRIAKCQSDWMERWVDDAFWSFLFSLILIVIMFLWRPSANNQRYAFMPLIDDSDDEIEEFMVTSENLTEGIKLRASKSVSNGTAKPATSENFDEDLKWVEENIPSSFTDVALPVLVDSDEEIMTRSEMAEKMFSSEKIM

SEQ ID NO: 57748 - protein, 6 aa, Homo sapiens
MPIRSV

SEQ ID NO: 57749 - protein, 44 aa, Homo sapiens
LPVFYACTVGINLFSIMYTGAPWLKSPRRWLACAHFRRLQASVR

SEQ ID NO: 57750 - protein, 9 aa, Homo sapiens
TACWSQRFS

SEQ ID NO: 57751 - protein, 143 aa, Homo sapiens
MELFSNIVPRTAENFRALCTGEKGFGFKNSIFHRVIPDFVCQGGDITKHDGTGGQSIYGDKFEDENFDVKHTGPGLLSMANQGQNTNNSQFVITLKKAEHLDFKHVVFGFVKDGMDTVKKIESFGSPKGSVCRRITITECGQI

SEQ ID NO: 57752 - protein, 35 aa, Homo sapiens
LARPGQSPRSLPGLTPRNVVDEKPQQHGVASQPRA

SEQ ID NO: 57753 - protein, 28 aa, Homo sapiens
IILMAEEYFLVYVYESFLISLSVDEQLL

SEQ ID NO: 57754 - protein, 43 aa, Homo sapiens
MFPPTPLSPARFKKLTGHSFHMGYSMAILNGIVAALTVAWCLM

SEQ ID NO: 57755 - protein, 26 aa, Homo sapiens
IITTEDIVTVVTMVTNVDFPPKESSL

SEQ ID NO: 57756 - protein, 44 aa, Homo sapiens
IYLGKLYLPELARAFFKKTFVKLNKLKVNTLRVVVTDQKYGQTS

SEQ ID NO: 57757 - protein, 19 aa, Homo sapiens
MSKENMKLPQPPEGHCYSS

SEQ ID NO: 57758 - protein, 208 aa, Homo sapiens
ILKRWKKNWFDLWSDGHLIYYDDQTRQNIEDKVHMPMDCINIRTGQECRDTQPPDGKSKDCMLQIVCRDGKTISLCAESTDDCLAWKFTLQDSRTNTAYVGSAVMTDETSVVSSPPPYTAYAAPAPEQAYGYGPYGGAYPPGTQVVYAANGQAYAVPYQYPYAGLYGQQPANQVIIRERYRDNDSDLALGMLAGAATGMALGSLFWVF

SEQ ID NO: 57759 - protein, 231 aa, Homo sapiens
ILLSDNAASLAVQAFLQMCNLPIKVVCRANAEYMSPSGKVPFIHVGNQVVSELGPIVQFVKAKGHSLSDGLEEVQKAEMKAYMELVNNMLLTAELYLQWCDEATVGEITHARYGSPYPWPLNHILAYQKQWEVKRKMKAIGWGKKTLDQVLEDVDQCCQALSQRLGTQPYFFNKQPTELDALVFGHLYTILTTQLTNDELSEKVKNYSNLLAFCRRIEQHYFEDRGKGRLS

SEQ ID NO: 57760 - protein, 19 aa, Homo sapiens
LKKFMDQHPEMDFSKAKFN

SEQ ID NO: 57761 - protein, 287 aa, Homo sapiens
LMAMEGYWRFLALLGSALLVGFLSVIFALVWVLHYREGLGWDGSALEFNWHPVLMVTGFVFIQGIAIIVYRLPWTWKCSKLLMKSIHAGLNAVAAILAIISVVAVFENHNVNNIANMYSLHSWVGLIAVICYLLQLLSGFSVFLLPWAPLSLRAFLMPIHVYSGIVIFGTVIATALMGLTEKLIFSLRDPAYSTFPPEGVFVNTLGLLILVFGALIFWIVTRPQWKRPKEPNSTILHPNGGTEQGARGSMPAYSGNNMDKSDSELNSEVAARKRNLALDEAGQRSTM

SEQ ID NO: 57762 - protein, 626 aa, Homo sapiens
LFYLPASALRQVTNMSDKSELKAELERKKQRLAQIREEKKRKEEERKKKETDQKKEAVAPVQEESDLEKKRREAEALLQSMGLTPESPIVPPPMSPSSKSVSTPSEAGSQDSGDGAVGSRRGPIKLGMAKITQVDFPPREIVTYTKETQTPVMAQPKEDEEEDDDVVAPKPPIEPEEEKTLKKDEENDSKAPPHELTEEEKQQILHSEEFLSFFDHSTRIVERALSEQINIFFDYSGRDLEDKEGEIQAGAKLSLNRQFFDERWSKHRVVSCLDWSSQYPELLVASYNNNEDAPHEPDGVALVWNMKYKKTTPEYVFHCQSAVMSATFAKFHPNLVVGGTYSGQIVLWDNRSNKRTPVQRTPLSAAAHTHPVYCVNVVGTQNAHNLISISTDGKICSWSLDMLSHPQDSMELVHKQSKAVAVTSMSFPVGDVNNFVVGSEEGSVYTACRHGSKAGISEMFEGHQGPITGIHCHAAVGAVDFSHLFVTSSFDWTVKLWTTKNNKPLYSFEDNADYVYDVMWSPTHPALFACVDGMGRLDLWNLNNDTEVPTASISVEGNPALNRVRWTHSGREIAVGDSEGQIVIYDVGEQIAVPRNDEWARFGRTLAEINANRADAEEEAATRIPA

SEQ ID NO: 57763 - protein, 6 aa, Homo sapiens
IKSTIF

SEQ ID NO: 57764 - protein, 30 aa, Homo sapiens
INPQLQGTASNQTVMTTISNGRDPRRAFKR

SEQ ID NO: 57765 - skipped

SEQ ID NO: 57766 - protein, 246 aa, Homo sapiens
TTGFGESIMAARTGHTALRRVVSGCRPKSATAAGAQAPVRNGRYLASCGILMSRTLPLHTSILPKEICARTFFKITAPLINKRKEYSERRILGYSMQEMYDVVSGVEDYKHFVPWCKKSDVISKRSGYCKTRLEIGFPPVLERYTSVVTLVKPHLVKASCTDGRLFNHLETIWRFSPGLPGYPRTCTLDFSISFEFRSLLHSQLATLFFDEVVKQMVAAFERRACKLYGPETNIPRELMLHEVHHT

SEQ ID NO: 57767 - protein, 63 aa, Homo sapiens
LRRYTRAEYESEAEGVMGGEIQPVSVKVGDKVLLPEYGGTKVVLDDKDYFLFRDGDILGKYVD

SEQ ID NO: 57768 - protein, 576 aa, Homo sapiens
LLSGTLLWIPRAYSTRSKMAELNTHVNVKEKIYAVRSVVPNKSNNEIVLVLQQFDFNVDKAVQAFVDGSAIQVLKEWNMTGKKKNNKRKRSKSKQHQGNKDAKDKVERPEAGPLQPQPPQIQNGPMNGCEKDSSSTDSANEKPALIPREKKISILEEPSKALRGVTEGNRLLQQKLSLDGNPKPIHGTTERSDGLQWSAEQPCNPSKPKAKTSPVKSNTPAAHLEIKPDELAKKRGPNIEKSVKDLQRCTVSLTRYRVMIKEEVDSSVKKIKAAFAELHNCIIDKEVSLMAEMDKVKEEAMEILTARQKKAEELKRLTDLASQMAEMQLAELRAEIKHFVSERKYDEELGKAARFSCDIEQLKAQIMLCGEITHPKNNYSSRTPCSSLLPLLNAHAATSGKQSNFSRKSSTHNKPSEGKAANPKMVSSLPSTADPSHQTMPANKQNGSSNQRRRFNPQYHNNRLNGPAKSQGSGNEAEPLGKGNSRHEHRRQPHNGFRPKNKGGAKNQEASLGMKTPEAPAHSEKPRRRQHAADTSEARPFRGSVGRVSQCNLCPTRIEVSTDAAVLSVPAVTLVA

SEQ ID NO: 57769 - protein, 10 aa, Homo sapiens
IITSNEIYPG

SEQ ID NO: 57770 - protein, 58 aa, Homo sapiens
VAAPHQSRAPRLGRRRVRVLLSCTRCLGSARRGPPPGFEDGGVATGSDPAMARYIFVE

SEQ ID NO: 57771 - protein, 764 aa, Homo sapiens
VGTDQDFYSLLGVSKTASSREIRQAFKKLALKLHPDKNPNNPNAHGDFLKINRAYEVLKDEDLRKKYDKYGEKGLEDNQGGQYESWNYYRYDFGIYDDDPEIITLERREFDAAVNSGELWFVNFYSPGCSHCHDLAPTWRDFAKEVDGLLRIGAVNCGDDRMLCRMKGVNSYPSLFIFRSGMAPVKYHGDRSKESLVSFAMQHVRSTVTELWTGNFVNSIQTAFAAGIGWLITFCSKGGDCLTSQTRLRLSGMLDGLVNVGWMDCATQDNLCKSLDITTSTTAYFPPGATLNNKEKNSILFLNSLDAKEIYLEVIHNLPDFELLSANTLEDRLAHHRWLLFFHFGKNENSNDPELKKLKTLLKNDHIQVGRFDCSSAPDICSNLYVFQPSLAVFKGQGTKEYEIHHGKKILYDILAFAKESVNSHVTTLGPQNFPANDKEPWLVDFFAPWCPPCRALLPELRRASNLLYGQLKFGTLDCTVHEGLCNMYNIQAYPTTVVFNQSNIHEYEGHHSAEQILEFIEDLMNPSVVSLTPTTFNELVTQRKHNEVWMVDFYSPWCHPCQVLMPEWKRMARTLTGLINVGSIDCQQYHSFCAQENVQRYPEIRFFPPKSNKAYHYHSYNGWNRDAYSLRIWGLGFLPQVSTDLTPQTFSEKVLQGKNHWVIDFYAPWCGPCQNFAPEFELLARMIKGKVKAGKVDCQAYAQTCQKAGIRAYPTVKFYFYERAKRNFQEEQINTRDAKAIAALISEKLETLRNQGKRNKDEL

SEQ ID NO: 57772 - protein, 41 aa, Homo sapiens
MRPLATAYKASTSDYQVISDRQTPKKDESLVSKAMEYMFGW

SEQ ID NO: 57773 - protein, 407 aa, Homo sapiens
KEKIIEDKTFGLKNKKGAKQQKFIKAVTHQVKFGQQNPRQVAQSEAEKKLKKDDKKKELQELNELFKPVVAAQKISKGADPKSVVCAFFKQGQCTKGDKCKFSHDLTLERKCEKRSVYIDARDEELEKDTMDNWDEKKLEEVVNKKHGEAEKKKPKTQIVCKHFLEAIENNKYGWFWVCPGGGDICMYRHALPPGFVLKKDKKKEEKEDEISLEDLIERERSALGPNVTKITLESFLAWKKRKRQEKIDKLEQDMERRKADFKAGKALVISGREVFEFRPELVNDDDEEADDTRYTQGTGGDEVDDSVSVNDIDLSLYIPRDVDETGITVASLERFSTYTSDKDENKLSEASGGRAENGERSDLEEDNEREGTENGAIDAVPVDENLFTGEDLDELEEELNTLDLEE

SEQ ID NO: 57774 - protein, 110 aa, Homo sapiens
LDKSDVSSLIFLMKDYMGRGKISKEKSFLDLVVELEKLNLVAPDQLDLLEKCLKNIHRIDLKTKIQKYKQSVQGAGTSYRNVLQAAIQKSLKDPSNNFRVSLEKTYGIPA

SEQ ID NO: 57775 - protein, 466 aa, Homo sapiens
MEGKINKQLKKVLKKIVKEAHEPLAVADAKLGGVIKEKLNLSCIHSPVVNELMRGIRSQMDGLIPGVEPREMAAMCLGLAHSLSRYRLKFSADKVDTMIVQAISLLDDLDKELNNYIMRCREWYGWHFPELGKIISDNLTYCKCLQKVGDRKNYASAKLSELLPEEVEAEVKAAAEISMGTEVSEEDICNILHLCTQVIEISEYRTQLYEYLQNRMMAIAPNVTVMVGELVGARLIAHAGSLLNLAKHAASTVQILGAEKALFRALKSRRDTPKYGLIYHASLVGQTSPKHKGKISRMLAAKTVLAIRYDAFGEDSSSAMGVENRAKLEARLRTLEDRGIRKISGTGKALAKTEKYEHKSEVKTYDPSGDSTLPTCSKKRKIEQVDKEDEITEKKAKKAKIKVKVEEEEEEKVAEEEETSVKKKKKRGKKKHIKEEPLSEEEPCTSTAIASPEKKKKKKKKRENED

SEQ ID NO: 57776 - protein, 165 aa, Homo sapiens [sequence omitted]

SEQ ID NO: 57777 - protein, 213 aa, Homo sapiens
LANLGAECLRMLDSGADYLHLDVMDGHFVPNITFGHPVVESLRKQLGQDPFFDMHMMVSKPEQWVKPMAVAGANQYTFHLEATENPGALIKDIRENGMKVGLAIKPGTSVEYLAPWANQIDMALVMTVEPGFGGQKFMEDMMPKVHWLRTQFPSLDIEVDGGVGPDTVHKCAEAGANMIVSGSAIMRSEDPRSVINLLRNVCSEAAQKRSLDR

SEQ ID NO: 57778 - protein, 84 aa, Homo sapiens [sequence omitted]

SEQ ID NO: 57779 - protein, 865 aa, Homo sapiens
KIVLNFNPHFEIEKHDCKYDFIEIRDGDSESADLLGKHCGNIAPPTIISSGSMLYIKFTSDYARQGAGFSLRYEIFKTGSEDCSKNFTSPNGTIESPGFPEKYPHNLDCTFTILAKPKMEIILQFLIFDLEHDPLQVGEGDCKYDWLDIWDGIPHVGPLIGKYCGTKTPSELRSSTGILSLTFHTDMAVAKDGFSARYYLVHQEPLENFQCNVPLGMESGRIANEQISASSTYSDGRWTPQQSRLHGDDNGWTPNLDSNKEYLQVDLRFLTMLTAIATQGAISRETQNGYYVKSYKLEVSTNGEDWMVYRHGKNHKVFQANNDATEVVLNKLHAPLLTRFVRIRPQTWHSGIALRLELFGCRVTDAPCSNMLGMLSGLIADSQISASSTQEYLWSPSAARLVSSRSGWFPRIPQAQPGEEWLQVDLGTPKTVKGVIIQGARGGDSITAVEARAFVRKFKVSYSLNGKDWEYIQDPRTQQPKLFEGNMHYDTPDIRRFDPIPAQYVRVYPERWSPAGIGMRLEVLGCDWTDSKPTVETLGPTVKSEETTTPYPTEEEATECGENCSFEDDKDLQLPSGFNCNFDFLEEPCGWMYDHAKWLRTTWASSSSPNDRTFPDDRNFLRLQSDSQREGQYARLISPPVHLPRSPVCMEFQYQATGGRGVALQVVREASQESKLLWVIREDQGGEWKHGRIILPSYDMEYQIVFEGVIGKGRSGEIAIDDIRISTDVPLENCMEPISAFAGENFKVDIPEIHEREGYEDEIDDEYEVDWSNSSSATSGSGAPSTDKEKSWLYTLDPILITIIAMSSLGVLLGATCAGLLLYCTCSYSGLSSRSCTTLENYNFELYDGLKHKVKMNHQKCCSEA

SEQ ID NO: 57780 - protein, 247 aa, Homo sapiens
VGRPQFARSLSAAPQLSDTADTMGFGDLKSPAGLQVLNDYLADKSYIEGYVPSQADVAVFEAVSSPPPADLCHALRWYNHIKSYEKEKASLPGVKKALGKYGPADVEDTTGSGATDSKDDDDIDLFGSDDEEESEEAKRLREERLAQYESKKAKKPALVAKSSILLDVKPWDDETDMAKLEECVRSIQADGLVWGSSKLVPVGYGIKKLQIQCVVEDDKVGTDMLEEQITAFEDYVQSMDVAAFNKI

SEQ ID NO: 57781 - protein, 233 aa, Homo sapiens
IFSKYGKIVGCSVHKGFAFFQYVNERNARAAVAGEDGRMIAGQVLDINLAAEPKVNRGKAGVKRSAAEMYGSSFDLDCDFQRDYYDRMYSYPARVPPPPPIARAVVPSKRQRVSGNTSQRGISGFNSKSGQRGSSKSGKLKGDDLQAIKRELTQIKQKVDSFLENLEKIEKEQSKQAVEMNNVKSEEEQSSSSVKKDETNVKMESEGGADDSAEEGDLLDDDDNEDGGMTSWS

SEQ ID NO: 57782 - protein, 21 aa, Homo sapiens
LNSIVLPHKELSRSFTNQIIL

SEQ ID NO: 57783 - protein, 709 aa, Homo sapiens
IPGIESPFEQAKKVITMFVQRQVFAENKDEIALVLFGTDGTDNPLSGGDQYQNITVHRHLMLPDFDLLEDIESKIQPGSQQADFLDALIVSMDVIQHETIGKKFEKRHIEIFTDLSSRFSKSQLDIIIHSLKKCDISLQFFLPFSLGKEDGSGDRGDGPFRLGGHGPSFPLKGITEQQKEGLEIVKMVMISLEGEDGLDEIYSFSESLRKLCVFKKIERHSIHWPCRLTIGSNLSIRIAAYKSILQERVKKTWTVVDAKTLKKEDIQKETVYCLNDDDETEVLKEDIIQGFRYGSDIVPFSKVDEEQMKYKSEGKCFSVLGFCKSSQVQRRFFMGNQVLKVFAARDDEAAAVALSSLIHALDDLDMVAIVRYAYDKRANPQVGVAFPHIKHNYECLVYVQLPFMEDLRQYMFSSLKNSKKYAPTEAQLNAVDALIDSMSLAKKDEKTDTLEDLFPTTKIPNPRFQRLFQCLLHRALHPREPLPPIQQHIWNMLNPPAEVTTKSQIPLSKIKTLFPLIEAKKKDQVTAQEIFQDNHEDGPTAKKLKTEQGGAHFSVSSLAEGSVTSVGSVNPAENFRVLVKQKKASFEEASNQLINHIEQFLDTNETPYFMKSIDCIRAFREEAIKFSEEQRFNNFLKALQEKVEIKQLNHFWEIVVQDGITLITKEEASGSSVTAEEAKKFLAPKDKPSGDTAAVFEEGGDVDDLLDMI

SEQ ID NO: 57784 - protein, 186 aa, Homo sapiens
IYPSINPPTLTAHQSNRVCNALALLQCVASHPETRSAFLAAHIPLFLYPFLHTVSKTRPFEYLRLTSLGVIGALVKTDEQEVINFLLTTEIIPLCLRIMESGSELSKTVATFILQKILLDDTGLAYICQTYERFSHVAMILGKMVLQLSKEPSARLLKHVVRCYLRLSDNPRFSDLTFCWSSFQRK

SEQ ID NO: 57785 - protein, 24 aa, Homo sapiens
MKMFHFQDQQILTLFSQLPLNPWH

SEQ ID NO: 57786 - protein, 62 aa, Homo sapiens
IEGTSDDLTVVDAASLRRQIIKLNRRLQLLEEENKERAKREMVMYSITVAFWLLNSWLWFRR

SEQ ID NO: 57787 - protein, 498 aa, Homo sapiens
VKSISMTTFTQQEIEFLQKHGNEVCKQIWLGLFDDRSSAIPDFRDPQKVKEFLQEKYEKKRWYVPPEQAKVVASVHASISGSSASSTSSTPEVKPLKSLLGDSAPTLHLNKGTPSQSPVVGRSQGQQQEKKQFDLLSDLGSDIFAAPAPQSTATANFANFAHFNSHAAQNSANADFANFDAFGQSSGSSNFGGFPTASHSPFQPQTTGGSAASVNANFAHFDNFPKSSSADFGTFNTSQSHQTASAVSKVSTNKAGLQTADKYAALANLDNIFSAGQGGDQGSGFGTTGKAPVGSVVSVPSQSSASSDKYAALAELDSVFSSAATSSNAYTSTSNASSNVFGTVPVVASAQTQPASSSVPAPFGATPSTNPFVAAAGPSVASSTNPFQTNARGATAATFGTASMSMPTGFGTPAPYSLPTSFSGSFQQPAFPAQAAFPQQTAFSQQPNGAGFAAFGQTKPVVTPFGQVAAAGVSSNPFMTGAPTGQFPTGSSSTNPFL

SEQ ID NO: 57788 - protein, 21 aa, Homo sapiens
KRLETFLSLLVQNLAPAETHT

SEQ ID NO: 57789 - protein, 87 aa, Homo sapiens
RVHIGQVIMSIRTKLQNKEHVIEALRRAKFKLPGHQKIHISKKWGFTKFNADEFEDMVAEKWLIPDGCGVKYIPNRGPLDKWRALHS

SEQ ID NO: 57790 - protein, 121 aa, Homo sapiens
IPCIGSPACPTMSDAAVDTSSEITTKDLKEKKEVVEEAENGRDAPANGNANEENGEQEADNEVDEEEEEGGEEEEEEEEGDGEEEDGDEDEEAESATGKRAAEDDEDDDVDTKKQKTDEDD

SEQ ID NO: 57791 - protein, 216 aa, Homo sapiens
KEKTERDKNQSSSKRKAVVPGPAEHPLQYNYTFWYSRRTPGRPTSSQSYEQNIKQIGTFASVEQFWRFYSHMVRPGDLTGHSDFHLFKEGIKPMWEDDANKNGGKWIIRLRKGLASRCWENLILAMLGEQFMVGEEICGAVVSVRFQEDIISIWNKTASDQATTARIRDTLRRVLNLPPNTIMEYKTHTDSIKMPGRLGPQRLLFQNLWKPRLNVP

SEQ ID NO: 57792 - protein, 36 aa, Homo sapiens
ITKRWKHLTGTLILVNSLDVLRAAAFSPADQDDFVI

SEQ ID NO: 57793 - protein, 400 aa, Homo sapiens
KCSALREPAHSTARKASEPSQPSQPSQPGGHLIARLRTMDLHLFDYSEPGNFSDISWPCNSSDCIVVDTVMCPNMPNKSVLLYTLSFIYIFIFVIGMIANSVVVWVNIQAKTTGYDTHCYILNLAIADLWVVLTIPVWVVSLVQHNQWPMGELTCKVTHLIFSINLFGSIFFLTCMSVDRYLSITYFTNTPSSRKKMVRRVVCILVWLLAFCVSLPDTYYLKTVTSASNNETYCRSFYPEHSIKEWLIGMELVSVVLGFAVPFSIIAVFYFLLARAISASSDQEKHSSRKIIFSYVVVFLVCWLPYHVAVLLDIFSILHYIPFTCRLEHALFTALHVTQCLSLVHCCVNPVLYSFINRNYRYELMKAFIFKYSAKTGLTKLIDASRVSETEYSALEQSTK

SEQ ID NO: 57794 - protein, 321 aa, Homo sapiens
VADLSEQSLKDGEERGEEDPEEEHELPVDMETINLDRDAEDVDLNHYRIGKIEGFEVLKKVKTLCLRQNLIKCIENLEELQSLRELDLYDNQIKKIENLEALTELEILDISFNLLRNIEGVDKLTRLKKLFLVNNKISKIENLSNLHQLQMLELGSNRIRAIENIDTLTNLESLFLGKNKITKLQNLDALTNLTVLSMQSNRLTKIEGLQNLVNLRELYLSHNGIEVIEGLENNNKLTMLDIASNRIKKIENISHLTELQEFWMNDNLLESWSDLDELKGARSLETVYLERNPLQKDPQYRRKVMLALPSVRQIDATFVRF

SEQ ID NO: 57795 - protein, 16 aa, Homo sapiens
KNILQEQKENTEVSKQ

SEQ ID NO: 57796 - protein, 745 aa, Homo sapiens
IRMKELERQQKEEDSERYSRRSRRNTSASDEDERMSVGSRGSLRVEERPEKDFTEKGSRNMPGLSAATLASLGGTSSRRGSGDTSISIDTEASIREIKDSLAEVEEKYKKAMVSNAQLDNEKTNFMYQVDTLKDMLLELEEQLAESRRQYEEKNKEFEREKHAHSILQFQFAEVKEALKQREEMLEKHGIILNSEIATNGETSDTLNNVGYQGPTKMTKEELNALKSTGDGTLGRASEVEVKNEIVANVGKREILHNTEKEQHTEDTVKDCVDIEVFPAGENTEDQKSSEDTAPFLGTLAGATYEEQVQSQILESSSLPENTVQVESNEVMGAPDDRTRTPLEPSNCWSDLDGGNHTENVGEAAVTQVEEQAGTVASCPLGHSDDTVYHDDKCMVEVPQELETSTGHSLEKEFTNQEAAEPKEVPAHSTEVGRDHNEEEGEETGLRDEKPIKTEVPGSPAGTEGNCQEATGPSTVDTQNEPLDMKEPDEEKSDQQGEALDSSQKKTKNKKKKNKKKKSPVPVETLKDVKKELTYQNTDLSEIKEEEQVKSTDRKSAVEAQNEVTENPKQKIAAESSENVDCPENPKIKLDGKLDQEGDDVQTAAEEVLADGDTLDFEDDTVQSSGPRAGGEELDEGVAKDNAKIDGATQSSPAEPKSEDADRCTLPEHESPSQDISDACEAESTERCEMSEHPSQTVRKALDSNSLENDDLSAPGREPGHFNPESREDTRGGNEKGKSKEDCTMS

SEQ ID NO: 57797 - protein, 48 aa, Homo sapiens
LRRRGGWTDVLKCVVSTDPGLRSHWLVAALCSFGRFLKAAFFVLLPER

SEQ ID NO: 57798 - protein, 50 aa, Homo sapiens
LGRKYSIFTEKDEILSDVASRLWFTYRKNFPAIGGCRDISLSSKCGPWRY

SEQ ID NO: 57799 - protein, 12 aa, Homo sapiens
KLEGPESSAVLA

SEQ ID NO: 57800 - protein, 22 aa, Homo sapiens
RPSRTSWCYRSIWSCWKRWRIR

SEQ ID NO: 57801 - protein, 26 aa, Homo sapiens
KWPCWPCWCSRSCWFPRCSWSSRPTW

SEQ ID NO: 57802 - protein, 48 aa, Homo sapiens
IQNENLKSMTHKRSQRSSYTRLSKDPPELHAAASSESTGFGEERESIL

SEQ ID NO: 57803 - protein, 5 aa, Homo sapiens
KKEYT

SEQ ID NO: 57804 - protein, 109 aa, Homo sapiens
IDVAQQDGKLPFVPPEEEFIMGVSKYGIKVSTSDQYDVLHRHALYLIIRMVCYDDGLGAGKSLLALKTTDASNEEYSLWVYQCNSLEQAQAICKVLSTAFDSVLTSEKP

SEQ ID NO: 57805 - protein, 29 aa, Homo sapiens
VTLRSDATADDLIDVVEGNRVYIPCIYVK

SEQ ID NO: 57806 - protein, 143 aa, Homo sapiens
VEPVGEKSNYICHKGHEFIPTLYHFPTNCEACMKPLWHMFKPPPALECRRCHIKCHKDHMDKKEEIIAPCKVYYDISTAKNLLLLANSTEEQQKWVSRLVKKIPKKPPAPDPFARSSPRTSMKIQQNQSIRRPSRQLAPNKPS

SEQ ID NO: 57807 - protein, 95 aa, Homo sapiens
IRRTRKTPPTMEEILKNEKHREEIKIKSQDFYEKEKLLSKETSEELLPPPVQTQIKGRASAPYFGKEKPSVAPSSTGKTFQPGSWMPRDGKSHNE

SEQ ID NO: 57808 - skipped

SEQ ID NO: 57809 - protein, 66 aa, Homo sapiens
VLCKLEENVQATNSPSEAEEFQLEVSGLLGEMNCPYLSLTSGDVTKRLLIQKNCLLLLSKFMATRI

SEQ ID NO: 57810 - protein, 762 aa, Homo sapiens
VACRAIGILSRFSAFRILRSRGYICRNFTGSSALLTRTHINYGVKGDVAVVRINSPNSKVNTLSKELHSEFSEVMNEIWASDQIRSAVLISSKPGCFIAGADINMLAACKTLQEVTQLSQEAQRIVEKLEKSTKPIVAAINGSCLGGGLEVAISCQYRIATKDRKTVLGTPEVLLGALPGAGGTQRLPKMVGVPAALDMMLTGRSIRADRAKKMGLVDQLVEPLGPGLKPPEERTIEYLEEVAITFAKGLADKKISPKRDKGLVEKLTAYAMTIPFVRQQVYKKVEEKVRKQTKGLYPAPLKIIDVVKTGIEQGSDAGYLCESQKFGELVMTKESKALMGLYHGQVLCKKNKFGAPQKDVKHLAILGAGLMGAGIAQVSVDKGLKTILKDATLTALDRGQQQVFKGLNDKVKKKALTSFERDSIFSNLTGQLDYQGFEKADMVIEAVFEDLSLKHRVLKEVEAVIPDHCIFASNTSALPISEIAAVSKRPEKVIGMHYFSPVDKMQLLEIITTEKTSKDTSASAVAVGLKQGKVIIVVKDGPGFYTTRCLAPMMSEVIRILQEGVDPKKLDSLTTSFGFPVGAATLVDEVGVDVAKHVAEDLGKVFGERFGGGNPELLTQMVSKGFLGRKSGKGFYIYQEGVKRKDLNSDMDSILASLKLPPKSEVSSDEDIQFRLVTRFVNEAVMCLQEGILATPAEGDIGAVFGLGFPPCLGGPFRFVDLYGAQKIVDRLKKYEAAYGKQFTPCQLLADHANSPNKKFYQ

SEQ ID NO: 57811 - protein, 73 aa, Homo sapiens
VNQSLLELHKLATDKNDPHLCDFIETHYLNEQVKAIKELGDHVTNMHEMGAPESGVAEYLFDKHTLGDSDNES

SEQ ID NO: 57812 - protein, 208 aa, Homo sapiens
KQLIVANAGDSRCVVSEAGKALDMSYDHKPEDEVELARIKNAGGKVTMDGRVNGGLNLSRAIGDHFYKRNKNLPPEEQMISALPDIKVLTLTDDHEFMVIACDGIWNVMSSQEVVDFIQSKISQRDENGELRLLSSIVEELLDQCLAPDTSGDGTGCDNMTCIIICFKPRNTAELQPESGKRKLEEVLSTEGAEENGNSDKKKKAKRD

SEQ ID NO: 57813 - protein, 296 aa, Homo sapiens
LSLCFRPSDPGAEPPRTAVRPITERSLLQGDEIWNALTDNYGNVMPVDWKSSHTRTLHLLTLNLSEKGVSDSLLFDTSDDEELREQLDMHSIIVSCVNDEPLFTADQVIEEIEEMMQESPDPEDDETPTQSDRLSMLSQEIQTLKRSSTGSYEERVKRLSVSELNEILEEIETAIKEYSEELVQQLALRDELEFEKEVKNSFISVLIEVQNKQKEHKETAKKKKKLKNGSSQNGKNERSHMPGTYLTTVIPYEKKNGPPSVEDLQILTKILRAMKEDSEKVPSLLTDYILKVLCPT

SEQ ID NO: 57814 - protein, 4 aa, Homo sapiens
IGKT

SEQ ID NO: 57815 - protein, 505 aa, Homo sapiens
RNLRCHDVYRATFGDNKRNERFYTEKDPSYFVFLYLTKDSRFLTINIMNKTTSEVWLIDGLSPWDPPVLIQKRIHGVLYYVEHRDDELYILTNVGEPTEFKLMRTAADTPAIMNWDLFFTMKRNTKVIDLDMFKDHCVLFLKHSNLLYVNVIGLADDSVRSLKLPPWACGFIMDTNSDPKNCPFQLCSPIRPPKYYTYKFAEGKLFEETGHEDPITKTSRVLRLEAKSKDGKLVPMTVFHKTDSEDLQKKPLLVHVYGAYGMDLKMNFRPERRVLVDDGWILAYCHVRGGGELGLQWHADGRLTKKLNGLADLEACIKTLHGQGFSQPSLTTLTAFSAGGVLAGALCNSNPELVRAVTLEAPFLDVLNTMMDTTLPLTLEELEEWGNPSSDEKHKNYIKRYCPYQNIKPQHYPSIHITAYENDERVPLKGIVSYTEKLKEAIAEHAKDTGEGYQTPNIILDIQPGGNHVIEDSHKKITAQIKFLYEELGLDSTSVFEDLKKYLKF

SEQ ID NO: 57816 - protein, 160 aa, Homo sapiens
LEGFASASETVRILMTMRSLLRTPFLCGLLWAFCAPGARAEEPAASFSQPGSMGLDKNTVHDQEHIMEHLEGVINKPEAEMSPQELQLHYFKMHDYDGNNLLDGLELSTAITHVHKEEGSEQAPLMSEDELINIIDGVLRDDDKNNDGYIDYAEFAKSLQ

SEQ ID NO: 57817 - protein, 248 aa, Homo sapiens
IYLKAANNKKGKKFKLRDILSPDMISPPLGDFRHTIHIGKEGQHDVFGDISFLQGNYELLPGNQEKAHLGQFPGHNEFFRANSTSDSVFTETPSPVLKNAISLPTIGGSQALMLPLLSPVTFNSKQESFGPAKLPRLSCEPVMEEKAQEKSSLLENGTVHQGDTSWGSSGSASQSSQGRDSHSSSLSEQYPDWPAEDMFDHPTPCELIKGKTKSEESLSDLTGSLLSLQLDLGPSLLDEVLNVMDKNK

SEQ ID NO: 57818 - protein, 360 aa, Homo sapiens
LHLQQQQKGGGGSQINSTRYKTELCRPFEESGTCKYGEKCQFAHGFHELRSLTRHPKYKTELCRTFHTIGFCPYGPRCHFIHNADERRPAPSGGASGDLRAFGTRDALHLGFPREPRPKLHHSLSFSGFPSGHHQPPGGLESPLLLDSPTSRTPPPPSCSSASSCSSSASSCSSASAASTPSGAPTCCASAAAAAAAALLYGTGGAEDLLAPGAPCAACSSASCANNAFAFGPELSSLITPLAIQTHNFAAVAAAAYYRSQQQQQQQGLAPPAQPPAPPSATLPAGAAAPPSPPFSFQLPRRLSDSPVFDAPPSPPDSLSDRDSYLSGSLSSGSLSGSESPSLDPGRRLPIFSRLSISDD

SEQ ID NO: 57819 - protein, 29 aa, Homo sapiens
LILLFYLIFYGFLAALFSFTMWVMLQTQR

SEQ ID NO: 57820 - protein, 165 aa, Homo sapiens
LLSLTVFSIVSVTAYIALALLSVTISFRIYKGVIQAIQKSDEGHPFRAYLESEVAISEELVQKYSNSALGHVNCTIKELRRLFLVDDLVDSLKFAVLMWVFTYVGALFNGLTLLILALISLFSVPVIYERHQAQIDHYLGLANKNVKDAMAKIQAKIPGLKRKAE

SEQ ID NO: 57821 - protein, 24 aa, Homo sapiens
LPLRACYHCGVMCRCCGGKHKAAA

SEQ ID NO: 57822 - protein, 114 aa, Homo sapiens
VDEMLKTMMSVSRNELLQKLDPLEQAKVDLVSAYTLNSMFWVYLATQGVNPKEHPVKQELERIRVYMNRVKEITDKKKAGKLDRGAASRFVKNALWEPKSKNASKVANKGKSKS

SEQ ID NO: 57823 - protein, 40 aa, Homo sapiens
MDCSSERNILSKYLLISIPGHRGNVYAASRNISIWRFLIK

SEQ ID NO: 57824 - protein, 133 aa, Homo sapiens
INPTVIVDPFQILVAANKAVHLYKLGKMKTRTLSTEIIFNLSPNNNISEALKKFGISANDTSILIVYIEEGEKQINQEYLISQVEGHQVSLKNLPEIMNITEVKKIYKLSSQEESIGTLLDAIICRMSTKDVL

SEQ ID NO: 57825 - protein, 33 aa, Homo sapiens
VKPNASRAAQDRRRWYPYNYSRLSYPACWEWTQ

SEQ ID NO: 57826 - protein, 69 aa, Homo sapiens
ILKEKFPRATAIKVTDISGGCGAMYEIKIESEEFKEKRTVQQHQMVNQALKEEIKEMHGLRIFTSVPKR

SEQ ID NO: 57827 - protein, 12 aa, Homo sapiens
VVLSGRPLGTPD

SEQ ID NO: 57828 - protein, 53 aa, Homo sapiens
MYGQAWNQQGFNQTQSSAPWMGPNYGVQPPQGQNGSMLPNQPSGYRVAGYETQ

SEQ ID NO: 57829 - protein, 11 aa, Homo sapiens
MNCSYQKLLCS

SEQ ID NO: 57830 - protein, 46 aa, Homo sapiens
LNKNVFTSAEELERAQRLEERERIIREIWMNGQPEVPGTRSLNRYY

SEQ ID NO: 57831 - protein, 28 aa, Homo sapiens
VKIKALNQAESFIGEHHLDHLKSLIKED

SEQ ID NO: 57832 - protein, 206 aa, Homo sapiens
VAGERAGGGAMWFMYLLSWLSLFIQVAFITLAVAAGLYYLAELIEEYTVATSRIIKYMIWFSTAVLIGLYVFERFPTSMIGVGLFTNLVYFGLLQTFPFIMLTSPNFILSCGLVVVNHYLAFQFFAEEYYPFSEVLAYFTFCLWIIPFAFFVSLSAGENVLPSTMQPGDDVVSNYFTKGKRGKRLGILVVFSFIKEAILPSRQKIY

SEQ ID NO: 57833 - protein, 14 aa, Homo sapiens
MPCGELVLQRVLPS

SEQ ID NO: 57834 - protein, 49 aa, Homo sapiens
VDVLFGDGHRLIMRGAHLTALEMLTAFASHIRARDAAGSGDKPGADTGR

SEQ ID NO: 57835 - protein, 78 aa, Homo sapiens
LLEGAVAFMPEDITKGTQSLPTASASKFPSSGPVTPQPTALTFAKSSWARQESLQERKQALYEYARRRFTERRAQEAD

SEQ ID NO: 57836 - protein, 88 aa, Homo sapiens
IDLRQLLDLFIQWDWSTYLADYGQPNCKYLRVNPVTALTLLEKISREMKDTSRKNNMFAQFRKNERDKQKLIDTVAKQLRGLISSHHS

SEQ ID NO: 57837 - protein, 104 aa, Homo sapiens
LVQTFLRRQQRLQEIERRRNTPFHERFFRFLLRKLYVFRRSFLMTCISLRNLILGRPSLEQLAQEVTYANLRPFEAVGELNPSNTDSSHSNPPESNPDPVHSEF

SEQ ID NO: 57838 - protein, 28 aa, Homo sapiens
MSDAYMGCDQEYKFSVDVKEAETDSDSD

SEQ ID NO: 57839 - protein, 78 aa, Homo sapiens
VLSGGSTLFKGFGDRLLSEVKKLAPKDIKIKISAPQERLYSTWIGGSILASLDTFKKMWVSKKEYEEDGSRAIHRKTF

SEQ ID NO: 57840 - protein, 33 aa, Homo sapiens
LKEGYCNSLKYAFFECKRSVLDNRARFRGRKGY

SEQ ID NO: 57841 - protein, 255 aa, Homo sapiens
TCLLKLLLFHFSGVTESSAPRLNSVPFGRMEADASVDMFSKVLEHQLLQTTKLVEEHLDSEIQKLDQMDEDELERLKEKRLQALRKAQQQKQEWLSKGHGEYREIPSERDFFQEVKESENVVCHFYRDSTFRCKILDRHLAILSKKHLETKFLKLNVEKAPFLCERLHIKVIPTLALLKDGKTQDYVVGFTDLGNTDDFTTETLEWRLGSSDILNYSGNLMEPPFQNQKKFGTNFTKLEKKTIRGKKYDSDSDDD

SEQ ID NO: 57842 - protein, 239 aa, Homo sapiens
MISYPKGREILELVQKGIPVTMTIGVGTRHVQEFISGQSVVFVAIAFITMMIISLAWLIFYYIQRFLYTGSQIGSQSHRKETKKVIGQLLLHTVKHGEKGIDVDAENCAVCIENFKVKDIIRILPCKHIFHRICIDPWLLDHRTCPMCKLDVIKALGYWGEPGDVQEMPAPESPPGRDPAANLSLALPDDDGSDDSSPPSASPAESEPQCDPSFKGDAGENTALLEAGRSDSRHGGPIS

SEQ ID NO: 57843 - protein, 11 aa, Homo sapiens
LNNWEMKQEAL

SEQ ID NO: 57844 - protein, 70 aa, Homo sapiens
VKGPVRMPAKTLRITTRKTTCGEDSKTWDHFQMRIHKRLIDLHSPSEIVKQITSISIEPGVEVEVTIADA

SEQ ID NO: 57845 - skipped

SEQ ID NO: 57846 - protein, 35 aa, Homo sapiens
IKKATGIKNGLALHLMAQGLYNHSTTTVQDKDESE

SEQ ID NO: 57847 - protein, 325 aa, Homo sapiens
VGAESGARPKERGAEPELGRLWLRTVSSWRLGWHFDFGVAEKPGVKMTERFDCHHCNESLFGKKYILREESPYCVVCFETLFANTCEECGKPIGCDCKDLSYKDRHWHEACFHCSQCRNSLVDKPFAAKEDQLLCTDCYSNEYSSKCQECKKTIMPGTRKMEYKGSSWHETCFICHRCQQPIGTKSFIPKDNQNFCVPCYEKQHAMQCVQCKKPITTGGVTYREQPWHKECFVCTACRKQLSGQRFTARDDFAYCLNCFCDLYAKKCAGCTNPISGLGGTKYISFEERQWHNDCFNCKKCSLSLVGRGFLTERDDILCPDCGKDI

SEQ ID NO: 57848 - protein, 4 aa, Homo sapiens
IMRI

SEQ ID NO: 57849 - skipped

SEQ ID NO: 57850 - protein, 6 aa, Homo sapiens
KRSFQY

SEQ ID NO: 57851 - protein, 49 aa, Homo sapiens
ITSEFRKTIKLTRYRSEKVTISYAEYIASRQHCFQNGTLHAPPLYNHYS

SEQ ID NO: 57852 - protein, 138 aa, Homo sapiens [sequence omitted]

SEQ ID NO: 57853 - protein, 68 aa, Homo sapiens
KEIESEIDSEEELINKKRIIEKVIHRLTHYDHVLIELTQAGLKGSTEGSESYEEDPYLVVNPNYLLED

SEQ ID NO: 57854 - protein, 520 aa, Homo sapiens
LPYGSLRGRVVSTAQFRVPMPSASASRKSQEKPREIMDAAEDYAKERYGISSMIQSQEKPDRVLVRVRDLTIQKADEVVWVRARVHTSRAKGKQCFLVLRQQQFNVQALVAVGDHASKQMVKFAANINKESIVDVEGVVRKVNQKIGSCTQQDVELHVQKIYVISLAEPRLPLQLDDAVRPEAEGEEEGRATVNQDTRLDNRVIDLRTSTSQAVFRLQSGICHLFRETLINKGFVEIQTPKIISAASEGGANVFTVSYFKNNAYLAQSPQLYKQMCICADFEKVFSIGPVFRAEDSNTHRHLTEFVGLDIEMAFNYHYHEVMEEIADTMVQIFKGLQERFQTEIQTVNKQFPCEPFKFLEPTLRLEYCEALAMLREAGVEMGDEDDLSTPNEKLLGHLVKEKYDTDFYILDKYPLAVRPFYTMPDPRNPKQSNSYDMFMRGEEILSGAQRIHDPQLLTERALHHGIDLEKIKAYIDSFRFGAPPHAGGGIGLERVTMLFLGLHNVRQTSMFPRDPKRLTP

SEQ ID NO: 57855 - protein, 302 aa, Homo sapiens
ITLLECVGKGRYGEVWRGSWQGENVAVKIFSSRDEKSWFRETELYNTVMLRHENILGFIASDMTSRHSSTQLWLITHYHEMGSLYDYLQLTTLDTVSCLRIVLSIASGLAHLHIEIFGTQGKPAIAHRDLKSKNILVKKNGQCCIADLGLAVMHSQSTNQLDVGNNPRVGTKRYMAPEVLDETIQVDCFDSYKRVDIWAFGLVLWEVARRMVSNGIVEDYKPPFYDVVPNDPSFEDMRKVVCVDQQRPNIPNRWFSDPTLTSLAKLMKECWYQNPSARLTALRIKKTLTKIDNSLDKLKTDC

SEQ ID NO: 57856 - protein, 255 aa, Homo sapiens
IPVPRENKATSMKERRASQKLSSKSIMDPNQNVKCKIVVVGDSQCGKTALLHVFAKDCFPENYVPTVFENYTASFEIDTQRIELSLWDTSGSPYYDNVRPLSYPDSDAVLICFDISRPETLDSVLKKWKGEIQEFCPNTKMLLVGCKSDLRTDVSTLVELSNHRQTPVSYDQGANMAKQIGAATYIECSALQSENSVRDIFHVATLACVNKTNKNVKRNKSQRATKRISHMPSRPELSAVATDLRKDKAKSCTVM

SEQ ID NO: 57857 - protein, 83 aa, Homo sapiens
KELNDIRFEFTPGRDTADGVSQELFSAGLVDGHDVVIVAANLQKIVDDPKALKTLTFKLASGCDGSEIPDEVKLIGFAQLSVS

SEQ ID NO: 57858 - protein, 264 aa, Homo sapiens
LPNLQTVTVNSIDSAGIQLHPGENADSPADIRIKEEEPDPEEWQLSGDSTLNTNDLTHLRVQVVDEEGDQQHQEGKRLRRVACTCPNCKEGGGRGTNLGKKKQHICHIPGCGKVYGKTSHLRAHLRWHSGERPFVCNWMYCGKRFTRSDELQRHRRTHTGEKKFVCPECSKRFMRSDHLAKHIKTHQNKKGIHSSSTVLASVEAARDDTLITAGGTTLILANIQQGSVSGIGTVNTSATSNQDILTNTEIPLQLVTVSGNETME

SEQ ID NO: 57859 - protein, 96 aa, Homo sapiens
IESAKIMDPDEQLETLHEALKLLPPAHCETLRYLMAHLKRVTLHEKENLMNAENLGIVFGPTLMRSPELDAMAALNDIRYQRLVVELLIKNEDILF

SEQ ID NO: 57860 - protein, 5 aa, Homo sapiens
MRKRM

SEQ ID NO: 57861 - protein, 265 aa, Homo sapiens
IPVYECERSDVQIHVPTFTFRVTVGDITCTGEGTSKKLAKHRAAEAAINILKANASICFAVPDPLMPDPSKQPKNQLNPIGSLQELAIHHGWRLPEYTLSQEGGPAHKREYTTICRLESFMETGKGASKKQAKRNAAEKFLAKFSNISPENHISLTNVVGHSLGCTWHSLRNSPGEKINLLKRSLLSIPNTDYIQLLSEIAKEQGFNITYLDIDELSANGQYQCLAELSTSPITVCHGSGISCGNAQSDAAHNALQYLKIIAERK

SEQ ID NO: 57862 - protein, 225 aa, Homo sapiens
LEPMPKTMHFLFRFIVFFYLWGLFTAQRQKKEESTEEVKIEVLHRPENCSKTSKKGDLLNAHYDGYLAKDGSKFYCSRTQNEGHPKWFVLGVGQVIKGLDIAMTDMCPGEKRKVVIPPSFAYGKEGYAEGKIPPDATLIFEIELYAVTKGPRSIETFKQIDMDNDRQLSKAEINLYLQREFEKDEKPRDKSYQDAVLEDIFKKNDHDGDGFISPKEYNVYQHDEL

SEQ ID NO: 57863 - protein, 747 aa, Homo sapiens
IITVPVVLLNKGTDDATADSRKTYTLTDYLKNTYRLKLYSLRWISDHEYLYKQENNILVFNAEYGNSSVFLENSTFDEFGHSINDYSISPDGQFILLEYNYVKQWRHSYTASYDIYDLNKRQLITEERIPNNTQWVTWSPVGHKLAYVWNNDIYVKIEPNLPSYRITWTGKEDIIYNGITDWVYEEEVFSAYSALWWSPNGTFLAYAQFNDTEVPLIEYSFYSDESLQYPKTVRVPYPKAGAVNPTVKFFVVNTDSLSSVTNATSIQITAPASMLIGDHYLCDVTWATQERISLQWLRRIQNYSVMDICDYDESSGRWNCLVARQHIEMSTTGWVGRFRPSEPHFTLDGNSFYKIISNEEGYRHICYFQIDKKDCTFITKGTWEVIGIEALTSDYLYYISNEYKGMPGGRNLYKIQLSDYTKVTCLSCELNPERCQYYSVSFSKEAKYYQLRCSGPGLPLYTLHSSVNDKGLRVLEDNSALDKMLQNVQMPSKKLDFIILNETKFWYQMILPPHFDKSKKYPLLLDVYAGPCSQKADTVFRLNWATYLASTENIIVASFDGRGSGYQGDKIMHAINRRLGTFEVEDQIEAARQFSKMGFVDNKRIAIWGWSYGGYVTSMVLGSGSGVFKCGIAVAPVSRWEYYDSVYTERYMGLPTPEDNLDHYRNSTVMSRAENFKQVEYLLIHGTADDNVHFQQSAQISKALVDVGVDFQAMWYTDEDHGIASSTAHQHIYTHMSHFIKQCFSLP

SEQ ID NO: 57864 - protein, 31 aa, Homo sapiens
LEKNVNQSLLELHKLATDKNDPHLCDLRYIT

SEQ ID NO: 57865 - protein, 49 aa, Homo sapiens
IEKASDSEEPEEKQETENEEASVIETNSTVPGADSIPDPELSGESLTAE

SEQ ID NO: 57866 - protein, 39 aa, Homo sapiens
LICLFKFFIETESQLYCPGWKRTSFPPSDNLFQTSQLKN

SEQ ID NO: 57867 - protein, 7 aa, Homo sapiens
RAMGALS

SEQ ID NO: 57868 - protein, 754 aa, Homo sapiens
LRAEMSQWYELQQLDSKFLEQVHQLYDDSFPMEIRQYLAQWLEKQDWEHAANDVSFATIRFHDLLSQLDDQYSRFSLENNFLLQHNIRKSKRNLQDNFQEDPIQMSMIIYSCLKEERKILENAQRFNQAQSGNIQSTVMLDKQKELDSKVRNVKDKVMCIEHEIKSLEDLQDEYDFKCKTLQNREHETNGVAKSDQKQEQLLLKKMYLMLDNKRKEVVHKIIELLNVTELTQNALINDELVEWKRRQQSACIGGPPNACLDQLQNWFTIVAESLQQVRQQLKKLEELEQKYTYEHDPITKNKQVLWDRTFSLFQQLIQSSFVVERQPCMPTHPQRPLVLKTGVQFTVKLRLLVKLQELNYNLKVKVLFDKDVNERNTVKGFRKFNILGTHTKVMNMEESTNGSLAAEFRHLQLKEQKNAGTRTNEGPLIVTEELHSLSFETQLCQPGLVIDLETTSLPVVVISNVSQLPSGWASILWYNMLVAEPRNLSFFLTPPCARWAQLSEVLSWQFSSVTKRGLNVDQLNMLGEKLLGPNASPDGLIPWTRFCKENINDKNFPFWLWIESILELIKKHLLPLWNDGCIMGFISKERERALLKDQQPGTFLLRFSESSREGAITFTWVERSQNGGEPDFHAVEPYTKKELSAVTFPDIIRNYKVMAAENIPENPLKYLYPNIDKDHAFGKYYSRPKEAPEPMELDGPKGTGYIKTELISVSEVHPSRLQTTDNLLPMSPEEFDEVSRIVGSVEFDSMMNTV

SEQ ID NO: 57869 - protein, 40 aa, Homo sapiens
ITSTVLAPNVLCVAAPLVESPGPCWGTRWQDVSVVRTSAA

SEQ ID NO: 57870 - protein, 19 aa, Homo sapiens
ITLREALKHPFFDLLKKSI

SEQ ID NO: 57871 - protein, 588 aa, Homo sapiens
TTCLAERTPCRRPAEMLRLPTVFRQMRPVSRVLAPHLTRAYAKDVKFGADARALMLQGVDLLADAVAVTMGPKGRTVIIEQSWGSPKVTKDGVTVAKSIDLKDKYKNIGAKLVQDVANNTNEEAGDGTTTATVLARSIAKEGFEKISKGANPVEIRRGVMLAVDAVIAELKKQSKPVTTPEEIAQVATISANGDKEIGNIISDAMKKVGRKGVITVKDGKTLNDELEIIEGMKFDRGYISPYFINTSKGQKCEFQDAYVLLSEKKISSIQSIVPALEIANAHRKPLVIIAEDVDGEALSTLVLNRLKVGLQVVAVKAPGFGDNRKNQLKDMAIATGGAVFGEEGLTLNLEDVQPHDLGKVGEVIVTKDDAMLLKGKGDKAQIEKRIQEIIEQLDVTTSEYEKEKLNERLAKLSDGVAVLKVGGTSDVEVNEKKDRVTDALNATRAAVEEGIVLGGGCALLRCIPALDSLTPANEDQKIGIEIIKRTLKIPAMTIAKNAGVEGSLIVEKIMQSSSEVGYDAMAGDFVNMVEKGIIDPTKVVRTALLDAAGVASLLTTAEVVVTEIPKEEKDPGMGAMGGMGGGMGGGMF

SEQ ID NO: 57872 - protein, 305 aa, Homo sapiens
LGIPGNAIVIWFTGFKWKKTVTTLWFLNLAIADFIFLLFLPLYISYVAMNFHWPFGIWLCKANSFTAQLNMFASVFFLTVISLDHYIHLIHPVLSHRHRTLKNSLIVIIFIWLLASLIGGPALYFRDTVEFNNHTLCYNNFQKHDPDLTLIRHHVLTWVKFIIGYLFPLLTMSICYLCLIFKVKKRSILISSRHFWTILVVVVAFVVCWTPYHLFSIWELTIHHNSYSHHVMQAGIPLSTGLAFLNSCLNPILYVLISKKFQARFRSSVAEILKYTLWEVSCSGTVSEQLRNSETKNLCLLETAQ

SEQ ID NO: 57873 - protein, 6 aa, Homo sapiens
MAASCH

SEQ ID NO: 57874 - protein, 11 aa, Homo sapiens
LPPNLKITWSY

SEQ ID NO: 57875 - protein, 12 aa, Homo sapiens
VSETNDTKVLRH

SEQ ID NO: 57876 - protein, 859 aa, Homo sapiens
LRPRLRLQCRAQEPCAAQSSCWRGIEARLRGFGSGRWLCSAGRERARPRGPSPPDPPPPRSRPLGDSSGCSGGSPGPGTRGPGAMRASLLLSVLRPAGPVAVGISLGFTLSLLSVTWVEEPCGPGPPQPGDSELPPRGNTNAARRPNSVQPGAEREKPGAGEGAGENWEPRVLPYHPAQPGQAAKKAVRTRYISTELGIRQRLLVAVLTSQTTLPTLGVAVNRTLGHRLERVVFLTGARGRRAPPGMAVVTLGEERPIGHLHLALRHLLEQHGDDFDWFFLVPDTTYTEAHGLARLTGHLSLASAAHLYLGRPQDFIGGEPTPGRYCHGGFGVLLSRMLLQQLRPHLEGCRNDIVSARPDEWLGRCILDATGVGCTGDHEGVHYSHLELSPGEPVQEGDPHFRSALTAHPVRDPVHMYQLHKAFARAELERTYQEIQELQWEIQNTSHLAVDGDQAAAWPVGIPAPSRPASRFEVLRWDYFTEQHAFSCADGSPRCPLRGADRADVADVLGTALEELNRRYHPALRLQKQQLVNGYRRFDPARGMEYTLDLQLEALTPQGGRRPLTRRVQLLRPLSRVEILPVPYVTEASRLTVLLPLAAAERDLAPGFLEAFATAALEPGDAAAALTLLLLYEPRQAQRVAHADVFAPVKAHVAELERRFPGARVPWLSVQTAAPSPLRLMDLLSKKHPLDTLFLLAGPDTVLTPDFLNRCRMHAISGWQAFFPMHFQAFHPAVAPPQGPGPPELGRDTGRFDRQAASEACFYNSDYVAARGRLAAASEQEEELLESLDVYELFLHFSSLHVLRAVEPALLQRYRAQTCSARLSEDLYHRCLQSVLEGLGSRTQLAMLLFEQEQGNST

SEQ ID NO: 57877 - protein, 25 aa, Homo sapiens
KEKQNNLNSVLKKTFQELSSEILLR

SEQ ID NO: 57878 - protein, 193 aa, Homo sapiens
IIKTTLQQEKPDFCFLEEDPGICRGYITRYFYNNQTKQCERFKYGGCLGNMNNFETLEECKNICEDGPNGFQVDNYGTQLNAVNNSLTPQSTKVPSLFEFHGPSWCLTPADRGLCRANENRFYYNSVIGKCRPFKYSGCGGNENNFTSKQECLRACKKGFIQRISKGGLIKTKRKRKKQRVKIAYEEIFVKNM

SEQ ID NO: 57879 - protein, 23 aa, Homo sapiens
LPPAFLHPTMSWCPSPLRMHQRM

SEQ ID NO: 57880 - protein, 141 aa, Homo sapiens
VVGVFRPETVASQPSLGEGEESESNSVESLGFCSVMPLAAVGYLDGTLAIYDLATQTLRHQCQHQSGIVQLLWEAGTAVVYTCSLDGIVRLWDARTGRLLTDYRGHTAEILDFALSKDASLVVTTSGDHKAKVFCVQRPDR

SEQ ID NO: 57881 - protein, 711 aa, Homo sapiens
IMVKLAKAGKNQGDPKKMAPPPKEVEEDSEDEEMSEDEEDDSSGEEVVIPQKKGKKAAATSAKKVVVSPTKKVAVATPAKKAAVTPGKKAAATPAKKTVTPAKAVTTPGKKGATPGKALVATPGKKGAAIPAKGAKNGKNAKKEDSDEEEDDDSEEDEEDDEDEDEDEDEIEPAAMKAAAAAPASEDEDDEDDEDDEDDDDDEEDDSEEEAMETTPAKGKKAAKVVPVKAKNVAEDEDEEEDDEDEDDDDDEDDEDDDDEDDEEEEEEEEEEPVKEAPGKRKKEMAKQKAAPEAKKQKVEGTEPTTAFNLFVGNLNFNKSAPELKTGISDVFAKNDLAVVDVRIGMTRKFGYVDFESAEDLEKALELTGLKVFGNEIKLEKPKGKDSKKERDARTLLAKNLPYKVTQDELKEVFEDAAEIRLVSKDGKSKGIAYIEFKTEADAEKTFEEKQGTEIDGRSISLYYTGEKGQNQDYRGGKNSTWSGESKTLVLSNLSYSATEETLQEVFEKATFIKVPQNQNGKSKGYAFIEFASFEDAKEALNSCNKREIEGRAIRLELQGPRGSPNARSQPSKTLFVKGLSEDTTEETLKESFDGSVRARIVTDRETGSSKGFGFVDFNSEEDAKAAKEAMEDGEIDGNKVTLDWAKPKGEGGFGGRGGGRGGFGGRGGGRGGRGGFGGRGRGGFGGRGGFRGGRGGGGDHKPQGKKTKFE

SEQ ID NO: 57882 - protein, 7 aa, Homo sapiens
LWMSELV

SEQ ID NO: 57883 - protein, 98 aa, Homo sapiens
ILKCKAVSRELNFSSTEQMEKFRLEQKVYFKGQCLEEWFFEFGFVIPNSTNTWQSLIEAAPESQMMPASVLTGNVIIETKFFDDDLLVSTSRVRLFYV

SEQ ID NO: 57884 - protein, 113 aa, Homo sapiens
IKQMWDTKTLGLRQHHCRKCGQAVCGKCSSKRSSYPVMGFEFQVRVCDSCYDSIKDEDRTSLATFHEGKHNISHMSMDIARGLMVTCGTDRIVKIWDMTPVVGCSLATGFSPH

SEQ ID NO: 57885 - protein, 388 aa, Homo sapiens
LASVTLPSICSHFNPLSLEELGSNTGIQVFNQIVKSRPHDNIVISPHGIASVLGMLQLGADGRTKKQLAMVMRYGVNGVGKILKKINKAIVSKKNKDIVTVANAVFVKNASEIEVPFVTRNKDVFQCEVRNVNFEDPASACDSINAWVKNETRDMIDNLLSPDLIDGVLTRLVLVNAVYFKGLWKSRFQPENTKKRTFVAADGKSYQVPMLAQLSVFRCGSTSAPNDLWYNFIELPYHGESISMLIALPTESSTPLSAIIPHISTKTIDSWMSIMVPKRVQVILPKFTAVAQTDLKEPLKVLGITDMFDSSKANFAKITRSENLHVSHILQKAKIEVSEDGTKASAATTAILIARSSPPWFIVDRPFLFFIRHNPTGAVLFMGQINKP

SEQ ID NO: 57886 - protein, 5 aa, Homo sapiens
IFSHK

SEQ ID NO: 57887 - protein, 338 aa, Homo sapiens
VAAGAQRVRGIHSSVQCKLRYGMWHFLLGDKASKRLTERSRVITVDGNICTGKGKLAKEIAEKLGFKHFPEAGIHYPDSTTGDGKPLATDYNGNCSLEKFYDDPRSNDGNSYRLQSWLYSSRLLQYSDALEHLLTTGQGVVLERSIFSDFVFLEAMYNQGFIRKQCVDHYNEVKSVTICDYLPPHLVIYIDVPVPEVQRRIQKKGDPHEMKITSAYLQDIENAYKKTFLPEMSEKCEVLQYSAREAQDSKKVVEDIEYLKFDKGPWLKQDNRTLYHLRLLVQDKFEVLNYTSIPIFLPEVTIGAHQTDRVLHQFRELPGRKYSPGYNTEVGDKWIWLK

SEQ ID NO: 57888 - protein, 256 aa, Homo sapiens
RTHIPRTPTPDVKRDPSPSPPGAIDSLASVSSAKTQGWKMWQPATERLQHFQTMLKSKLNVLTLKKEPLPAVIFHEPEAIELCTTTPLMKTRTHSGCKVTYLGKVSTTGMQFLSGCTEKPVIELWKKHTLAREDVFPANALLEIRPFQVWLHHLDHKGEATVHMDTFQVARIAYCTADHNVSPNIFAWVYREINDDLSYQMDCHAVECESKLEAKKLAHAMMEAFRKTFHSMKSDGRIHSNSSSEEVSQELESDDG

SEQ ID NO: 57889 - protein, 1821 aa, Homo sapiens
LASKSATSAKAGCSTITDSSSAASTSSSSSAVASASSTVPPGARVKQGKDQNKARRSRSASSPSPRRSSREKEQSKTGGSSKFDWAARFSPKVSLPKTKLSLPGSSKSETSKPGPSGLQAKLASLRKSTKKRSESPPAELPSLRRSTRQKTTGSCASTSRRGSGLGKRGAAEARRQEKMADPESNQEAVNSSAARTDEAPQGAAASSSVAGAVGMTTSGESESDDSEMGRLQALLEARGLPPHLFGPLGPRMSQLFHRTIGSGASSKAQQLLQGLQASDESQQLQAVIEMCQLLVMGNEETLGGFPVKSVVPALITLLQMEHNFDIMNHACRALTYMMEALPRSSAVVVDAIPVFLEKLQVIQCIDVAEQALTALEMLSRRHSKAILQAGGLADCLLYLEFFSINAQRNALAIAANCCQSITPDEFHFVADSLPLLTQRLTHQDKKSVESTCLCFARLVDNFQHEENLLQQVASKDLLTNVQQLLVVTPPILSSGMFIMVVRMFSLMCSNCPTLAVQLMKQNIAETLHFLLCGASNGSCQEQIDLVPRSPQELYELTSLICELMPCLPKEGIFAVDTMLKKGNAQNTDGAIWQWRDDRGLWHPYNRIDSRIIEQINEDTGTARAIQRKPNPLANSNTSGYSESKKDDARAQLMKEDPELAKSFIKTLFGVLYEVYSSSAGPAVRHKCLRAILRIIYFADAELLKDVLKNHAVSSHIASMLSSQDLKIVVGALQMAEILMQKLPDIFSVYFRREGVMHQVKHLAESESLLTSPPKACTNGSGSMGSTTSVSSGTATAATHAAADLGSPSLQHSRDDSLDLSPQGRLSDVLKRKRLPKRGPRRPKYSPPRDDDKVDNQAKSPTTTQSPKSSFLASLNPKTWGRLSTQSNSNNIEPARTAGGSGLARAASKDTISNNREKIKGWIKEQAHKFVERYFSSENMDGSNPALNVLQRLCAATEQLNLQVDGGAECLVEIRSIVSESDVSSFEIQHSGFVKQLLLYLTSKSEKDAVSREIRLKRFLHVFFSSPLPGEEPIGRVEPVGNAPLLALVHKMNNCLSQMEQFPVKVHDFPSGNGTGGSFSLNRGSQALKFFNTHQLKCQLQRHPDCANVKQWKGGPVKIDPLALVQAIERYLVVRGYGRVREDDEDSDDDGSDEEIDESLAAQFLNSGNVRHRLQFYIGEHLLPYNMTVYQAVRQFSIQAEDERESTDDESNPLGRAGIWTKTHTIWYKPVREDEESNKDCVGGKRGRAQTAPTKTSPRNAKKHDELWHDGVCPSVSNPLEVYLIPTPPENITFEDPSLDVILLLRVLHAISRYWYYLYDNAMCKEIIPTSEFINSKLTAKANRQLQDPLVIMTGNIPTWLTELGKTCPFFFPFDTRQMLFYVTAFDRDRAMQRLLDTNPEINQSDSQDSRVAPRLDRKKRTVNREELLKQAESVMQDLGSSRAMLEIQYENEVGTGLGPTLEFYALVSQELQRADLGLWRGEEVTLSNPKGSQEGTKYIQNLQGLFALPFGRTAKPAHIAKVKMKFRFLGKLMAKAIMDFRLVDLPLGLPFYKWMLRQETSLTSHDLFDIDPVVARSVYHLEDIVRQKKRLEQDKSQTKESLQYALETLTMNGCSVEDLGLDFTLPGFPNIELKKGGKDIPVTIHNLEEYLRLVIFWALNEGVSRQFDSFRDGFESVFPLSHLQYFYPEELDQLLCGSKADTWDAKTLMECCRPDHGYTHDSRAVKFLFEILSSFDNEQQRLFLQFVTGSPRLPVGGFRSLNPPLTIVRKTFESTENPDDFLPSVMTCVNYLKLPDYSSIEIMREKLLIAAREGQQSFHLS

SEQ ID NO: 57890 - protein, 6 aa, Homo sapiens
MHPIQT

SEQ ID NO: 57891 - protein, 2508 aa, Homo sapiens
IRRDFSRRLRREANLVATCLPVRASLPHRLNMLRGPGPGLLLLAVQCLGTAVPSTGASKSKRQAQQMVQPQSPVAVSQSKPGCYDNGKHYQINQQWERTYLGNALVCTCYGGSRGFNCESKPEAEETCFDKYTGNTYRVGDTYERPKDSMIWDCTCIGAGRGRISCTIANRCHEGGQSYKIGDTWRRPHETGGYMLECVCLGNGKGEWTCKPIAEKCFDHAAGTSYVVGETWEKPYQGWMMVDCTCLGEGSGRITCTSRNRCNDQDTRTSYRIGDTWSKKDNRGNLLQCICTGNGRGEWKCERHTSVQTTSSGSGPFTDVRAAVYQPQPHPQPPPYGHCVTDSGVVYSVGMQWLKTQGNKQMLCTCLGNGVSCQETAVTQTYGGNSNGEPCVLPFTYNGRTFYSCTTEGRQDGHLWCSTTSNYEQDQKYSFCTDHTVLVQTRGGNSNGALCHFPFLYNNHNYTDCTSEGRRDNMKWCGTTQNYDADQKFGFCPMAAHEEICTTNEGVMYRIGDQWDKQHDMGHMMRCTCVGNGRGEWTCIAYSQLRDQCIVDDITYNVNDTFHKRHEEGHMLNCTCFGQGRGRWKCDPVDQCQDSETGTFYQIGDSWEKYVHGVRYQCYCYGRGIGEWHCQPLQTYPSSSGPVEVFITETPSQPNSHPIQWNAPQPSHISKYILRWRPKNSVGRWKEATIPGHLNSYTIKGLKPGVVYEGQLISIQQYGHQEVTRFDFTTTSTSTPVTSNTVTGETTPFSPLVATSESVTEITASSFVVSWVSASDTVSGFRVEYELSEEGDEPQYLDLPSTATSVNIPDLLPGRKYIVNVYQISEDGEQSLILSTSQTTAPDAPPDTTVDQVDDTSIVVRWSRPQAPITGYRIVYSPSVEGSSTELNLPETANSVTLSDLQPGVQYNITIYAVEENQESTPVVIQQETTGTPRSDTVPSPRDLQFVEVTDVKVTIMWTPPESAVTGYRVDVIPVNLPGEHGQRLPISRNTFAEVTGLSPGVTYYFKVFAVSHGRESKPLTAQQTTKLDAPTNLQFVNETDSTVLVRWTPPRAQITGYRLTVGLTRRGQPRQYNVGPSVSKYPLRNLQPASEYTVSLVAIKGNQESPKATGVFTTLQPGSSIPPYNTEVTETTIVITWTPAPRIGFKLGVRPSQGGEAPREVTSDSGSIVVSGLTPGVEYVYTIQVLRDGQERDAPIVNKVVTPLSPPTNLHLEANPDTGVLTVSWERSTTPDITGYRITTTPTNGQQGNSLEEVVHADQSSCTFDNLSPGLEYNVSVYTVKDDKESVPISDTIIPEVPQLTDLSFVDITDSSIGLRWTPLNSSTIIGYRITVVAAGEGIPIFEDFVDSSVGYYTVTGLEPGIDYDISVITLINGGESAPTTLTQQTAVPPPTDLRFTNIGPDTMRVTWAPPPSIDLTNFLVRYSPVKNEEDVAELSISPSDNAVVLTNLLPGTEYVVSVSSVYEQHESTPLRGRQKTGLDSPTGIDFSDITANSFTVHWIAPRATITGYRIRHHPEHFSGRPREDRVPHSRNSITLTNLTPGTEYVVSIVALNGREESPLLIGQQSTVSDVPRDLEVVAATPTSLLISWDAPAVTVRYYRITYGETGGNSPVQEFTVPGSKSTATISGLKPGVDYTITVYAVTGRGDSPASSKPISINYRTEIDKPSQMQVTDVQDNSISVKWLPSSSPVTGYRVTTTPKNGPGPTKTKTAGPDQTEMTIEGLQPTVEYVVSVYAQNPSGESQPLVQTAVTNIDRPKGLAFTDVDVDSIKIAWESPQGQVSRYRVTYSSPEDGIHELFPAPDGEEDTAELQGLRPGSEYTVSVVALHDDMESQPLIGTQSTAIPAPTDLKFTQVTPTSLSAQWTPPNVQLTGYRVRVTPKEKTGPMKEINLAPDSSSVVVSGLMVATKYEVSVYALKDTLTSRPAQGVVTTLENVSPPRRARVTDATETTITISWRTKTETITGFQVDAVPANGQTPIQRTIKPDVRSYTITGLQPGTDYKIYLYTLNDNARSSPVVIDASTAIDAPSNLRFLATTPNSLLVSWQPPRARITGYIIKYEKPGSPPREVVPRPRPGVTEATITGLEPGTEYTIYVIALKNNQKSEPLIGRKKTDELPQLVTLPHPNLHGPEILDVPSTVQKTPFVTHPGYDTGNGIQLPGTSGQQPSVGQQMIFEEHGFRRTTPPTTATPIRHRPRPYPPNVGEEIQIGHIPREDVDYHLYPHGPGLNPNASTGQEALSQTTISWAPFQDTSEYIISCHPVGTDEEPLQFRVPGTSTSATLTGLTRGATYNVIVEALKDQQRHKVREEVVTVGNSVNEGLNQPTDDSCFDPYTVSHYAVGDEWERMSESGFKLLCQCLGFGSGHFRCDSSRWCHDNGVNYKIGEKWDRQGENGQMMSCTCLGNGKGEFKCDPHEATCYDDGKTYHVGEQWQKEYLGAICSCTCFGGQRGWRCDNCRRPGGEPSPEGTTGQSYNQYSQRYHQRTNTNVNCPIECFMPLDVQADREDSRE

SEQ ID NO: 57892 - protein, 5 aa, Homo sapiens
IQTLR

SEQ ID NO: 57893 - protein, 394 aa, Homo sapiens
LAIQPPLSPLRALAPLPEKPGAVPPPQKRMAKVAKDLNPGVKKMSLGQLQSARGVACLGCKGTCSGFEPHSWRKICKSCKCSQEDHCLTSDLEDDRKIGRLLMDSKYSTLTARVKGGDGIRIYKRNRMIMTNPIATGKDPTFDTITYEWAPPGVTQKLGLQYMELIPKEKQPVTGTEGAFYRRRQLMHQLPIYDQDPSRCRGLLENELKLMEEFVKQYKSEALGVGEVALPGQGGLPKEEGKQQEKPEGAETTAATTNGSLSDPSKEVEYVCELCKGAAPPDSPVVYSDRAGYNKQWHPTCFVCAKCSEPLVDLIYFWKDGAPWCGRHYCESLRPRCSGCDEIIFAEDYQRVEDLAWHRKHFVCEGCEQLLSGRAYIVTKGQLLCPTCSKSKRS

SEQ ID NO: 57894 - protein, 155 aa, Homo sapiens [sequence omitted]

SEQ ID NO: 57895 - protein, 18 aa, Homo sapiens
ILKMETAEYNGQITGASL

SEQ ID NO: 57896 - protein, 16 aa, Homo sapiens
ISQHQEHFIQMLNETV

SEQ ID NO: 57897 - protein, 4 aa, Homo sapiens
LEVH

SEQ ID NO: 57898 - protein, 149 aa, Homo sapiens
LSTSAKRIQKELAEITLDPPPNCSAGPKGDNIYEWRSTILGPPGSVYEGGVFFLDITFSPDYPFKPPKVTFRTRIYHCNINSQGVICLDILKDNWSPALTISKVLLSICSLLTDCNPADPLVGSIATQYMTNRAEHDRMARQWTKRYAT

SEQ ID NO: 57899 - protein, 21 aa, Homo sapiens
MASIWLSYKISCVTQSTDAAV

SEQ ID NO: 57900 - protein, 36 aa, Homo sapiens
LEKTIDDLEEKLAQAKEENVGLHQTLDQTLNELNCI

SEQ ID NO: 57901 - protein, 64 aa, Homo sapiens
KNSGVLMVVKCRKENSALKECLTAYYNDPAFYEECKMEYLKEREEFRKTGIPTKKRLQKLPTSM

SEQ ID NO: 57902 - protein, 38 aa, Homo sapiens
IVYKALRSHILPPKHFTEDGNILQLANLPDLYKVFERC

SEQ ID NO: 57903 - protein, 427 aa, Homo sapiens
LDIIKHIVAKGEHKSGVLDESTIATILREVLEGLEYLHKNGQIHRDVKAGNILLGEDGSVQIADFGVSAFLATGGDITRNKVRKTFVGTPCWMAPEVMEQVRGYDFKADIWSFGITAIELATGAAPYHKYPPMKVLMLTLQNDPPSLETGVQDKEMLKKYGKSFRKMISLCLQKDPEKRPTAAELLRHKFFQKAKNKEFLQEKTLQRAPTISERAKKVRRVPGSSGRLHKTEDGGWEWSDDEFDEESEEGKAAISQLRSPRVKESISNSELFPTTDPVGTLLQVPEQISAHLPQPAGQIATQPTQVSLPPTAEPAKTAQALSSGSGSQETKIPISLVLRLRNSKKELNDIRFEFTPGRDTAEGVSQELISAGLVDGRDLVIVAANLQKIVEEPQSNRSVTFKLASGVEGSDIPDDGKLIGFAQLSIS

SEQ ID NO: 57904 - protein, 14 aa, Homo sapiens
IFRNRQCWEDRRKA

SEQ ID NO: 57905 - protein, 728 aa, Homo sapiens
IHEFDPWFNYRSTHHLASHGFYEFLNWFDERAWYPLGRIVGGTVYPGLMITAGLIHWILNTLNITVHIRDVCVFLAPTFSGLTSISTFLLTRELWNQGAGLLAACFIAIVPGYISRSVAGSFDNEGIAIFALQFTYYLWVKSVKTGSVFWTMCCCLSYFYMVSAWGGYVFIINLIPLHVFVLLLMQRYSKRVYIAYSTFYIVGLILSMQIPFVGFQPIRTSEHMAAAGVFALLQAYAFLQYLRDRLTKQEFQTLFFLGVSLAAGAVFLSVIYLTYTGYIAPWSGRFYSLWDTGYAKIHIPIIASVSEHQPTTWVSFFFDLHILVCTFPAGLWFCIKNINDERVFVALYAISAVYFAGVMVRLMLTLTPVVCMLSAIAFSNVFEHYLGDDMKRENPPVEDSSDEDDKRNQGNLYDKAGKVRKHATEQEKTEEGLGPNIKSIVTMLMLMLLMMFAVHCTWVTSNAYSSPSVVLASYNHDGTRNILDDFREAYFWLRQNTDEHARVMSWWDYGYQIAGMANRTTLVDNNTWNNSHIALVGKAMSSNETAAYKIMRTLDVDYVLVIFGGVIGYSGDDINKFLWMVRIAEGEHPKDIRESDYFTPQGEFRVDKAGSPTLLNCLMYKMSYYRFGEMQLDFRTPPGFDRTRNAEIGNKDIKFKHLEEAFTSEHWLVRIYKVKAPDNRETLDHKPRVTNIFPKQKYLSKKTTKRKRGYIKNKLVFKKGKKISKKTV

SEQ ID NO: 57906 - protein, 883 aa, Homo sapiens
LARTAAEALIMATFISVQLKKTSEVDLAKPLVKFIQQTYPSGGEEQAQYCRAAEELSKLRRAAVGRPLDKHEGALETLLRYYDQICSIEPKFPFSENQICLTFTWKDAFDKGSLFGGSVKLALASLGYEKSCVLFNCAALASQIAAEQNLDNDEGLKIAAKHYQFASGAFLHIKETVLSALSREPTVDISPDTVGTLSLIMLAQAQEVFFLKATRDKMKDAIIAKLANQAADYFGDAFKQCQYKDTLPKYFYFQEVFPVLAAKHCIMQANAEYHQSILAKQQKKFGEEIARLQHAAELIKTVASRYDEYVNVKDFSDKINRALAAAKKDNDFIYHDRVPDLKDLDPIGKATLVKSTPVNVPISQKFTDLFEKMVPVSVQQSLAAYNQRKADLVNRSIAQMREATTLANGVLASLNLPAAIEDVSGDTVPQSILTKSRSVIEQGGIQTVDQLIKELPELLQRNREILDESLRLLDEEEATDNDLRAKFKERWQRTPSNELYKPLRAEGTNFRTVLDKAVQADGQVKECYQSHRDTIVLLCKPEPELNAAIPSANPAKTMQGSEVVNVLKSLLSNLDEVKKEREGLENDLKSVNFDMTSKFLTALAQDGVINEEALSVTELDRVYGGLTTKVQESLKKQEGLLKNIQVSHQEFSKMKQSNNEANLREEVLKNLATAYDNFVELVANLKEGTKFYNELTEILVRFQNKCSDIVFARKTERDELLKDLQQSIAREPSAPSIPTPAYQSSPAGGHAPTPPTPAPRTMPPTKPQPPARPPPPVLPANRAPSATAPSPVGAGTAAPAPSQTPGSAPPPQAQGPPYPTYPGYPGYCQMPMPMGYNPYAYGQYNMPYPPVYHQSPGQAPYPGPQQPSYPFPQPPQQSYYPQQ

SEQ ID NO: 57907 - protein, 10 aa, Homo sapiens
TTLLEEAARA

SEQ ID NO: 57908 - protein, 43 aa, Homo sapiens
RTLIMKNHPNEASIFTKLLLKLPDLRSLNNMHSEELLAFKVHP

SEQ ID NO: 57909 - protein, 26 aa, Homo sapiens
MAALRPLVKPKIIKKRTKKFIRHQSD

SEQ ID NO: 57910 - protein, 26 aa, Homo sapiens
LGRRTATAASVSPWEKIKFEPFGAVC

SEQ ID NO: 57911 - protein, 319 aa, Homo sapiens
LLLGAGESGKSTIVKQMKIIHEDGYSEEECRQYRAVVYSNTIQSIMAIVKAMGNLQIDFADPSRADDARQLFALSCTAEEQGVLPDDLSGVIRRLWADHGVQACFGRSREYQLNDSAAYYLNDLERIAQSDYIPTQQDVLRTRVKTTGIVETHFTFKDLHFKMFDVGGQRSERKKWIHCFEGVTAIIFCVALSAYDLVLAEDEEMNRMHESMKLFDSICNNKWFTDTSIILFLNKKDLFEEKITHSPLTICFPEYTGANKYDEAASYIQSKFEDLNKRKDTKEIYTHFTCATDTKNVQFVFDAVTDVIIKNNLKDCGLF

SEQ ID NO: 57912 - protein, 793 aa, Homo sapiens
IPYNCFENPAWTMATQADLMELDMAMEPDRKAAVSHWQQQSYLDSGIHSGATTTAPSLSGKGNPEEEDVDTSQVLYEWEQGFSQSFTQEQVADIDGQYAMTRAQRVRAAMFPETLDEGMQIPSTQFDAAHPTNVQRLAEPSQMLKHAVVNLINYQDDAELATRAIPELTKLLNDEDQVVVNKAAVMVHQLSKKEASRHAIMRSPQMVSAIVRTMQNTNDVETARCTAGTLHNLSHHREGLLAIFKSGGIPALVKMLGSPVDSVLFYAITTLHNLLLHQEGAKMAVRLAGGLQKMVALLNKTNVKFLAITTDCLQILAYGNQESKLIILASGGPQALVNIMRTYTYEKLLWTTSRVLKVLSVCSSNKPAIVEAGGMQALGLHLTDPSQRLVQNCLWTLRNLSDAATKQEGMEGLLGTLVQLLGSDDINVVTCAAGILSNLTCNNYKNKMMVCQVGGIEALVRTVLRAGDREDITEPAICALRHLTSRHQEAEMAQNAVRLHYGLPVVVKLLHPPSHWPLIKATVGLIRNLALCPANHAPLREQGAIPRLVQLLVRAHQDTQRRTSMGGTQQQFVEGVRMEEIVEGCTGALHILARDVHNRIVIRGLNTIPLFVQLLYSPIENIQRVAAGVLCELAQDKEAAEAIEAEGATAPLTELLHSRNEGVATYAAAVLFRMSEDKPQDYKKRLSVELTSSLFRTEPMAWNETADLGLDIGAQGEPLGYRQDDPSYRSFHSGGYGQDALGMDPMMEHEMGGHHPGADYPVDGLPDLGHAQDLMDGLPPGDSNQLAWFDTDL

SEQ ID NO: 57913 - protein, 47 aa, Homo sapiens [sequence omitted]

SEQ ID NO: 57914 - protein, 258 aa, Homo sapiens
KKKTKGPDAASKLPLVTPHTQCRLKLLKLERIKDYLLMEEEFIRNQEQMKPLEEKQEEERSKVDDLRGTPMSVGTLEEIIDDNHAIVSTSVGSEHYVSILSFVDKDLLEPGCSVLLNHKVHAVIGVLMDDTDPLVTVMKVEKAPQETYADIGGLDNQIQEIKESVELPLTHPEYYEEMGIKPPKGVILYGPPGTGKTLLAKAVANQTSATFLRVVGSELIQKYLGDGPKLVRELFRVAEEHAPSIVFIDEIDAIGTKR

SEQ ID NO: 57915 - protein, 35 aa, Homo sapiens
MEWIMIKVRVGQETFYDVYRRKASERQYQRRLEDE

SEQ ID NO: 57916 - protein, 131 aa, Homo sapiens
LKDFEKRGKKEVCPVLDQFLCHVAKTGETMIQWSQFKGYFIFKLEKVMDDFRTSAPEPRGPPNPNVEYIPFDEMKERILKIVTGFNGIPFTIQRLCELLTDPRRNYTGTDKFLRGVEKNVMVVSCVYPSSE

SEQ ID NO: 57917 - protein, 24 aa, Homo sapiens
MERFGSRNGKTSKKITIANCGQLY

SEQ ID NO: 57918 - protein, 20 aa, Homo sapiens
RQKMCFPGDSGFSISSCIIW

SEQ ID NO: 57919 - protein, 11 aa, Homo sapiens
KLVTTVTEIAG

SEQ ID NO: 57920 - protein, 745 aa, Homo sapiens
VMAVLPGPLQLLGVLLTISLSSIRLIQAGAYYGIKPLPPQIPPQMPPQIPQYQPLGQQVPHMPLAKDGLAMGKEMPHLQYGKEYPHLPQYMKEIQPAPRMGKEAVPKKGKEIPLASLRGEQGPRGEPGPRGPPGPPGLPGHGIPGIKGKPGPQGYPGVGKPGMPGMPGKPGAMGMPGAKGEIGQKGEIGPMGIPGPQGPPGPHGLPGIGKPGGPGLPGQPGPKGDRGPKGLPGPQGLRGPKGDKGFGMPGAPGVKGPPGMHGPPGPVGLPGVGKPGVTGFPGPQGPLGKPGAPGEPGPQGPIGVPGVQGPPGIPGIGKPGQDGIPGQPGFPGGKGEQGLPGLPGPPGLPGIGKPGFPGPKGDRGMGGVPGALGPRGEKGPIGAPGIGGPPGEPGLPGIPGPMGPPGAIGFPGPKGEGGIVGPQGPPGPKGEPGLQGFPGKPGFLGEVGPPGMRGLPGPIGPKGEAGQKGVPGLPGVPGLLGPKGEPGIPGDQGLQGPPGIPGIGGPSGPIGPPGIPGPKGEPGLPGPPGFPGIGKPGVAGLHGPPGKPGALGPQGQPGLPGPPGPPGPPGPPAVMPPTPPPQGEYLPDMGLGIDGVKPPHAYGAKKGKNGGPAYEMPAFTAELTAPFPPVGAPVKFNKLLYNGRQNYNPQTGIFTCEVPGVYYFAYHVHCKGGNVWVALFKNNEPVMYTYDEYKKGFLDQASGSAVLLLRPGDRVFLQMPSEQAAGLYAGQYVHSSFSGYLLYPM

SEQ ID NO: 57921 - protein, 17 aa, Homo sapiens
LGLCNRYMEPIRMADGL

SEQ ID NO: 57922 - protein, 299 aa, Homo sapiens
VPDLLRPRMTNDSEGKMGFKHPKIMGNFRGHALPGTFFFIIGLWWCTKSILKYICKKQKRTCYLGSKTLFYRLEILEGITIVGMALTGMAGEQFIPGGPHLMLYDYKQGHWNQLLGWHHFTMYFFFGLLGVADILCFTISSLPVSLTKLMLSNALFVEAFIFYNHTHGREMLDIFVHQLLVLVVFLTGLVAFLEFLVRNNVLLELLRSSLILLQGSWFFQIGFVLYPPSGGPAWDLMDHENILFLTICFCWHYAVTIVIVGMNYAFITWLVKSRLKRLCSSEVGLLKNAEREQESEEEM

SEQ ID NO: 57923 - protein, 169 aa, Homo sapiens
KPEKSQRAGAAGGPEEEAEKPVKTKTVSSSNGGESSSRSAEKRSAEEEAADLPTKPTKISKFGFAIGSQTTKKASAISIKLGSSKPKETVPTLAPKTLSVAAAFNEDEDSEPEEMPPEAKMRMKNIGRDTPTSAGPNSFNKGKHGFSDNQKLWERNIKSHLGNVHDQDN

SEQ ID NO: 57924 - protein, 4 aa, Homo sapiens
LDLP

SEQ ID NO: 57925 - protein, 43 aa, Homo sapiens
IQGGQFLPSALLPLDLRHRLQARPWMVYCKFSIWRYHYHTLPT

SEQ ID NO: 57926 - protein, 97 aa, Homo sapiens
IKTWKKRWFVFDRNKRTFSYYADKHETKLKGVIYFQAIEEVYYDHLKNANKSPNPLLTFSVKTHDRIYYMVAPSPEAMRIWMDVIVTGAEGYTHFLL

SEQ ID NO: 57927 - protein, 56 aa, Homo sapiens
IVPWHTSMQVADRVLSTDVDVILRKHSDHRMREKADIQLLVYTIDDLIDKLSTIVN

SEQ ID NO: 57928 - protein, 34 aa, Homo sapiens
MKFKDPLKDGEAKIKSDYAQLLEDMQNAFRSLED

SEQ ID NO: 57929 - protein, 181 aa, Homo sapiens
IEQSQAEIYHNRFDAVQSAHRAATRGFIRYGWRWGWRTAVFVTIFNTVNTSLNVYRNKDALSHFVIAGAVTGSLFRINVGLRGLVAGGIIGALLGTPVGGLLMAFQKYSGETVQERKQKDRKALHELKLEEWKGRLQVTEHLPEKIESSLQEDEPENDAKKIEALLNLPRNPSVIDKQDKD

SEQ ID NO: 57930 - protein, 57 aa, Homo sapiens
LCRKMGVPYCITKGKARLGRLVHRKTCTTVAFTQVNSEDKGTLAKLVEVIRTNYNDR

SEQ ID NO: 57931 - protein, 25 aa, Homo sapiens
LLSLLLILCFRESYDRLYLDVVVSV

SEQ ID NO: 57932 - protein, 71 aa, Homo sapiens
IIHEDNEWGIELVSEVSEEELKNFSGPVPDLPEGITVAYTIPKKQEDSVTELTVEDSGESLEDLMAKMKNM

SEQ ID NO: 57933 - protein, 14 aa, Homo sapiens
KVQRPWRKHANIPL

SEQ ID NO: 57934 - protein, 51 aa, Homo sapiens
IFFDEIDAIGGAWFDDGARGDNEVQRTMLELINQLDGFDPRGNIKVLMATN

SEQ ID NO: 57935 - protein, 67 aa, Homo sapiens
LDIKKNERLWLLDDSKSWWRVRNSMNKTGFVPSNYVERKNSARKASIVKNLKDTLGKIFFKRKATLF

SEQ ID NO: 57936 - protein, 106 aa, Homo sapiens
VDRFHQLILRVKDRESFPMILVANKVDLMHLRKITREQGKEMATKHNIPYIETSAKDPPLNVDKAFHDLVRVIRQQIPEKSQKKKKKTKWRGDRATGTHKLQCVIL

SEQ ID NO: 57937 - protein, 12 aa, Homo sapiens
IVDNREIPEIAS

SEQ ID NO: 57938 - protein, 5 aa, Homo sapiens
IRTAF

SEQ ID NO: 57939 - protein, 362 aa, Homo sapiens
IIMAPLGTTVLLWSLLRSSPGVERVCFRARIQPWHGGLLQPLPCSFEMGLPRRRFSSEAAESGSPETKKPTFMDEEVQSILTKMTGLNLQKTFKPAIQELKPPTYKLMTQAQLEEATRQAVEAAKVRLKMPPVLEERVPINDVLAEDKILEGTETTKYVFTDISYSIPHRERFIVVREPSGTLRKASWEERDRMIQVYFPKEGRKILTPIIFKEENLRTMYSQDRHVDVLNLCFAQFEPDSTEYIKVHHKTYEDIDKRGKYDLLRSTRYFGGMVWYFVNNKKIDGLLIDQIQRDLIDDATNLVQLYHVLHPDGQSAQGAKDQAAEGINLIKVFAKTEAQKGAYIELTLQTYQEALSRHSAAS

SEQ ID NO: 57940 - protein, 180 aa, Homo sapiens
RSELIAKIPNFWVTTFVSHPQVSALLGEEDEEALHYLTRVEVTEFEDIKSGYRIDFYFDENPYFENKVLSKEFLLNESGDPSSKSTEIKWKSGKDLTKRSSQTQNKASRKRQHEEPESFFTWFTDHSDAGADELGEVIKDDIWPNPLQYYLVPDMDDEEGEGEEDDDDDEEEEGLEDIDE

SEQ ID NO: 57941 - protein, 80 aa, Homo sapiens
KSSKGVHFMFLAKVLTGRYTMGSHGMRRPPPVNPGSVTSDLYDSCVDNFFEPQIFVIFNDDQSYPYFVIQYEEVSNTVSI

SEQ ID NO: 57942 - protein, 84 aa, Homo sapiens
VKSHLMYAVREEVEVLKEQIKELVERNSLLERENALLKSLSSNDQLSQLPTQQANPGSTSQQQAVIAQPPQPTQPPQQPNVSSA

SEQ ID NO: 57943 - protein, 211 aa, Homo sapiens
LAAVCLRAAEVAGSFKMRLLLLLLVAASAMVRSEASANLGGVPSKRLKMQYATGPLLKFQIWVSSGYRRVFEEYMRVISQRYPDIRIEGENYLPQPIYRHIASFLSVFKLVLIGLIIVGKDPFAFFGMQAPSIWQWGQENKVYACMMVFFLSNMIENQCMSTGAFEITLNDVPVWSKLESGHLPSMQQLVQILDNEMKLNVHMDSIPHHRS

SEQ ID NO: 57944 - protein, 54 aa, Homo sapiens
VAGSFKMRLLLLLLVAASAMVRSEASANLGGVPSKRLKMQYATGPLLKFQICVS

SEQ ID NO: 57945 - protein, 524 aa, Homo sapiens
LRVFSKSRAGLEARKLKAYRTMEYMAESTDRSPGHILCCECGVPISPNPANICVACLRSKVDISQGIPKQVSISFCKQCQRYFQPPGTWIQCALESRELLALCLKKIKAPLSKVRLVDAGFVWTEPHSKRLKVKLTIQKEVMNGAILQQVFVVDYVVQSQMCGDCHRVEAKDFWKAVIQVRQKTLHKKTFYYLEQLILKYGMHQNTLRIKEIHDGLDFYYSSKQHAQKMVEFLQCTVPCRYKASQRLISQDIHSNTYNYKSTFSVEIVPICKDNVVCLSPKLAQSLGNMNQICVCIRVTSAIHLIDPNTLQVADIDGSTFWSHPFNSLCHPKQLEEFIVMECSIVQDIKRAAGAGMISKKHTLGEVWVQKTSEMNTDKQYFCRTHLGHLLNPGDLVLGFDLANCNLNDEHVNKMNSDRVPDVVLIKKSYDRTKRQRRRNWKLKELARERENMDTDDERQYQDFLEDLEEDEAIRKNVNIYRDSAIPVESDTDDEGAPRISLAEMLEDLHISQDATGEEGASMLT

SEQ ID NO: 57946 - protein, 41 aa, Homo sapiens [sequence omitted]

SEQ ID NO: 57947 - protein, 11 aa, Homo sapiens
LPGGALSRVRS

SEQ ID NO: 57948 - protein, 426 aa, Homo sapiens
VHIDNGFMRKRESQSVEEALKKLGIQVKVINAAHSFYNGTTTLPISDEDRTPRKRISKTLNMTTSPEEKRKIIGDTFVKIANEVIGEMNLKPEEVFLAQGTLRPDLIESASLVASGKAELIKTHHNDTELIRKLREEGKVIEPLKDFHKDEVRILGRELGLPEELVSRHPFPGPGLAIRVICAEEPYICKDFPETNNILKIVADFSASVKKPHTLLQRVKACTTEEDQEKLMQITSLHSLNAFLLPIKTVGVQGDCRSYSYVCGISSKDEPDWESLIFLARLIPRMCHNVNRVVYIFGPPVKEPPTDVTPTFLTTGVLSTLRQADFEAHNILRESGYAGKISQMPVILTPLHFDRDPLQKQPSCQRSVVIRTFITSDFMTGIPATPGNEIPVEVVLKMVTEIKKIPGISRIMYDLTSKPPGTTEWE

SEQ ID NO: 57949 - protein, 365 aa, Homo sapiens
KSTNMMGHRVDYFIASKAVDCLLDSKWAKAKKGEEALFTTRESVVDYCNRLLKKQFFHRALKVMKMKYDKDIKKEKDKGKAESGKEEDKKSKKENIKDEKTKKEKEKKKDGEKEESKKEETPGTPKKKETKKKFKLEPHDDQVFLDGNEVYVWIYDPVHFKTFVMGLILVIAVIAATLFPLWPAEMRVGVYYLSVGAGCFVASILLLAVARCILFLIIWLITGGRHHFWFLPNLTADVGFIDSFRPLYTHEYKGPKADLKKDEKSETKKQQKSDSEEKSDSEKKEDEEGKVGPGNHGTEGSGGERHSDTDSDRREDDRSQHSSGNGNDFEMITKEELEQQTDGDCEEDEEEENDGETPKSSHEKS

SEQ ID NO: 57950 - protein, 95 aa, Homo sapiens
KERLGCHPQTGFADIQGHPFFRNVDWDMMEQKQVVPPFKPNISGEFGLDNFDSQFTNEPVQLTPDDDDIVRKIDQSEFEGFEYINPLLMSAEECV

SEQ ID NO: 57951 - protein, 5 aa, Homo sapiens
MNYNP

SEQ ID NO: 57952 - protein, 200 aa, Homo sapiens
VVGFVTSFVGWIGVIVTTSTNDWVVTCGYTIPTCRKLDELGSKGLWADCVMATGLYHCKPLVDILILPGYVQACRALMIAASVLGLPAILLLLTVLPCIRMGQEPGVAKYRRAQLAGVLLILLALCALVATIWFPVCAHRETTIVSFGYSLYAGWIGAVLCLVGGCVILCCAGDAQAFGENRFYYTAGSSSPTHAKSAHV

SEQ ID NO: 57953 - protein, 8 aa, Homo sapiens
MDSKMDFI

SEQ ID NO: 57954 - protein, 20 aa, Homo sapiens
MEHGMWPLQERYFRTLHLVN

SEQ ID NO: 57955 - protein, 51 aa, Homo sapiens
LEEEIARLPKEIDQLEKIQNNSKLLRNKAVQLENELENFTKQFLPSSNEES

SEQ ID NO: 57956 - protein, 360 aa, Homo sapiens
IDTNALRVPRENMEAISPLKNGMVEDWDSFQAILDHTYKMHVKSEASLHPVLMSEAPWNTRAKREKLTELMFEHYNIPAFFLCKTAVLTAFANGRSTGLILDSGATHTTAIPVHDGYVLQQGIVKSPLAGDFITMQCRELFQEMNIELVPPYMIASKEAVREGSPANWKRKEKLPQVTRSWHNYMCNCVIQDFQASVLQVSDSTYDEQVAAQMPTVHYEFPNGYNCDFGAERLKIPEGLFDPSNVKGLSGNTMLGVSHVVTTSVGMCDIDIRPGLYGSVIVAGGNTLIQSFTDRLNRELSQKTPPSMRLKLIANNTTVERRFSSWIGGSILASLGTFQQMWISKQEYEEGGKQCVERKCP

SEQ ID NO: 57957 - protein, 19 aa, Homo sapiens
KKIETSAEKLRKLLKEEKR

SEQ ID NO: 57958 - protein, 602 aa, Homo sapiens
IKDVHEDSLTVVFENNWQPERQVPFNEVRLPPPPDIKKEISEGDEVEVYSRANDQEPCGWWLAKVRMMKGEFYVIEYAACDATYNEIVTFERLRPVNQNKTVKKNTFFKCTVDVPEDLREACANENAHKDFKKAVGACRIFYHPETTQLMILSASEATVKRVNILSDMHLRSIRTKLMLMSRNEEATKHLECTKQLAAAFHEEFVVREDLMGLAIGTHGSNIQQARKVPGVTAIELDEDTGTFRIYGESADAVKKARGFLEFVEDFIQVPRNLVGKVIGKNGKVIQEIVDKSGVVRVRIEGDNENKLPREDGMVPFVFVGTKESIGNVQVLLEYHIAYLKEVEQLRMERLQIDEQLRQIGSRSYSGRGRGRRGPNYTSGYGTNSELSNPSETESERKDELSDWSLAGEDDRDSRHQRDSRRRPGGRGRSVSGGRGRGGPRGGKSSISSVLKDPDSNPYSLLDNTESDQTADTDASESHHSTNRRRRSRRRRTDEDAVLMDGMTESDTASVNENGLVTVADYISRAESQSRQRNLPRETLAKNKKEMAKDVIEEHGPSEKAINGPTSASGDDISKLQRTPGEEKINTLKEENTQEAAVLNGVS

SEQ ID NO: 57959 - protein, 195 aa, Homo sapiens
IGKDTSLLGNGQMFGNWTFGTLVFTVMVITVTVKMALETHFWTWINHLVTWGSIIFYFVFSLFYGGILWPFLGSQNMYFVFIQLLSSGSAWFAIILMVVTCLFLDIIKKVFDRHLHPTSTEKAQLTETNAGIKCLDSMCCFPEGEAACASVGRMLERVIGRCSPTHISRSWSASDPFYTNDRSILTLSTMDSSTC

SEQ ID NO: 57960 - protein, 29 aa, Homo sapiens
VSNIHQAICNIPFLDFLTNKHMGILNEDQ

SEQ ID NO: 57961 - protein, 60 aa, Homo sapiens
MGSVKSFFLRNLFPSSVEMVVLDVLYHLIIYLWTKRYKCCIKSANYVKLAYLPLLCLSLA

SEQ ID NO: 57962 - protein, 10 aa, Homo sapiens
RWQFTEFESP

SEQ ID NO: 57963 - protein, 647 aa, Homo sapiens
LDAHQREDLFPQLHCSWLNLVSTIHSRSQLSEIPTMSHPSWLPPKSTGEPLGHVPARMETTHSFGNPSISVSTQQPPKKFAPVVAPKPKYNPYKQPGGEGDFLPPPPPPLDDSSALPSISGNFPPPPPLDEEAFKVQGNPGGKTLEERRSSLDAEIDSLTSILADLECSSPYKPRPPQSSTGSTASPPVSTPVTGHKRMVIPNQPPLTATKKSTLKPQPAPQAGPIPVAPIGTLKPQPQPVPASYTTASTSSRPTFNVQVKSAQPSPHYMAAPSSGQIYGSGPQGYNTQPVPVSGQCPPPSTRGGMDYAYIPPPGLQPEPGYGYAPNQGRYYEGYYAAGPGYGGRNDSDPTYGQQGHPNTWKREPGYTPPGAGNQNPPGMYPVTGPKKTYITDPVSAPCAPPLQPKGGHSGQLGPSSVAPSFRPEDELEHLTKKMLYDMENPPADEYFGRCARCGENVVGEGTGCTAMDQVFHVDCFTCIICNNKLRGQPFYAVEKKAYCEPCYINTLEQCNVCSKPIMERILRATGKAYHPHCFTCVMCHRSLDGIPFTVDAGGLIHCIEDFHKKFAPRCSVCKEPIMPAPGQEETVRIVALDRDFHVHCYRCEDCGGLLSEGDNQGCYPLDGHILCKTCNSARIRVLTAKASTDL

SEQ ID NO: 57964 - protein, 836 aa, Homo sapiens
IDEYIDFEKIRKALPSSEDLVKLAPDFDKIVESLSLLKDFFTSGHKLVSEVIGASDLLLLLGSPEETAFRATDRGSESDKHFRKVSDKEKIDQLQEELLHTQLKYQRILERLEKENKELRKLVLQKDDKGIHHRKLKKSLIDMYSEVLDVLSDYDASYNTQDHLPRVVVVGDQSAGKTSVLEMIAQARIFPRGSGEMMTRSPVKVTLSEGPHHVALFKDSSREFDLTKEEDLAALRHEIELRMRKNVKEGCTVSPETISLNVKGPGLQRMVLVDLPGVINTVTSGMAPDTKETIFSISKAYMQNPNAIILCIQDGSVDAERSIVTDLVSQMDPHGRRTIFVLTKVDLAEKNVASPSRIQQIIEGKLFPMKALGYFAVVTGKGNSSESIEAIREYEEEFFQNSKLLKTSMLKAHQVTTRNLSLAVSDCFWKMVRESVEQQADSFKATRFNLETEWKNNYPRLRELDRNELFEKAKNEILDEVISLSQVTPKHWEEILQQSLWERVSTHVIENIYLPAAQTMNSGTFNTTVDIKLKQWTDKQLPNKAVEVAWETLQEEFSRFMTEPKGKEHDDIFDKLKEAVKEESIKRHKWNDFAEDSLRVIQHNALEDRSISDKQQWDAAIYFMEEALQARLKDTENAIENMVGPDWKKRWLYWKNRTQEQCVHNETKNELEKMLKCNEEHPAYLASDEITTVRKNLESRGVEVDPSLIKDTWHQVYRRHFLKTALNHCNLCRRGFYYYQRHFVDSELECNDVVLFWRIQRMLAITANTLRQQLTNTEVRRLEKNVKEVLEDFAEDGEKKIKLLTGKRVQLAEDLKKVREIQEKLDAFIEALHQEK

SEQ ID NO: 57965 - protein, 746 aa, Homo sapiens
IDQLQEELLHTQLKYQRILERLEKENKELRKLVLQKDDKGIHHRKLKKSLIDMYSEVLDVLSDYDASYNTQDHLPRVVVVGDQSAGKTSVLEMIAQARIFPRGSGEMMTRSPVKVTLSEGPHHVALFKDSSREFDLTKEEDLAALRHEIELRMRKNVKEGCTVSPETISLNVKGPGLQRMVLVDLPGVINTVTSGMAPDTKETIFSISKAYMQNPNAIILCIQDGSVDAERSIVTDLVSQMDPHGRRTIFVLTKVDLAEKNVASPSRIQQIIEGKLFPMKALGYFAVVTGKGNSSESIEAIREYEEEFFQNSKLLKTSMLKAHQVTTRNLSLAVSDCFWKMVRESVEQQADSFKATRFNLETEWKNNYPRLRELDRNELFEKAKNEILDEVISLSQVTPKHWEEILQQSLWERVSTHVIENIYLPAAQTMNSGTFNTTVDIKLKQWTDKQLPNKAVEVAWETLQEEFSRFMTEPKGKEHDDIFDKLKEAVKEESIKRHKWNDFAEDSLRVIQHNALEDRSISDKQQWDAAIYFMEEALQARLKDTENAIENMVGPDWKKRWLYWKNRTQEQCVHNETKNELEKMLKCNEEHPAYLASDEITTVRKNLESRGVEVDPSLIKDTWHQVYRRHFLKTALNHCNLCRRGFYYYQRHFVDSELECNDVVLFWRIQRMLAITANTLRQQLTNTEVRRLEKNVKEVLEDFAEDGEKKIKLLTGKRVQLAEDLKKVREIQEKLDAFIEALHQEK

SEQ ID NO: 57966 - protein, 37 aa, Homo sapiens
RSYCYRYRCAARSQNTPDSSASNLGFRCAADRLPTMD

SEQ ID NO: 57967 - protein, 53 aa, Homo sapiens
VDRKGPLVTLNKPQGLPVTGKPGELTLFSVLPELSQSLGLREQELQVVRASGK

SEQ ID NO: 57968 - protein, 294 aa, Homo sapiens
INTVDTSHEDMIHDAQMDYYGTRLATCSSDRSVKIFDVRNGGQILIADLRGHEGPVWQVAWAHPMYGNILASCSYDRKVIIWREENGTWEKSHEHAGHDSSVNSVCWAPHDYGLILACGSSDGAISLLTYTGEGQWEVKKINNAHTIGCNAVSWAPAVVPGSLIDHPSGQKPNYIKRFASGGCDNLIKLWKEEEDGQWKEEQKLEAHSDWVRDVAWAPSIGLPTSTIASCSQDGRVFIWTCDDASSNTWSPKLLHKFNDVVWHVSWSITANILAVSGGDNKEELQMQPQIDHLP

SEQ ID NO: 57969 - protein, 410 aa, Homo sapiens
IETRRPWGRPYVAWLLVVMDALVEDDICILNHEKAHKRDTVTPVSIYSGDESVASHFALVTAYEDIKKRLKDSEKENSLLKKRIRFLEEKLIARFEEETSSVGREQVNKAYHAYREVCIDRDNLKSKLDKMNKDNSESLKVLNEQLQSKEVELLQLRTEVETQQVMRNLNPPSSNWEVEKLSCDLKIHGLEQELELMRKECSDLKIELQKAKQTDPYQEDNLKSRDLQKLSISSDNMQHAYWELKREMSNLHLVTQVQAELLRKLKTSTAIKKACAPVGCSEDLGRDSTKLHLMNFTATYTRHPPLLPNGKALCHTTSSPLPGDVKVLSEKAILQSWTDNERSIPNDGTCFQEHSSYGRNSLEDNSWVFPSPPKSSETAFGETKTKTLPLPNLPPLHYLDQHNQNCLYKN

SEQ ID NO: 57970 - protein, 11 aa, Homo sapiens
LDSQAQISTTE

SEQ ID NO: 57971 - protein, 48 aa, Homo sapiens
IMGLCCTGQHFLKIAATQHLSLHPSMESTIEHMLLWMGSPRESLSETM

SEQ ID NO: 57972 - protein, 15 aa, Homo sapiens
LENLGEEYLGQWLGE

SEQ ID NO: 57973 - protein, 47 aa, Homo sapiens
VAKKLEKLKKRTQRAIAELIRERLKGQEDSLASAVDAATEQKTCDSD

SEQ ID NO: 57974 - protein, 231 aa, Homo sapiens
ILLPLLLLLLLTPPPGARGEVCMASRGLSLFPESCPDFCCGTCDDQYCCSDVLKKFVWSEERCAVPEASVPASVEPVEQLGSALRFRPGYNDPMSGFGATLAVGLTIFVLSVVTIIICFTCSCCCLYKTCRRPRPVVTTTTSTTVVHAPYPQPPSVPPSYPGPSYQGYHTMPPQPGMPAAPYPMQYPPPYPAQPMGPPAYHETLAGGAAAPYPASQPPYNPAYMDAPKAAL

SEQ ID NO: 57975 - protein, 481 aa, Homo sapiens
KMAASVVCRAATAGAQVLLRARRSPALLRTPALRSTATFAQALQFVPETQVSLLDNGLRVASEQSSQPTCTVGVWIDVGSRFETEKNNGAGYFLEHLAFKGTKNRPGSALEKEVESMGAHLNAYSTREHTAYYIKALSKDLPKAVELLGDIVQNCSLEDSQIEKERDVILREMQENDASMRDVVFNYLHATAFQGTPLAQAVEGPSENVRKLSRADLTEYLSTHYKAPRMVLAAAGGVEHQQLLDLAQKHLGGIPWTYAEDAVPTLTPCRFTGSEIRHRDDALPFAHVAIAVEGPGWASPDNVALQVANAIIGHYDCTYGGGVHLSSPLASGAVANKLCQSFQTFSICYAETGLLGAHFVCDRMKIDDMMFVLQGQWMRLCTSATESEVARGKNILRNALVSHLDGTTPVCEDIGRSLLTYGRRIPLAEWESRIAEVDASVVREICSKYIYDQCPAVAGYGPIEQLPDYNRIRSGMFWLRF

SEQ ID NO: 57976 - protein, 68 aa, Homo sapiens
LASPYSACSGRSAGFLDNCAMCAARLAAAAAAAQSVYAFSARPLAGGEPVSLGSLRGKVLLIENVASL

SEQ ID NO: 57977 - skipped

SEQ ID NO: 57978 - protein, 10 aa, Homo sapiens
LTKNKDNHNL

SEQ ID NO: 57979 - protein, 23 aa, Homo sapiens
LTRILVIREIQEAIAVANASTMH

SEQ ID NO: 57980 - protein, 1849 aa, Homo sapiens
RDRWTDLGTDRGPGGKQAKDPQAELTRNPKARRRARARDRSPPLIPVPLFRMELTSRERGRGQPLPWELRLGLLLSVLAATLAQAPAPDVPGCSRGSCYPATGDLLVGRADRLTASSTCGLNGPQPYCIVSHLQDEKKCFLCDSRRPFSARDNPHSHRIQNVVTSFAPQRRAAWWQSENGIPAVTIQLDLEAEFHFTHLIMTFKTFRPAAMLVERSADFGRTWHVYRYFSYDCGADFPGVPLAPPRHWDDVVCESRYSEIEPSTEGEVIYRVLDPAIPIPDPYSSRIQNLLKITNLRVNLTRLHTLGDNLLDPRREIREKYYYALYELVVRGNCFCYGHASECAPAPGAPAHAEGMVHGACICKHNTRGLNCEQCQDFYRDLPWRPAEDGHSHACRKCECHGHTHSCHFDMAVYLASGNVSGGVCDGCQHNTAGRHCELCRPFFYRDPTKDLRDPAVCRSCDCDPMGSQDGGRCDSHDDPALGLVSGQCRCKEHVVGTRCQQCRDGFFGLSISDRLGCRRCQCNARGTVPGSTPCDPNSGSCYCKRLVTGRGCDRCLPGHWGLSHDLLGCRPCDCDVGGALDPQCDEGTGQCHCRQHMVGRRCEQVQPGYFRPFLDHLIWEAEDTRGQVLDVVERLVTPGETPSWTGSGFVRLQEGQTLEFLVASVPKAMDYDLLLRLEPQVPEQWAELELIVQRPGPVPAHSLCGHLVPKDDRIQGTLQPHARYLIFPNPVCLEPGISYKLHLKLVRTGGSAQPETPYSGPGLLIDSLVLLPRVLVLEMFSGGDAAALERQATFERYQCHEEGLVPSKTSPSEACAPLLISLSTLIYNGALPCQCNPQGSLSSECNPHGGQCLCKPGVVGRRCDLCAPGYYGFGPTGCQACQCSHEGALSSLCEKTSGQCLCRTGAFGLRCDRCQRGQWGFPSCRPCVCNGHADECNTHTGACLGCRDHTGGEHCERCIAGFHGDPRLPYGGQCRPCPCPEGPGSQRHFATSCHQDEYSQQIVCHCRAGYTGLRCEACAPGHFGDPSRPGGRCQLCECSGNIDPMDPDACDPHTGQCLRCLHHTEGPHCAHCKPGFHGQAARQSCHRCTCNLLGTNPQQCPSPDQCHCDPSSGQCPCLPNVQGPSCDRCAPNFWNLTSGHGCQPCACHPSRARGPTCNEFTGQCHCRAGFGGRTCSECQELHWGDPGLQCHACDCDSRGIDTPQCHRFTGHCSCRPGVSGVRCDQCARGFSGIFPACHPCHACFGDWDRVVQDLAARTQRLEQRAQELQQTGVLGAFESSFWHMQEKLGIVQGIVGARNTSAASTAQLVEATEELRREIGEATEHLTQLEADLTDVQDENFNANHALSGLERDRLALNLTLRQLDQHLDLLKHSNFLGAYDSIRHAHSQSAEAERRANTSALAVPSPVSNSASARHRTEALMDAQKEDFNSKHMANQRALGKLSAHTHTLSLTDINELVCGAPGDAPCATSPCGGAGCRDEDGQPRCGGLSCNGAAATADLALGRARHTQAELQRALAEGGSILSRVAETRRQASEAQQRAQAALDKANASRGQVEQANQELQELIQSVKDFLNQEGADPDSIEMVATRVLELSIPASAEQIQHLAGAIAERVRSLADVDAILARTVGDVRRAEQLLQDARRARSWAEDEKQKAETVQAALEEAQRAQGIAQGAIRGAVADTRDTEQTLYQVQERMAGAERALSSAGERARQLDALLEALKLKRAGNSLAASTAEETAGSAQGRAQEAEQLLRGPLGDQYQTVKALAERKAQGVLAAQARAEQLRDEARDLLQAAQDKLQRLQELEGTYEENERALESKAAQLDGLEARMRSVLQAINLQVQIYNTCQ

SEQ ID NO: 57981 - protein, 41 aa, Homo sapiens
LVASQHLLCLSYFINSTLPSILCGMSATLVPVLENDIHLSL

SEQ ID NO: 57982 - protein, 63 aa, Homo sapiens
IKFQMKKVLCLAVAVGHVKMTADELVYNIHLAVNFLVSLLKKNWQNVRALYIESTMGKPQRLY

SEQ ID NO: 57983 - protein, 385 aa, Homo sapiens
LMSDNGVRVQRFFVADTANEALEAAKRLNAKEIVLKAQILAGGRGKGVFNSGLKGGVHLTKDPNVVGQLAKQMIGYNLATKQTPKEGVKVNKVMVAEALDISRETYLAILMDRSCNGPVLVGSPQGGVDIEEVAASNPELIFKEQIDIFEGIKDSQAQRMAENLGFVGPLKSQAADQITKLYNLFLKIDATQVEVNPFGETPEGQVVCFDAKINFDDNAEFRQKDIFAMDDKSENEPIENEAAKYDLKYIGLDGNIACFVNGAGLAMATCDIIFLNGGKPANFLDLGGGVKEAQVYQAFKLLTADPKVEAILVNIFGGIVNCAIIANGITKACRELELKVPLVVRLEGTNVQEAQKILNNSGLPITSAIDLEDAAKKAVASVAKK

SEQ ID NO: 57984 - protein, 5 aa, Homo sapiens
KSKRS

SEQ ID NO: 57985 - protein, 39 aa, Homo sapiens
KRNKKIFDNWMTIQELLTHGTKSPDGTRVYNSFLSVTTV

SEQ ID NO: 57986 - protein, 98 aa, Homo sapiens
LTHLLFLPDWAAVFELYNCEDERCYLDLARLRGVHYITWRRQNKVFPQDKGHHPTLGEHPKFTNYSFDVEEFMYLVLQAADHVLQHPKWPFKKKHDEL

SEQ ID NO: 57987 - protein, 637 aa, Homo sapiens
TPAVDIGAADLAHAQQQQQQALQVARQLLLQQQQQQQVSGLKSPKRNDKQPALQVPVSVAMMTPQVITPQQMQQILQQQVLSPQQLQVLLQQQQALMLQQQQLQEFYKKQQEQLQLQLLQQQHAGKQPKEQQQVATQQLAFQQQLLQMQQLQQQHLLSLQRQGLLTIQPGQPALPLQPLAQGMIPTELQQLWKEVTSAHTAEETTGNNHSSLDLTTTCVSSSAPSKTSLIMNPHASTNGQLSVHTPKRESLSHEEHPHSHPLYGHGVCKWPGCEAVCEDFQSFLKHLNSEHALDDRSTAQCRVQMQVVQQLELQLAKDKERLQAMMTHLHVKSTEPKAAPQPLNLVSSVTLSKSASEASPQSLPHTPTTPTAPLTPVTQGPSVITTTSMHTVGPIRRRYSDKYNVPISSADIAQNQEFYKNAEVRPPFTYASLIRQAILESPEKQLTLNEIYNWFTRMFAYFRRNAATWKNAVRHNLSLHKCFVRVENVKGAVWTVDEVEFQKRRPQKISGNPSLIKNMQSSHAYCTPLNAALQASMAENSIPLYTTASMGNPTLGNLASAIREELNGAMEHTNSNESDSSPGRSPMQAVHPVHVKEEPLDPEEAEGPLSLVTTANHSPDFDHDRDYEDEPVNEDME

SEQ ID NO: 57988 - protein, 16 aa, Homo sapiens
LEMDMEGLEDYFSEDS

SEQ ID NO: 57989 - protein, 6 aa, Homo sapiens
KESPWY

SEQ ID NO: 57990 - protein, 120 aa, Homo sapiens
VVLNHVRKSAISDHLKSKTHTKRKAEFEEQNVRKKQRPLTASLQCNSTAQTEKVSVIQDFVKMCLEANIPLEKADHPAVRAFLSRHVKNGGSIPKSDQLRRAYLPDGYENENQLLNSQDC

SEQ ID NO: 57991 - protein, 23 aa, Homo sapiens
KEKSNMTRNMHATVIPEPATGFY

SEQ ID NO: 57992 - protein, 824 aa, Homo sapiens [sequence omitted]

SEQ ID NO: 57993 - protein, 553 aa, Homo sapiens
IYLWSRQQRRREARGRGDASGLKRNSERKTPEGRASPAPGSGHPEGPGAHLDMNSLDRAQAAKNKGNKYFKAGKYEQAIQCYTEAISLCPTEKNVDLSTFYQNRAAAFEQLQKWKEVAQDCTKAVELNPKYVKALFRRAKAHEKLDNKKECLEDVTAVCILEGFQNQQSMLLADKVLKLLGKEKAKEKYKNREPLMPSPQFIKSYFSSFTDDIISQPMLKGEKSDEDKDKEGEALEVKENSGYLKAKQYMEEENYDKIISECSKEIDAEGKYMAEALLLRATFYLLIGNANAAKPDLDKVISLKEANVKLRANALIKRGSMYMQQQQPLLSTQDFNMAADIDPQNADVYHHRGQLKILLDQVEEAVADFDECIRLRPESALAQAQKCFALYRQAYTGNNSSQIQAAMKGFEEVIKKFPRCAEGYALYAQALTDQQQFGKADEMYDKCIDLEPDNATTYVHKGLLQLQWKQDLDRGLELISKAIEIDNKCDFAYETMGTIEVQRGNMEKAIDMFNKAINLAKSEMEMAHLYSLCDAAHAQTEVAKKYGLKPPTL

SEQ ID NO: 57994 - protein, 580 aa, Homo sapiens
LVSTAEARASSSRLCAGVARRAGERGANFSGGTGIGCLEPEIMTTPGKENFRLKSYKNKSLNPDEMRRRREEEGLQLRKQKREEQLFKRRNVATAEEETEEEVMSDGGFHEAQISNMEMAPGGVITSDMIEMIFSKSPEQQLSATQKFRKLLSKEPNPPIDEVISTPGVVARFVEFLKRKENCTLQFESAWVLTNIASGNSLQTRIVIQAGAVPIFIELLSSEFEDVQEQAVWALGNIAGDSTMCRDYVLDCNILPPLLQLFSKQNRLTMTRNAVWALSNLCRGKSPPPEFAKVSPCLNVLSWLLFVSDTDVLADACWALSYLSDGPNDKIQAVIDAGVCRRLVELLMHNDYKVVSPALRAVGNIVTGDDIQTQVILNCSALQSLLHLLSSPKESIKKEACWTISNITAGNRAQIQTVIDANIFPALISILQTAEFRTRKEAAWAITNATSGGSAEQIKYLVELGCIKPLCDLLTVMDSKIVQVALNGLENILRLGEQEAKRNGTGINPYCALIEEAYGLDKIEFLQSHENQEIYQKAFDLIEHYFGTEDEDSSIAPQVDLNQQQYIFQQCEAPMEGFQL

SEQ ID NO: 57995 - protein, 207 aa, Homo sapiens
VMTAGWLVIAVGLVRAYLAKGSYHSLYYSIEKPLKFFQTGALLEILHCAIGIVPSSVVLTSFQVMSRVFLIWAVTHSVKEVQSEDSVLLFVIAWTITEIIRYSFYTFSLLNHLPYLIKWARYTLFIVLYPMGVSGELLTIYAALPFVRQAGLYSISLPNKYNFSFDYYAFLILIMISYIPIFPQLYFHMIHQRRKILSHTEEHKKFE

SEQ ID NO: 57996 - protein, 89 aa, Homo sapiens
TGNAVRAIGRLSSMAMISGLSGRKSSTGSPTSPLNAEKLESEEDVSQAFLEAVAEEKPHVKPYFSKTIRDLEVVEGSAARFDCKIEGKL

SEQ ID NO: 57997 - protein, 7 aa, Homo sapiens
KGNTGSK

SEQ ID NO: 57998 - protein, 141 aa, Homo sapiens
ILRVLNTNIDGQRKIAFAITAIKGVGRRYAHVVLRKADTDLTKRAGELTDDEVERVITVMQNPRQYKIPDWFLNRQKDVKDGKYSQVLANGLDNKLREDLERLKKIRAHRGLRHFWGLRVRGQHTKTTGRRGRTVGVSKKK

SEQ ID NO: 57999 - skipped

SEQ ID NO: 58000 - protein, 397 aa, Homo sapiens
INIYKTVWWYPYNHPASCTSLNFHLIDYHLAAFITVMLARRLVWALISEATKAGAASMIHYMVLISARLVLLTLCGWVLCWTLVNLFRSHSVLNLLFLGYPFGVYVPLCCFHQDSRAHLLLTDYNYVVQHEAVEESASTVGGLAKSKDFLSLLLESLKEQFNNATPIPTHSCPLSPDLIRNEVECLKADFNHRIKEVLFNSLFSAYYVAFLPLCFVKSTQYYDMRWSCEHLIMVWINAFVMLTTQLLPSKYCDLLHKSAAHLGKWQKLEHGSYSNAPQHIWSENTIWPQGVLVRHSRCLYRAMGPYNVAVPSDVSHARFYFLFHRPLRLLNLLILIEGSVVFYQLYSLLRSEKWNHTLSMALILFCNYYVLFKLLRDRIVLGRAYSYPLNSYELKAN

SEQ ID NO: 58001 - protein, 360 aa, Homo sapiens
VIGNGSFGVVYQAKLCDSGELVAIKKVLQDKRFKNRELQIMRKLDHCNIVRLRYFFYSSGEKKDEVYLNLVLDYVPETVYRVARHYSRAKQTLPVIYVKLYMYQLFRSLAYIHSFGICHRDIKPQNLLLDPDTAVLKLCDFGSAKQLVRGEPNVSYICSRYYRAPELIFGATDYTSSIDVWSAGCVLAELLLGQPIFPGDSGVDQLVEIIKVLGTPTREQIREMNPNYTEFKFPQIKAHPWTKVFRPRTPPEAIALCSRLLEYTPTARLTPLEACAHSFFDELRDPNVKLPNGRDTPALFNFTTQELSSNPPLATILIPPHARIQAAASTPTNATAASDANTGDRGQTNNAASASASNST

SEQ ID NO: 58002 - protein, 324 aa, Homo sapiens
LPPSCPAPPGDLDQTTMWKRWLALALALVAVAWVRAEEELRSKSKICANVFCGAGRECAVTEKGEPTCLCIEQCKPHKRPVCGSNGKTYLNHCELHRDACLTGSKIQVDYDGHCKEKKSVSPSASPVVCYQSNRDELRRRIIQWLEAEIIPDGWFSKGSNYSEILDKYFKNFDNGDSRLDSSEFLKFVEQNETAINITTYPDQENNKLLRGLCVDALIELSDENADWKLSFQEFLKCLNPSFNPPEKKCALEDETYADGAETEVDCNRCVCACGNWVCTAMTCDGKNQKGAQTQTEEEMTRYVQELQKHQETAEKTKRVSTKEI

SEQ ID NO: 58003 - protein, 68 aa, Homo sapiens
IELWDVGGSVGSASSVKSTRAVFYNSVNGIIFVHDLTNKKSSQNLRRWSLEALNRDLVPTGVLVTNGD

SEQ ID NO: 58004 - protein, 146 aa, Homo sapiens
IIFVHDLTNKKSSQNLRRWSLEALNRDLVPTGVLVTNGDYDQEQFADNQIPLLVIGTKLDQIHETKRHEVLTRTAFLAEDFNPEEINLDCTNPRYLAAGSSNAVKLSRFFDKVIEKRYFLREGNQIPGFPDRKRFGAGTLKSLHYD

SEQ ID NO: 58005 - protein, 436 aa, Homo sapiens
VKGLGLDESGLAKQAASGLVGQENAREACGVIVELIKSKKMAGRAVLLAGPPGTGKTALALAIAQELGSKVPFCPMVGSEVYSTEIKKTEVLMENFRRAIGLRIKETKEVYEGEVTELTPCETENPMGGYGKTISHVIIGLKTAKGTKQLKLDPSIFESLQKERVEAGDVIYIEANSGAVKRQGRCDTYATEFDLEAEEYVPLPKGDVHKKKEIIQDVTLHDLDVANARPQGGQDILSMMGQLMKPKKTEITDKLRGEINKVVNKYIDQGIAELVPGVLFVDEVHMLDIECFTYLHRALESSIAPIVIFASNRGNCVIRGTEDITSPHGIPLDLLDRVMIIRTMLYTPQEMKQIIKIRAQTEGINISEEALNHLGEIGTKTTLRYSVQLLTPANLLAKINGKDSIEKEHVEEISELFYDAKSSAKILADQQDKYMK

SEQ ID NO: 58006 - protein, 1002 aa, Homo sapiens
VNASVLTQFSDSTVQSGGSHTALGDRSYSESSSTSSSESLNSSAPRGERSTLEDSREPGQALGDSSANAEDRTSGVPSLGTHTLATVTGNGERTLRSVTLTNTSMSTTSGEAGSPAAAMHQETEGASLHVNVTDDMGLVSRSLAASSALGVAGISYGQVRGTAIEQRTSSDHTDHTYLSSTFTKGERALLSITDNSSSSDIVESSTSYIKISNSSHSEYSSFFHAQTERSNISSYDGEYAQPSTESPVLHTSNLPSYTPTINMPNTSVVLDTDAEFVSDSSSSSSSSSSSSSSGPPLPLPSVSQSHHLFSSILPSTRASVHLLKSTSDASTPWSSSPSPLPVSLTTSTSAPLSVSQTTLPQSSSTPVLPRARETPVTSFQTSTMTSFMTMLHSSQTADLKSQSTPHQEKVITESKSPSLVSLPTESTKAVTTNSPLPPSLTESSTEQTLPATSTNLAQMSPTFTTTILKTSQPLMTTPGTLSSTASLVTGPIAVQTTAGKQLSLTHPEILVPQISTEGGISTERNRVIVDATTGLIPLTSVPTSAKEMTTKLGVTAEYSPASRSLGTSPSPQTTVVSTAEDLAPKSATFAVQSSTQSPTTVSSSASVNSCAVNPCLHNGECVADNTSRGYHCRCPPSWQGDDCSVDVNECLSNPCPSTAMCNNTQGSFICKCPVGYQLEKGICNLVRTFVTEFKLKRTFLNTTVEKHSDLQEVENEITKTLNMCFSALPSYIRSTVHASRESNAVVISLQTTFSLASNVTLFDLADRMQKCVNSCKSSAEVCQLLGSQRRIFRAGSLCKRKSPECDKDTSICTDLDGVALCQCKSGYFQFNKMDHSCRACEDGYRLENETCMSCPFGLGGLNCGNPYQLITVVIAAAGGGLLLILGIALIVTCCRKNKNDISKLIFKSGDFQMSPYAEYPKNPRSQEWGREAIEMHENGSTKNLLQMTDVYYSPTSVRNPELERNGLYPAYTGLPGSRHSCIFPGQYNPSFISDESRRRDYF

SEQ ID NO: 58007 - protein, 48 aa, Homo sapiens
TDSTRPTLDCQDHGILAFSPDSITRLSSVMKAEEETTFKSRRERDSLL

SEQ ID NO: 58008 - protein, 17 aa, Homo sapiens
ISSLEIQARDLAGWAFA

SEQ ID NO: 58009 - protein, 182 aa, Homo sapiens
LDRTSQNDAYLNSPSLNFVTDNQTLPNQPAFSSIDKQVYATMPINSFRSGMNSPLRTTPDKSHFGLIVGDSQHSFPFSGDETNHASATSTQDFLDQVTSQKKAEAQPVHQAYQMSSFEQPFRAPYHGSRAGIATQFSTANGQVNLRGPGTSAEFSEFPLVNVNDNRAGMTSSPDATTGQTFG

SEQ ID NO: 58010 - protein, 258 aa, Homo sapiens
LSSGSNFCSEQKTSGIINKFCSAKDSEHNEKYEDTFLESEEIGTKVEVVERKEHLHTDILKRGSEMDNNCSPTRKDFTEDTIPRTQIERRKTSLYFSSKYNKEALSPPRRKAFKKWTPPRSPFNLVQETLFHDPWKLLIATIFLNRTSGKMAIPVLWKFLEKYPSAEVARTADWRDVSELLKPLGLYDLRAKTIVKFSDEYLTKQWKYPIELHGIGKYGNDSYRIFCVNEWKQVHPEDHKLNKYHDWLWENHEKLSLS

SEQ ID NO: 58011 - protein, 787 aa, Homo sapiens
LCASQRSMRTLEDSSGTVLHRLIQEQLRYGNLTETRTLLAIQQQALRGGAGTGGTGSPQASLEILAPEDSQVLQQATRQEPQGQEHQGGENHLAENTLYRLCPQPSKGEELPTYEEAKAHSQYYAAQQAGTRPHAGDRDPRGAPGGSRRQDEALRELRHGHVRSLSERLLQLSLERNGARAPSHMSSSHSFPQLARNQQGPPLRGPPAEGPESRGPPPQYPHVVLAHETTTAVTDPRYRARGSPHFQHAEVRILQAQVPPVFLQQQQQYQYLQQSQEHPPPPHPAALGHGPLSSLSPPAVEGPVSAQASSATSGSAHLAQMEAVLRENARLQRDNERLQRELESSAEKAGRIEKLESEIQRLSEAHESLTRASSKREALEKTMRNKMDSEMRRLQDFNRDLRERLESANRRLASKTQEAQAGSQDMVAKLLAQSYEQQQEQEKLEREMALLRGAIEDQRRRAELLEQALGNAQGRAARAEEELRKKQAYVEKVERLQQALGQLQAACEKREQLELRLRTRLEQELKALRAQQRQAGAPGGSSGSGGSPELSALRLSEQLREKEEQILALEADMTKWEQKYLEERAMRQFAMDAAATAAAQRDTTLIRHSPQPSPSSSFNEGLLTGGHRHQEMESRLKVLHAQILEKDAVIKVLQQRSRRDPGKAIQGSLRPAKSVPSVFAAAAAGTQGWQGLSSSERQTADAPARLTTADRAPTEEPVVTAPPAAHAKHGSRDGSTQTEGPPDSTSTCLPPEPDSLLGCSSSQRAASLDSVATSRVQDLSDMVEILI

SEQ ID NO: 58012 - protein, 47 aa, Homo sapiens
KDSVEENMLKIQNKKRELAAGAFGTKKPNADEMKQAKINEIRTLIDL

SEQ ID NO: 58013 - protein, 350 aa, Homo sapiens [sequence omitted]

SEQ ID NO: 58014 - protein, 452 aa, Homo sapiens
ILQSKNVSYTDQAFFSFVFWPFSLKLLWAPLVDAVYVKNFGRRKSWLVPTQYILGLFMIYLSTQVDRLLGNTDDRTPDVIALTVAFFLFEFLAATQDIAVDGWALTMLSRENVGYASTCNSVGQTAGYFLGNVLFLALESADFCNKYLRFQPQPRGIVTLSDFLFFWGTVFLITTTLVALLKKENEVSVVKEETQGITDTYKLLFAIIKMPAVLTFCLLILTAKIGFSAADAVTGLKLVEEGVPKEHLALLAVPMVPLQIILPLIISKYTAGPQPLNTFYKAMPYRLLLGLEYALLVWWTPKVEHQGGFPIYYYIVVLLSYALHQVTVYSMYVSIMAFNAKVSDPLIGGTYMTLLNTVSNLGGNWPSTVALWLVDPLTVKECVGASNQNCRTPDAVELCKKLGGSCVTALDGYYVESIICVFIGFGWWFFLGPKFKKLQDEGSSSWKCKRNN

SEQ ID NO: 58015 - protein, 21 aa, Homo sapiens
INPDSAQPYKWRAKAHRLLGQ

SEQ ID NO: 58016 - protein, 27 aa, Homo sapiens
ILEELEKSVFSPQTTRSTKKCTILRKS

SEQ ID NO: 58017 - protein, 238 aa, Homo sapiens
KLKEQKSHSEKMIQGDKEAVLQYFKELNDTLEQKKKSFLTALCDVGNLINQEYTPQIERMKEIREQQLELMALTISLQEESPLKFLEKVDDVRQHVQILKQRPLPEVQPVEIYPRVSKILKEEWSRTEIGQIKNVLIPKMKISPKRMSCSWPGKDEKEVEFLKILNIVVVTLISVILMSILFFNQHIITFLSEITLIWFSEASLSVYQSLSNSLHKVKNILCHIFYLLKEFVWKIVSH

SEQ ID NO: 58018 - protein, 7 aa, Homo sapiens
RNTTCHY

SEQ ID NO: 58019 - protein, 30 aa, Homo sapiens
MKAVMIGACFLIDFMFFESTGSQEQKSGVW

SEQ ID NO: 58020 - protein, 75 aa, Homo sapiens
LSSWQQTPSPLILDQNYINTKNQVIKAERRVLKELGFCVHVKHPHKIIVMYLQVLECERNQTLVQTAWVVHDGKS

SEQ ID NO: 58021 - protein, 26 aa, Homo sapiens
LSLAAITKADLLADHTEVIVKSILQV

SEQ ID NO: 58022 - protein, 62 aa, Homo sapiens
KNKITVVSEKQFSKRYLKYLTKKYLKKNNLRDWLRVVASDKETYELRYFQISQDEDESESED

SEQ ID NO: 58023 - protein, 53 aa, Homo sapiens
MMPMTFYFGFKNVELLFSSLVINTAGEMAGAFVAVIILAVFYEGLDSPREPAV

SEQ ID NO: 58024 - protein, 128 aa, Homo sapiens
LKGVHSHKKKKIRTSPTFRRPKTLRLRRQPKYPRKSAPRRNKLDHYAIIKFPLTTESAMKKIEDNNTLVFIVDVKANKHQIKQAVKKLYDIDVAKVNILIRPDGEKKAYVRLAPDYDALDVANKIGII

SEQ ID NO: 58025 - protein, 82 aa, Homo sapiens; identical to SEQ ID NO: 51503

SEQ ID NO: 58026 - protein, 27 aa, Homo sapiens
LLLITHWIMPQASLPNDPLATRRASST

SEQ ID NO: 58027 - protein, 308 aa, Homo sapiens
ITSNMDSVGRIQMRTRRTLRGHLAKIYAMHWGYDSRLLVSASQDGKLIIWDSYTTNKMHAIPLRSSWVMTCAYAPSGNYVACGGLDNICSIYNLKTREGNVRVSRELPGHTGYLSCCRFLDDSQIVTSSGDTTCALWDIETAQQTTTFTGHSGDVMSLSLSPDMRTFVSGACDASSKLWDIRDGMCRQSFTGHVSDINAVSFFPNGYAFATGSDDATCRLFDLRADQELLLYSHDNIICGITSVAFSKSGRLLLAGYDDFNCNVWDTLKGDRAGVLAGHDNRVSCLGVTDDGMAVATGSWDSFLRIWN

SEQ ID NO: 58028 - protein, 175 aa, Homo sapiens
LAASALPALVMSKGHRIEEVPELPLVFEDKVEGYKKTKEAVLLLKKLKAWNDIEKVYASQRMRAGKGKMRNRRRIQRRGLCIIYNEDNGIIKAFRNIPGITLLNVSKLNILKLAPGGHVGRFCIWTESAFRKLDELYGTWRKAASLKSNYNLPMHKLINTDLSRILKSPEIQRAL

SEQ ID NO: 58029 - protein, 112 aa, Homo sapiens
KNPLKNLRIMLKLNPYAKTMRRNTILRQARNHKLRVDKAAAAAAALPAKSDEKAAVAGKKPVVGKKGKKAAVGVKKQKKPLVGKKAAATKKPAPEKKPAEKKPTTEEKKPAA

SEQ ID NO: 58030 - protein, 34 aa, Homo sapiens
LQQLVTENPGKSISVFINPDDVTRPHFRIDDKFF

SEQ ID NO: 58031 - protein, 151 aa, Homo sapiens
TYHPADKDYGLMKIDEPSTPYHSMMGDDEDACSDTEATEAMAPDILARKLAAAEGLEPKYRIQEQESSGEEDSDLSPEEREKKRQFEMKRKLHYNEGLNIKLARQLISKDLHDDDEDEEMLETADGESMNTEESNQGSTPSDQQQNKLRSS

SEQ ID NO: 58032 - protein, 53 aa, Homo sapiens
ILKEKLQVPSPATQPQDGDAAAAAFRTGWPLRCGRGTSISSWEVPQSSGAGEF

SEQ ID NO: 58033 - protein, 163 aa, Homo sapiens
KCPNPPVQENFDVNKYLGRWYEIEKIPTTFENGRCIQANYSLMENGKIKVLNQELRADGTVNQIEGEATPVNLTEPAKLEVKFSWFMPSAPYWILATDYENYALVYSCTCIIQLFHVDFAWILARNPNLPPETVDSLKNILTSNNIDVKKMTVTDQVNCPKLS

SEQ ID NO: 58034 - protein, 142 aa, Homo sapiens
VELSQYRDQHFRGDNEEQEKLLKKSCTLYVGNLSFYTTEEQIYELFSKSGDIKKIIMGLDKMKKTACGFCFVEYYSRADAENAMRYINGTRLDDRIIRTDWDAGFKEGRQYGRGRSGGQVRDEYRQDYDAGRGGYGKLAQNQ

SEQ ID NO: 58035 - protein, 30 aa, Homo sapiens
LILEKNAGPEARYPESIAPFGGISFKTKPN

SEQ ID NO: 58036 - protein, 1206 aa, Homo sapiens
LSRWKLAIVSLGVICSGGFLLLLLYWMPEWRVKATCVRAAIKDCEVVLLRTTDEFKMWFCAKIRVLSLETYPVSSPKSMSNKLSNGHAVCLIENPTEENRHRISKYSQTESQQIRYFTHHSVKYFWNDTIHNFDFLKKLLYGVNEIAVKVPSVFKLLIKEVLNPFYIFQLFSVILWSTDEYYYYALAIVVMSIVSIVSSLYSIRKQYVMLHDMVATHSTVRVSVCRVNEEIEEIFSTDLVPGDVMVIPLNGTIMPCDAVLINGTCIVNESMLTGESVPVTKTNLPNPSVDVKGIGDELYNPETHKRHTLFCGTTVIQTRFYTGELVKAIVVRTGFSTSKGQLVRSILYPKPTDFKLYRDAYLFLLCLVAVAGIGFIYTIINSILNEVQVGVIIIESLDIITITVPPALPAAMTAGIVYAQRRLKKIGIFCISPQRINICGQLNLVCFDKTGTLTEDGLDLWGIQRVENARFLSPEENVCNEMLVKSQFVACMATCHSLTKIEGVLSGDPLDLKMFEAIGWILEEATEEETALHNRIMPTVVRPPKQLLPESTPAGNQEMELFELPATYEIGIVRQFPFSSALQRMSVVARVLGDRKMDAYMKGAPEAIAGLCKPETVPVDFQNVLEDFTKQGFRVIALAHRKLESKLTWHKVQNISRDAIENNMDFMGLIIMQNKLKQETPAVLEDLHKANIRTVMVTGDSMLTAVSVARDCGMILPQDKVIIAEALPPKDGKVAKINWHYADSLTQCSHPSAIDPEAIPVKLVHDSLEDLQMTRYHFAMNGKSFSVILEHFQDLVPKLMLHGTVFARMAPDQKTQLIEALQNVDYFVGMCGDGANDCGALKRAHGGISLSELEASVASPFTSKTPSISCVPNLIREGRAALITSFCVFKFMALYSIIQYFSVTLLYSILSNLGDFQFLFIDLAIILVVVFTMSLNPAWKELVAQRPPSGLISGALLFSVLSQIIICIGFQSLGFFWVKQQPWYEVWHPKSDACNTTGSGFWNSSHVDNETELDEHNIQNYENTTVFFISSFQYLIVAIAFSKGKPFRQPCYKNYFFVFSVIFLYIFILFIMLYPVASVDQVLQIVCVPYQWRVTMLIIVLVNAFVSITVENFFLDMVLWKVVFNRDKQGEYRFSTTQPPQESVDRWGKCCLPWALGCRKKTPKAKYMYLAQELLVDPEWPPKPQTTTEAKALVKENGSCQIITIT

SEQ ID NO: 58037 - protein, 15 aa, Homo sapiens
LMTSLLLQNLQEQSL

SEQ ID NO: 58038 - protein, 227 aa, Homo sapiens
MEYSDELEAIIEEDDGDGGWVDTYHNTGITGITEAVKEITLENKDNIRLQDCSALCEEEEDEDEGEAADMEEYEESGLLETDEATLDTRKIVEACKAKTDAGGEDAILQTRTYDLYITYDKYYQTPRLWLFGYDEQRQPLTVEHMYEDISQDHVKKTVTIENHPHLPPPPMCSVHPCRHAEVMKKIIETVAEGGGELGVHMYLLIFLKFVQAVIPTIEYDYTRHFTM

SEQ ID NO: 58039 - protein, 10 aa, Homo sapiens
ISMSHHWITQ

SEQ ID NO: 58040 - protein, 30 aa, Homo sapiens
LKKPIYQRTVAYGHFGRDSFPWEVPKKLKY

SEQ ID NO: 58041 - protein, 18 aa, Homo sapiens
VPYLEVPVPRGPPSPGNP

SEQ ID NO: 58042 - protein, 272 aa, Homo sapiens
MDRMMVEHLLRCGYYNTAVKLARQSGIEDLVNIEMFLTAKEVEESLERRETATCLAWCHDNKSRLRKMKSCLEFSLRIQEFIELIRQNKRLDAVRHARKHFSQAEGSQLDEVRQAMGMLAFPPDTHISPYKDLLDPARWRMLIQQFRYDNYRLHQLGNNSVFTLTLQAGLSAIKTPQCYKEDGSSKSPDCPVCSRSLNKLAQPLPMAHCANSRLVCKISGDVMNENNPPMMLPNGYVYGYNSLLSIRQDDKVVCPRTKEVFHFSQAEKVYIM

SEQ ID NO: 58043 - protein, 167 aa, Homo sapiens
KLKKGKSFQEYSGSLLLSIASVGFLSPTDIAIAVPRQWEEMRPLDIVELAEPEEVEVLEPEEDFEQFLLPVINEMREDIASLTREHGRAYLRNRSKLWEMDNMLIQIKTQVEASEESALNHLQNPGDAAEGRAAKRCEKAEEKAKEIAKMAEMLVELVRRIEKSESS

SEQ ID NO: 58044 - protein, 13 aa, Homo sapiens
RVKVFRNIRALYC

SEQ ID NO: 58045 - protein, 17 aa, Homo sapiens
LLQAERRALCACWPAGH

SEQ ID NO: 58046 - protein, 33 aa, Homo sapiens
VSHSEDVQGAVQGNHSGVVLSINSREMHSYLVS

SEQ ID NO: 58047 - protein, 23 aa, Homo sapiens
KIPGISRIMYDLTSKPPGTTEWE

SEQ ID NO: 58048 - protein, 354 aa, Homo sapiens
VCALQAASRRALQLSGTPVRQLQKGACPLGLHQLSSPRYKFNFIADVVEKIAPAVVHIELFLRHPLFGRNVPLSSGSGFIMSEAGLIITNAHVVSSNSAAPGRQQLKVQLQNGDSYEATIKDIDKKSDIATIKIHPKKKLPVLLLGHSADLRPGEFVVAIGSPFALQNTVTTGIVSTAQREGRELGLRDSDMDYIQTDAIINYGNSGGPLVNLDGEVIGINTLKVTAGISFAIPSDRITRFLTEFQDKQIKDWKKRFIGIRMRTITPSLVDELKASNPDFPEVSSGIYVQEVAPNSPSQRGGIQDGDIIVKVNGRPLVDSSELQEAVLTESPLLLEVRRGNDDLLFSIAPEVVM

SEQ ID NO: 58049 - protein, 30 aa, Homo sapiens
LCVGCSTVLCQPTGGKARLTEGYSFTRKQH

SEQ ID NO: 58050 - protein, 251 aa, Homo sapiens
LEELERCPTPAMLALLCSCLLLAAGASDAWTGEDSAEPNSDSAEWIRDMYAKVTEIWQEVMQRRDDDGALHAACQVQPSATLDAAQPRVTGVVLFRQLAPRAKLDAFFALEGFPTEPNSSSRAIHVHQFGDLSQGCESTGPHYNPLAVPHPQHPGDFGNFAVRDGSLWRYRAGLAASLAGPHSIVGRAVVVHAGEDDLGRGGNQASVENGNAGRRLACCVVGVCGPGLWERQAREHSERKKRRRESECKAA

SEQ ID NO: 58051 - protein, 43 aa, Homo sapiens
IYFRPLMRLEEYKKEQAINRAGIVQEDVQPPGLKVWSDPFGRK

SEQ ID NO: 58052 - protein, 33 aa, Homo sapiens
RSRSPRRRSPVRRRSRSPGRRRHRSRSSSNSSQ

SEQ ID NO: 58053 - protein, 30 aa, Homo sapiens
LSRKRKLYTLVTYVPVTTFRNLHTVNLDEN

SEQ ID NO: 58054 - protein, 189 aa, Homo sapiens
LAPLCENMPSGKANKPGDVVRAKNGKTIQVDNTDAEGRLILADALCYAHTFNPKVILNAATLTGAMDVALGSGATGVFTNSSWLWNKLFEASIETGDRVWRMPLFEHYTRQVVDCQLADVNNIGKYRSAGACTAAAFLKEFVTHPKWAHLDIAGVMTNKDEVPYLRKGMTGRPTRTLIEFLLRFSQDNA

SEQ ID NO: 58055 - protein, 44 aa, Homo sapiens
MGRLGILGQISAVVSICHSRSWIDGSQGKSRSHSTDSWCKFWIF

SEQ ID NO: 58056 - protein, 12 aa, Homo sapiens
MVGPASTSMALV

SEQ ID NO: 58057 - protein, 16 aa, Homo sapiens
RAQIFANTVDNAFIFL

SEQ ID NO: 58058 - protein, 648 aa, Homo sapiens
IKTYREIVQEKERRERELHEAYKNARSQEEAEGILQQYIERFTISEAVLERLEMPKILERSHSTEPNLSSFLNDPNPMKYLRQQSLPPPKFTATVETTIARASVLDTSMSAGSGSPSKTVTPKAVPMLTPKPYSQPKNSQDVLKTFKVDGKVSVNGETVHREEEKERECPTVAPAHSLTKSQMFEGVARVHGSPLELKQDNGSIEINIKKPNSVPQELAATTEKTEPNSQEDKNDGGKSRKGNIELASSEPQHFTTTVTRCSPTVAFVEFPSSPQLKNDVSEEKDQKKPENEMSGKVELVLSQKVVKPKSPEPEATLTFPFLDKMPEANQLHLPNLNSQVDSPSSEKSPVMTPFKFWAWDPEEERRRQEKWQQEQERLLQERYQKEQDKLKEEWEKAQKEVEEEERRYYEEERKIIEDTVVPFTVSSSSADQLSTSSSMTEGSGTMNKIDLGNCQDEKQDRRWKKSFQGDDSDLLLKTRESDRLEEKGSLTEGALAHSGNPVSKGVHEDHQLDTEAGAPHCGTNPQLAQDPSQNQQTSNPTHSSEDVKPKTLPLDKSINHQIESPSERRKSISGKKLCSSCGLPLGKGAAMIIETLNLYFHIQCFRCGICKGQLGDAVSGTDVRIRNGLLNCNDCYMRSRSAGQPTTL

SEQ ID NO: 58059 - protein, 389 aa, Homo sapiens
KKPENEMSGKVELVLSQKVVKPKSPEPEATLTFPFLDKMPEANQLHLPNLNSQVDSPSSEKSPVMTPQFKFWAWDPEEERRRQEKWQQEQERLLQERYQKEQDKLKEEWEKAQKEVEEEERRYYEEERKIIEDTVVPFTVSSSSADQLSTSSSMTEGSGTMNKIDLGNCQDEKQDRRWKKSFQGDDSDLLLKTRESDRLEEKGSLTEGALAHSGNPVSKGVHEDHQLDTEAGAPHCGTNPQLAQDPSQNQQTSNPTHSSEDVKPKTLPLDKSINHQIESPSERRKKSPREHFQAGPFSPCSPTPPGQSPNRSISGKKLCSSCGLPLGKGAAMIIETLNLYFHIQCFRCGICKGQLGDAVSGTDVRIRNGLLNCNDCYMRSRSAGQPTTL

SEQ ID NO: 58060 - protein, 216 aa, Homo sapiens
LFTVYCSALFVLPLLGLHEAASFYQRALLANALTSALRLHQRLPHFQLSRAFLAQALLEDSCHYLLYSLIFVNSYPVTMSIFPVLLFSLLHAATYTKKVLDARGSNSLPLLRSVLDKLSANQQNILKFIACNEIFLMPATVFMLFSGQGSLLQPFIYYRFLTLRYSSRRNPYCRTLFNELRIVVEHIIMKPACPLFVRRLCLQSIAFISRLAPTVP

SEQ ID NO: 58061 - protein, 41 aa, Homo sapiens
MGALCGFGPLIFIYYIIKTERDRKEKLMQEGKLDRTVHLSY

SEQ ID NO: 58062 - protein, 72 aa, Homo sapiens
ILIDPFHKAIRRNPDTPWITKPVHKHREMRGLTSAGRKSRGLGKGHKFHHTICGSRRAAWRRRNTLQLHRYR

SEQ ID NO: 58063 - protein, 261 aa, Homo sapiens
LNLTEDIGQDDHQTGSLRSCSSSDCFNKVMPPRKKRRPASGDDLSAKKSRHDSMYRKYDSTRIKTEEEAFSSKRCLEWFYEYAGTDDVVGPEGMEKFCEDIGVEPENVVMLVLAWKLDAQNMGYFTLQEWLKGMTSLQCDTTEKLRNTLDYLRSFLNDSTNFKLIYRYAFDFAREKDQRSLDINTAKCMLGLLLGKIWPLFPVFHQFLEQSKYKVINKDQWCNVLEFSRTINLDLSNYDEDGAWPVLLDEFVEWYKDKQMS

SEQ ID NO: 58064 - protein, 658 aa, Homo sapiens
LWSEVNRYGQNGDFTRALKTVNKILQINKDDVTALHCKVVCLIQNGSFKEALNVINTHTKVLANNSLSFEKAYCEYRLNRIENALKTIESANQQTDKLKELYGQVLYRLERYDECLAVYRDLVRNSQDDYDEERKTNLSAVVAAQSNWEKVVPENLGLQEGTHELCYNTACALIGQGQLNQAMKILQKAEDLCRRSLSEDTDGTEEDPQAELAIIHGQMAYILQLQGRTEEALQLYNQIIKLKPTDVGLLAVIANNIITINKDQNVFDSKKKVKLTNAEGVEFKLSKKQLQAIEFNKALLAMYTNQAEQCRKISASLQSQSPEHLLPVLIQAAQLCREKQHTKAIELLQEFSDQHPENAAEIKLTMAQLKISQGNISKACLILRSIEELKHKPGMVSALVTMYSHEEDIDSAIEVFTQAIQWYQNHQPKSPAHLSLIREAANFKLKYGRKKEAISDLQQLWKQNPKDIHTLAQLISAYSLVDPEKAKALSKHLPSSDSMSLKVDVEALENSAGATYIRKKGGKVTGDSQPKEQGQGDLKKKKKKKKGKLPKNYDPKVTPDPERWLPMRERSYYRGRKKGKKKDQIGKGTQGATAGASSELDASKTVSSPPTSPRPGSAATVSASTSNIIPPRHQKPAGAPATKKKQQQKKKKGGKGGW

SEQ ID NO: 58065 - protein, 15 aa, Homo sapiens
KKVIQKILDSGNKKN

SEQ ID NO: 58066 - protein, 393 aa, Homo sapiens [sequence omitted]

SEQ ID NO: 58067 - protein, 234 aa, Homo sapiens
TPLRGLATAEPAACPAANMSFLFGSRSSKTFKPKKNIPEGSHQYELLKHAEATLGSGNLRMAVMLPEGEDLNEWVAVNTVDFFNQINMLYGTITDFCTEESCPVMSAGPKYEYHWADGTNIKKPIKCSAPKYIDYLMTWVQDQLDDETLFPSKIGVPFPKNFMSVAKTILKRLFRVYAHIYHQHFDPVIQLQEEAHLNTSFKHFIFFVQEFNLIDRRELAPLQELIEKLTSKDR

SEQ ID NO: 58068 - protein, 72 aa, Homo sapiens
IYLRGRNEEQGIPLEYLEKLHYKHESWLLHRTLKTNFDYLQEVPILTLDVNEDFKDKYESLVEKVKEFLSTL

SEQ ID NO: 58069 - protein, 98 aa, Homo sapiens
LKQEMTKQKIEYESRIKSLEQRNLTLETEMMSLHDELDQERKKFTMIEIKMRNAERAKEDAEKRNDMLQKEMEQFFSTFGELTVEPRRTERGNTIWIQ

SEQ ID NO: 58070 - protein, 963 aa, Homo sapiens
KMNFLRGVMGGQSAGPQHTEAETIQKLCDRVASSTLLDDRRNAVRALKSLSKKYRLEVGIQAMEHLIHVLQTDRSDSEIIGYALDTLYNIISNEEEEEVEENSTRQSEDLGSQFTEIFIKQQENVTLLLSLLEEFDFHVRWPGVKLLTSLLKQLGPQVQQIILVSPMGVSRLMDLLADSREVIRNDGVLLLQALTRSNGAIQKIVAFENAFERLLDIISEEGNSDGGIVVEDCLILLQNLLKNNNSNQNFFKEGSYIQRMKPWFEVGDENSGWSAQKVTNLHLMLQLVRVLVSPTNPPGATSSCQKAMFQCGLLQQLCTILMATGVPADILTETINTVSEVIRGCQVNQDYFASVNAPSNPPRPAIVVLLMSMVNERQPFVLRCAVLYCFQCFLYKNQKGQGEIVSTLLPSTIDATGNSVSAGQLLCGGLFSTDSLSNWCAAVALAHALQENATQKEQLLRVQLATSIGNPPVSLLQQCTNILSQGSKIQTRVGLLMLLCTWLSNCPIAVTHFLHNSANVPFLTGQIAENLGEEEQLVQGLCALLLGISIYFNDNSLESYMKEKLKQLIEKRIGKENFIEKLGFISKHELYSRASQKPQPNFPSPEYMIFDHEFTKLVKELEGVITKAIYKSSEEDKKEEEVKKTLEQHDNIVTHYKNMIREQDLQLEELRQQVSTLKCQNEQLQTAVTQQVSQIQQHKDQYNLLKIQLGKDNQHQGSYSEGAQMNGIQPEEIGRLREEIEELKRNQELLQSQLTEKDSMIENMKSSQTSGTNEQSSAIVSARDSEQVAELKQELATLKSQLNSQSVEITKLQTEKQELLQKTEAFAKSVEVQGETETIIATKTTDVEGRLSALLQETKELKNEIKALSEERTAIKEQLDSSNSTIAILQTEKDKLELEITDSKKEQDDLLVLLADQDQKILSLKNKLKDLGHPVEEEDELESGDQEDEDDESEDPGKDLDHI

SEQ ID NO: 58071 - protein, 5 aa, Homo sapiens
ISVSH

SEQ ID NO: 58072 - protein, 50 aa, Homo sapiens
ISDLVRCMRLQRHGMVQTEDQYIFCYQVILYVLTRLQAEEEQKQQPQLLK

SEQ ID NO: 58073 - protein, 15 aa, Homo sapiens
ILPKIKAIPQLQGYL

SEQ ID NO: 58074 - protein, 10 aa, Homo sapiens
IRAGSRNGSS

SEQ ID NO: 58075 - protein, 782 aa, Homo sapiens
VAWAERLVRGLRGLWGTRLMEESSTNREKYLKSVLRELVTYLLFLIVLCILTYGMMSSNVYYYTRMMSQLFLDTPVSKTEKTNFKTLSSMEDFWKFTEGSLLDGLYWKMQPSNQTEADNRSFIFYENLLLGVPRIRQLRVRNGSCSIPQDLRDEIKECYDVYSVSSEDRAPFGPRNGTAWIYTSEKDLNGSSHWGIIATYSGAGYYLDLSRTREETAAQVASLKKNVWLDRGTRATFIDFSVYNANINLFCVVRLLVEFPATGGVIPSWQFQPLKLIRYVTTFDFFLAACEIIFCFFIFYYVVEEILEIRIHKLHYFRSFWNCLDVVIVVLSVVAIGINIYRTSNVEVLLQFLEDQNTFPNFEHLAYWQIQFNNIAAVTVFFVWIKLFKFINFNRTMSQLSTTMSRCAKDLFGFAIMFFIIFLAYAQLAYLVFGTQVDDFSTFQECIFTQFRIILGDINFAEIEEANRVLGPIYFTTFVFFMFFILLNMFLAIINDTYSEVKSDLAQQKAEMELSDLIRKGYHKALVKLKLKKNTVDDISESLRQGGGKLNFDELRQDLKGKGHTDAEIEAIFTKYDQDGDQELTEHEHQQMRDDLEKEREDLDLDHSSLPRPMSSRSFPRSLDDSEEDDDEDSGHSSRRRGSISSGVSYEEFQVLVRRVDRMEHSIGSIVSKIDAVIVKLEIMERAKLKRREVLGRLLDGVAEDERLGRDSEIHREQMERLVREELERWESDDAASQISHGLGTPVGLNGQPRPRSSRPSSSQSTEGMEGAGGNGSSNVHV

SEQ ID NO: 58076 - protein, 19 aa, Homo sapiens
RFRFHNPGPIECTKYPKTQ

SEQ ID NO: 58077 - protein, 43 aa, Homo sapiens
ILHIVKDESPAKAEFFQHLIEDRTEAAFSYYEFLLHVQQQICK

SEQ ID NO: 58078 - protein, 34 aa, Homo sapiens
LIHMRVVAQGFVVGAMTVGMGYSMYREFWAKPKP

SEQ ID NO: 58079 - protein, 61 aa, Homo sapiens [sequence omitted]

SEQ ID NO: 58080 - skipped

SEQ ID NO: 58081 - protein, 13 aa, Homo sapiens
IDKLGMLGICFTF

SEQ ID NO: 58082 - protein, 14 aa, Homo sapiens
IKKNRFHINLIQLP

SEQ ID NO: 58083 - protein, 174 aa, Homo sapiens
LKALENDQKVRKEGGKFGFAESIANQRITAFKMEKAPIDTSDVEEKAEEIIAEAEPPSEVVSTPVLWTPGTAQIGEGVENSWGDLEDSEKEDDEGGGDQAIILDGIKMDTGVEVSDIGSQDAPIILSDSEEEEMIILEPDKNPKKIRTQTTSAKQEKAPSKKPVKRRKKKRAAN

SEQ ID NO: 58084 - protein, 30 aa, Homo sapiens
LLVLQTDSEIITGHGHTQINSQELTGFLFL

SEQ ID NO: 58085 - protein, 11 aa, Homo sapiens
LILSPFAFASR

SEQ ID NO: 58086 - protein, 28 aa, Homo sapiens
VPAVATGSRALQLGRRLSPGGVRGDTHP

SEQ ID NO: 58087 - protein, 148 aa, Homo sapiens
TLPALPEDGGSGAFPPGHFKDPKRLYCKNGGFFLRIHPDGRVDGVREKSDPHIKLQLQAEERGVVSIKGVCANRYLAMKEDGRLLASKCVTDECFFFERLESNNYNTYRSRKYTSWYVALKRTGQYKLGSKTGPGQKAILFLPMSAKS

SEQ ID NO: 58088 - protein, 20 aa, Homo sapiens
MKEEVYFRNLLMRVKENKCV

SEQ ID NO: 58089 - protein, 167 aa, Homo sapiens
MLLSLAAFSVISVVSYLILALLSVTISFRIYKSVIQAVQKSEEGHPIKAYLDVDITLSSEAFHNYMNAAVVHINRALKLIILLFLVEDLVDSLKQAVFMWLMTYVGAFFNGITLLILAELLIFSVPIVYEKYKTQIDHYVGIARHQTKSIVEKIQAKLPGIAKKKAE

SEQ ID NO: 58090 - protein, 603 aa, Homo sapiens
LEKALKPANMLERLKIYEEAWTKYPRGLVPRRLPLNFLSGEKFKECLDKFLRMNFSKGCPPVFNTLRSLYKDKEKVAIIEELVVGYETSLKSCRLFNPNDDGKEEPPTTLLWVQYYLAQHYDKIGQPSIALEYINTAIESTPTLIELFLVKAKIYKHAGNIKEAARWMDEAQALDTADRFINSKCAKYMLKANLIKEAEEMCSKFTREGTSAVENLNEMQCMWFQTECAQAYKAMNKFGEALKKCHEIERHFIEITDDQFDFHTYCMRKITLRSYVDLLKLEDVLRQHPFYFKAARIAIEIYLKLHDNPLTDENKEHEADTANMSDKELKKLRNKQRRAQKKAQIEEEKKNAEKEKQQRNQKKKKDDDDEEIGGPKEELIPEKLAKVETPLEEAIKFLTPLKNLVKNKIETHLFAFEIYFRKEKFLLMLQSVKRAFAIDSSHPWLHECMIRLFNTAVCESKDLSDTVRTVLKQEMNRLFGATNPKNFNETFLKRNSDSLPHRLSAAKMVYYLDPSSQKRAIELATTLDESLTNRNLQTCMEVLEALYDGSLGDCKEAAEIYRANCHKLFPYALAFMPPGYEEDMKITVNGDSSAEAEELANEI

SEQ ID NO: 58091 - protein, 111 aa, Homo sapiens
LNGIDLTPVQDTPVASRKEDTYVHFNVDIELQKHVEKLIKGAAIFFEFKHYKPKKRFTSTKCFAFMEMDEIKPGPIVIELYKKPTDFKRKKLQLLTKKTLYLRLHQTLHKE

SEQ ID NO: 58092 - skipped

SEQ ID NO: 58093 - protein, 389 aa, Homo sapiens
KPRLRSYRVTLRKESTMAQESPKNSAAEIPVTSNGEVDDSREHSFNRDLKHSLPSGLGLSETQITSHGFDNTKEGVIEAGAFQGSPAPPLPSVMSPSRVAASRLAQQGSDLIVPAGGQRTQTKSGPVILADEIKNPAMEKLELVRKWSLNTYKCTRQIISEKLGRGSRTVDLELEAQIDILRDNKKKYENILKLAQTLSTQLFQMVHTQRQLGDAFADLSLKSLELHEEFGYNADTQKLLAKNGETLLGAINFFIASVNTLVNKTIEDTLMTVKQYESARIEYDAYRTDLEELNLGPRDANTLPKIEQSQHLFQAHKEKYDKMRNDVSVKLKFLEENKVKVLHNQLVLFHNAIAAYFAGNQKQLEQTLKQFHIKLKTPGVDAPSWLEEQ

SEQ ID NO: 58094 - protein, 23 aa, Homo sapiens
IGGGQTKTFAPEEISAMVLTKMQ

SEQ ID NO: 58095 - protein, 164 aa, Homo sapiens
LKNEKALRLNLVGEKLQWFQNHLDPQKKRYSKKDACELIERYLNRFSSELEQIELHNSIRDRQGRRHCSRETVIKQTMERERQQFEGYGLEIPDILNASNLKTFREWDFDLKKLPNIKMRKICANDAIPKTCKRKTIITVDQDLGELELNDESSDSDEEMTAVA

SEQ ID NO: 58096 - protein, 136 aa, Homo sapiens
KIFKSDGLRGLYQGFNVSVQGIIIYRAAYFGVYDTAKGMLPDPKNVHIFVSWMIAQSVTAVAGLVSYPFDTVRRRMMMQSGRKGADIMYTGTVDCWRKIAKDEGAKAFFKGAWSNVLRGMGGAFVLVLYDEIKKYV

SEQ ID NO: 58097 - protein, 7 aa, Homo sapiens
RPMRLEP

SEQ ID NO: 58098 - protein, 2500 aa, Homo sapiens
ITSLNRNSLTNRRNQSPAPPAALPAELQTTPESVQLQDSWVLGSNVPLESRHFLFKTGTGTTPLFSTATPGYTMASGSVYSPPTRPLPRNTLSRSAFKFKKSSKYCSWKCTALCAVGVSVLLAILLSYFIAMHLFGLNWQLQQTENDTFENGKVNSDTMPTNTVSLPSGDNGKLGGFTQENNTIDSGELDIGRRAIQEIPPGIFWRSQLFIDQPQFLKFNISLQKDALIGVYGRKGLPPSHTQYDFVELLDGSRLIAREQRSLLETERAGRQARSVSLHEAGFIQYLDSGIWHLAFYNDGKNAEQVSFNTIVIESVVECPRNCHGNGECVSGTCHCFPGFLGPDCSRAACPVLCSGNGQYSKGRCLCFSGWKGTECDVPTTQCIDPQCGGRGICIMGSCACNSGYKGESCEEADCIDPGCSNHGVCIHGECHCSPGWGGSNCEILKTMCPDQCSGHGTYLQESGSCTCDPNWTGPDCSNEICSVDCGSHGVCMGGTCRCEEGWTGPACNQRACHPRCAEHGTCKDGKCECSQGWNGEHCTIEGCPGLCNSNGRCTLDQNGWHCVCQPGWRGAGCDVAMETLCTDSKDNEGDGLIDCMDPDCCLQSSCQNQPYCRGLPDPQDIISQSLQSPSQQAAKSFYDRISFLIGSDSTHVIPGESPFNKSLASVIRGQVLTADGTPLIGVNVSFFHYPEYGYTITRQDGMFDLVANGGASLTLVFERSPFLTQYHTVWIPWNVFYVMDTLVMKKEENDIPSCDLSGFVRPNPIIVSSPLSTFFRSSPEDSPIIPETQVLHEETTIPGTDLKLSYLSSRAAGYKSVLKITMTQSIIPFNLMKVHLMVAVVGRLFQKWFPASPNLAYTFIWDKTDAYNQKVYGLSEAVVSVGYEYESCLDLTLWEKRTAILQGYELDASNMGGWTLDKHHVLDVQNGILYKGNGENQFISQQPPVVSSIMGNGRRRSISCPSCNGQADGNKLLAPVALACGIDGSLYVGDFNYVRRIFPSGNVTSVLELSSNPAHRYYLATDPVTGDLYVSDTNTRRIYRPKSLTGAKDLTKNAEVVAGTGEQCLPFDEARCGDGGKAVEATLMSPKGMAVDKNGLIYFVDGTMIRKVDQNGIISTLLGSNDLTSARPLTCDTSMHISQVRLEWPTDLAINPMDNSIYVLDNNVVLQITENRQVRIAAGRPMHCQVPGVEYPVGKHAVQTTLESATAIAVSYSGVLYITETDEKKINRIRQVTTDGEISLVAGIPSECDCKNDANCDCYQSGDGYAKDAKLSAPSSLAASPDGTLYIADLGNIRIRAVSKNKPLLNSMNFYEVASPTDQELYIFDINGTHQYTVSLVTGDYLYNFSYSNDNDITAVTDSNGNTLRIRRDPNRMPVRVVSPDNQVIWLTIGTNGCLKSMTAQGLELVLFTYHGNSGLLATKSDETGWTTFFDYDSEGRLTNVTFPTGVVTNLHGDMDKAITVDIESSSREEDVSITSNLSSIDSFYTMVQDQLRNSYQIGYDGSLRIIYASGLDSHYQTEPHVLAGTANPTVAKRNMTLPGENGQNLVEWRFRKEQAQGKVNVFGRKLRVNGRNLLSVDFDRTTKTEKIYDDHRKFLLRIAYDTSGHPTLWLPSSKLMAVNVTYSSTGQIASIQRGTTSEKVDYDGQGRIVSRVFADGKTWSYTYLEKSMVLLLHSQRQYIFEYDMWDRLSAITMPSVARHTMQTIRSIGYYRNIYNPPESNASIITDYNEEGLLLQTAFLGTSRRVLFKYRRQTRLSEILYDSTRVSFTYDETAGVLKTVNLQSDGFICTIRYRQIGPLIDRQIFRFSEDGMVNARFDYSYDNSFRVTSMQGVINETPLPIDLYQFDDISGKVEQFGKFGVIYYDINQIISTAVMTYTKHFDAHGRIKEIQYEIFRSLMYWITIQYDNMGRVTKREIKIGPFANTTKYAYEYDVDGQLQTVYLNEKIMWRYNYDLNGNLHLLNPSNSARLTPLRYDLRDRITRLGDVQYRLDEDGFLRQRGTEIFEYSSKGLLTRVYSKGSGWTVIYRYDGLGRRVSSKTSLGQHLQFFYADLTYPTRITHVYNHSSSEITSLYYDLQGHLFAMEISSGDEFYIASDNTGTPLAVFSSNGLMLKQIQYTAYGEIYFDSNIDFQLVIGFHGGLYDPLTKLIHFGERDYDILAGRWTTPDIEIWKRIGKDPAPFNLYMFRNNNPASKIHDVKDYITDVNSWLVTFGFHLHNAIPGFPVPKFDLTEPSYELVKSQQWDDIPPIFGVQQQVARQAKAFLSLGKMAEVQVSRRRAGGAQSWLWFATVKSLIGKGVMLAVSQGRVQTNVLNIANEDCIKVAAVLNNAFYLENLHFTIEGKDTHYFIKTTTPESDLGTLRLTSGRKALENGINVTVSQSTTVVNGRTRRFADVEMQFGALALHVRYGMTLDEEKARILEQARQRALARAWAREQQRVRDGEEGARLWTEGEKRQLLSAGKVQGYDGYYVLSVEQYPELADSANNIQFLRQSEIGRR

SEQ ID NO: 58099 - protein, 110 aa, Homo sapiens
ILASIVVTYYVDFFKTLKENFHTSSWFLCGSALLLVSLSIAFYCIVYLEWYCGIGEYDVKYPALIPITTASFIAAGICFNIALWHVWSFFTPLLLFTQFMGVVMFITLLG

SEQ ID NO: 58100 - protein, 51 aa, Homo sapiens
IKKLRKKVLAQYYTVTDEHHRSEEELLVIFNKKISKNPTFKLLKDKVKLVK

SEQ ID NO: 58101 - protein, 96 aa, Homo sapiens
INEMREDIASLIREHGRAYLRTRSKLWEMDNMLIQIKTQVEASEESALNHVQHPSGEADERVSELCEKAEEKAKEIAKMAEMLVELVWRIERSESS

SEQ ID NO: 58102 - protein, 168 aa, Homo sapiens
KADPPATEKTLLEEKVKLEEQLKETVEKYKRALADTENLRQRSQKLVEEAKLYGIQAFCKDLLEVADVLEKATQCVPKEEIKDDNPHLKNLYEGLVMTEVQIQKVFTKHGLLKLNPVGAKFDPYEHEALFHTPVEGKEPGTVALVSKVGYKLHGRTLRPALVGVVKEA

SEQ ID NO: 58103 - protein, 9 aa, Homo sapiens
RISPKDFIM

SEQ ID NO: 58104 - protein, 126 aa, Homo sapiens
IAKFFKAIVGKNLPDEEIFQQLNQLNSLHQETIMKCVKSRKDEIKQALSREIVAISSAQLQDFDWQVKLALSSDKIAALRMPLLSLHLDVKENGEVKPYSIEMSREELQNLIQSLEAANKVVLQLK

SEQ ID NO: 58105 - protein, 210 aa, Homo sapiens
KTFNMDEYVGLPRNHPESYHSYMWNNFFKHIDIDPNNAHILDGNAADLQAECDAFENKIKEAGGIDLFVGGIGPDGHIAFNEPGSSLVSRTRLKTLAMDTILANAKYFDGDLSKVPTMALTVGVGTVMDAREVMILITGAHKAFALYKAIEEGVNHMWTVSAFQQHPRTIFVCDEDATLELRVKTVKYFKGLMHVHNKLVDPLFSMKDGN

SEQ ID NO: 58106 - protein, 247 aa, Homo sapiens
LFILAVINLIITLVIWAVIRIGPNGCDSMEFHESGLLRFKQVSDMGVIHPLYKSTVGGRRNENLVITGNNQPIVFQQGTTKLSVENNKTSITSDIGMQFFDPRTQNILFSTDYETHEFHLPSGVKSLNVQKASTERITSNATSDLNIKVDGRAIVRGNEGVFIMGKTIEFHMGGNMELKAENSIILNGSVMVSTTRLPSSSSGDQLGSGDWVRYKLCMCADGTLFKVQVTSQNMGCQISDNPCGNTH

SEQ ID NO: 58107 - protein, 98 aa, Homo sapiens
INRVNSCLKKNLPVNVRWLLCGCLCCCCTLGCSMWPVICLSKRTRRSIEKLLEWENNRLYHKLCLHWRLSKRKCETNNMMEYVILIEFLPKTPIFRPD

SEQ ID NO: 58108 - protein, 21 aa, Homo sapiens
IDGDEDLPGPPVRYYFSHDTD

SEQ ID NO: 58109 - protein, 355 aa, Homo sapiens
LEDLPPPPEYELAPSKLEEEVDDVFLIRAQGLPWSCTMEDVLNFFSDCRIRNGENGIHFLLNRDGKRRGDALIEMESEQDVQKALEKHRMYMGQRYVEVYEINNEDVDALMKSLQVKSSPVVNDGVVRLRGLPYSCNEKDIVDFFAGLNIVDITFVMDYRGRRKTGEAYVQFEEPEMANQALLKHREEIGNRYIEIFPSRRNEVRTHVGSYKGKKIASFPTAKYITEPEMVFEEHEVNEDIQPMTAFESEKEIELPKEVPEKLPEAADFGTTSSLHFVHMRGLPFQANAQDIINFFAPLKPVRITMEYSSSGKATGEADVHFETHEDAVAAMLKDRSHVHHRYIELFLNSCPKGK

SEQ ID NO: 58110 - protein, 90 aa, Homo sapiens
MAAFRKGHVKVVRYLVKEVNQFPSDSECMRYIATITDKEMLKKCHLCMESIVQAKDRQAAEANKNASILLEELDLEKADYNIIPIYSHGE

SEQ ID NO: 58111 - protein, 8 aa, Homo sapiens
LGFYRFWK

SEQ ID NO: 58112 - protein, 537 aa, Homo sapiens
TNSRLSGFRGFRVVGGRGRRAIRTRRTRSSATLLTSARRTRRRRWLEHLTLCSKEMVMEKPSPLLVGREFVRQYYTLLNKAPEYLHRFYGRNSSYVHGGVDASGKPQEAVYGQNDIHHKVLSLNFSECHTKIRHVDAHATLSDGVVVQVMGLLSNSGQPERKFMQTFVLAPEGSVPNKFYVHNDMFRYEDEVFGDSEPELDEESEDEVEEEQEERQPSPEPVQENANSGYYEAHPVTNGIEEPLEESSHEPEPEPESETKTEELKPQVEEKNLEELEEKSTTPPPAEPVSLPQEPPKAFSWASVTSKNLPPSGTVSSSGIPPHVKAPVSQPRVEAKPEVQSQPPRVREQRPRERPGFPPRGPRPGRGDMEQNDSDNRRIIRYPDSHQLFVGNLPHDIDENELKEFFMSFGNVVELRINTKGVGGKLPNFGFVVFDDSEPVQRILIAKPIMFRGEVRLNVEEKKTRAARERETRGGGDDRRDIRRNDRGPGGPRGIVGGGMMRDRDGRGPPPRGGMAQKLGSGRGTGQMEGRFTGQRR

SEQ ID NO: 58113 - protein, 107 aa, Homo sapiens
IEIDSDEEPRGELLSLRDIERLHKKPKSDKETRLATAMAGKTDRKEFVRKKTKTNPFSSSTNKEKKKQKNFMMMRYSQNVRSKNKRSFREKQLALRDALLKKRKRMK

SEQ ID NO: 58114 - protein, 440 aa, Homo sapiens
LDKSGSVANNWIEIYNFVQQLAERFVSPEMRLSFIVFSSQATIILPLTGDRGKISKGLEDLKRVSPVGETYIHEGLKLANEQIQKAGGLKTSSIIIALTDGKLDGLVPSYAEKEAKISRSLGASVYCVGVLDFEQAQLERIADSKEQVFPVKGGFQALKGIINSILAQSCTEILELQPSSVCVGEEFQIVLSGRGFMLGSRNGSVLCTYTVNETYTTSVKPVSVQLNSMLCPAPILNKAGETLDVSVSFNGGKSVISGSLIVTATECSNGIAAIIVILVLLLLLGIGLMWWFWPLCCKVVIKDPPPPPAPAPKEEEEEPLPTKKWPTVDASYYGGRGVGGIKRMEVRWGDKGSTEEGARLEKAKNAVVKIPEETEEPIRPRPPRPKPTHQPPQTKWYTPIKGRLDALWALLRRQYDRVSLMRPQEGDEGRCINFSRVPSQ

SEQ ID NO: 58115 - protein, 39 aa, Homo sapiens
IESRVRELSKLAETTDKVKQGFWKEFETLQQQECKLLYS

SEQ ID NO: 58116 - protein, 33 aa, Homo sapiens
LDALITHVLPFEKINEGFDLLHSGKSIRTVLTF

SEQ ID NO: 58117 - protein, 176 aa, Homo sapiens
IFFGGGFPSGSVHSFSNGRAGYSQQHQHRHSGHEREEERGDGGFSVFIQLMPIIVLILVSLLSQLMVSNPPYSLYPRSGTGQTIKMQTENLGVVYYVNKDFKNEYKGMLLQKVEKSVEEDYVTNIRNNCWKERQQKTDMQYAAKVYRDDRLRRKADALSMDNCKELERLTSLYKGG

SEQ ID NO: 58118 - protein, 23 aa, Homo sapiens
ITIPVYVFFHLWTWMGIKLFRHN

SEQ ID NO: 58119 - protein, 77 aa, Homo sapiens [sequence omitted]

SEQ ID NO: 58120 - protein, 805 aa, Homo sapiens
LDNWTYSKEFKIPFEISKWQKVNLILEGVDTVSKILFNEVTIGETDNMFNRYSFDITNVVRDVNSIELRFQSAVLYAAQQSKAHTRYQVPPDCPPLVQKGECHVNFVRKEQCSFSWDWGPSFPTQGIWKDVRIEAYNICHLNYFTFSPIYDKSAQEWNLEIESTFDVVSSKPVGGQVIVAIPKLQTQQTYSIELQPGKRIVELFVNISKNITVETWWPHGHGNQTGYNMTVLFELDGGLNIEKSAKVYFRTVELIEEPIKGSPGLSFYFKINGFPIFLKGSNWIPADSFQDRVTSELLRLLLQSVVDANMNTLRVWGGGIYEQDEFYELCDELGIMVWQDFMFACALYPTDQGFLDSVTAEVAYQIKRLKSHPSIIIWSGNNENEEALMMNWYHISFTDRPIYIKDYVTLYVKNIRELVLAGDKSRPFITSSPTNGAETVAEAWVSQNPNSNYFGDVHFYDYISDCWNWKVFPKARFASEYGYQSWPSFSTLEKVSSTEDWSFNSKFSLHRQHHEGGNKQMLYQAGLHFKLPQSTDPLRTFKDTIYLTQVMQAQCVKTETEFYRRSRSEIVDQQGHTMGALYWQLNDIWQAPSWASLEYGGKWKMLHYFAQNFFAPLLPVGFENENTFYIYGVSDLHSDYSMTLSVRVHTWSSLEPVCSRVTERFVMKGGEAVCLYEEPVSELLRRCGNCTRESCVVSFYLSADHELLSPTNYHFLSSPKEAVGLCKAQITAIISQQGDIFVFDLETSAVAPFVWLDVGSIPGRFSDNGFLMTEKTRTILFYPWEPTSKNELEQSFHVTSLTDIY

SEQ ID NO: 58121 - protein, 92 aa, Homo sapiens
VIGLTKSVAADFIQQGIRCNCVCPGTVDTPSLQERIQARGNPEEARNDFLKRQKTGRFATAEEIAMLCVYLASDESAYVTGNPVIIDGGWSL

SEQ ID NO: 58122 - skipped

SEQ ID NO: 58123 - protein, 179 aa, Homo sapiens
LALLTGGGEMLLNVALVALVLLGAYRLWVRWGRRGLGAGAGAGEESPATSLPRMKKRDFSLEQLRQYDGSRNPRILLAVNGKVFDVTKGSKFYGPAGPYGIFAGRDASRGLATFCLDKDALRDEYDDLSDLNAVQMESVREWEMQFKEKYDYVGRLLKPGEEPSEYTDEEDTKDHNKQD

SEQ ID NO: 58124 - protein, 6 aa, Homo sapiens
MRQRSK

SEQ ID NO: 58125 - protein, 1067 aa, Homo sapiens
LPALGAEPPALGSPRGAGAGTDFFCRIILWNDIFIMSQQGYVATPPYSQPQPGIGLSPPHYGHYGDPSHTASPTGMMKPAGPLGATATRGMLPPGPPPPGPHQFGQNGAHATGHPPQRFPGPPPVNNVASSHAPYQPSAQSSYPGPISTSSVTQLGSQLSAMQINSYGSGMAPPSQGPPGPLSATSLQTPPRPPQPSILQPGSQVLPPPPTTLNGPGASPLPLPMYRPDGLSGPPPPNAQYQPPPLPGQTLGAGYPPQQANSGPQMAGAQLSYPGGFPGGPAQMAGPPQPQKKLDPDSIPSPIQVIENDRASRGGQVYATNTRGQIPPLVTTDCMIQDQGNASPRFIRCTTYCFPCTSDMAKQAQIPLAAVIKPFATIPSNESPLYLVNHGESGPVRCNRCKAYMCPFMQFIEGGRRYQCGFCNCVNDVPPFYFQHLDHIGRRLDHYEKPELSLGSYEYVATLDYCRKSKPPNPPAFIFMIDVSYSNIKNGLVKLICEELKTMLEKIPKEEQEETSAIRVGFITYNKVLHFFNVKSNLAQPQMMVVTDVGEVFVPLLDGFLVNYQESQSVIHNLLDQIPDMFADSNENETVFAPVIQAGMEALKAADCPGKLFIFHSSLPTAEAPGKLKNRDDKKLVNTDKEKILFQPQTNVYDSLAKDCVAHGCSVTLFLFPSQYVDVASLGLVPQLTGGTLYKYNNFQMHLDRQQFLNDLRNDIEKKIGFDAIMRVRTSTGFRATDFFGGILMNNTTDVEMAAIDCDKAVTVEFKHDDKLSEDSGALIQCAVLYTTISGQRRLRIHNLGLNCSSQLADLYKSCETDALINFFAKSAFKAVLHQPLKVIREILVNQTAHMLACYRKNCASPSAASQLILPDSMKVLPVYMNCLLKNCVLLSRPEISTDERAYQRQLVMTMGVADSQLFFYPQLLPIHTLDVKSTMLPAAVRCSESRLSEEGIFLLANGLHMFLWLGVSSPPELIQGIFNVPSFAHINTDMTLLPEVGNPYSQQLRMIMGIIQQKRPYSMKLTIVKQREQPEMVFRQFLVEDKGLYGGSSYVDFLCCVHKEICQLLN

SEQ ID NO: 58126 - protein, 69 aa, Homo sapiens
RSEMEVDAPGVDGRDGLRERRGFSEGGRQNFDVRPQSGANGLPKHSYWLDLWLFILFDVVVFLFVYFLP

SEQ ID NO: 58127 - protein, 14 aa, Homo sapiens
IESTMHTQVFLSSN

SEQ ID NO: 58128 - protein, 23 aa, Homo sapiens
LWIYLIKQHNEDILEYKRRNGLE

SEQ ID NO: 58129 - protein, 382 aa, Homo sapiens
TGGSRAAPSWAVSPAAMDSDDEMVEEAVEGHLDDDGLPHGFCTVTYSSTDRFEGNFVHGEKNGRGKFFFFDGSTLEGYYVDDALQGQGVYTYEDGGVLQGTYVDGELNGPAQEYDTDGRLIFKGQYKDNIRHGVCWIYYPDGGSLVGEVNEDGEMTGEKIAYVYPDERTALYGKFIDGEMIEGKLATLMSTEEGRPHFELMPGNSVYHFDKSTSSCISTNALLPDPYESERVYVAESLISSAGEGLFSKVAVGPNTVMSFYNGVRITHQEVDSRDWALNGNTLSLDEETVIDVPEPYNHVSKYCASLGHKANHSFTPNCIYDMFVHPRFGPIKCIRTLRAVEADEELTVAYGYDHSPPGKSGPEAPEWYQVELKAFQATQQK

SEQ ID NO: 58130 - protein, 16 aa, Homo sapiens
LLEHKKCHTVPTGGLK

SEQ ID NO: 58131 - protein, 20 aa, Homo sapiens
LLEHKKCHTVPTGGLNSGQW

SEQ ID NO: 58132 - protein, 4 aa, Homo sapiens
KCPP

SEQ ID NO: 58133 - protein, 206 aa, Homo sapiens
IRIRFVSDEYFPSEPGFCIHYNIVMPQFTEAVSPSVLPPSALPLDLLNNAITAFSTLEDLIRYLEPERWQLDLEDLYRPTWQLLGKAFVFGRKSRVVDLNLLTEEVRLYSCTPRNFSVSIREELKRTDTIFWPGCLLVKRCGGNCACCLHNCNECQCVPSKVTKKYHEVLQLRPKTGVRGLHKSLTDVALEHHEECDCVCRGSTGG

SEQ ID NO: 58134 - protein, 5 aa, Homo sapiens
MYVFH

SEQ ID NO: 58135 - protein, 237 aa, Homo sapiens
ITTVPTPHLDGKHVVFGQVIKGIGVARILENVEVKGEKPAKLCVIAECGELKEGDDGGIFPKDGSGDSHPDFPEDADIDLKDVDKILLITEDLKNIGNTFFKSQNWEMAIKKYAEVLRYVDSSKAVIETADRAKLQPIALSCVLNIGACKLKMSNWQGAIDSCLEALELDPSNTKALYRRAQGWQGLKEYDQALADLKKAQGIAPEDKAIQAELLKVKQKIKAQKDKEKAVYAKMFA

SEQ ID NO: 58136 - protein, 219 aa, Homo sapiens
ISFANHTSCRCMSKLDVYRQVHSIIRRSLPATLPQCQAANKTCPTNYMWNNHICRCLAQEDFMFSSDAGDDSTDGFHDICGPNKELDEETCQCVCRAGLRPASCGPHKELDRNSCQCVCKNKLFPSQCGANREFDENTCQCVCKRTCPRNQPLNPGKCACECTESPQKCLLKGKKFHHQTCSCYRRPCTNRQKACEPGFSYSEEVCRCVPSYWKRPQMS

SEQ ID NO: 58137 - protein, 4 aa, Homo sapiens
MDVT

SEQ ID NO: 58138 - protein, 533 aa, Homo sapiens
IMDQFGDILEGEVDHSFFDSDFEEGKKCETNSVFDKQNDDPKERIDKDTKNVNSNTGMQTTENYLTEKGNERNVKFPPEHPVENDVTQTVSSFSLPASSRSKKLCDVTTGLKIHVSIPNRIPKIVKEGEDDYYTDGEESSDDGKKYHVKSKSAKPSTNVKKSIRKKYCKVSSSSSSSLSSSSSGSGTDCLDAGSDSHLSDSSPSSKSSKKHVSGITLLSPKHKYKSGIKSTETQPSSTTPKCGHYPEESEDTVTDVSPLSTPDISPLQSFELGIANDQKVKIKKQENVSQEIYEDVEDLKNNSKYLKAAKKGKEKHEPDVSSKSSSVLDSSLDHRHKQKVLHDTMDLNHLLKAFLQLDKKGPQKHHFDQPSVAPGKNYSFTREEVRQIDRENQRLLKELSRQAEKPGSKSTIPRSADHPPKLYHSALNRQKEQQRIERENLALLKRLEAVKPTVGMKRSEQLMDYHRNMGYLNSSPLSRRARSTLGQYSPLRASRTSSATSGLSCRSERSAVDPSSGHPRRRPKPPNVRTAWL

SEQ ID NO: 58139 - protein, 20 aa, Homo sapiens
LWYMDFLQIFTVLVNPISMT

SEQ ID NO: 58140 - protein, 23 aa, Homo sapiens
MGVLGLRHPEMINSQRRQWHPWT

SEQ ID NO: 58141 - protein, 17 aa, Homo sapiens
MTMSTILSKKKQCLRNI

SEQ ID NO: 58142 - protein, 87 aa, Homo sapiens
LKTAMSTSHVAEPAENEQDEQDENGAEASADLRADAMAKDRSEEECTTEAEKNERVQKHLKALTSELASARDESKKTANDMIHAENM

SEQ ID NO: 58143 - protein, 7 aa, Homo sapiens
MRLDTVQ

SEQ ID NO: 58144 - protein, 36 aa, Homo sapiens
LDPQRRVHVKCRTYHSQLVTRGRAAPARARAVPACH

SEQ ID NO: 58145 - protein, 11 aa, Homo sapiens
RRHWRRTKLGL

SEQ ID NO: 58146 - protein, 8 aa, Homo sapiens
LWSLRCDP

SEQ ID NO: 58147 - protein, 11 aa, Homo sapiens
MYITDAQVYTR

SEQ ID NO: 58148 - protein, 365 aa, Homo sapiens
VAPAYAKMGEMMLALFRHHHWSRAALVYSDDKLERNCYFTLEGVHEVFQEEGLHTSIYSFDETKDLDLEDIVRNIQASERVVIMCASSDTIRSIMLVAHRHGMTSGDYAFFNIELFNSSSYGDGSWKRGDKHDFEAKQAYSSLQTVTLLRTVKPEFEKFSMEVKSSVEKQGLNMEDYVNMFVEGFHDAILLYVLALHEVLRAGYSKKDGGKIIQQTWNRTFEGIAGQVSIDANGDRYGDFSVIAMTDVEAGTQEVIGDYFGKEGRFEMRPNVKYPWGPLKLRIDENRIVEHTNSSPCKSSGGLEESAVTGIVVGALLGAGLLMAFYFFRKKYRITIERRTQQEESNLGKHRELREDSIRSHFSVA

SEQ ID NO: 58149 - protein, 292 aa, Homo sapiens
ILIFSSRGINFRTRHLMQDLRMLMPHSKADTKMDRKDKLFVINEVCEMKNCNKCIYFEAKKKQDLYMWLSNSPHGPSAKFLVQNIHTLAELKMTGNCLKGSRPLLSFDPAFDELPHYALLKELLIQIFSTPRYHPKSQPFVDHVFTFTILDNRIWFRNFQIIEEDAALVEIGPRFVLNLIKIFQGSFGGPTLYENPHYQSPNMHRRVIRSITAAKYREKQQVKDVQKLRKKEPKTLLPHDPTADVFVTPAEEKPIEIQWVKPEPKVDLKARKKRIYKRQRKMKQRMDSGKTK

SEQ ID NO: 58150 - protein, 196 aa, Homo sapiens
LISFLSEPEILVKENNMHPKHCNLLGDELLECLSWRRGALLYMYCHSLTKRREWLLRKSSLLKKYLLDGISYLLQMLNYRCPIQLNEGVSFQDLDTAKLLSAGIFSDIHLLAMMYSGEMCYWGSKYCADQQPENHEVDTSVSGAGCTTYKEPLDFREVGEKILKKYVSVCEGPLKEQEWNTTNAKQILNFFHHRCN

SEQ ID NO: 58151 - protein, 6 aa, Homo sapiens
LMVRPF

SEQ ID NO: 58152 - protein, 61 aa, Homo sapiens
LTTQADQNNPRKNICWGTQSKPLYETIEDNDVKGFNDDVLLQIVHFLLNRPKEEKSQLLEN

SEQ ID NO: 58153 - protein, 221 aa, Homo sapiens
VNIPRKRKGNCSQHDRALERFYEQVVQAIQRHIHFDVVKCILVASPGFVREQFCDYLFQQAVKTDNKLLLENRSKFLQVHASSGHKYSLKEALCDPTVASRLSDTKAAGEVKALDDFYKMLQHEPDRAFYGLKQVEKANEAMAIDTLLISDELFRHQDVATRSRYVRLVDSVKENAGTVRIFSSLHVSGEQLSQLTGVAAILRFPVPELSDQEGDSSSEED

SEQ ID NO: 58154 - protein, 300 aa, Homo sapiens
LYKTELSKEECCSTGRLSTSWTEEDVNDNTLFKWMIFNGGAPNCIPCKETCENVDCGPGKKCRMNKKNKPRCVCAPDCSNITWKGPVCGLDGKTYRNECALLKARCKEQPELEVQYQGRCKKTCRDVFCPGSSTCVVDQTNNAYCVTCNRICPEPASSEQYLCGNDGVTYSSACHLRKATCLLGRSIGLAYEGKCIKAKSCEDIQCTGGKKCLWDFKVGRGRCSLCDELCPDSKSDEPVCASDNATYASECAMKEAACSSGVLLEVKHSGSCNSISEDTEEEEEDEDQDYSFPISSILEW

SEQ ID NO: 58155 - protein, 19 aa, Homo sapiens
INSLRLKEYHRLQSKVTAK

SEQ ID NO: 58156 - protein, 59 aa, Homo sapiens
IQDRCNTISFATLAEIHHFHQIRVRDFKSQMQHFLQQQIIFFQKVTQKLEEALHKYDSV

SEQ ID NO: 58157 - protein, 17 aa, Homo sapiens
ISGITVNGYVNGIKHKC

SEQ ID NO: 58158 - protein, 615 aa, Homo sapiens
IDCLSDEDKKLPQVEHVLPLLKRGIGIHHGGLLPILKETIEILFSEGLIKALFATETFAMGINMPARTVLFTNARKFDGKDFRWISSGEYIQMSGRAGRRGMDDRGIVILMVDEKMSPTIGKQLLKGSADPLNSAFHLTYNMVLNLLRVEEINPEYMLEKSFYQFQHYRAIPGVVEKVKNSEEQYNKIVIPNEESVVIYYKIRQQLAKLGKEIEEYIHKPKYCLPFLQPGRLVKVKNEGDDFGWGVVVNFSKKSNVKPNSGELDPLYVVEVLLRCSKESLKNSATEAAKPAKPDEKGEMQVVPVLVHLLSAISSVRLYIPKDLRPVDNRQSVLKSIQEVQKRFPDGIPLLDPIDDMGIQDQGLKKVIQKVEAFEHRMYSHPLHNDPNLETVYTLCEKKAQIAIDIKSAKRELKKARTVLQMDELKCRKRVLRRLGFATSSDVIEMKGRVACEISSADELLLTEMMFNGLFNDLSAEQATALLSCFVFQENSSEMPKLTEQLAGPLRQMQECAKRIAKVSAEAKLEIDEETYLSSFKPHLMDVVYTWATGATFAHICKMTDVFEGSIIRCMRRLEELLRQMCQAAKAIGNTELENKFAEGITKIKRDIVFAASLYL

SEQ ID NO: 58159 - protein, 19 aa, Homo sapiens
KKRMRRLKRKRRKMRQRSK

SEQ ID NO: 58160 - protein, 12 aa, Homo sapiens
KKLKKQKLMARE

SEQ ID NO: 58161 - protein, 26 aa, Homo sapiens
IFKHAVAGCIISLLWFFGLTLCGPLR

SEQ ID NO: 58162 - protein, 812 aa, Homo sapiens
KISEPEAEISPGSLPVTANMKASENLKHIVNHDDVFEESEELSSDEEMKMAEMRPPLIETSINQPKVVALSNNKKDDTKETDSLSDEVTHNSNQNNSNCSSPSRMSDSVSLNTDSSQDTSLCSPVKQTHIDINSKIRQEDENFNSLLQNGDILNSSTEEKFKAHDKKDFNLPEYDLNVEERLVLIEKSVDSTATADDTHKLDHINMNLNKLITNDTFQPEIMERSKTQDIVLGTSFLSINSKEETEHLENGNKYPNLESVNKVNGHSEETSQSPNRTEPHDSDCSVDLGISKSTEDLSPQKSGPVGSVVKSHSITNMEIGGLKIYDILSDNGPQQPSTTVKITSAVDGKNIVRSKSATLLYDQPLQVFTGSSSSSDLISGTKAIFKFDSNHNPEEPNIIRGPTSGPQSAPQIYGPPQYNIQYSSSAAVKDTLWHSKQNPQIDHASFPPQLLPRSESTENQSYAKHSANMNFSNHNNVRANTAYHLHQRLGPARHGEMWAISPNDRLIPAVTRSTIQRQSSVSSTASVNLGDPGSTRRAQIPEGDYLSYREFHSAGRTPPMMPGSQRPLSARTYSIDGPNASRPQSARPSINEIPERTMSVSDFNYSRTSPSKRPNARVGSEHSLLDPPGKSKVPRDWREQVLRHIEAKKLEKMPLSNGQMGQPLRPQANYSQIHHPPQASVARHPSREQLIDYLMLKVAHQPPYTQPHCSPRQGHELAKQEIRVRVEKDPELGFSISGGVGGRGNPFRPDDDGIFVTRVQPEGPASKLLQPGDKIIQANGYSFINIEHGQAVSLLKTFQNTVELIIVREVSS

SEQ ID NO: 58163 - protein, 84 aa, Homo sapiens
TCTLKLLEYFVEEYFDQNPISQIGIIVTKSKRAEKLTELSGNPRKHITSLKKAVDMTCHGEPSLYNSLSMAMQTLKLVLYIMYN

SEQ ID NO: 58164 - protein, 33 aa, Homo sapiens
TVAFCFAWEVPAVSLGYSKFMGGIWAAVHFEES

SEQ ID NO: 58165 - protein, 84 aa, Homo sapiens
KTSDLTLFNVHVDVCLNKSFIQELRKDKFNPVNQPKESSRSTGSSSGVQKAVTRTKRPGLMTKYSTSKKIKPNNPKHTLDIFFK

SEQ ID NO: 58166 - protein, 43 aa, Homo sapiens
KIRKSNQIPTEVRSKAEEVVSFVKKNVLVTGGFFGGFLLGMAS

SEQ ID NO: 58167 - protein, 95 aa, Homo sapiens
MEGVNPFIKSNKHRMIMFLDELGNVPELPDTTEHSRTDLSRDLAALHEICVAHSDELRTLSNERGAQQHVLKKLLAITELLQQKQNQYTKTNDVR

SEQ ID NO: 58168 - protein, 179 aa, Homo sapiens [sequence omitted]

SEQ ID NO: 58169 - protein, 17 aa, Homo sapiens
KIAVSTQESSNFTVFVF

SEQ ID NO: 58170 - protein, 16 aa, Homo sapiens
ISKNKRVFANSHHNIK

SEQ ID NO: 58171 - protein, 64 aa, Homo sapiens
MPTKTLRITTKKTPCGEGSKTWDRFQMRIHKRLIDLHSPSEIVKQITSISIEPGVEVEVTIADA

SEQ ID NO: 58172 - protein, 5 aa, Homo sapiens
MDTLL

SEQ ID NO: 58173 - protein, 91 aa, Homo sapiens
TWSSMGQETVEKFRQRILAPCKLETVGWQLNLQMAHSAQAKLKSPQAVLQLGVNNEDSKSLEKVLVEFSHKELFDFYNKLETIQAQLDSLT

SEQ ID NO: 58174 - protein, 54 aa, Homo sapiens
IKKFEEEGNPYYSSARVWDDGIIDPADTRLVLGLSFSAALNAPIEKTDFGIFRM

SEQ ID NO: 58175 - protein, 8 aa, Homo sapiens
KMDKREHR

SEQ ID NO: 58176 - protein, 389 aa, Homo sapiens
IEEEANGDIFDIEIGVSDPEKVGDGMNAYMAYRVTTKTSLSMFSKSEFSVKRRFSDFLGLHSKLASKYLHVGYIVPPAPEKSIVGMTKVKVGKEDSSSTEFVEKRRAALERYLQRTVKHPTLLQDPDLRQFLESSELPRAVNTQALSGAGILRMVNKAADAVNKMTIKMNESDAWFEEKQQQFENLDQQLRKLHVSVEALVCHRKELSANTAAFAKSAAMLGNSEDHTALSRALSQLAEVEEKIDQLHQEQAFADFYMFSELLSDYIRLIAAVKGVFDHRMKCWQKWEDAQITLLKKREAEAKMMVANKPDKIQQAKNEIREWEAKVQQGERDFEQISKTIRKEVGRFEKERVKDFKTVIIKYLESLVQTQQQLIKYWEAFLPEAKAIA

SEQ ID NO: 58177 - protein, 17 aa, Homo sapiens
LPAASGNQTCHLLTALY

SEQ ID NO: 58178 - protein, 23 aa, Homo sapiens
IIEKIILKTCFAEKTLRKILRMG

SEQ ID NO: 58179 - protein, 284 aa, Homo sapiens
MIAIQLISRMEYVHSKNLIYRDVKPENFLIGRPGNKTQQVIHIIDFGLAKEYIDPETKKHIPYREHKSLTGTARYMSINTHLGKEQSRRDDLEALGHMFMYFLRGSLPWQGLKADTLKERYQKIGDTKRATPIEVLCENFPEEMATYLRYVRRLDFFEKPDYDYLRKLFTDLFDRKGYMFDYEYDWIGKQLPTPVGAVQQDPALSSNREAHQHRDKMQQSKNQVVSSTNGELNTDDPTAGRSNAPITAPTEVEVMDETNCQKVLNMWCCCFFKRRKRKTIQRHK

SEQ ID NO: 58180 - protein, 481 aa, Homo sapiens
IVRQKNHPMTPEAVKANWKKICDFENASKPQSIQESTGSIIEVLSKIDSEGGVSANHTSRATSTATSGFAGAIGQKLPPFSYAYTELEAIMYALGVGASIKDPKDLKFIYEGSSDFSCLPTFGVIIGQKSMMGGGLAEIPGLSINFAKVLHGEQYLELYKPLPRAGKLKCEAVVADVLDKGSGVVIIMDVYSYSEKELICHNQFSLFLVGSGGFGGKRTSDKVKVAVAIPNRPPDAVLTDTTSLNQAALYRLSGDWNPLHIDPNFASLAGFDKPILHGLCTFGFSARRVLQQFADNDVSRFKAIKARFAKPVYPGQTLQTEMWKEGNRIHFQTKVQETGDIVISNAYVDLAPTSGTSAKTPSEGGKLQSTFVFEEIGRRLKDIGPEVVKKVNAVFEWHITKGGNIGAKWTIDLKSGSGKVYQGPAKGAADTTIILSDEDFMEVVLGKLDPQKAFFSGRLKARGNIMLSQKLQMILKDYAKL

SEQ ID NO: 58181 - skipped

SEQ ID NO: 58182 - protein, 91 aa, Homo sapiens
MPHSVTLRGPSPWGFRLVGGRDFSAPLTISRDGSPTTSRRPSGTGTGPEDGRPSLGSPYGQPPRFPVPHNGSSEATLPAQMSTLHVSPPPR

SEQ ID NO: 58183 - protein, 44 aa, Homo sapiens
VWRRKRKPAGRQQPNPLPHLWRRTPQTRRKSLAYGQNPVLMVPL

SEQ ID NO: 58184 - protein, 182 aa, Homo sapiens [sequence omitted]

SEQ ID NO: 58185 - protein, 424 aa, Homo sapiens
LAATAMSSTPVPLAATSSFSSPNVSSMESFPPLAYSTPQPPLPPVRPSAPLPFVPPPAVPSVPPLVTSMPPPVSPSTAAAFGNPPVSHFPPSTSAPNTLLPAPPSGPPISGFSVGSTYDITRGHAGRAPQTPLMPSFSAPSGTGLLPTPITQQASLTSLAQGTGTTSAITFPEEQEDPRITRGQDEASAGGIWGFIKGVAGNPMVKSVLDKTKHSVESMITTLDPGMAPYIKSGGELDIVVTSNKEVKVAAVRDAFQEVFGLAVVVGEAGQSNIAPQPVGYAAGLKGAQERIDSLRRTGVIHEKQTAVSVENFIAELLPDKWFDIGCLVVEDPVHGIHLETFTQATPVPLEFVQQAQSLTPQDYNLRWSGLLVTVGEVLEKSLLNVSRTDWHMAFTGMSRRQMIYSAARAIAGMYKQRLPPRTV

SEQ ID NO: 58186 - protein, 837 aa, Homo sapiens
MVVHSSYDEIEGGGLLATPQLTNKNPKMSRSVGYSYPSLPPGYQNTTPPGATGVPPSSLNYPSGPQAFTQTPLGANHLTTSMSGLSLQPEGLRVVNLLQERNMLPSTPLKPPVPNLHEDIQKLNCNPELFRCTLTSIPQTQALLNKAKLPLGLLLHPFKDLVQLPVVTSSTIVRCRSCRTYINPFVSFLDQRRWKCNLCYRVNDVPEEFLYNPLTRVYGEPHRRPEVQNATIEFMAPSEYMLRPPQPPVYLFVFDVSHNAVETGYLNSVCQSLLDNLDLLPGNTRTKIGFITFDSTIHFYGLQESLSQPQMLIVSDIEDVFIPMPENLLVNLNESKELVQDLLKTLPQMFTKTLETQSALGPALQAAFKLMSPTGGRMSVFQTQLPTLGVGALKPREEPNHRSSAKDIHMTPSTDFYKKLALDCSGQQVAVDLFLLSGQYSDLASLGCISRYSAGSVYYYPSYHHQHNPVQVQKLQKELQRYLTRKIGFEAVMRIRCTKGLSIHTFHGNFFVRSTDLLSLPNVNPDAGYAVQMSVEESLTDTQLVSFQSALLYTSSKGERRIRVHTLCLPVVSTLNDVFLGADVQAISGLLANMAVDRSMTASLSDARDALVNAVIDSLSAYRSSVLSNQQPGLMVPFSLRLFPLFVLALLKQKSFQTGTNARLDERIFAMCQVKNQPLVYLMLTTHPSLYRVDNLSDEGALNISDRTIPQPPILQLSVEKLSRDGAFLMDAGSVLMLWVGKNCTQNFLSQVLGVQNYASIPQPMTDLPELDTPESARIIAFISWLREQRPFFPILYVIRDESPMKANFLQNMIEDRTESALSYYEFLLHIQQQVNK

SEQ ID NO: 58187 - protein, 398 aa, Homo sapiens
LETTLEKFQQEKEELINKKNTSNKIAQDKLNDIKEKVKNIHGYMKDIENYIQDGKDDYKKQKETELNKVIAQLSECEKHKEKINEDMRLMRQDIDTQKIQERWLQDNLTLRKRNEELKEVEEERKQHLKEMGQMQVLQMKSEHQKLEENIDNIKRNHNLALGRQKGYEEEIIHFKKELREPQFRDAEEKYREMMIVMRTTELVNKDLDIYYKTLDQAIMKFHSMKMEEINKIIRDLWRSTYRGQDIEYIEIRSDADENVSASDKRRNYNYRVVMLKGDTALDMRGRCSAGQKVLASLIIRLALAETFCLNCGIIALDEPTTNLDRENIESLAHALVEIIKSRSQQRNFQLLVITHDEDFVELLGRSEYVEKFYRIKKNIDQCSEIVKCSVSSLGFNVH

SEQ ID NO: 58188 - protein, 16 aa, Homo sapiens
MKMTNEQRIRMTVPCL

SEQ ID NO: 58189 - protein, 26 aa, Homo sapiens
LEGLRRSRGHRKPLSSLGPRGLLSTR

SEQ ID NO: 58190 - protein, 824 aa, Homo sapiens
VARAGGIETIANEYSDRCTPACISFGPKNRSIGAAAKSQVISNAKNTVQGFKRFHGRAFSDPFVEAEKSNLAYDIVQLPTGLTGIKVTYMEEERNFTTEQVTAMLLSKLKETAESVLKKPVVDCVVSVPCFYTDAERRSVMDATQIAGLNCLRLMNETTAVALAYGIYKQDLPALEEKPRNVVFVDMGHSAYQVSVCAFNRGKLKVLATAFDTTLGGRKFDEVLVNHFCEEFGKKYKLDIKSKIRALLRLSQECEKLKKLMSANASDLPLSIECFMNDVDVSGTMNRGKFLEMCNDLLARVEPPLRSVLEQTKLKKEDIYAVEIVGGATRIPAVKEKISKFFGKELSTTLNADEAVTRGCALQCAILSPAFKVREFSITDVVPYPISLRWNSPAEEGSSDCEVFSKNHAAPFSKVLTFYRKEPFTLEAYYSSPQDLPYPDPAIAQFSVQKVTPQSDGSSSKVKVKVRVNVHGIFSVSSASLVEVHKSEENEEPMETDQNAKEEEKMQVDQEEPHVEEQQQQTPAENKAESEEMETSQAGSKDKKMDQPPQAKKAKVKTSTVDLPIENQLLWQIDREMLNLYIENEGKMIMQDKLEKERNDAKNAVEEYVYEMRDKLSGEYEKFVSEDDRNSFTLKLEDTENWLYEDGEDQPKQVYVDKLAELKNLGQPIKIRFQESEERPKLFEELGKQIQQYMKIISSFKNKEDQYDHLDAADMTKVEKSTNEAMEWMNNKLNLQNKQSLTMDPVVKSKEIEAKIKELTSTCSPIISKPKPKVEPPKEEQKNAEQNGPVDGQGDNPGPQAAEQGTDTAVPSDSDKKLPEMDID

SEQ ID NO: 58191 - protein, 12 aa, Homo sapiens
LLEMICSIGKLQ

SEQ ID NO: 58192 - protein, 44 aa, Homo sapiens
LRASAVLGFAVGTCTGIYAAQAYAVPNVEKTLRDYLQLLRKGPD

SEQ ID NO: 58193 - protein, 15 aa, Homo sapiens
IRWLPSPLLCIGDGG

SEQ ID NO: 58194 - protein, 229 aa, Homo sapiens
VVTVFGVIIFKVYKWKQSRDLYRAPVSSLYRTPGPSLHADAVRGGLMSPHLYHQVYLTTDSRRSDPLLKKPGAASPLASRQNTLRSCDPVFYRQVLGAESAPPGQQAPPNTDWRFSQAQRPGTSGSQNGDDTGTWPNNQFDTEMLQAMILASASEAADGSSTLGGGAGTMGLSARYGPQFTLQHVPDYRQNVYIPGSNATLTNAAGKRDGKAPAGGNGNKKKSGKKEKK

SEQ ID NO: 58195 - protein, 66 aa, Homo sapiens
LALASIYDGDEFRKAESVQGGETRIYLDLPQNFKIFVSAICSMQALRQPMGRTPWQRGPVCLDAIS

SEQ ID NO: 58196 - protein, 20 aa, Homo sapiens
ITAKADFRTLLKETKFITYS

SEQ ID NO: 58197 - protein, 30 aa, Homo sapiens
KKAKKASTKDSESPSQKKKKKKKKTAEQTV

SEQ ID NO: 58198 - protein, 27 aa, Homo sapiens
MTSLLLCPATAVIIYRMRTHPILSGAV

SEQ ID NO: 58199 - protein, 32 aa, Homo sapiens
LYYPRCCGAELVPLQLSRVGLDIFDSFPPRLN

SEQ ID NO: 58200 - protein, 61 aa, Homo sapiens
KLHYNEGLNIKLARQLISKDLHDDDEDEEMLETADGESMNTEESNQGSTPSDQQQNKLRSS

SEQ ID NO: 58201 - protein, 193 aa, Homo sapiens
LEKNMSDEEKQKRREESTRLKEEGNEQFKKGDYIEAESSYSRALEMCPSCFQKERSILFSNRAAARMKQDKKEMAINDCSKAIQLNPSYIRAILRRAELYEKTDKLDEALEDYKSILEKDPSIHQAREACMRLPKQIEERNERLKEEMLGKLKDLGNLVLRPFGLSTENFQIKQDSSTGSYSINFVQNPNNNR

SEQ ID NO: 58202 - protein, 260 aa, Homo sapiens
LVSDNFLNITNVAFDDRGLYTCFVTSPIRASYSVTLRVIFTSGDMSVYYMIVCLIAFTITLILNVTRLCMMSSHLRKTEKAINEFFRTEGAEKLQKAFEIAKRIPIITSAKTLELAKVTQFKTMEFARYIEELARSVPLPPLILNCRAFVEEMFEAVRVDDPDDLGERIKERPALNAQGGIYVINPEMGRSNSPGGDSDDGSLNEQGQEIAVQVSVHLQSETKSIDTESQGSSHFSPPDDIGSAESNCNYKDGAYENCQL

SEQ ID NO: 58203 - protein, 410 aa, Homo sapiens
KPLEDYMALFPSVRILRTKKREGLIRTRMLGASVATGDVITFLDSHCEANVNWLPPLLDRIARNRKTIVCPMIDVIDHDDFRYETQAGDAMRGAFDWEMYYKRIPIPPELQKADPSDPFESPVMAGGLFAVDRKWFWELGGYDPGLEIWGGEQYEISFKVWMCGGRMEDIPCSRVGHIYRKYVPYKVPAGVSLARNLKRVAEVWMDEYAEYIYQRRPEYRHLSAGDVAVQKKLRSSLNCKSFKWFMTKIAWDLPKFYPPVEPPAAAWGEIRNVGTGLCADTKHGALGSPLRLEGCVRGRGEAAWNNMQVFTFTWREDIRPGDPQHTKKFCFDAISHTSPVTLYDCHSMKGNQLWKYRKDKTLYHPVSGSCMDCSESDHRIFMNTCNPSSLTQQWLFEHTNSTVLEKFNRN

SEQ ID NO: 58204 - protein, 840 aa, Homo sapiens
IDMKPEVPREKLASRPTRPPEPRHIPANRGEIKGSESATYVPVAPPTPAWQPEIKPEPAWHDQDETSSVKSDGAGGARASFRGRGRGRGRGRGRGRGGTRTHFDYQFGYRKFDGVEGPRTPKYMNNITYYFDNVSSTELYSVDQELLKDYIKRQIEYYFSVDNLERDFFLRRKMDADGFLPITLIASFHRVQALTTDISLIFAALKDSKVVEIVDEKVRRREEPEKWPLPPIVDYSQTDFSQLLNCPEFVPRQHYQKETESAPGSPRAVTPVPTKTEEVSNLKTLPKGLSASLPDLDSENWIEVKKRPRPSPARPKKSEESRFSHLTSLPQQLPSQQLMSKDQDEQEELDFLFDEEMEQMDGRKNTFTAWSDEESDYEIDDRDVNKILIVTQTPHYMRRHPGGDRTGNHTSRAKMSAELAKVINDGLFYYEQDLWAEKFEPEYSQIKQEVENFKKVNMISREQFDTLTPEPPVDPNQEVPPGPPRFQQVPTDALANKLFGAPEPSTIARSLPTTVPESPNYRNTRTPRTPRTPQLKDSSQTSRFYPVVKEGRTLDAKMPRKRKTRHSSNPPLESHVGWVMDSREHRPRTASISSSPSEGTPTVGSYGCTPQSLPKFQHPSHELLKENGFTQHVYHKYRRRCLNERKRLGIGQSQEMNTLFRFWSFFLRDHFNKKMYEEFKQLALEDAKEGYRYGLECLFRYYSYGLEKKFRLDIFKDFQEETVKDYEAGQLYGLEKFWAFLKYSKAKNLDIDPKLQEYLGKFRRLEDFRVDPPMGEEGNHKRHSVVAGGGGGEGRKRCPSQSSSRPAAMISQPPTPPTGQPVREDAKWTSQHSNTQTLGK

SEQ ID NO: 58205 - protein, 156 aa, Homo sapiens
IVYPPQLPGEPRRPAEIYHCRRQIKYSKDKMWYLAKLIRGMSIDQALAQLEFNDKKGAKIIKEVLLEAQDMAVRDHNVEFRSNLYIAESTSGRGQCLKRIRYHGRGRFGIMEKVYCHYFVKLVEGPPPPPEPPKTAVAHAKEYIQQLRSRTIVHTL

SEQ ID NO: 58206 - protein, 606 aa, Homo sapiens
LNILRKSLQAERNKPTKNMINIISRLQEVFGHAIKAAYPDLENPPLLVTPSQQAKFGDYQCNSAMGISQMLKTKEQKVNPREIAENITKHLPDNECIEKVEIAGPGFINVHLRKDFVSEQLTSLLVNGVQLPALGENKKVIVDFSSPNIAKEMHVGHLRSTIIGESISRLFEFAGYDVLRLNHVGDWGTQFGMLIAHLQDKFPDYLTVSPPIGDLQVFYKESKKRFDTEEEFKKRAYQCVVLLQGKNPDITKAWKLICDVSRQELNKIYDALDVSLIERGESFYQDRMNDIVKEFEDRGFVQVDDGRKIVFVPGCSIPLTIVKSDGGYTYDTSDLAAIKQRLFEEKADMIIYVVDNGQSVHFQTIFAAAQMIGWYDPKVTRVFHAGFGVVLGEDKKKFKTRSGETVRLMDLLGEGLKRSMDKLKEKERDKVLTAEELNAAQTSVAYGCIKYADLSHNRLNDYIFSFDKMLDDRGNTAAYLLYAFTRIRSIARLANIDEEMLQKAARETKILLDHEKEWKLGRCILRFPEILQKILDDLFLHTLCDYIYELATAFTEFYDSCYCVEKDRQTGKILKVNMWRMLLCEAVAAVMAKGFDILGIKPVQRM

SEQ ID NO: 58207 - protein, 291 aa, Homo sapiens
TMPFDFRRFDIYRKVPKDLTQPTYTGAIISICCCLFILFLFLSELTGFITTEVVNELYVDDPDKDSGGKIDVSLNISLPNLHCELVGLDIQDEMGRHEVGHIDNSMKIPLNNGAGCRFEGQFSINKVPGNFHVSTHSATAQPQNPDMTHVIHKLSFGDTLQVQNIHGAFNALGGADRLTSNPLASHDYILKIVPTVYEDKSGKQRYSYQYTVANKEYVAYSHTGRIIPAIWFRYDLSPITVKYTERRQPLYRFITTICAIIGGTFTVAGILDSCIFTASEAWKKIQLGKMH

SEQ ID NO: 58208 - protein, 6 aa, Homo sapiens
MFLNYS

SEQ ID NO: 58209 - protein, 83 aa, Homo sapiens
LSPTVYRNPESFKEKFVRKTRENPVVPIGCLATAAALTYGLYSFHRGNSQRSQLMMRTRIAAQGFTVAAILLGLAVTAMKSRP

SEQ ID NO: 58210 - protein, 184 aa, Homo sapiens
TEDIVHREVTPDQKLLSRRLLTKTNRMPRWAERLFPANVAHSVYVLEDSIVDPQNQTMTTFTWNINHARLMVVEERCVYCVNSDNSGWTEIRREAWVSSSLFGVSRAVQEFGLARFKSNVTKTMKGFEYILAKLQGEAPSKTLVETAKEAKEKAKETALAATEKAKDLASKAATKKQQQQQQFV

SEQ ID NO: 58211 - protein, 177 aa, Homo sapiens
IFVGGLNPEATEEKIREYFGEFGEIEAIELPMDPKLNKRRGFVFITFKEEEPVKKVLEKKFHTVSGSKCEIKVAQPKEVYQQQQYGSGGRGNRNRGNRGSGGGGGGGGQSQSWNQGYGNYWNQGYGYQQGYGPGYGGYDYSPYGYYGYGPGYDYSQGSTNYGKSQRRGGHQNNYKPY

SEQ ID NO: 58212 - protein, 562 aa, Homo sapiens
IEDDLDDVIEEVEDSKPDTTAPPSSPKVTYKAPVPTGEVYFADSFDRGTLSGWILSKAKKDDTDDEIAKYDGKWEVEEMKESKLPGDKGLVLMSRAKHHAISAKLNKPFLFDTKPLIVQYEVNFQNGIECGGAYVKLLSKTPELNLDQFHDKTPYTIMFGPDKCGEDYKLHFIFRHKNPKTGIYEEKHAKRPDADLKTYFTDKKTHLYTLILNPDNSFEILVDQSVVNSGNLLNDMTPPVNPSREIEDPEDRKPEDWDERPKIPDPEAVKPDDWDEDAPAKIPDEEATKPEGWLDDEPEYVPDPDAEKPEDWDEDMDGEWEAPQIANPRCESAPGCGVWQRPVIDNPNYKGKWKPPMIDNPSYQGIWKPRKIPNPDFFEDLEPFRMTPFSAIGLELWSMTSDIFFDNFIICADRRIVDDWANDGWGLKKAADGAAEPGVVGQMIEAAEERPWLWVVYILTVALPVFLVILFCCSGKKQTSGMEYKKTDAPQPDVKEEEEEKEEEKDKGDEEEEGEEKLEEKQKSDAEEDGGTVSQEEEDRKPKAEEDEILNRSPRNRKPRRE

SEQ ID NO: 58213 - protein, 12 aa, Homo sapiens
LAKFIEKAAASV

SEQ ID NO: 58214 - protein, 39 aa, Homo sapiens
KYHTLMYMGRTIMRCEPCACGGGGREMYFLNHVPPKHGC

SEQ ID NO: 58215 - protein, 24 aa, Homo sapiens
RKLLKLLKYLLLYSKKLKCPEICL

SEQ ID NO: 58216 - protein, 12 aa, Homo sapiens
MGSPLNPISSVS

SEQ ID NO: 58217 - protein, 29 aa, Homo sapiens
TSKKEHISAENMSLETLRNSSPEDLFDEI

SEQ ID NO: 58218 - protein, 3397 aa, Homo sapiens
KMFINIKSILWMCSTLIVTHALHKVKVGKSPPVRGSLSGKVSLPCHFSTMPTLPPSYNTSEFLRIKWSKIEVDKNGKDLKETTVLVAQNGNIKIGQDYKGRVSVPTHPEAVGDASLTVVKLLASDAGLYRCDVMYGIEDTQDTVSLTVDGVVFHYRAATSRYTLNFEAAQKACLDVGAVIATPEQLFAAYEDGFEQCDAGWLADQTVRYPIRAPRVGCYGDKMGKAGVRTYGFRSPQETYDVYCYVDHLDGDVFHLTVPSKFTFEEAAKECENQDARLATVGELQAAWRNGFDQCDYGWLSDASVRHPVTVARAQCGGGLLGVRTLYRFENQTGFPPPDSRFDAYCFKPKEATTIDLSILAETASPSLSKEPQMVSDRTTPIIPLVDELPVIPTEFPPVGNIVSFEQKATVQPQAITDSLATKLPTPTGSTKKPWDMDDYSPSASGPLGKLDISEIKEEVLQSTTGVSHYATDSWDGVVEDKQTQESVTQIEQIEVGPLVTSMEILKHIPSKEFPVTETPLVTARMILESKTEKKMVSTVSELVTTGHYGFTLGEEDDEDRTLTVGSDESTLIFDQIPEVITVSKTSEDTIHTHLEDLESVSASTTVSPLIMPDNNGSSMDDWEERQTSGRITEEFLGKYLSTTPFPSQHRTEIELFPYSGDKILVEGISTVIYPSLQTEMTHRRERTETLIPEMRTDTYTDEIQEEITKSPFMGKTEEEVFSGMKLSTSLSEPIHVTESSVEMTKSFDFPTLITKLSAEPTEVRDMEEDFTATPGTTKYDENITTVLLAHGTLSVEAATVSKWSWDEDNTTSKPLESTEPSASSKLPPALLTTVGMNGKDKDIPSFTEDGADEFTLIPDSTQKQLEEVTDEDIAAHGKFTIRFQPTTSTGIAEKSTLRDSTTEEKVPPITSTEGQVYATMEGSALGEVEDVDLSKPVSTVPQFAHTSEVEGLAFVSYSSTQEPTTYVDSSHTIPLSVIPKTDWGVLVPSVPSEDEVLGEPSQDILVIDQTRLEATISPETMRTTKITEGTTQEEFPWKEQTAEKPVPALSSTAWTPKEAVTPLDEQEGDGSAYTVSEDELLTGSERVPVLETTPVGKIDHSVSYPPGAVTEHKVKTDEVVTLTPRIGPKVSLSPGPEQKYETEGSSTTGFTSSLSPFSTHITQLMEETTTEKTSLEDIDLGSGLFEKPKATELIEFSTIKVTVPSDITTAFSSVDRLHTTSAFKPSSAITKKPPLIDREPGEETTSDMVIIGESTSHVPPTTLEDIVAKETETDIDREYFTTSSPPATQPTRPPTVEDKEAFGPQALSTPQPPASTKFHPDINVYIIEVRENKTGRMSDLSVIGHPIDSESKEDEPCSEETDPVHDLMAEILPEFPDIIEIDLYHSEENEEEEEECANATDVTTTPSVQYINGKHLVTTVPKDPEAAEARRGQFESVAPSQNFSDSSESDTHPFVIAKTELSTAVQPNESTETTESLEVTWKPETYPETSEHFSGGEPDVFPTVPFHEEFESGTAKKGAESVTERDTEVGHQAHEHTEPVSLFPEESSGEIAIDQESQKIAFARATEVTFGEEVEKSTSVTYTPTIVPSSASAYVSEEEAVTLIGNPWPDDLLSTKESWVEATPRQVVELSGSSSIPITEGSGEAEEDEDTMFTMVTDLSQRNTTDTLITLDTSRIITESFFEVPATTIYPVSEQPSAKVVPTKFVSETDTSEWISSTTVEEKKRKEEEGTTGTASTFEVYSSTQRSDQLILPFELESPNVATSSDSGTRKSFMSLTTPTQSEREMTDSTPVFTETNTLENLGAQTTEHSSIHQPGVQEGLTTLPRSPASVFMEQGSGEAAADPETTTVSSFSLNVEYAIQAEKEVAGTLSPHVETTFSTEPTGLVLSTVMDRVVAENITQTSREIVISERLGEPNYGAEIRGFSTGFPLEEDFSGDFREYSTVSHPIAKEETVMMEGSGDAAFRDTQTSPSTVPTSVHISHISDSEGPSSTMVSTSAFPWEEFTSSAEGSGEQLVTVSSSVVPVLPSAVQKFSGTASSIIDEGLGEVGTVNEIDRRSTILPTAEVEGTKAPVEKEEVKVSGTVSTNFPQTIEPAKLWSRQEVNPVRQEIESETTSEEQIQEEKSFESPQNSPATEQTIFDSQTFTETELKTTDYSVLTTKKTYSDDKEMKEEDTSLVNMSTPDPDANGLESYTTLPEATEKSHFFLATALVTESIPAEHVVTDSPIKKEESTKHFPKGMRPTIQESDTELLFSGLGSGEEVLPTLPTESVNFTEVEQINNTLYPHTSQVESTSSDKIEDFNRMENVAKEVGPLVSQTDIFEGSGSVTSTTLIEILSDTGAEGPTVAPLPFSTDIGHPQNQTVRWAEEIQTSRPQTITEQDSNKNSSTAEINETTTSSTDFLARAYGFEMAKEFVTSAPKPSDLYYEPSGEGSGEVDIVDSFHTSATTQATRQESSTTFVSDGSLEKHPEVPSAKAVTADGFPTVSVMLPLHSEQNKSSPDPTSTLSNTVSYERSTDGSFQDRFREFEDSTLKPNRKKPTENIIIDLDKEDKDLILTITESTILEILPELTSDKNTIIDIDHTKPVYEDILGMQTDIDTEVPSEPHDSNDESNDDSTQVQEIYEAAVNLSLTEETFEGSADVLASYTQATHDESMTYEDRSQLDHMGFHFTTGIPAPSTETELDVLLPTATSLPIPRKSATVIPEIEGIKAEAKALDDMFESSTLSDGQAIADQSEIIPTLGQFERTQEEYEDKKHAGPSFQPEFSSGAEEALVDHTPYLSIATTHLMDQSVTEVPDVMEGSNPPYYTDTTLAVSTFAKLSSQTPSSPLTIYSGSEASGHTEIPQPSALPGIDVGSSVMSPQDSFKEIHVNIEATFKPSSEEYLHITEPPSLSPDTKLEPSEDDGKPELLEEMEASPTELIAVEGTEILQDFQNKTDGQVSGEAIKMFPTIKTPEAGTVITTADEIELEGATQWPHSTSASATYGVEAGVVPWLSPQTSERPTLSSSPEINPETQAALIRGQDSTIAASEQQVAARILDSNDQATVNPVEFNTEVATPPFSLLETSNETDFLIGINEESVEGTAIYLPGPDRCKMNPCLNGGTCYPTETSYVCTCVPGYSGDQCELDFDECHSNPCRNGATCVDGFNTFRCLCLPSYVGALCEQDTETCDYGWHKFQGQCYKYFAHRRTWDAAERECRLQGAHLTSILSHEEQMFVNRVGHDYQWIGLNDKMFEHDFRWTDGSTLQYENWRPNQPDSFFSAGEDCVVIIWHENGQWNDVPCNYHLTYTCKKGTVACGQPPVVENAKTFGKMKPRYEINSLIRYHCKDGFIQRHLPTIRCLGNGRWAIPKITCMNPSAYQRTYSMKYFKNSSSAKDNSINTSKHDHRWSRRWQESRR

SEQ ID NO: 58219 - protein, 482 aa, Homo sapiens
VYTTTRSHLGAENNIDLVLNVEDFDVESKFERTVNVSVPKKTRNNGTLYAYIFLHHAGVLPWHDGKQVHLVSPLTTYMVPKPEEINLLTGESDTQQIEAEKKPTSALDEPVSHWRPRLALNVMADNFVFDGSSLPADVHRYMKMIQLGKTVHYLPILFIDQLSNRVKDLMVINRSTTELPLTVSYDKVSLGRLRFWIHMQDAVYSLQQFGFSEKDADEVKGIFVDTNLYFLALTFFVAAFHLLFDFLAFKNDISFWKKKKSMIGMSTKAVLWRCFSTVVIFLFLLDEQTSLLVLVPAGVGAAIELWKVKKALKMTIFWRGLMPEFQFGTYSESERKTEEYDTQAMKYLSYLLYPLCVGGAVYSLLNIKYKSWYSWLINSFVNGVYAFGFLFMLPQLFVNYKLKSVAHLPWKAFTYKAFNTFIDDVFAFIITMPTSHRLACFRDDVVFLVYLYQRWLYPVDKRRVNEFGESYEEKATRAPHTD

SEQ ID NO: 58220 - protein, 122 aa, Homo sapiens
TPARPENRAAASAPRKPRRVMSSPPEGKLETKAGHPPAVKAGGMRIVQKHPHTGDTKEEKDKDDQEWESPSPPKPTVFISGVIARGDKDFPPAAAQVAHQKPHASMDKHPSPRTQHIQQPRK

SEQ ID NO: 58221 - protein, 26 aa, Homo sapiens
RVDKDRSGVISDTELQQALSNGQRNH

SEQ ID NO: 58222 - protein, 152 aa, Homo sapiens
VMFWTPNVSEKILIDIIGVDFAFAELCVVPLRIFSFFPVPVTVRAHLTGWLMTLKKTFVLAPSSVLRIIVLIASLVVLPYLGVHGATLGVGSLLAGFVGESTMVAIAACYVYRKQKKKMENESATEGEDSAMTDMPPTEEVTDIVEMREENE

SEQ ID NO: 58223 - protein, 848 aa, Homo sapiens
IYPVSSTVQPVAAAATVVPSYTQSATYSTTAVTYSGTSYSGYEAAVYSAASSYYQQQQQQQKQAAAAAAAAAATAAWTGTTFTKKAPFQNKQLKPKQPPKPPQIHYCDVCKISCAGPQTYKEHLEGQKHKKKEAALKASQNTSSSNSSTRGTQNQLRCELCDVSCTGADAYAAHIRGAKHQKVVKLHTKLGKPIPSTEPNVVSQATSSTAVSASKPTASPSSIAANNCTVNTSSVATSSMKGLTTTGNSSLNSTSNTKVSAVPTNMAAKKTSTPKINFVGGNKLQSTGNKAEDIKGTECVKSTPVTSAVQIPEVKQDTVSEPVTPASLAALQSDVQPVGHDYVEEVRNDEGKVIRFHCKLCECSFNDPNAKEMHLKGRRHRLQYKKKVNPDLQVEVKPSIRARKIQEEKMRKQMQKEEYWRRREEEERWRMEMRRYEEDMYWRRMEEEQHHWDDRRRMPDGGYPHGPPGPLGLLGVRPGMPPQPQGPAPLRRPDSSDDRYVMTKHATIYPTEEELQAVQKIVSITERALKLVSDSLSEHEKNKNKEGDDKKEGGKDRALKGVLRVGVLAKGLLLRGDRNVNLVLLCSEKPSKTLLSRIAENLPKQLAVISPEKYDIKCAVSEAAIILNSCVEPKMQVTITLTSPIIREENMREGDVTSGMVKDPPDVLDRQKCLDALAALRHAKWFQARANGLQSCVIIIRILRDLCQRVPTWSDFPSWAMELLVEKAISSASSPQSPGDALRRVFECISSGIILKGSPGLLDPCEKDPFDTLATMTDQQREDITSSAQFALRLLAFRQIHKVLGMDPLPQMSQRFNIHNNRKRRRDSDGVDGFEAEGKKDKKDYDNF

SEQ ID NO: 58224 - protein, 14 aa, Homo sapiens
TTSYSHQKCRTYYR

SEQ ID NO: 58225 - protein, 28 aa, Homo sapiens
TCFATKNGIKVTVENAKCVQANAFIQGL

SEQ ID NO: 58226 - protein, 83 aa, Homo sapiens
VVTMEHSAKGNAHKIMEKCTLPLTGKQCVNRIITEKAVFDVDKKKGLTLIELWEGLTVDDVQKSTGCDFAVSPKLMPMQQIAN

SEQ ID NO: 58227 - protein, 35 aa, Homo sapiens
INSRQFLIPPKDEDSPKSNGGGWSFTNFFQNKPND

SEQ ID NO: 58228 - protein, 81 aa, Homo sapiens
KAFMKASSELFSQKTKASLLVSNQNGNMYTSSVYGSLASVLAQYSPQQLAGKRIGVFSYGSGLAATLYSLKVTQDATPGKC

SEQ ID NO: 58229 - protein, 388 aa, Homo sapiens
RPLRAPPSSQDKIPQQNSESAMAKPQVVVAPVLMSKLSVNAPEFYPSGYSSSYTESYEDGCEDYPTLSEYVQDFLNHLTEQPGSFETEIEQFAETLNGCVTTDDALQELVELIYQQATSIPNFSYMGARLCNYLSHHLTISPQSGNFRQLLLQRCRTEYEVKDQAAKGDEVTRKRFHAFVLFLGELYLNLEIKGTNGQVTRADILQVGLRELLNALFSNPMDDNLICAVKLLKLTGSVLEDAWKEKGKMDMEEIIQRIENVVLDANCSRDVKQMLLKLVELRSSNWGRVHATSTYREATPENDPNYFMNEPTFYTSDGVPFTAADPDYQEKYQELLEREDFFPDYEENGTDLSGAGDPYLDDIDDEMDPEIEEAYEKFCLESERKRKQ

SEQ ID NO: 58230 - protein, 93 aa, Homo sapiens
KLRDHYSSISPSFHKTAVKMFDIKAWAEYVVEWAAKDPYGFLTTVILALTPLFLASAVLSWKLAKMIEAREKEQKKKQKRQENIAKAKRLKKD

SEQ ID NO: 58231 - protein, 42 aa, Homo sapiens
KIDLKFIDTTSKFGHGCFQTMEEKTAFMAPLKKDRIAKEEGA

SEQ ID NO: 58232 - protein, 41 aa, Homo sapiens
MLLPNILLTGTPGVGKTTLGKELASKSGLKYINVGDLAREV

SEQ ID NO: 58233 - protein, 239 aa, Homo sapiens
MGITEYEPRVINQMLEFAFRYVTTILDDAKIYSSHAKKATVDADDVRLAIQCRADQSFTSPPPRDFLLDIARQRNQTPLPLIKPYSGPRLPPDRYCLTAPNYRLKSLQKKASTSAGRITVPRLSVGSVTSRPSTPTLGTPTPQTMSVSTKVGTPMSLTGQRFTVQMPTSQSPAVKASIPATSAVQNVLINPSLIGSKNILITTNMMSSQNTANESSNALKRKREDDDDDDDDDDDYDNL

SEQ ID NO: 58234 - protein, 4 aa, Homo sapiens
MEKA

SEQ ID NO: 58235 - protein, 78 aa, Homo sapiens
LEYFVEEYFDQNPISQIGIIVTKSKRAEKLTELSGNPRKHITSLKKAVDMTCHGEPSLYNSLSIAMQTLKLVLYIMYN

SEQ ID NO: 58236 - protein, 47 aa, Homo sapiens
LKKPKFELGKLMELHGEGSSSGKATGDERGAKVERADGFEPPVQESV

SEQ ID NO: 58237 - protein, 57 aa, Homo sapiens
MMTVTNWFNYESANIESFFSGSWSIFWVKMASCWICVLLYLCTLVAPLCCPTREFSV

SEQ ID NO: 58238 - protein, 42 aa, Homo sapiens
VNPGGWAPASVLRAVAKREYPKFLKRFTSYVQEKTAGKPILF

SEQ ID NO: 58239 - protein, 227 aa, Homo sapiens
MEYHPRIIMLTCAFLACKVDEFNVSSPQFVGNLRESPLGQEKALEQILEYELLLIQQLNFHLIVHNPYRPFEGFLIDLKTRYPILENPEILRKTADDFLNRIALTDAYLLYTPSQIALTAILSSASRAGITMESYLSESLMLKENRTCLSQLLDIMKSMRNLVKKYEPPRSEEVAVLKQKLERCHSAELALNVITKKRKGYEDDDYVSKKSKHEEEEWTDDDLVESL

SEQ ID NO: 58240 - protein, 65 aa, Homo sapiens
LELIGDLIGHSSSVEMFLYFEDHGLVTCSADHLIILWKNGERESGLRSLRLFQKLEENGDLYLAV

SEQ ID NO: 58241 - protein, 64 aa, Homo sapiens
IKVTLATLKMSVQPTVSLGGFEITPPVVLRLKCGSGPVHISGQHLVAVEEDAESEDEEEEDVKL

SEQ ID NO: 58242 - protein, 121 aa, Homo sapiens
IEKALEYFTCALQHRADVSCLWKLAGDACTCLYAVAPSKVNVHVLGVLLGQKEGKQVLKKNELLHLGGRCYGRALKLMSTSNTWCDLGINYYRQAQHLAETGSNMNDLKELLEKSLHVWYK

SEQ ID NO: 58243 - protein, 202 aa, Homo sapiens
LSDVASFATKLKNTLIQYHSIEEDKWRVAKKTKDVTVWRKPSEEFNGYLYKAQGVIDDLVYSIIDHIRPGPCRLDWDSLMTSLDILENFEENCCVMRYTTAGQLWNIISPREFVDFSYTVGYKEGLLSCGISLDWDEKRPEFVRGYNHPCGWFCVPLKDNPNQSLLTGYIQTDLRGMIPQSAVDTAMASTLTNFYGDLRKAL

SEQ ID NO: 58244 - protein, 6 aa, Homo sapiens
MTVASI

SEQ ID NO: 58245 - protein, 4 aa, Homo sapiens
VFQV

SEQ ID NO: 58246 - protein, 6 aa, Homo sapiens
LLVSLD

SEQ ID NO: 58247 - protein, 9 aa, Homo sapiens
KVYKIMILF

SEQ ID NO: 58248 - protein, 77 aa, Homo sapiens
IAGLAMSAIFNFQSLLTVILLLICTCAYIRSLAPSLLDRNKTGLLGIFWKCARIGERKSPYVAVCCIVMAFSILFIQ

SEQ ID NO: 58249 - protein, 360 aa, Homo sapiens
ILWAIKMKSLLLLVLISICWADHLSDNYTLDHDRAIHIQAENGPHLLVEAEQAKVFSHRGGNVTLPCKFYRDPTAFGSGIHKIRIKWTKLTSDYLKEVDVFVSMGYHKKTYGGYQGRVFLKGGSDSDASLVITDLTLEDYGRYKCEVIEGLEDDTVVVALDLQGVVFPYFPRLGRYNLNFHEAQQACLDQDAVIASFDQLYDAWRGGLDWCNAGWLSDGSVQYPITKPREPCGGQNTVPGVRNYGFWDKDKSRYDVFCFTSNFNGRFYYLIHPTKLTYDEAVQACLNDGAQIAKVGQIFAAWKILGYDRCDAGWLADGSVRYPISRPRRRCSPTEAAVRFVGFPDKKHKLYGVYCFRAYN

SEQ ID NO: 58250 - protein, 22 aa, Homo sapiens
LKPTRKFAYLGRLTRLAGSTRQ

SEQ ID NO: 58251 - protein, 19 aa, Homo sapiens
RGGKAPLFSHHSRPLQEFV

SEQ ID NO: 58252 - protein, 84 aa, Homo sapiens
ILLKAVGDTPIMKTKKWAVERTRTIQGLIDFIKKFLKLVASEQLFIYVNQSFAPSPDQEVGTLYECFGSDGKLVLHYCKSQAWG

SEQ ID NO: 58253 - protein, 30 aa, Homo sapiens
RDLRRQLHKAVMDHVSDSFLETNVPLLVLT

SEQ ID NO: 58254 - protein, 18 aa, Homo sapiens
IVLAKQMCMIMMEVTDFT

SEQ ID NO: 58255 - protein, 7 aa, Homo sapiens
LELCFER

SEQ ID NO: 58256 - protein, 1102 aa, Homo sapiens
MKDFIGDRSIPKLVAIPKPTVPPSADEKSNPNFFEQRHGGSHQSSKWTPVGPAPSTSQSQKRSSGLQSGHSSQRTSAGSSSGTNSSGQRHDRESYNNSGSSSRKKGQHGSEHSKSRSSSPGKPQAVSSLNSSHSRSHGNDHHSKEHQRSKSPRDPDANWDSPSRVPFSSGQHSTQSFPPSLMSKSNSMLQKPTAYVRPMDGQESMEPKLSSEHYSSQSHGNSMTELKPSSKAHLTKLKIPSQPLDASASGDVSCVDEILKEMTHSWPPPLTAIHTPCKTEPSKFPFPTKESQQSNFGTGEQKRYNPSKTSNGHQSKSMLKDDLKLSSSEDSDGEQDCDKTMPRSTPGSNSEPSHHNSEGADNSRDDSSSHSGSESSSGSDSESESSSSDSEANEPSQSASPEPEPPPTNKWQLDNWLNKVNPHKVSPASSVDSNIPSSQGYKKEGREQGTGNSYTDTSGPKETSSATPGRDSKTIQKGSESGRGRQKSPAQSDSTTQRRTVGKKQPKKAEKAAAEEPRGGLKIESETPVDLASSMPSSRHKAATKGSRKPNIKKESKSSPRPTAEKKKYKSTSKSSQKSREIIETDTSSSDSDESESLPPSSQTPKYPESNRTPVKPSSVEEEDSFFRQRMFSPMEEKELLSPLSEPDDRYPLIVKIDLNLLTRIPGKPYKETEPPKGEKKNVPEKHTREAQKQASEKVSNKGKRKHKNEDDNRASESKKPKTEDKNSAGHKPSSNRESSKQSAAKEKDLLPSPAGPVPSKDPKTEHGSRKRTISQSSSLKSSSNSNKETSGSSKNSSSTSKQKKTEGKTSSSSKEVKEKAPSSSSNCPPSAPTLDSSKPRRTKLVFDDRNYSADHYLQEAKKLKHNADALSDRFEKAVYYLDAVVSFIECGNALEKNAQESKSPFPMYSETVDLIKYTMKLKNYLAPDATAADKRLTVLCLRCESLLYLRLFKLKKENALKYSKTLTEHLKNSYNNSQAPSPGLGSKAVGMPSPVSPKLSPGNSGNYSSGASSASASGSSVTIPQKIHQMAASYVQVTSNFLYATEIWDQAEQLSKEQKEFFAELDKVMGPLIFNASIMTDLVRYTRQGLHWLRQDAKLIS

SEQ ID NO: 58257 - protein, 81 aa, Homo sapiens
IRYVISQGNDDSVFRIHQRNGLSYLHTAKKKLMPGTYTLEITSIPLYKKKELKKLEESNEDDYLLGELGEALRMRLQIQLY

SEQ ID NO: 58258 - protein, 21 aa, Homo sapiens
LRMTGALLSMTFPLKHQHIFW

SEQ ID NO: 58259 - protein, 216 aa, Homo sapiens
TPSRGLRSLQSQTLSDLDMSFIFDWIYSGFSSVLQFLGLYKKTGKLVFLGLDNAGKTTLLHMLKDDRLGQHVPTLHPTSEELTIAGMTFTTFDLGGHVQARRVWKNYLPAINGIVFLVDCADHERLLESKEELDSLMTDETIANVPILILGNKIDRPEAISEERLREMFGLYGQTTGKGSISLKELNARPLEVFMCSVLKRQGYGEGFRWMAQYID

SEQ ID NO: 58260 - protein, 285 aa, Homo sapiens
VANDEELNQLLKGVTIASGGVLPNIHPELLAKKRGSKGKLEAIITPPPAKKAKSPSQKKPVSKKAGGKKGARKSKKKQGEVSKAASADSTTEGTPADGFTVLSTKSLFLGQKLQVVQADIASIDSDAVVHPTNTDFYIGGEVGNTLEKKGGKEFVEAVLELRKKNGPLEVAGAAVSAGHGLPAKFVIHCNSPVWGADKCEELLEKTVKNCLALADDKKLKSIAFPSIGSGRNGFPKQTAAQLILKAISSYFVSTMSSSIKTVYFVLFDSESIGIYVQEMAKLDAN

SEQ ID NO: 58261 - protein, 214 aa, Homo sapiens
KERGWNDPPQFSYGLQTQAGGPRRSLLTKRVAAPQDGSPRVPASETSPGPPPMGPPPPSSKAPRSPPVGSGPASGVEPTSFPVESEAVMEDVLRPLEQALEDCRGHTRKQVCDDISRRLALLQEQWAGGKLSIPVKKRMALLVQELSSHRWDAADDIHRSLMVDHVTEVSQWMVGVKRLIAEKRSLFSEEAANEEKSAATAEKNHTIPGFQQAS

SEQ ID NO: 58262 - protein, 112 aa, Homo sapiens
LGPDESKQKFVLKTPKETLMGKYGEDSKLIYDLKDQGGELLSLRYDLTVPFARYLAMNKLTNIKRYHIAKVYRRDNPAMTRGRYREFYQCVSVGKPWGRMSYLGLSQASRIY

SEQ ID NO: 58263 - protein, 10 aa, Homo sapiens
IASDLMNLSL

SEQ ID NO: 58264 - protein, 463 aa, Homo sapiens
LTMAPQSLPSSRMAPLGMLLGLLMAACFTFCLSHQNLKEFALTNPEKSSTKETERKETKAEEELDAEVLEVFHPTHEWQALQPGQAVPAGSHVRLNLQTGEREAKLQYEDKFRNNLKGKRLDINTNTYTSQDLKSALAKFKEGAEMESSKEDKARQAEVKRLFRPIEELKKDFDELNVVIETDMQIMVRLINKFNSSSSSLEEKIAALFDLEYYVHQMDNAQDLLSFGGLQVVINGLNSTEPLVKEYAAFVLGAAFSSNPKVQVEAIEGGALQKLLVILATEQPLTAKKKVLFALCSLLRHFPYAQRQFLKLGGLQVLRTLVQEKGTEVLAVRVVTLLYDLVTEKMFAEEEAELTQEMSPEKLQQYRQVHLLPGLWEQGWCEITAHLLALPEHDAREKVLQTLGVLLTTCRDRYRQDPQLGRTLASLQAEYQVLASLELQDGEDEGYFQELLGSVNSLLKELR

SEQ ID NO: 58265 - protein, 40 aa, Homo sapiens
KHAEKNWFVGLKKNGSCKRGPRTHYGQKAILFLPLPVSSD

SEQ ID NO: 58266 - protein, 62 aa, Homo sapiens
MISRIEYVHTKNFIHRDIKPDNFLMGIGRHCNKCLESPVGKRKRSMTVSTSQDPSFSGLNQF

SEQ ID NO: 58267 - protein, 21 aa, Homo sapiens
RLATRTCLLKNLWSRHSPALG

SEQ ID NO: 58268 - protein, 9 aa, Homo sapiens
MWCLSLSPA

SEQ ID NO: 58269 - protein, 36 aa, Homo sapiens
VHTPRSGEGTVLRGSNLYSSGGSRKSQNLLFSGWVM

SEQ ID NO: 58270 - protein, 61 aa, Homo sapiens
KINNRASEEAFVKESKEETPGTEWEKVAQLCDFNPKSSKQCKDVSRLRSVLMSLKQTPLSR

SEQ ID NO: 58271 - protein, 430 aa, Homo sapiens
TSSSSGVNLAKGVMRFAWTVLLLGPLQLCALVHCAPPAAGQQQPPREPPAAPGAWRQQIQWENNGQVFSLLSLGSQYQPQRRRDPGAAVPGAANASAQQPRTPILLIRDNRTAAARTRTAGSSGVTAGRPRPTARHWFQAGYSTSRAREAGASRAENQTAPGEVPALSNLRPPSRVDGMVGDDPYNPYKYSDDNPYYNYYDTYERPRPGGRYRPGYGTGYFQYGLPDLVADPYYIQASTYVQKMSMYNLRCAAEENCLASTAYRADVRDYDHRVLLRFPQRVKNQGTSDFLPSRPRYSWEWHSCHQHYHSMDEFSHYDLLDANTQRRVAEGHKASFCLEDTSCDYGYHRRFACTAHTQGLSPGCYDTYGADIDCQWIDITDVKPGNYILKVSVNPSYLVPESDYTNNVVRCDIRYTGHHAYASGCTISPY

SEQ ID NO: 58272 - protein, 4 aa, Homo sapiens
MAAS

SEQ ID NO: 58273 - protein, 17 aa, Homo sapiens
IESHRHELQGQKPLLEH

SEQ ID NO: 58274 - protein, 309 aa, Homo sapiens
LRVPSTMRAWIFFLLCLAGRALAAPQQEALPDETEVVEETVAEVTEVSVGANPVQVEVGEFDDGAEETEEEVVAENPCQNHHCKHGKVCELDENNTPMCVCQDPTSCPAPIGEFEKVCSNDNKTFDSSCHFFATKCTLEGTKKGHKLHLDYIGPCKYIPPCLDSELTEFPLRMRDWLKNVLVTLYERDEDNNLLTEKQKLRVKKIHENEKRLEAGDHPVELLARDFEKNYNMYIFPVHWQFGQLDQHPIDGYLSHTELAPLRAPLIPMEHCTTRFFETCDLDNDKYIALDEWAGCFGIKQKDIDKDLVI

SEQ ID NO: 58275 - protein, 14 aa, Homo sapiens
MKILTQDMTFLAVT

SEQ ID NO: 58276 - protein, 40 aa, Homo sapiens
MKMELEQANERECEVLKKIWGSAQGMDSMLKYLQRKIDEF

SEQ ID NO: 58277 - protein, 53 aa, Homo sapiens
RNVWVFLATSGTLAGIMGMRFYHSGKFMPAGLIAGASLLMVAKVGVSMFNRPH

SEQ ID NO: 58278 - protein, 94 aa, Homo sapiens
LVVSGGIVGYVKTGSVPSLAAGLLFGSLAGLGAYQLYQDPRNVWGFLAATSVTFVGVMGMRSYYYGKFMPVGLIAGASLLMAAKVGVRMLMTSD

SEQ ID NO: 58279 - protein, 116 aa, Homo sapiens
LGKITLVSAAPGKVICEMKVEEEHTNAIGTLHGGLTATLVDNISTMALLCTERGAPGVSVDMNITYMSPAKLGEDIVITAHVLKQGKTLAFTSVDLTNKATGKLIAQGRHTKHLGN

SEQ ID NO: 58280 - protein, 23 aa, Homo sapiens
LIRVKTSEDADELHKILLEKKDA

SEQ ID NO: 58281 - protein, 44 aa, Homo sapiens
LQEACEAYLVGLFEDTNLCAIHAKRVTIMPKDIQLARRIRGERA

SEQ ID NO: 58282 - protein, 82 aa, Homo sapiens
VLRDNIQGITKPAIRRLARRGGVKRISGLIYEETRGVLKVFLENVIRDAVTYTEHAKRKTVTAMDVVYALKRQGRTLYGFGG

SEQ ID NO: 58283 - protein, 41 aa, Homo sapiens
LENVIRDAVTYTEHAKRKTVTAMDVVYALKRQGRTLYGFGG

SEQ ID NO: 58284 - protein, 16 aa, Homo sapiens
VLLPKKTESHHKAKGK

SEQ ID NO: 58285 - protein, 42 aa, Homo sapiens
LRIHTGEKPYQCNECGKAFIQRSSLIRHQRIHSGEKSESISV

SEQ ID NO: 58286 - protein, 44 aa, Homo sapiens
TDPDIDKKERKKMVKEAQREKRKNKIPKHVKKRKEKTAKTKKGK

SEQ ID NO: 58287 - protein, 2875 aa, Homo sapiens
LPADMSCNGGSHPRINTLGRMIRAESGPDLRYEVTSGGGGTSRMYYSRRGVITDQNSDGYCQTGTMSRHQNQNTIQELLQNCSDCLMRAELIVQPELKYGDGIQLTRSRELDECFAQANDQMEILDSLIREMRQMGQPCDAYQKRLLQLQEQMRALYKAISVPRVRRASSKGGGGYTCQSGSGWDEFTKHVTSECLGWMRQQRAEMDMVAWGVDLASVEQHINSHRGIHNSIGDYRWQLDKIKADLREKSAIYQLEEEYENLLKASFERMDHLRQLQNIIQATSREIMWINDCEEEELLYDWSDKNTNIAQKQEAFSIRMSQLEVKEKELNKLKQESDQLVLNQHPASDKIEAYMDTLQTQWSWILQITKCIDVHLKENAAYFQFFEEAQSTEAYLKGLQDSIRKKYPCDKNMPLQHLLEQIKELEKEREKILEYKRQVQNLVNKSKKIVQLKPRNPDYRSNKPIILRALCDYKQDQKIVHKGDECILKDNNERSKWYVTGPGGVDMLVPSVGLIIPPPNPLAVDLSCKIEQYYEAILALWNQLYINMKSLVSWHYCMIDIEKIRAMTIAKLKTMRQEDYMKTIADLELHYQEFIRNSQGSEMFGDDDKRKIQSQFTDAQKHYQTLVIQLPGYPQHQTVTTTEITHHGTCQDVNHNKVIETNRENDKQETWMLMELQKIRRQIEHCEGRMTLKNLPLADQGSSHHITVKINELKSVQNDSQAIAEVLNQLKDMLANFRGSEKYCYLQNEVFGLFQKLENINGVTDGYLNSLCTVRALLQAILQTEDMLKVYEARLTEEETVCLDLDKVEAYRCGLKKIKNDLNLKKSLLATMKTELQKAQQIHSQTSQQYPLYDLDLGKFGEKVTQLTDRWQRIDKQIDFRLWDLEKQIKQLRNYRDNYQAFCKWLYDAKRRQDSLESMKFGDSNTVMRFLNEQKNLHSEISGKRDKSEEVQKIAELCANSIKDYELQLASYTSGLETLLNIPIKRTMIQSPSGVILQEAADVHARYIELLTRSGDYYRFLSEMLKSLEDLKLKNTKIEVLEEELRLARDANSENCNKNKFLDQNLQKYQAECSQFKAKLASLEELKRQAELDGKSAKQNLDKCYGQIKELNEKITRLTYEIEDEKRRRKSVEDRFDQQKNDYDQLQKARQCEKENLGWQKLESEKAIKEKEYEIERLRVLLQEEGTRKREYENELAKVRNHYNEEMSNLRNKYETEINITKTTIKEISMQKEDDSKNLRNQLDRLSRENRDLKDEIVRLNDSILQATEQRRRAEENALQQKACGSEIMQKKQHLEIELKQVMQQRSEDNARHKQSLEEAAKTIQDKNKEIERLKAEFQEEAKRRWEYENELSKVRNNYDEEIISLKNQFETEINITKTTIHQLTMQKEEDTSGYRAQIDNLTRENRSLSEEIKRLKNTLTQTTENLRRVEEDIQQQKATGSEVSQRKQQLEVELRQVTQMRTEESVRYKQSLDDAAKTIQDKNKEIERLKQLIDKETNDRKCLEDENARLQRVQYDLQKANSSATETINKLKVQEQELTRLRIDYERVSQERTVKDQDITRFQNSLKELQLQKQKVEEELNRLKRTASEDSCKRKKLEEELEGMRRSLKEQAIKITNLTQQLEQASIVKKRSEDDLRQQRDVLDGHLREKQRTQEELRRLSSEVEALRRQLLQEQESVKQAHLRNEHFQKAIEDKSRSLNESKIEIERLQSLTENLTKEHLMLEEELRNLRLEYDDLRRGRSEADSDKNATILELRSQLQISNNRTLELQGLINDLQRERENLRQEIEKFQKQALEASNRIQESKNQCTQVVQERESLLVKIKVLEQDKARLQRLEDELNRAKSTLEAETRVKQRLECEKQQIQNDLNQWKTQYSRKEEAIRKIESEREKSEREKNSLRSEIERLQAEIKRIEERCRRKLEDSTRETQSQLETERSRYQREIDKLRQRPYGSHRETQTECEWTVDTSKLVFDGLRKKVTAMQLYECQLIDKTTLDKLLKGKKSVEEVASEIQPFLRGAGSIAGASASPKEKYSLVEAKRKKLISPESTVMLLEAQAATGGIIDPHRNEKLTVDSAIARDLIDFDDRQQIYAAEKAITGFDDPFSGKTVSVSEAIKKNLIDRETGMRLLEAQIASGGVVDPVNSVFLPKDVALARGLIDRDLYRSLNDPRDSQKNFVDPVTKKKVSYVQLKERCRIEPHTGLLLLSVQKRSMSFQGIRQPVTVTELVDSGILRPSTVNELESGQISYDEVGERIKDFLQGSSCIAGIYNETTKQKLGIYEAMKIGLVRPGTALELLEAQAATGFIVDPVSNLRLPVEEAYKRGLVGIEFKEKLLSAERAVTGYNDPETGNIISLFQAMNKELIEKGHGIRLLEAQIATGGIIDPKESHRLPVDIAYKRGYFNEELSEILSDPSDDTKGFFDPNTEENLTYLQLKERCIKDEETGLCLLPLKEKKKQVQTSQKNTLRKRRVVIVDPETNKEMSVQEAYKKGLIDYETFKELCEQECEWEEITITGSDGSTRVVLVDRKTGSQYDIQDAIDKGLVDRKFFDQYRSGSLSLTQFADMISLKNGVGTSSSMGSGVSDDVFSSSRHESVSKISTISSVRNLTIRSSSFSDTLEESSPIAAIFDTENLEKISITEGIERGIVDSITGQRLLEAQACTGGIIHPTTGQKLSLQDAVSQGVIDQDMATRLKPAQKAFIGFEGVKGKKKMSAAEAVKEKWLPYEAGQRFLEFQYLTGGLVDPEVHGRISTEEAIRKGFIDGRAAQRLQDTSSYAKILTCPKTKLKISYKDAINRSMVEDITGLRLLEAASVSSKGLPSPYNMSSAPGSRSGSRSGSRSGSRSGSRSGSRRGSFDATGNSSYSYSYSFSSSSIGH

SEQ ID NO: 58288 - protein, 28 aa, Homo sapiens
KDKNCESRRRKERDGERHHSHKRRKQKI

SEQ ID NO: 58289 - protein, 78 aa, Homo sapiens
VTNDFVMLKGCVVGTKKWVLTLRKTLLVQTKQRALEKIDLKFIDTHSKFGHGRFQTMEEKKAFMGPLKKDRIAKEEGA

SEQ ID NO: 58290 - protein, 15 aa, Homo sapiens
LLCMHAMGLHCNENE

SEQ ID NO: 58291 - protein, 236 aa, Homo sapiens
LEVATSLPHPSPGPRPAADVKMSSSEEVSWISWFCGLRGNEFFCEVDEDYIQDKFNLTGLNEQVPHYRQALDMILDLEPDEELEDNPNQSDLIEQAAEMLYGLIHARYILTNRGIAQMLEKYQQGDFGYCPRVYCENQPMLPIGLSDIPGEAMVKLYCPKCMDVYTPKSSRHHHTDGAYFGTGFPHMLFMVHPEYRPKRPANQFVPRLYGFKIHPMAYQLQLQAASNFKSPVKTIR

SEQ ID NO: 58292 - protein, 211 aa, Homo sapiens
ISPYKDEPWKYLESEEYQERYGSRPVWADYRRNHKGGVPPQRTRKTCIRRNKVVGNPCPICRDHKLHVDFRNVKLLEQFVCAHTGIIFYAPYTGVCVKQHKRLTQAIQKARDHGLLIYHIPQVEPRDLDFSTSHGAVSATPPAPTLVSGDPWYPWYNWKQPPERELSRLRRLYQGHLQEESGPPPESMPKMPPRTPAEASSTGQTGPQSAL

SEQ ID NO: 58293 - protein, 69 aa, Homo sapiens
IVQLGFDLDAHGIIFTEDYRTRVLKACDGRPYAGAVQKFLASVLPACGDLSFQQDQMTQTFGFRDSEIT

SEQ ID NO: 58294 - protein, 17 aa, Homo sapiens
VDHRVILGNELPKFYDE

SEQ ID NO: 58295 - protein, 41 aa, Homo sapiens
LAHARELGVLVFENSAKRLMVVTPAGHSDVKRFWKRQKHSS

SEQ ID NO: 58296 - protein, 624 aa, Homo sapiens
VGVFQHGKVEIIANDQGNRTTPSYVAFTDTERLIGDAAKNQVALNPQNTVFDAKRLIGRKFGDPVVQSDMKHWPFQVINDGDKPKVQVSYKGETKAFYPEEISSMVLTKMKEIAEAYLGYPVTNAVITVPAYFNDSQRQATKDAGVIAGLNVLRIINEPTAAAIAYGLDRTGKGERNVLIFDLGGGTFDVSILTIDDGIFEVKATAGDTHLGGEDFDNRLVNHFVEEFKRKHKKDISQNKRAVRRLRTACERAKRTLSSSTQASLEIDSLFEGIDFYTSITRARFEELCSDLFRSTLEPVEKALRDAKLDKAQIHDLVLVGGSTRIPKVQKLLQDFFNGRDLNKSINPDEAVAYGAAVQAAILMGDKSENVQDLLLLDVAPLSLGLETAGGVMTALIKRNSTIPTKQTQIFTTYSDNQPGVLIQVYEGERAMTKDNNLLGRFELSGIPPAPRGVPQIEVTFDIDANGILNVTATDKSTGKANKITITNDKGRLSKEEIERMVQEAEKYKAEDEVQRERVSAKNALESYAFNMKSAVEDEGLKGKISEADKKKVLDKCQEVISWLDANTLAEKDEFEHKRKELEQVCNPIISGLYQGAGGPGPGGFGAQGPKGGSGSGPTIEEVD

SEQ ID NO: 58297 - protein, 12 aa, Homo sapiens
KTFIAVLSLSKE

SEQ ID NO: 58298 - protein, 453 aa, Homo sapiens
VTYATYPKIWVKVSEADSSNADWVTKQLNEINYEDHKLKSGTNTKKALQAVYSMMSWPDDVPPEGWNRTRHVIILMTDGLHNMGGDPITVIDEIRDLLYIGKDRKNPREDYLDVYVFGVGPLVNQVNINALASKKDNEQHVFKVKDMENLEDVFYQMIDESQSLSLCGMVWEHRKGTDYHKQPWQAKISVIRPSKGHESCMGAVVSEYFVLTAAHCFTVDDKEHSIKVSVGGEKRDLEIEVVLFHPNYNINGKKEAGIPEFYDYDVALIKLKNKLKYGQTIRPICLPCTEGTTRALRLPPTTTCQQQKEELLPAQDIKALFVSEEEKKLTRKEVYIKNGDKKGSCERDAQYAPGYDKVKDISEVVTPRFLCTGGVSPYADPNTCRGDSGGPLIVHKRSRFIQVGVISWGVVDVCKNQKRQKQVPAHARDFHINLFQVLPWLKEKLQDEDLGFL

SEQ ID NO: 58299 - protein, 57 aa, Homo sapiens
KLSEQLKHCNGILKELLSKKHAAYAWPFYKPVDASALGLHDYHDIIKHPMDLSTVKT

SEQ ID NO: 58300 - protein, 136 aa, Homo sapiens
VHIIQAREPSLRDSNPEEIEIDFETLKPSTLRELERYVLSCLRKKPRKPYTIKKPVGKTKEELALEKKRELEKRLQDVSGQLNSTKKPPKKANEKTESSSAQQVAVSRLSASSSSSDSSSSSSSSSSSDTSDSDSG

SEQ ID NO: 58301 - protein, 39 aa, Homo sapiens [sequence omitted]

SEQ ID NO: 58302 - protein, 38 aa, Homo sapiens
LMEYLENPKKYIPGTKMIFVGIKKGRKGRLDSLSQKSY

SEQ ID NO: 58303 - protein, 28 aa, Homo sapiens
LTLELVNEKFWKVSRPLELCYAPTKDPK

SEQ ID NO: 58304 - protein, 35 aa, Homo sapiens
LVLDNCINKMVNNLSSEVKERRIVLIRERKAKRLF

SEQ ID NO: 58305 - protein, 169 aa, Homo sapiens
LFSEETTSDNNNTSITTPTLSPSQQPLPTELNVTSPSKEECGPCTDTAHVSLITPTKRSCGTDSQSENEASPVKRPRLLENTERSEETSRSKQKSRRRCFQCQTKLELVQQELGSCRCGYVFCMLHRLPEQHDCTFDHMGRGREEAIMKMVKLDRKVGRSCQRIGEGCS

SEQ ID NO: 58306 - protein, 21 aa, Homo sapiens
IMDHEEARRKHTGGKILGFFF

SEQ ID NO: 58307 - protein, 299 aa, Homo sapiens
IIHAKRTYRELRLLKHMKHENVIGLLDVFTPARSLEEFNDVYLVTHLMGADLNNIVKCQKLTDDHVQFLIYQILRGLKYIHSADIIHRDLKPSNLAVNEDCELKILDFGLARHTDDEMTGYVATRWYRAPEIMLNWMHYNQTVDIWSVGCIMAELLTGRTLFPGTDHIDQLKLILRLVGTPGAELLKKISSESARNYIQSLTQMPKMNFANVFIGANPLAVDLLEKMLVLDSDKRITAAQALAHAYFAQYHDPDDEPVADPYDQSFESRDLLIDEWKSLTYDEVISFVPPPLDQEEMES

SEQ ID NO: 58308 - protein, 30 aa, Homo sapiens
LILNLGLFAAGVWLARNLSDIDLMAPQPGV

SEQ ID NO: 58309 - protein, 7 aa, Homo sapiens
MVITARK

SEQ ID NO: 58310 - protein, 55 aa, Homo sapiens
LQKSFLQPHSSNPQVVSAVSHQGKRNPKSPLACTNKRPRPEGMQTLESFFKPLTH

SEQ ID NO: 58311 - protein, 128 aa, Homo sapiens
IVPRLRTRNTRTDAILLGHYRLSQDTDNQTKVFAVITKKKEEKPLDYKYRYFRRVPVQEADQSFHVGLQLCSSGHQRFNKLIWIHHSCHITYKSTGETAVSAFEIDKMYTPLFFARVRSYTAFSERPL

SEQ ID NO: 58312 - protein, 11 aa, Homo sapiens
RSYTAFSERPL

SEQ ID NO: 58313 - protein, 37 aa, Homo sapiens
MHIRKATKYLKDVTLQKQCVPFQRYNAGVGRCAQAKQ

SEQ ID NO: 58314 - protein, 6 aa, Homo sapiens
MRTMRQ

SEQ ID NO: 58315 - protein, 60 aa, Homo sapiens [sequence omitted]

SEQ ID NO: 58316 - protein, 74 aa, Homo sapiens
VIKTGRLLISHEAPLTGGFASEISSTVQEECFLNLEAPISRVCGYDTPFPHIFEPFYIPDKWKCYDALRKMINY

SEQ ID NO: 58317 - protein, 395 aa, Homo sapiens
LGWVSSSSPTSSASSFSSSAPFLASAVSAQPPLPDQCPALCECSEAARTVKCVNRNLTEVPTDLPAYVRNLFLTGNQLAVLPAGAFARRPPLAELAALNLSGSRLDEVRAGAFEHLPSLRQLDLSHNPLADLSPFAFSGSNASVSAPSPLVELILNHIVPPEDERQNRSFEGMVVAALLAGRALQGLRRLELASNHFLYLPRDVLAQLPSLRHLDLSNNSLVSLTYVSFRNLTHLESLHLEDNALKVLHNGTLAELQGLPHIRVFLDNNPWVCDCHMADMVTWLKETEVVQGKDRLTCAYPEKMRNRVLLELNSADLDCDPILPPSLQTSYVFLGIVLALIGAIFLLVLYLNRKGIKKWMHNIRDACRDHMEGYHYRYEINADPRLTNLSSNSDV

SEQ ID NO: 58318 - protein, 1416 aa, Homo sapiens
VTAPGIIRPGGNVTIGVELLEHCPSQVTVKAELLKTASNLTVSVLEAEGVFEKGSFKTLTLPSLPLNSADEIYELRVTGRTQDEILFSNSTRLSFETKRISVFIQTDKALYKPKQEVKFRIVTLFSDFKPYKTSLNILIKDPKSNLIQQWLSQQSDLGVISKTFQLSSHPILGDWSIQVQVNDQTYYQSFQVSEYVLPKFEVTLQTPLYCSMNSKHLNGTITAKYTYGKPVKGDVTLTFLPLSFWGKKKNITKTFKINGSANFSFNDEEMKNVMDSSNGLSEYLDLSSPGPVEILTTVTESVTGISRNVSTNVFFKQHDYIIEFFDYTTVLKPSLNFTATVKVTRADGNQLTLEERRNNVVITVTQRNYTEYWSGSNSGNQKMEAVQKINYTVPQSGTFKIEFPILEDSSELQLKAYFLGSKSSMAVHSLFKSPSKTYIQLKTRDENIKVGSPFELVVSGNKRLKELSYMVVSRGQLVAVGKQNSTMFSLTPENSWTPKACVIVYYIEDDGEIISDVLKIPVQLVFKNKIKLYWSKVKAEPSEKVSLRISVTQPDSIVGIVAVDKSVNLMNASNDITMENVVHELELYNTGYYLGMFMNSFAVFQECGLWVLTDANLTKDYIDGVYDNAEYAERFMEENEGHIVDIHDFSLGSSPHVRKHFPETWIWLDTNMGYRIYQEFEVTVPDSITSWVATGFVISEDLGLGLTTTPVELQAFQPFFIFLNLPYSVIRGEEFALEITIFNYLKDATEVKVIIEKSDKFDILMTSNEINATGHQQTLLVPSEDGATVLFPIRPTHLGEIPITVTALSPTASDAVTQMILVKAEGIEKSYSQSILLDLTDNRLQSTLKTLSFSFPPNTVTGSERVQITAIGDVLGPSINGLASLIRMPYGCGEQNMINFAPNIYILDYLTKKKQLTDNLKEKALSFMRQGYQRELLYQREDGSFSAFGNYDPSGSTWLSAFVLRCFLEADPYIDIDQNVLHRTYTWLKGHQKSNGEFWDPGRVIHSELQGGNKSPVTLTAYIVTSLLGYRKYQPNIDVQESIHFLESEFSRGISDNYTLALITYALSSVGSPKAKEALNMLTWRAEQEGGMQFWVSSESKLSDSWQPRSLDIEVAAYALLSHFLQFQTSEGIPIMRWLSRQRNSLGGFASTQDTTVALKALSEFAALMNTERTNIQVTVTGPSSPSPVKFLIDTHNRLLLQTAELAVVQPTAVNISANGFGFAICQLNVVYNVKASGSSRRRRSIQNQEAFDLDVAVKENKDDLNHVDLNVCTSFSGPGRSGMALMEVNLLSGFMVPSEAISLSETVKKVEYDHGKLNLYLDSVNETQFCVNIPAVRNFKVSNTQDASVSIVDYYEPRRQAVRSYNSEVKLSSCDLCSDVQGCRPCEDGASGSHHHSSVIFIFCFKLLYFMELWL

SEQ ID NO: 58319 - protein, 32 aa, Homo sapiens
KPNSKKRKISLPIAFMFQGIGQRDKRTPQGSN

SEQ ID NO: 58320 - protein, 6 aa, Homo sapiens
LPKPLL

SEQ ID NO: 58321 - protein, 10 aa, Homo sapiens
LGSGDSFLSL

SEQ ID NO: 58322 - protein, 102 aa, Homo sapiens
MKSDGTYWTIHITPEPEFSYVSFETNLSQTSYDDLIRKVVEVFKPGKFVTTLFVNQSSKCRTVLASPQKIEGFKRLDCQSAMFNDYNFVFTSFAKKQQQQQS

SEQ ID NO: 58323 - protein, 192 aa, Homo sapiens
LVLVELSGIIDSDFLSKCENKCKVLGIDTERPILQVDSCVFAGEYEDTLGTCVIFEENVEHADTEGNNKTVLKYKCHTMKKLSMTRTLLTEKKEGEENIGGVEWLQIKDNDFSYRPNMICNFLHENEDEEVVASAPDKSLELEEEEIQMNDSSNLSCEQEKPMHLEIEDSGPLIDIPSETEGSVFMETQMLP

SEQ ID NO: 58324 - protein, 254 aa, Homo sapiens
LGDLWARARATMTDYGEEQRNELEALESIYPDSFTVLSENPPSFTITVTSEAGENDETVQTTLKFTYSEKYPDEAPLYEIFSQENLEDNDVSDILKLLALQAEENLGMVMIFTLVTAVQEKLNEIVDQIKTRREEEKKQKEKEAEEAEKQLFHGTPVTIENFLNWKAKFDAELLEIKKKRMKEEEQAGKNKLSGKQLFETDHNLDTSDIQFLEDAGNNVEVDESLFQEMDDLELEDDEDDPDYNPADPESDSAD

SEQ ID NO: 58325 - protein, 146 aa, Homo sapiens
LMDEILKQQQELLGLDCSKYSPEFANSNDKDDQVLNCHLAVKVLSPEDGKADIVRAAQDFCQLVAQKQKRPTDLDVDTLASLLSSNGCPDPDLVLKFGPVDSTLGFLPWHIRLTEIVSLPSHLNISYEDFFSALRQYAACEQRLGK

SEQ ID NO: 58326 - protein, 163 aa, Homo sapiens
IIYVGSAESEEYDQVLDSVLVGPVPAGRHMFVFQADAPNPGLIPDADAVGVTVVLITCTYRGQEFIRVGYYVNNEYTETELRENPPVKPDFSKLQRNILASNPRVTRFHINWEDNTEKLEDAESSNPNLQSLLSTDALPSASKGWSTSENSLNVMLESHMDCM

SEQ ID NO: 58327 - protein, 90 aa, Homo sapiens
IGNCRTLRKDQVELVENMVTVGKTILERNNFTDFTNVRMGFHMPPFCSISHLHLHVLAPVDQLGFLSKLVYRVNSYWFITADHLIEKLRT

SEQ ID NO: 58328 - protein, 387 aa, Homo sapiens
LFCPLHHPHPPPSGVCAAAAVAAAAAAAARPVVTPTRGSLFPLLDLLSFFVEEASMGAQFSKTAAKGEAAAERPGEAAVASSPSKANGQENGHVKVNGDASPAAAESGAKEELQANGSAPAADKEEPAAAGSGAASPSAAEKGEPAAAAAPEAGASPVEKEAPAEGEAAEPGSPTAAEGEAASAASSTSSPKAEDGATPSPSNETPKKKKKRFSFKKSFKLSGFSFKKNKKEAGEGGEAEAPAAEGGKDEAAGGAAAAAAEAGAASGEQAAAPGEEAAAGEEGAAGGDPQEAKPQEAAVAPEKPPASDETKAAEEPSKVEEKKAEEAGASAAACEAPSAAGPGAPPEQEAAPAEEPAAAAASSACAAPSQEAQPECSPEAPPAEAAE

SEQ ID NO: 58329 - protein, 14 aa, Homo sapiens
MVWLPWRFGDLMPR

SEQ ID NO: 58330 - protein, 970 aa, Homo sapiens
LAALEIWRSDATMRTHTRGAPSVFFIYLLCFVSAYITDENPEVMIPFTNANYDSHPMLYFSRAEVAELQLRAASSHEHIAARLTEAVHTMLSSPLEYLPPWDPKDYSARWNEIFGNNLGALAMFCVLYPENIEARDMAKDYMERMAAQPSWLVKDAPWDEVPLAHSLVGFATAYDFLYNYLSKTQQEKFLEVIANASGYMYETSYRRGWGFQYLHNHQPTNCMALLTGSLVLMNQGYLQEAYLWTKQVLTIMEKSLVLLREVTDGSLYEGVAYGSYTTRSLFQYMFLVQRHFNINHFGHPWLKQHFAFMYRTILPGFQRTVAIADSNYNWFYGPESQLVFLDKFVMRNGSGNWLADQIRRNRVVEGPGTPSKGQRWCTLHTEFLWYDGSLKSVPPPDFGTPTLHYFEDWGVVTYGSALPAEINRSFLSFKSGKLGGRAIYDIVHRNKYKDWIKGWRNFNAGHEHPDQNSFTFAPNGVPFITEALYGPKYTFFNNVLMFSPAVSKSCFSPWVGQVTEDCSSKWSKYKHDLAASCQGRVVAAEEKNGVVFIRGEGVGAYNPQLNLKNVQRNLILLHPQLLLLVDQIHLGEESPLETAASFFHNVDVPFEETVVDGVHGAFIRQRDGLYKMYWMDDTGYSEKATFASVTYPRGYPYNGTNYVNVTMHLRSPITRAAYLFIGPSIDVQSFTVHGDSQQLDVFIATSKHAYATYLWTGEATGQSAFAQVIADRHKILFDRNSAIKSSIVPEVKDYAAIVEQNLQHFKPVFQLLEKQILSRVRNTASFRKTAERLLRFSDKRQTEEAIDRIFAISQQQQQQSKSKKNRRAGKRYKFVDAVPDIFAQIEVNEKKIRQKAQILAQKELPIDEDEEMKDLLDFADVTYEKHKNGGLIKGRFGQARMVTTTHSRAPSLSASYTRLFLILNIAIFFVMLAMQLTYFQRAQSLHGQRCLYAVLLIDSCILLWLYSSCSQSQC

SEQ ID NO: 58331 - protein, 130 aa, Homo sapiens
LMNELKQNFSKSWHDMQTTTAYKKTHETLSHAGQKATAAFSNVGTAISKKFGDMSYSIRHSISMPAMRNSPTFKSFEERVETTVTSLKTKVGGTNPNGGSFEEVLSSTAHASAQSLAGGSRRTKEEELQC

SEQ ID NO: 58332 - protein, 10 aa, Homo sapiens
LGAFKIQLHP

SEQ ID NO: 58333 - protein, 222 aa, Homo sapiens
VRGLCAADQAPRASAPPMAEPLQPDPGAAEDAAAQAVETPGWKAPEDAGPQPGSYEIRHYGPAKWVSTSVESMDWDSAIQTGFTKLNSYIQGKNEKEMKIKMTAPVTSYVEPGSGPFSESTITISLYIPSEQQFDPPRPLESDVFIEDRAEMTVFVRSFDGFSSAQKNQEQLLTLASILREDGKVFDEKVYYTAGYNSPVKLLNRNNEVWLIQKNEPTKENE

SEQ ID NO: 58334 - protein, 29 aa, Homo sapiens
KKLDEKENLSAKRSRIEQKEELDDVIALD

SEQ ID NO: 58335 - protein, 10 aa, Homo sapiens
KRYQVKFRRR

SEQ ID NO: 58336 - protein, 62 aa, Homo sapiens
ILRFNEYVEVTDSPDYDRRADKPWARLTPADKAAIRKELNEFKSTEMEVHEESRQFTRFHRP

SEQ ID NO: 58337 - protein, 12 aa, Homo sapiens
MLKYKDKKWYQF

SEQ ID NO: 58338 - protein, 1386 aa, Homo sapiens
KEIAEDELVAAEALLKKVKKLFGESRGENEEMEKDLREKLADYKNKVDDAWDLLREATDKIREANRLFAVNQKNMTALEKKKEAVESGKRQIENTLKEGNDILDEANRLADEINSIIDYVEDIQTKLPPMSEELNDKIDDLSQEIKDRKLAEKVSQAESHAAQLNDSSAVLDGILDEAKNISFNATAAFKAYSNIKDYIDEAEKVAKEAKDLAHEATKLATGPRGLLKEDAKGCLQKSFRILNEAKKLANDVKENEDHLNGLKTRIENADARNGDLLRTLNDTLGKLSAIPNDTAAKLQAVKDKARQANDTAKDVLAQITELHQNLDGLKKNYNKLADSVAKTNAVVKDPSKNKIIADADATVKNLEQEADRLIDKLKPIKELEDNLKKNISEIKELINQARKQANSIKVSVSSGGDCIRTYKPEIKKGSYNNIVVNVKTAVADNLLFYLGSAKFIDFLAIEMRKGKVSFLWDVGSGVGRVEYPDLTIDDSYWYRIVASRTGRNGTISVRALDGPKASIVPSTHHSTSPPGYTILDVDANAMLFVGGLTGKLKKADAVRVITFTGCMGETYFDNKPIGLWNFREKEGDCKGCTVSPQVEDSEGTIQFDGEGYALVSRPIRWYPNISTVMFKFRTFSSSALLMYLATRDLRDFMSVELTDGHIKVSYDLGSGMASVVSNQNHNDGKWKSFTLSRIQKQANISIVDIDTNQEENIATSSSGNNFGLDLKADDKIYFGGLPTLRNLSMKARPEVNLKKYSGCLKDIEISRTPYNILSSPDYVGVTKGCSLENVYTVSFPKPGFVELSPVPIDVGTEINLSFSTKNESGIILLGSGGTPAPPRRKRRQTGQAYYAILLNRGRLEVHLSTGARTMRKIVIRPEPNLFHDGREHSVHVERTRGIFTVQVDENRRYMQNLTVEQPIEVKKLFVGGAPPEFQPSPLRNIPPFEGCIWNLVINSVPMDFARPVSFKNADIGRCAHQKLREDEDGAAPAEIVIQPEPVPTPAFPTPTPVLTHGPCAAESEPALLIGSKQFGLSRNSHIAIAFDDTKVKNRLTIELEVRTEAESGLLFYMARINHADFATVQLRNGLPYFSYDLGSGDTHTMIPTKINDGQWHKIKIMRSKQEGILYVDGASNRTISPKKADILDVVGMLYVGGLPINYTTRRIGPVTYSIDGCVRNLHMAEAPADLEQPTSSFHVGTCFANAQRGTYFDGTGFAKAVGGFKVGLDLLVEFEFRTTTTTGVLLGISSQKMDGMGIEMIDEKLMFHVDNGAGRFTAVYDAGVPGHLCDGQWHKVTANKIKHRIELTVDGNQVEAQSPNPASTSADTNDPVFVGGFPDDLKQFGLTTSIPFRGCIRSLKLTKGTGKPLEVNFAKALELRGVQPVSCPAN

SEQ ID NO: 58339 - protein, 109 aa, Homo sapiens
MPSHQTYGGSWKFLTFIDLVIQAVFFGICVLTDLSSLLTRGSGNQEQERQLKKLISLRDWMLAVLAFPVGVFVVAVFWIIYAYDREMIYPKLLDNFIPGWLNHGMHFKA

SEQ ID NO: 58340 - protein, 146 aa, Homo sapiens
LAFPVGVFVVAVFWIIYAYDREMIYPKLLDNFIPGWLNHGMHTTVLPFILIEMRTSHHQYPSRSSGLTAICTFSVGYILWVCWVHHVTGMWVYPFLEHIGPGARIIFFGSTTILMNFLYLLGEVLNNYIWDTQKSMEEEKEKPKLE

SEQ ID NO: 58341 - protein, 23 aa, Homo sapiens
LRSQIEESLGFCSAVSTPEVERK

SEQ ID NO: 58342 - protein, 157 aa, Homo sapiens
IPWFVSDTTIHDFNWLIEQVKHSNHKWMSKCGADWEEYIKMGKWVYHNHIFWTLPHEYCAMPQVAPDLYAELQKAHLILFKGDLNYRKLTGDRKWEFSVPFHQALNGFHPAPLCTIRTLKAEIQVGLQPGQGEQLLASEPSWWTTGKYGIFQYDGPL

SEQ ID NO: 58343 - protein, 16 aa, Homo sapiens
LMVPEMTGEADASYGS

SEQ ID NO: 58344 - protein, 181 aa, Homo sapiens
IGACGFEPPHFLTLDLEMHRDSCPLDCKVYVGNLGNNGNKTELERAFGYYGPLRSVWVARNPPGFAFVEFEDPRDAADAVRELDGRTLCGCRVRVELSNGEKRSRNRGPPPSWGRRPRDDYRRRSPPPRRRSPRRRSFSRSRSRSLSRDRRRERSLSRERNHKPSRSFSRSRSRSRSNERK

SEQ ID NO: 58345 - protein, 465 aa, Homo sapiens
TLSKRHFVLVFVVFFICFGLTIFVGIRGPKVIQTSAANFSLNNSKKLKPIQILSNPLSTYNQQLWLTCVVELDQSKETSIKTSFPMTVKVDGVAQDGTTMYIHNKVHNRTRTLTCAGKCAEIIVAHLGYLNYTQYTVIVGFEHLKLPIKGMNFTWKTYNPAFSRLEIWFRFFFVVLTFIVTCLFAHSLRKFSMRDWGIEQKWMSVLLPLLLLYNDPFFPLSFLVNSWLPGMLDDLFQSMFLCALLLFWLCVYHGIRVQGERKCLTFYLPKFFIVGLLWLASVTLGIWQTVNELHDPMYQYRVDTGNFQGMKVFFMVVAAVYILYLLFLIVRACSELRHMPYVDLRLKFLTALTFVVLVISIAILYLRFGAQVLQDNFVAELSTHYQNSAEFLSFYGLLNFYLYTLAFVYSPSKNALYESQLKDNPAFSMLNDSDDDVIYGSDYEEMPLQNGQAIRAKYKEESDSD

SEQ ID NO: 58346 - protein, 5 aa, Homo sapiens
MRRNV

SEQ ID NO: 58347 - protein, 53 aa, Homo sapiens
VYLKSHHGEHERPEFIAYPHLRIRTKPFPWGDGNHTLFHNPHVNPLPTGYEDE

SEQ ID NO: 58348 - protein, 2444 aa, Homo sapiens
LCSYTWEAVDTKNNVLYKINICGSVDIVQCGPSSAVCMHDLKTRTYHSVGDSVLRSATRSLLEFNTTVSCDQQGTNHRVQSSIAFLCGKTLGTPEFVTATECVHYFEWRTTAACKKDIFKANKEVPCYVFDEELRKHDLNPLIKLSGAYLVDDSDPDTSLFINVCRDIDTLRDPGSQLRACPPGTAACLVRGHQAFDVGQPRDGLKLVRKDRLVLSYVREEAGKLDFCDGHSPAVTITFVCPSERREGTIPKLTAKSNCRYEIEWITEYACHRDYLESKTCSLSGEQQDVSIDLTPLAQSGGSSYISDGKEYLFYLNVCGETEIQFCNKKQAAVCQVKKSDTSQVKAAGRYHNQTLRYSDGDLTLIYFGGDECSSGFQRMSVINFECNKTAGNDGKGTPVFTGEVDCTYFFTWDTEYACVKEKEDLLCGATDGKKRYDLSALVRHAEPEQNWEAVDGSQTETEKKHFFINICHRVLQEGKARGCPEDAAVCAVDKNGSKNLGKFISSPMKEKGNIQLSYSDGDDCGHGKKIKTNITLVCKPGDLESAPVLRTSGEGGCFYEFEWHTAAACVLSKTEGENCTVFDSQAGFSFDLSPLTKKNGAYKVETKKYDFYINVCGPVSVSPCQPDSGACQVAKSDEKTWNLGLSNAKLSYYDGMIQLNYRGGTPYNNERHTPRATLITFLCDRDAGVGFPEYQEEDNSTYNFRWYTSYACPEEPLECVVTDPSTLEQYDLSSLAKSEGGLGGNWYAMDNSGEHVTWRKYYINVCRPLNPVPGCNRYASACQMKYEKDQGSFTEVVSISNLGMAKTGPVVEDSGSLLLEYVNGSACTTSDGRQTTYTTRIHLVCSRGRLNSHPIFSLNWECVVSFLWNTEAACPIQTTTDTDQACSIRDPNSGFVFNLNPLNSSQGYNVSGIGKIFMFNVCGTMPVCGTILGKPASGCEAETQTEELKNWKPARPVGIEKSLQLSTEGFITLTYKGPLSAKGTADAFIVRFVCNDDVYSGPLKFLHQDIDSGQGIRNTYFEFETALACVPSPVDCQVTDLAGNEYDLTGLSTVRKPWTAVDTSVDGRKRTFYLSVCNPLPYIPGCQGSAVGSCLVSEGNSWNLGVVQMSPQAAANGSLSIMYVNGDKCGNQRFSTRITFECAQISGSPAFQLQDGCEYVFIWRTVEACPVVRVEGDNCEVKDPRHGNLYDLKPLGLNDTIVSAGEYTYYFRVCGKLSSDVCPTSDKSKVVSSCQEKREPQGFHKVAGLLTQKLTYENGLLKMNFTGGDTCHKVYQRSTAIFFYCDRGTQRPVFLKETSDCSYLFEWRTQYACPPFDLTECSFKDGAGNSFDLSSLSRYSDNWEAITGTGDPEHYLINVCKSLAPQAGTEPCPPEAAACLLGGSKPVNLGRVRDGPQWRDGIIVLKYVDGDLCPDGIRKKSTTIRFTCSESQVNSRPMFISAVEDCEYTFAWPTATACPMKSNEHDDCQVTNPSTGHLFDLSSLSGRAGFTAAYSEKGLVYMSICGENENCPPGVGACFGQTRISVGKANKRLRYVDQVLQLVYKDGSPCPSKSGLSYKSVISFVCRPEARPTNRPMLISLDKQTCTLFFSWHTPLACEQATECSVRNGSSIVDLSPLIHRTGGYEAYDESEDDASDTNPDFYINICQPLNPMHGVPCPAGAAVCKVPIDGPPIDIGRVAGPPILNPIANEIYLNFESSTPCLADKHFNYTSLIAFHCKRGVSMGTPKLLRTSECDFVFEWETPVVCPDEVRMDGCTLTDEQLLYSFNLSSLSTSTFKVTRDSRTYSVGVCTFAVGPEQGGCKDGGVCLLSGTKGASFGRLQSMKLDYRHQDEAVVLSYVNGDRCPPETDDGVPCVFPFIFNGKSYEECIIESRAKLWCSTTADYDRDHEWGFCRHSNSYRTSSIIFKCDEDEDIGRPQVFSEVRGCDVTFEWKTKVVCPPKKLECKFVQKHKTYDLRLLSSLTGSWSLVHNGVSYYINLCQKIYKGPLGCSERASICRRTTTGDVQVLGLVHTQKLGVIGDKVVVTYSKGYPCGGNKTASSVIELTCTKTVGRPAFKRFDIDSCTYYFSWDSRAACAVKPQEVQMVNGTITNPINGKSFSLGDIYFKLFRASGDMRTNGDNYLYEIQLSSITSSRNPACSGANICQVKPNDQHFSRKVGTSDKTKYYLQDGDLDVVFASSSKCGKDKTKSVSSTIFFHCDPLVEDGIPEFSHETADCQYLFSWYTSAVCPLGVGFDSENPGDDGQMHKGLSERSQAVGAVLSLLLVALTCCLLALLLYKKERRETVISKLTTCCRRSSNVSYKYSKVNKEEETDENETEWLMEEIQLPPPRQGKEGQENGHITTKSVKALSSLHGDDQDSEDEVLTIPEVKVHSGRGAGAESSHPVRNAQSNALQEREDDRVGLVRGEKARKGKSSSAQQKTVSSTKLVSFHDDSDEDLLHI

SEQ ID NO: 58349 - protein, 15 aa, Homo sapiens
MRATWPRRCLRARRS

SEQ ID NO: 58350 - protein, 280 aa, Homo sapiens
LLLLLLLVFPATVLFRGGPRGLLAVAQDLTEDEETVEDSIIEDEDDEAEVEEDEPTDLVEDKEEEDVSGEPEASPSADTTILFVKGEDFPANNIVKFLVGFTNKGTEDFIVESLDASFRYPQDYQFYIQNFTALPLNTVVPPQRQATFEYSFIPAEPMGGRPFGLVINLNYKDLNGNVFQDAVFNQTVTVIEREDGLDGETIFMYMFLAGLGLLVIVGLHQLLESRKRKRPIQKVEMGTSSQNDVDMSWIPQETLNQINKASPRRLPRKRAQKRSVGSDE

SEQ ID NO: 58351 - protein, 552 aa, Homo sapiens
IGLSQNNLRVHYKGHGKTPKDAASVRATHPIPAACGIYYFEVKIVSKGRDGYMGIGLSAQGVNMNRLPGWDKHSYGYHGDDGHSFCSSGTGQPYGPTFTTGDVIGCCVNLINNTCFYTKNGHSLGIAFTDLPPNLYPTVGLQTPGEVVDANFGQHPFVFDIEDYMREWRTKIQAQIDRFPIGDREGEWQTMIQKMVSSYLVHHGYCATAEAFARSTDQTVLEELASIKNRQRIQKLVLAGRMGEAIETTQQLYPSLLERNPNLLFTLKVRQFIEMVNGTDSEVRCLGGRSPKSQDSYPVSPRPFSSPSMSPSHGMNIHNLASGKGSTAHFSGFESCSNGVISNKAHQSYCHSNKHQSSNLNVPELNSINMSRSQQVNNFTSNDVDMETDHYSNGVGETSSNGFLNGSSKHDHEMEDCDTEMEVDSSQLRRQLCGGSQAAIERMIHFGRELQAMSEQLRRDCGKNTANKKMLKDAFSLLAYSDPWNSPVGNQLDPIQREPVCSALNSAILETHNLPKQPPLALAMGQATQCLGLMARSGIGSCAFATVEDYLH

SEQ ID NO: 58352 - protein, 26 aa, Homo sapiens
IRLPSLYDLINKSVEARKSRTLAQTV

SEQ ID NO: 58353 - protein, 37 aa, Homo sapiens
ITSREIQTAVRLLLPGELAKHVVSEGTKAVTKYTSSK

SEQ ID NO: 58354 - protein, 275 aa, Homo sapiens
KKTDELRNLHKLLYNRPGTVSSLKKNVGQFSGFPFEKGSVQYKKKEEMLKKFRNAMLKSICEVLDLERSGVNSELVKRILNFLMHPKPSGKPLPKSKKTCSKGSKKERNSSGMARKAKRTKCPEILSDESSSDEDEKKNKEESSDDEDKESEEEPPKKTAKREKPKQKATSKSKKSVKSANVKKADSSTTKKNQNSSKKESESEDSSDDEPLIKKLKKPPTDEELKETIKKLLASANLEEVTMKQICKKVYENYPTYDLTERKDFIKTTVKELIS

SEQ ID NO: 58355 - protein, 35 aa, Homo sapiens
VPSVTEKCCGITSKASPNRPFGALLGVVGLSEFPV

SEQ ID NO: 58356 - protein, 324 aa, Homo sapiens
KESESCDCLQGFQLTHSLGGGTGSGMGTLLISKIREEYPDRIMNTFSVMPSPKVSDTVVEPYNATLSVHQLVENTDETYCIDNEALYDICFRTLKLTTPTYGDLNHLVSATMSGVTTCLRFPGQLNADLRKLAVNMVPFPRLHFFMPGFAPLTSRGSQQYRALTVPELTQQMFDSKNMMAACDPRHGRYLTVAAIFRGRMSMKEVDEQMLNVQNKNSSYFVEWIPNNVKTAVCDIPPRGLKMSATFIGNSTAIQELFKRISEQFTAMFRRKAFLHWYTGEGMDEMEFTEAESNMNDLVSEYQQYQDATADEQGEFEEEEGEDEA

SEQ ID NO: 58357 - protein, 41 aa, Homo sapiens; identical to SEQ ID NO: 58283

SEQ ID NO: 58358 - protein, 17 aa, Homo sapiens
IMPKDIQLARRIRGERA

SEQ ID NO: 58359 - protein, 47 aa, Homo sapiens
VMALQEACEAYLVGLFEDTNLCAIHAKRVTIMPKDIQLARRIRGERA

SEQ ID NO: 58360 - protein, 43 aa, Homo sapiens
KKPHRYRPGTVALREIRRYQKSAELLIRKLPFQRLVREIAQDF

SEQ ID NO: 58361 - protein, 51 aa, Homo sapiens
IPRHLQLAIRNDEELNKLLGKVTIAQGGVLPNIQAVLLPKKTESHHKAKGK

SEQ ID NO: 58362 - protein, 74 aa, Homo sapiens
LDMLLEKLPQVAEEISGPLTSANKITLVSSGSGTMGAAKVTGEVLDILTRLPESVERLTGVSISQVNHKPLRTA

SEQ ID NO: 58363 - protein, 333 aa, Homo sapiens
RYFYTSVSRPGRGEPRFISVGYVDDTQFVRFDSDAASPREEPRAPWIEQEGPEYWDRNTQIYKAQAQTDRESLRNLRGYYNQSEAGSHTLQSMYGCDVGPDGRLLRGHDQYAYDGKDYIALNEDLRSWTAADTAAQITQRKWEAAREAEQRRAYLEGECVEWLRRYLENGKDKLERADPPKTHVTHHPISDHEATLRCWALGFYPAEITLTWQRDGEDQTQDTELVETRPAGDRTFQKWAAVVVPSGEEQRYTCHVQHEGLPKPLTLRWEPSSQSTVPIVGIVAGLAVLAVVVIGAVVAAVMCRRKSSGGKGGSYSQAACSDSAQGSDVSLTA

SEQ ID NO: 58364 - protein, 321 aa, Homo sapiens
ISSPVLSLSSLLRPQPEPQQEPVLITMATVVLTVLTHTPAPRVRLGQDALLDLSFAYMPPTSEAASSLAPGPPPFGLEWRRQHLGKGHLLLAATPGLNGQMPAAQEGAVAFAAWDDDEPWGPWTGNGTFWLPTVQPFQEGTYLATIHLPYLQGQVTLELAVYKPPKVSLMPATLARAAPGEAPPELLCLVSHFYPSGGLEVEWELRGGPGGRSQKAEGQRWLSALRHHSDGSVSLSGHLQPPPVTTEQHGARYACRIHHPSLPASGRSAEVTLEVAGLSGPSLEDSVGLFLSAFLLLGLFKALGWAAVYLSTCKDSKKKAE

SEQ ID NO: 58365 - protein, 8 aa, Homo sapiens
VVRRFFKS

SEQ ID NO: 58366 - protein, 47 aa, Homo sapiens
IVSLFSFAVPQSPTLHPLFSPILREPIQIPLPFFPCRPSYGRERCGQ

SEQ ID NO: 58367 - protein, 320 aa, Homo sapiens
MVDVVMLLHGHFQPLQRLQPQLRSFFHQHYLGGQEPTPSNIRMATHTLITGLEEYVRESFSLVQVQPGVDIIRTNLEFLQEQFNSIAAHVLHCTDSGFGARLLELCNQGLFECLALNLHCLGGQQMELAAVINGRIRRMSRGVNPSLVSWLTTMMGLRLQVVLEHMPVGPDAILRYVRRVGDPPQPLPEEPMEVQGAERASPEPQRENASPAPGTTAEEAMSRGPPPAPEGGSRDEQDGASAETEPWAAAVPPEWVPIIQQDIQSQRKVKPQPPLSDAYLSGMPAKRRKLRSDIQKRLQEDPNYSPQRFPNAQRAFADDP

SEQ ID NO: 58368 - protein, 205 aa, Homo sapiens
IQGDTALITRPWSPARRPEVDGVRKALQDLGLRIVEIGDENATLDGTDVLFTGREFFVGLSKWTNHRGAEIVADTFRDFAVSTVPVSGPSHLRGLCGMGGPRTVVAGSSDAAQKAVRAMAVLTDHPYASLTLPDDAAADCLFLRPGLPGVPPFLLHRGGGDLPNSQEALQKLSDVTLVPVSCSELEKAGAGLSSLCLVLSTRPHS

SEQ ID NO: 58369 - protein, 120 aa, Homo sapiens
VEVGGLLGVTQQLSSFETEFNTQPHRKVEGNFNPFASPQKNRQSDENNLKDPGGSEFDSISKNTWAPAPDTWAPAPDQTEQDQNRLSQNSVNLSPSSHANNLSVVTYSKGLHGPYPFGQS

SEQ ID NO: 58370 - protein, 9 aa, Homo sapiens
IMETIGLTQ

SEQ ID NO: 58371 - protein, 184 aa, Homo sapiens
LGNFSVNTSKGNTAKNGGLLLSTNMKWVQFSNLHVDVPKDLTKPVVTISDEPDILYKRLSVLVKGHDKAVLDSYEYFAVLAAKELGISIKVHEPPRKIERFTLLQSVHIYKKHRVQYEMRTLYRCLELEHLTGSTADVYLEYIQRNLPEGVAMEVTKTQLEQLPEHIKEPIWETLSEEKEESKS

SEQ ID NO: 58372 - protein, 72 aa, Homo sapiens
VTSRAIVEDCSGIQFAPYTWSYPEIDKDFESSGLDRSKNNWNDVDDFNWLARDMASPNWSILPEEERNIQWD

SEQ ID NO: 58373 - protein, 380 aa, Homo sapiens
LEDFESLKVIGRGAFGEVRLVQKKDTGHVYAMKILRKADMLEKEQVGHIRAERDILVEADSLWVVKMFYSFQDKLNLYLIMEFLPGGDMMTLLMKKDTLTEEETQFYIAETVLAIDSIHQLGFIHRDIKPDNLLLDSKGHVKLSDFGLCTGLKKAHRTEFYRNLNHSLPSDFTFQNMNSKRKAETWKRNRRQLAFSTVGTPDYIAPEVFMQTGYNKLCDWWSLGVIMYEMLIGYPPFCSETPQETYKKVMNWKETLTFPPEVPISEKAKDLILRFCCEWEHRIGAPGVEEIKSNSFFEGVDWEHIRERPAAISIEIKSIDDTSNFDEFPESDILKPTVATSNHPETDYKNKDWVFINYTYKRFEGLTARGAIPSYMKAAK

SEQ ID NO: 58374 - protein, 275 aa, Homo sapiens [sequence omitted]

SEQ ID NO: 58375 - protein, 47 aa, Homo sapiens
VIPPQDYEFLFEVGVSNVFGPGTRIPKAAVQVLDDIEKCLEKKQQSV

SEQ ID NO: 58376 - protein, 102 aa, Homo sapiens
LAPVGDGDVVADIQDRIQALGLHLPDPPLESEDEDEEGATALNNHSSIPMDPEHVELVKRTMAGVSLPAPGVPAWAREISDAQWEDVVQKALQARQASPAWK

SEQ ID NO: 58377 - protein, 64 aa, Homo sapiens [sequence omitted]

SEQ ID NO: 58378 - protein, 70 aa, Homo sapiens
LGRAVAFNKRILCLFRPQSGRVLSAMIRGAADGSRFQVWDYEEGEVEALLDRYFEADPPGQVAASPDPTT

SEQ ID NO: 58379 - protein, 352 aa, Homo sapiens
RDMATTAAPAGGARNGAGPEWGGFEENIQGGGSAVIDMENMDDTSGSSFEDMGELHQRLREEEVDADAADAAAAEEEDGEFLGMKGFKGQLSRQVADQMWQAGKRQASRAFSLYANIDILRPYFDVEPAQVRSRLLESMIPIKMVNFPQKIAGELYGPLMLVFTLVAILLHGMKTSDTIIREGTLMGTAIGTCFGYWLGVSSFIYFLAYLCNAQITMLQMLALLGYGLFGHCIVLFITYNIHLHALFYLFWLLVGGLSTLRMVAVLVSRTVGPTQRLLLCGTLAALHMLFLLYLHFAYHKVVEGILDTLEGPNIPPIQRVPRDIPAMLPAARLPTTVLNATAKAVAVTLQSH

SEQ ID NO: 58380 - protein, 74 aa, Homo sapiens
MRLATKEQEMQECTTQIQYLKQVQQPSVAQLRSTMVDPAINLFFLKMKGELEQTKDKLEQAQNELSAWKFTPDR

SEQ ID NO: 58381 - protein, 20 aa, Homo sapiens
VPFTEMKLRPRNFRSPAGGG

SEQ ID NO: 58382 - protein, 20 aa, Homo sapiens
VPFTEMKLRPRNFRSPAGGG

SEQ ID NO: 58383 - protein, 28 aa, Homo sapiens
KRFLEPGSKKKPPPDEIYVRTVYNIFRP

SEQ ID NO: 58384 - protein, 19 aa, Homo sapiens
IPTAMGPTSHSHLPSIGRG

SEQ ID NO: 58385 - protein, 326 aa, Homo sapiens
LPPALPPPPPPCCCSKLLPPLGLKGFQMEHFDASLSTYFKALLGPRDTRVKGWFLLDNYIPTFICSVIYLLIVWLGPKYMRNKQPFSCRGILVVYNLGLTLLSLYMFCELVTGVWEGKYNFFCQGTRTAGESDMKIIRVLWWYYFSKLIEFMDTFFFILRKNNHQITVLHVYHHASMLNIWWFVMNWVPCGHSYFGATLNSFIHVLMYSYYGLSSVPSMRPYLWWKKYITQGQLLQFVLTIIQTSCGVIWPCTFPLGWLYFQIGYMISLIALFTNFYIQTYNKKGASRRKDHLKDHQNGSMAAVNGHTNSFSPLENNVKPRKLRKD

SEQ ID NO: 58386 - protein, 6 aa, Homo sapiens
MNIIRI

SEQ ID NO: 58387 - protein, 390 aa, Homo sapiens
LDYCESPTAHCNVLNWEQVQRLDGILSETIPIHGRGNFPTLELQPSLIVKVVRRRLAEKRIGVRDVRLNGSAASHVLHQDSGLGYKDLDLIFCADLRGEGEFQTVKDVVLDCLLDFLPEGVNKEKITPLTLKEAYVQKMVKVCNDSDRWSLISLSNNSGKNVELKFVDSLRRQFEFSVDSFQIKLDSLLLFYECSENPMTETFHPTIIGESVYGDFQEAFDHLCNKIIATRNPEEIRGGGLLKYCNLLVRGFRPASDEIKTLQRYMCSRFFIDFSDIGEQQRKLESYLQNHFVGLEDRKYEYLMTLHGVVNESTVCLMGHERRQTLNLITMLAIRVLADQNVIPNVANVTCYYQPAPYVADANFSNYYIAQVQPVFTCQQQTYSTWLPCN

SEQ ID NO: 58388 - protein, 541 aa, Homo sapiens
LEERQQLNIHGLLPPSFNSQEIQVLRVVKNFEHLNSDFDRYLLLMDLQDRNEKLFYRVLTSDIEKFMPIVYTPTVGLACQQYSLVFRKPRGLFITIHDRGHIASVLNAWPEDVIKAIVVTDGERILGLGDLGCNGMGIPVGKLALYTACGGMNPQECLPVILDVGTENEELLKDPLYIGLRQRRVRGSEYDDFLDEFMEAVSSKYGMNCLIQFEDFANVNAFRLLNKYRNQYCTFNDDIQGTASVAVAGLLAALRITKNKLSDQTILFQGAGEAALGIAHLIVMALEKEGLPKEKAIKKIWLVDSKGLIVKGRASLTQEKEKFAHEHEEMKNLEAIVQEIKPTALIGVAAIGGAFSEQILKDMAAFNERPIIFALSNPTSKAECSAEQCYKITKGRAIFASGSPFDPVTLPNGQTLYPGQGNNSYVFPGVALGVVACGLRQITDNIFLTTAEVIAQQVSDKHLEEGRLYPPLNTIRDVSLKIAEKIVKDAYQEKTATVYPEPQNKEAFVRSQMYSTDYDQILPDCYSWPEEVQKIQTKVDQ

SEQ ID NO: 58389 - protein, 27 aa, Homo sapiens
RDCTPDCDGLGKRRFTKRESHQKDMAG

SEQ ID NO: 58390 - protein, 13 aa, Homo sapiens
IGHCDTGTVSRAQ

SEQ ID NO: 58391 - protein, 44 aa, Homo sapiens
LLRQLPRNLSASIAARKLLTVLGRIRSRVPASHPTVLFSTSERI

SEQ ID NO: 58392 - protein, 453 aa, Homo sapiens
IVVIGHVDSGKSTTTGHLIYKCGGIDKRTIEKFEKEAAEMGKGSFKYAWVLDKLKAERERGITIDISLWKFETSKYYVTIIDAPGHRDFIKNMITGTSQADCAVLIVAAGVGEFEAGISKNGQTREHALLAYTLGVKQLIVGVNKMDSTEPPYSQKRYEEIVKEVSTYIKKIGYNPDTVAFVPISGWNGDNMLEPSANMPWFKGWKVTRKDGNASGTTLLEALDCILPPTRPTDKPLRLPLQDVYKIGGIGTVPVGRVETGVLKPGMVVTFAPVNVTTEVKSVEMHHEALSEALPGDNVGFNVKNVSVKDVRRGNVAGDSKNDPPMEAAGFTAQVIILNHPGQISAGYAPVLDCHTAHIACKFAELKEKIDRRSGKKLEDGPKFLKSGDAAIVDMVPGKPMCVESFSDYPPLGRFAVRDMRQTVAVGVIKAVDKKAAGAGKVTKSAQKAQKAK

SEQ ID NO: 58393 - protein, 37 aa, Homo sapiens
LDKAQQNNVEHKVEIFSGVYKKLTGKDVNFEFPEFQL

SEQ ID NO: 58394 - protein, 25 aa, Homo sapiens
IRSPDELKEASMGFLVFQDPYTRSL

SEQ ID NO: 58395 - protein, 690 aa, Homo sapiens
IPTVKKIVLLAGWALFLFLAYKVSKTDREYQEYNPYEVLNLDPGATVAEIKKQYRLLSLKYHPDKGGDEVMFMRIAKAYAALTDEESRKNWEEFGNPDGPQATSFGIALPAWIVDQKNSILVLLVYGLAFMVILPVVVGSWWYRSIRYSGDQILIRTTQIYTYFVYKTRNMDMKRLIMVLAGASEFDPQYNKDATSRPTDNILIPQLIREIGSINLKKNEPPLTCPYSLKARVLLLSHLARMKIPETLEEDQQFMLKKCPALLQEMVNVICQLIVMARNREEREFRAPTLASLENCMKLSQMAVQGLQQFKSPLLQLPHIEEDNLRRVSNHKKYKIKTIQDLVSLKESDRHTLLHFLEDEKYEEVMAVLGSFPYVTMDIKSQVLDDEDSNNITVGSLVTVLVKLTRQTMAEVFEKEQSICAAEEQPAEDGQGETNKNRTKGGWQQKSKGPKKTAKSKKKKPLKKKPTPVLLPQSKQQKQKQANGVVGNEAAVKEDEEEVSDKGSDSEEEETNRDSQSEKDDGSDRDSDREQDEKQNKDDEAEWQELQQSIQRKERALLETKSKITHPVYSLYFPEEKQEWWWLYIADRKEQTLISMPYHVCTLKDTEEVELKFPAPGKPGNYQYTVFLRSDSYMGLDQIKPLKLEVHEAKPVPENHPQWDTAIEGDEDQEDSEGFEDSFEEEEEEEEDDD

SEQ ID NO: 58396 - protein, 262 aa, Homo sapiens
LPPDLPDLDPECRELLLDFANSSAELTGCLVRSARPVRLCQTCYPLFQQVVSKMDNISRAAGNTSESQSCARSLLMADRMQIVVILSEFFNTTWQEANCANCLTNNSEELSNSTVYFLNLFNHTLTCFEHNLQGNAHSLLQTKNYSEVCKNCREAYKTLSSLYSEMQKMNELENKAEPGTHLCIDVEDAMNITRKLWSRTFNCSVPCSDTVPVIAVSVFILFLPVVFYLSSFLHSEQKKRKLILPKRLKSSTSFANIQENSN

SEQ ID NO: 58397 - protein, 7 aa, Homo sapiens
KLWLQNR

SEQ ID NO: 58398 - protein, 165 aa, Homo sapiens
VTTLAPISNVTSAPVTSLPLVTTPAPETCEGRNSCVSCFNVSVVNTTCFWIECKDESYCSHNSTVSDCQVGNTTDFCSVSTATPVPTANSTAKPTVQPSPSTTSKTVTTSGTTNNTVTPTSQPVRKSTFDAASFIGGIVLVLGVQAVIFFLYKFCKSKERNYHTL

SEQ ID NO: 58399 - protein, 419 aa, Homo sapiens
IISDQVPSDQDAHQYLRLRDQSEATQVMAEPGEGGSETVALPPPPPSEEGGVPQDAAGRGGTPQIRVVGGRGHVAIKAGQEEGQPPAEGLAAASVVMAADRSLKKGVQGGEKALEICGAQRSASELTAGAEAEAEEVKTGKCATVSAAVAERESAEVVKEGLAEKEVMEEQMEVEEQPPEGEEIEVAEEDRLEEEAREEEGPWPLHEALRMDPLEAIQLELDTVNAQADRAFQQLEHKFGRMRRHYLERRNYIIQNIPGFWMTAFRNHPQLSAMIRGQDAEMLRYITNLEVKELRHPRTGCKFKFFFRRNPYFRNKLIVKEYEVRSSGRVVSLSTPIIWRRGHEPQSFIRRNQDLICSFFTWFSDHSLPESDKIAEIIKEDLWPNPLQYYLLREGVRRARRRPLREPVEIPRPFGFQSG

SEQ ID NO: 58400 - protein, 44 aa, Homo sapiens
MKWKDSDEADLVLAKEASMKCPQIVIAFYEERLTWHSCPEDEAQ

SEQ ID NO: 58401 - protein, 421 aa, Homo sapiens
LEVLEKEFDKAFVDVDLLLGEIDPDQADITYEGRQKMTSLSSCFAQLCHKAQSVSQINHKLEAQLVDLKSELTETQAEKVVLEKEVHDQLLQLHSIQLQLHAKTGQSADSGTIKAKLERELEANKKEKMKEAQLEAEVKLLRKENEALRRHIAVLQAEVYGARLAAKYLDKELAGRVQQIQLLGRDMKGPAHDKLWNQLEAEIHLHRHKTVIRACRGRNDLKRPMQAPPGHDQDSLKKSQGVGPIRKVLLLKEDHEGLGISITGGKEHGVPILISEIHPGQPADRCGGLHVGDAILAVNGVNLRDTKHKEAVTILSQQRGEIEFEVVYVAPEVDSDDENVEYEDESGHRYRLYLDELEGGGNPGASCKDTSGEIKVLQGFNKKAVTDTHENGDLGTASETPLDDGASKLDDLHTLYHKKSY

SEQ ID NO: 58402 - protein, 512 aa, Homo sapiens
LPEEIQRDILLEKKKVAQDQLRDKAPFRGLPPVDFVPPIGVESREPADAAIREKRAKIKEMMKHAWNNYKGYAWGLNELKPISKGGHSSSLFGNIKGATIVDALDTLFIMEMKHEFEEAKSWVEENLDFNVNAEISVFEVNIRFVGGLLSAYYLSGEEIFRKKAVELGVKLLPAFHTPSGIPWALLNMKSGIGRNWPWASGGSSILAEFGTLHLEFMHLSHLSGNPIFAEKVMNIRTVLNKLEKPQGLYPNYLNPSSGQWGQHHVSVGGLGDSFYEYLLKAWLMSDKTDLEAKKMYFDAVQAIETHLIRKSSSGLTYIAEWKGGLLEHKMGHLTCFAGGMFALGADAAPEGMAQHYLELGAEIARTCHESYNRTFMKLGPEAFRFDGGVEAIATRQNEKYYILRPEVMETYMYMWRLTHDPKYRKWAWEAVEALENHCRVNGGYSGLRDVYLLHESYDDVQQSFFLAETLKYLYLIFSDDDLLPLEHWIFNSEAHLLPILPKDKKEVEIREE

SEQ ID NO: 58403 - protein, 440 aa, Homo sapiens
IPCLCGSAPCLLCRCCPSGNNSTVTRLIYALFLLVGVCVACVMLIPGMEEQLNKIPGFCENEKGVVPCNILVGYKAVYRLCFGLAMFYLLLSLLMIKVKSSSDPRAAVHNGFWFFKFAAAIAIIIGAFFIPEGTFTTVWFYVGMAGAFCFILIQLVLLIDFAHSWNESWVEKMEEGNSRCWYAALLSATALNYLLSLVAIVLFFVYYTHPASCSENKAFISVNMLLCVGASVMSILPKIQESQPRSGLLQSSVITVYTMYLTWSAMTNEPETNCNPSLLSIIGYNTTSTVPKEGQSVQWWHAQGIIGLILFLLCVFYSSIRTSNNSQVNKLTLTSDESTLIEDGGARSDGSLEDGDDVHRAVDNERDGVTYSYSFFHFMLFLASLYIMMTLTNWYRYEPSREMKSQWTAVWVKISSSWIGIVLYVWTLVAPLVLTNRDFD

SEQ ID NO: 58404 - protein, 22 aa, Homo sapiens
RNYRTNSLFVVCILFQHPYFKQ

SEQ ID NO: 58405 - protein, 47 aa, Homo sapiens
IPRAIQSLKKIVNSAQTGSFKQLTVKEAVLNGLVATEVLCGFMSERS

SEQ ID NO: 58406 - protein, 145 aa, Homo sapiens
IKDDRLNKDRCVRLALVHDMAECIVGDIAPADNIPKEEKHRREEEAMKQITQLLPEDLRKELYELWEEYETQSSAEAKFVKQLDQCEMILQASEYEDLEHKPGRLQDFYDSTAGKFNHPEIVQLVSELEAERSTNIAAAASEPHS

SEQ ID NO: 58407 - protein, 54 aa, Homo sapiens
ISKIDLMVNSGKLGTTVKPKSLVTSSSGALKKQHKKPFDAMNNIVANLLLNLTR

SEQ ID NO: 58408 - protein, 507 aa, Homo sapiens
LGWSRRRSGLEPATVGSSMALLFLLPLVMQGVSRAEMGTADLGPSSVPTPTNVTIESYNMNPIVYWEYQIMPQVPVFTVEVKNYGVKNSEWIDACINISHHYCNISDHVGDPSNSLWVRVKARVGQKESAYAKSEEFAVCRDGKIGPPKLDIRKEEKQIMIDIFHPSVFVNGDEQEVDYDPETTCYIRVYNVYVRMNGSEIQYKILTQKEDDCDEIQCQLAIPVSSLNSQYCVSAEGVLHVWGVTTEKSKEVCITIFNSSIKGSLWIPVVAALLLFLVLSLVFICFYIKKINPLKEKSIILPKSLISVVRSATLETKPESKYVSLITSYQPFSLEKEVVCEEPLSPATVPGMHTEDNPGKVEHTEELSSITEVVTTEENIPDVVPGSHLTPIERESSSPLSSNQSEPGSIALNSYHSRNCSESDHSRNGFDTDSSCLESHSSLSDSEFPPNNKGEIKTEGQELITVIKAPTSFGYDKPHVLVDLLVDDSGKESLIGYRPTEDSKEFS

SEQ ID NO: 58409 - protein, 128 aa, Homo sapiens
MDIIKINVGCIFCGPKVPIKACTRFRARILIFNIEIPITKGFPVLLHYQTVSEPAVIKRLISVLNKSTGEVTKKKPKFLTKGQNALVELQTQRPIALELYKDFKELGRFMLRYGGSTIAAGVVTEIKE

SEQ ID NO: 58410 - protein, 889 aa, Homo sapiens
KRYSSRSRSRTYSRSRSRDRMYSRDYRRDYRNNRGMRRPYGYRGRGRGYYQGGGGRYHRGGYRPVWNRRHSRSPRRGRSRSRSPKRRSVSSQRSRSRSRRSYRSSRSPRSSSSRSSSPYSKSPVSKRRGSQEKQTKKAEGEPQEESPLKSKSQEEPKDTFEHDPSESIDEFNKSSATSGDIWPGLSAYDNSPRSPHSPSPIATPPSQSSSCSDAPMLSTVHSAKNTPSQHSHSIQHSPERSGSGSVGNGSSRYSPSQNSPIHHIPSRRSPAKTIAPQNAPRDESRGRSSFYPDGGDQETAKTGKFLKRFTDEESRVFLLDRGNTRDKEASKEKGSEKGRAEGEWEDQEALDYFSDKESGKQKFNDSEGDDTEETEDYRQFRKSVLADQGKSFATASHRNTEEEGLKYKSKVSLKGNRESDGFREEKNYKLKETGYVVERPSTTKDKHKEEDKNSERITVKKETQSPEQVKSEKLKDLFDYSPPLHKNLDAREKSTFREESPLRIKMIASDSHRPEVKLKMAPVPLDDSNRPASLTKDRLLASTLVHSVKKEQEFRSIFDHIKLPQASKSTSESFIQHIVSLVHHVKEQYFKSAAMTLNERFTSYQKATEEHSTRQKSPEIHRRIDISPSTLRKHTRLAGEERVFKEENQKGDKKLRCDSADLRHDIDRRRKERSKERGDSKGSRESSGSRKQEKTPKDYKEYKSYKDDSKHKREQDHSRSSSSSASPSSPSSREEKESKKEREEEFKTHHEMKEYSGFAGVSRPRGTFFRIRGRGRARGVFAGTNTGPNNSNTTFQKRPKEEEWDPEYTPKSKKYFLHDDRDDGVDYWAKRGRGRGTFQRGRGRFNFKKSGSSPKWTHDKYQGDGIVEDEEETMENNEEKKDRRKEEKE

SEQ ID NO: 58411 - protein, 278 aa, Homo sapiens
IAKTEGLEMADHMMAMNHGRFPDGTNGLHHHPAHRMGMGQFPSPHHHQQQQPQHAFNALMGEHIHYGAGNMNATSGIRHAMGPGTVNGGHPPSALAPAARFNNSQFMGPPVASQGGSLPASMQLQKLNNQYFNHHPYPHNHYMPDLHPAAGHQMNGTNQHFRDCNPKHSGGSSTPGGSGGSSTPGGSGSSSGGGAGSSNSGGGSGSGNMPASVAHVPAAMLPPNVIDTDFIDEEVLMSLVIEMGLDRIKELPELWLGQNEFDFMTDFVCKQQPSRVSC

SEQ ID NO: 58412 - protein, 471 aa, Homo sapiens
LRRDMRPQELPRLAFPLLLLLLLLLPPPPCPAHSATRFDPTWESLDARQLPAWFDQAKFGIFIHWGVFSVPSFGSEWFWWYWQKEKIPKYVEFMKDNYPPSFKYEDFGPLFTAKFFNANQWADIFQASGAKYIVLTSKHHEGFTLWGSEYSWNWNAIDEGPKRDIVKELEVAIRNRTDLRFGLYYSLFEWFHPLFLEDESSSFHKRQFPVSKTLPELYELVNNYQPEVLWSDGDGGAPDQYWNSTGFLAWLYNESPVRGTVVTNDRWGAGSICKHGGFYTCSDRYNPGHLLPHKWENCMTIDKLSWGYRREAGISDYLTIEELVKQLVETVSCGGNLLMNIGPTLDGTISVVFEERLRQMGSWLKVNGEAIYETHTWRSQNDTVTPDVWYTSKPKEKLVYAIFLKWPTSGQLFLGHPKAILGATEVKLLGHGQPLNWISLEQNGIMVELPQLTIHQMPCKWGWALALTNVI

SEQ ID NO: 58413 - protein, 19 aa, Homo sapiens
KKKAKTVEQTATTTNKRPG

SEQ ID NO: 58414 - protein, 74 aa, Homo sapiens
ILFLNNLPEETNEMMLSMLFNQFPGFKEVCLVPGRHDIAFVEFENDGKAGAARDALQGFKITTSHAMKITYAKK

SEQ ID NO: 58415 - protein, 258 aa, Homo sapiens
IKPPENVLFVCKLNPVTTDEDLEIIFSRFGPIRSCEVIRDWKTGESLCYAFIEFEKEEDCEKAFFKMDNVLIDDRRIHVDFSQSVAKVKWKGKGGKYTKSDFKEYEKEQDKPPNLVLKDKVKPKQDTKYDLILDEQAEDSKSSHSHTSKKHKKKTHHCSEEKEDEDYMPIKNTNQDIYREMGFGHYEEEESCWEKQKSEKRDRTQNRSRSRSRERDGHYSNSHKSKYQTDLYERERSKKRDRSRSPKKSKDKEKSKYR

SEQ ID NO: 58416 - protein, 352 aa, Homo sapiens
VPTMTAASMGPVRVAFVVLLALCSRPAVGQNCSGPCRCPDEPAPRCPAGVSLVLDGCGCCRVCAKQLGELCTERDPCDPHKGLFCHFGSPANRKIGVCTAKDGAPCIFGGTVYRSGESFQSSCKYQCTCLDGAVGCMPLCSMDVRLPSPDCPFPRRVKLPGKCCEEWVCDEPKDQTVVGPALAAYRLEDTFGPDPTMIRANCLVQTTEWSACSKTCGMGISTRVTNDNASCRLEKQSRLCMVRPCEADLEENIKKGKKCIRTPKISKPIKFELSGCTSMKTYRAKFCGVCTDGRCCTPHRTTTLPVEFKCPDGEVMKKNMMFIKTCACHYNCPGDNDIFESLYYRKMYGDMA

SEQ ID NO: 58417 - protein, 5 aa, Homo sapiens
MFAPF

SEQ ID NO: 58418 - protein, 90 aa, Homo sapiens
LAKKKSPEWFNKGSMATAALPESGSSLALRALGWGSLYAWCGVGVISFAVWKALGVHSMNDFRSKMQSIFPTIPKNSESAVEWEETLKSK

SEQ ID NO: 58419 - protein, 152 aa, Homo sapiens
LSGQDDEEQGLTAQVLDASSLSFNTRLKWFAICFVCGVFFSILGTGLLWLPGGIKLFAVFYTLGNLAALASTCFLMGPVKQLKKMFEATRLLATIVMLLCFIFTLCAALWWHKKGLAVLFCILQFLSMTWYSLSYIPYARDAVIKCCSSLLS

SEQ ID NO: 58420 - protein, 40 aa, Homo sapiens
RTHNDIIHNENMRQGRDKYKTLRQIRQGNTKQRIDEFEAL

SEQ ID NO: 58421 - protein, 594 aa, Homo sapiens
LSPPAGRMSLAAYCVICCRRIGTSTSPPKSGTHWRDIRNIIKFTGSLILGGSLFLTYEVLALKKAVTLDTQVVEREKMKSYIYVHTVSLDKGENHGIAWQARKELHKAVRKVLATSAKILRNPFADPFSTVDIEDHECAVWLLLRKSKSDDKTTRLEAVREMSETHHWHDYQYRIIAQACDPKTLIGLARSEESDLRFFLLPPPLPSLKEDSSTEEELRQLLASLPQTELDECIQYFTSLALSESSQSLAAQKGGLWCFGGNGLPYAESFGEVPSATVEMFCLEAIVKHSEISTHCDKIEANGGLQLLQRLYRLHKDCPKVQRNIMRVIGNMALNEHLHSSIVRSGWVSIMAEAMKSPHIMESSHAARILANLDRETVQEKYQDGVYVLHPQYRTSQPIKADVLFIHGLMGAAFKTWRQQDSEQAVIEKPMEDEDRYTTCWPKTWLAKDCPALRIISVEYDTSLSDWRARCPMERKSIAFRSNELLRKLRAAGVGDRPVVWISHSMGGLLVKKMLLEASTKPEMSTVINNTRGIIFYSVPHHGSRLAEYSVNIRYLLFPSLEVKELSKGNTFCHKGNWGYINISYTEKKKKFLP

SEQ ID NO: 58422 - protein, 557 aa, Homo sapiens
KMEGPLSVFGDRSTGETIRSQNVMAAASIANIVKSSLGPVGLDKMLVDDIGDVTITNDGATILKLLEVEHPAAKVLCELADLQDKEVGDGTTSVVIIAAELLKNADELVKQKIHPTSVISGYRLACKEAVRYINENLIVNTDELGRDCLINAAKTSMSSKIIGINGDFFANMVVDAVLAIKYTDIRGQPRYPVNSVNILKAHGRSQMESMLISGYALNCVVGSQGMPKRIVNAKIACLDFSLQKTKMKLGVQVVITDPEKLDQIRQRESDITKERIQKILATGANVILTTGGIDDMCLKYFVEAGAMAVRRVLKRDLKRIAKASGATILSTLANLEGEETFEAAMLGQAEEVVQERICDDELILIKNTKARTSASIILRGANDFMCDEMERSLHDALCVVKRVLESKSVVPGGGAVEAALSIYLENYATSMGSREQLAIAEFARSLLVIPNTLAVNAAQDSTDLVAKLRAFHNEAQVNPERKNLKWIGLDLSNGKPRDNKQAGVFEPTIVKVKSLKFATEAAITILRIDDLIKLHPESKDDKHGSYEDAVHSGALND

SEQ ID NO: 58423 - protein, 44 aa, Homo sapiens
LDHIIPDHNFLFPEFEIVIETEDEIMPEVVEKEDYSEIIGSMGI

SEQ ID NO: 58424 - protein, 16 aa, Homo sapiens
VGREAEPGTCALGARS

SEQ ID NO: 58425 - protein, 5 aa, Homo sapiens
TSTRL

SEQ ID NO: 58426 - protein, 1198 aa, Homo sapiens
LTRSGTLKPVITASFWQTRSSAAGGRMVWRLVLLALWVWPSTQAGHQDKDTTFDLFSISNINRKTIGAKQFRGPDPGVPAYRFVRFDYIPPVNADDLSKITKIMRQKEGFFLTAQLKQDGKSRGTLLALEGPGLSQRQFEIVSNGPADTLDLTYWIDGTRHVVSLEDVGLADSQWKNVTVQVAGETYSLHVGCDLIDSFALDEPFYEHLQAEKSRMYVAKGSARESHFRGLLQNVHLVFENSVEDILSKKGCQQGQGAEINAISENTETLRLGPHVTTEYVGPSSERRPEVCERSCEELGNMVQELSGLHVLVNQLSENLKRVSNDNQFLWELIGGPPKTRNMSACWQDGRFFAENETWVVDSCTTCTCKKFKTICHQITCPPATCASPSFVEGECCPSCLHSVDGEEGWSPWAEWTQCSVTCGSGTQQRGRSCDVTSNTCLGPSIQTRACSLSKCDTRIRQDGGWSHWSPWSSCSVTCGVGNITRIRLCNSPVPQMGGKNCKGSGRETKACQGAPCPIDGRWSPWSPWSACTVTCAGGIRERTRVCNSPEPQYGGKACVGDVQERQMCNKRSCPVDGCLSNPCFPGAQCSSFPDGSWSCGSCPVGFLGNGTHCEDLDECALVPDICFSTSKVPRCVNTQPGFHCLPCPPRYRGNQPVGVGLEAAKTEKQVCEPENPCKDKTHNCHKHAECIYLGHFSDPMYKCECQTGYAGDGLICGEDSDLDGWPNLNLVCATNATYHCIKDNCPHLPNSGQEDFDKDGIGDACDDDDDNDGVTDEKDNCQLLFNPRQADYDKDEVGDRCDNCPYVHNPAQIDTDNNGEGDACSVDIDGDDVFNERDNCPYVYNTDQRDTDGDGVGDHCDNCPLVHNPDQTDVDNDLVGDQCDNNEDIDDDGHQNNQDNCPYISNANQADHDRDGQGDACDPDDDNDGVPDDRDNCRLVFNPDQEDLDGDGRGDICKDDFDNDNIPDIDDVCPENNAISETDFRNFQMVPLDPKGTTQIDPNWVIRHQGKELVQTANSDPGIAVGFDEFGSVDFSGTFYVNTDRDDDYAGFVFGYQSSSRFYVVMWKQVTQTYWEDQPTRAYGYSGVSLKVVNSTTGTGEHLRNALWHTGNTPGQVRTLWHDPRNIGWKDYTAYRWHLTHRPKTGYIRVLVHEGKQVMADSGPIYDQTYAGGRLGLFVFSQEMVYFSDLKYECRDI

SEQ ID NO: 58427 - protein, 80 aa, Homo sapiens
LECSAYRRGVWGPHRAPASPTPGSRCRRRYLSLLPPPQISSCRCKLGGQGCGVGFPQRLPPWARPCSCLPLRQKLTHLQT

SEQ ID NO: 58428 - skipped

SEQ ID NO: 58429 - protein, 41 aa, Homo sapiens
IVPVEPERTAEYEDYGADEPAEEPPEPHRRWRRALPHGPGQ

SEQ ID NO: 58430 - protein, 16 aa, Homo sapiens
IMILMQGIQMIMDRII

SEQ ID NO: 58431 - protein, 31 aa, Homo sapiens
KAFSDAIKKWQELSPETSGKRKKRKEMNQYS

SEQ ID NO: 58432 - protein, 94 aa, Homo sapiens
INLRAANMIPAHDSPLAALAFDASGTKLATASEKGTVIRVFSIPEGQKLFEFRRGVKRCVSICSLAFSMDGMFLSASSNTETVHIFKLETVKEK

SEQ ID NO: 58433 - protein, 425 aa, Homo sapiens
KIRNVGLCEAIVQFTRTFSPSKPAKSLHTQKNRQFFNEPEENFWMVMVVRNPIIEKQSKDGKPVIEYQEEELLDKVYSSVLRQCYSMYKLFNGTFLKAMEDGGVKLLKERLEKFFHRYLQTLHLQSCDLLDIFGGISFFPLDKMTYLKIQSFINRMEESLNIVKYTAFLYNDQLIWSGLEQDDMRILYKYLTTSLFPRHIEPELAGRDSPIRAEMPGNLQHYGRFLTGPLNLNDPDAKCRFPKIFVNTDDTYEELHLIVYKAMSAAVCFMIDASVHPTLDFCRRLDSIVGPQLTVLASDICEQFNINKRMSGSEKEPQFKFIYFNHMNLAEKSTVHMRKTPSVSLTSVHPDLMKILGDINSDFTRVDEDEEIIVKAMSDYWVVGKKSDRRELYVILNQKNANLIEVNEEVKKLCATQFNNIFFLD

SEQ ID NO: 58434 - protein, 11 aa, Homo sapiens
TGEINSPGPPG

SEQ ID NO: 58435 - protein, 368 aa, Homo sapiens
LDSTGSRLDYRRYADTLFDILVAGSMLAPGGTRIDDGDKTKMTNHCVFSANEDHETIRNYAQVFNKLIRRYKYLEKAFEDEMKKLLLFLKAFSETEQTKLAMLSGILLGNGTLPATILTSLFTDSLVKEGIAASFAVKLFKAWMAEKDANSVTSSLRKANLDKRLLELFPVNRQSVDHFAKYFTDAGLKELSDFLRVQQSLGTRKELQKELQERLSQECPIKEVVLYVKEEMKRNDLPETAVIGLLWTCIMNAVEWNKKEELVAEQALKHLKQYAPLLAVFSSQGQSELILLQKVQEYCYDNIHFMKAFQKIVVLFYKADVLSEEAILKWYKEAHVAKGKSVFLDQMKKFVEWLQNAEEESESEGEEN

SEQ ID NO: 58436 - protein, 7 aa, Homo sapiens
VKFKFIL

SEQ ID NO: 58437 - protein, 6 aa, Homo sapiens
TSSVRG

SEQ ID NO: 58438 - protein, 198 aa, Homo sapiens
LCGLCSLGAVGAPRPCQAPQQWEGRQVMYQQSSGRNSRALLSYDGLNQRVRVLDERKALIPCKRLFEYILLYKDGVMFQIDQATKQCSKMTLTQPWDPLDIPQNSTFEDQYSIGGPQEQITVQEWSDRKSARSYETWIGIYTVKDCYPVQETFTINYSVILSTRFFDIQLGIKDPSVFTPPSTCQMAQLEKMSEDCSW

SEQ ID NO: 58439 - protein, 4 aa, Homo sapiens
KKYT

SEQ ID NO: 58440 - protein, 392 aa, Homo sapiens
LLAALCPASRALEEKKVCQGTSNKLTQLGTFEDHFLSLQRMFNNCEVVLGNLEITYVQRNYDLSFLKTIQEVAGYVLIALNTVERIPLENLQIIRGNMYYENSYALAVLSNYDANKTGLKELPMRNLQEILHGAVRFSNNPALCNVESIQWRDIVSSDFLSNMSMDFQNHLGSCQKCDPSCPNGSCWGAGEENCQKLTKIICAQQCSGRCRGKSPSDCCHNQCAAGCTGPRESDCLVCRKFRDEATCKDTCPPLMLYNPTTYQMDVNPEGKYSFGATCVKKCPRNYVVTDHGSCVRACGADSYEMEEDGVRKCKKCEGPCRKVCNGIGIGEFKDSLSINATNIKHFKNCTSISGDLHILPVAFRGDSFTHTPPLDPQELDILKTVKEITGLS

SEQ ID NO: 58441 - protein, 127 aa, Homo sapiens
ISRLTWLVSLFGELSLVSATLEERKEDQYMKMTVCLETEKKSPLSWIEEKGPGLKRNRYLSFHFKSGSLENVPNVGVNKNIFLKDQNIFVQKLLGQFSEKELAAEKKRILHCLGLAEEIQKYCCSRK

SEQ ID NO: 58442 - protein, 35 aa, Homo sapiens
TAKFKRQVSPFLQQMFMPLLHAIFEVLLQPAEEND

SEQ ID NO: 58443 - protein, 9 aa, Homo sapiens
VTSNLYQVF

SEQ ID NO: 58444 - protein, 391 aa, Homo sapiens
VKKFFSASSRVGSKKEIQEAKAPSPSINRQTSIETDRVSKEFIEFLKTFHKTGQEIYKQTKLFLEGMHYKRDLSIEEQSECAQDFYHNVAERMQTRGKVPPERVEKIMDQIEKYIMTRLYKYVFCPETTDDEKKDLAIQKRIRALRWVTPQMLCVPVNEDIPEVSDMVVKAITDIIEMDSKRVPRDKLACITKCSKHIFNAIKITKNEPASADDFLPTLIYIVLKGNPPRLQSNIQYITRFCNPSRLMTGEDGYYFTNLCCAVAFIEKLDAQSLNLSQEDFDRYMSGQTSPRKQEAESWSPDACLGVKQMYKNLDLLSQLNERQERIMNEAKKLEKDLIDWTDGIAREVQDIVEKYPLEIKPPNQPLAAIDSENVENDKLPPPLQPQVYAG

SEQ ID NO: 58445 - protein, 146 aa, Homo sapiens
IYAYHVEREKERDPEHRALCDLGPWVKCSAALASRWGRGFGLLGSIFGKDGVLNQPNSVFGLIFYILQLLLGMTASAVAALILMTSSIMSVVGSLYLAYILYFVLKEFCIICIVTYVLNFLLLIINYKRLVYLNEAWKRQLQPKQD

SEQ ID NO: 58446 - protein, 104 aa, Homo sapiens
ITYETLKYISKTPCRHQSPEIVREFLTALKSHKLTKAEKLQLLNHRPVTAVEIQLMVEESEERLTEEQIEALLHTVTSILPAEPEAEQKKNTNSNVAMDEEDPA

SEQ ID NO: 58447 - protein, 47 aa, Homo sapiens
VGPAAEARMPSRRRGGSSLIPDVGYLSEVDCPWPEHFPKIILSKISV

SEQ ID NO: 58448 - protein, 316 aa, Homo sapiens
LDLKANKTFAYHKDMPLIFIGGVPRSGTTLMRAMLDAHPDIRCGEETRVIPRILALKQMWSRSSKEKIRLDEAGVTDEVLDSAMQAFLLEIIVKHGEPAPYLCNKDPFALKSLTYLSRLFPNAKFLLMVRDGRASVHSMISRKVTIAGFDLNSYRDCLTKWNRAIETMYNQCMEVGYKKCMLVHYEQLVLHPERWMRTLLKFLQIPWNHSVLHHEEMIGKAGGVSLSKVERSTDQVIKPVNVGALSKWVGKIPPDVLQDMAVIAPMLAKLGYDPYANPPNYGKPDPKIIENTRRVYKGEFQLPDFLKEKPQTEQVE

SEQ ID NO: 58449 - protein, 54 aa, Homo sapiens
VHHLWAYRDLQTREDIRNAAWHKHGWEELVYYTVPLIQEMESRIMIPLKTSPLQ

SEQ ID NO: 58450 - protein, 363 aa, Homo sapiens
VKDPNSGLPKFVLINWTGEGVNDVRKGACASHVSTMASFLKGAHVTINARAEEDVEPECIMEKVAKASGANYSFHKESGRFQDVGPQAPVGSVYQKTNAVSEIKRVGKDSFWAKAEKEEENRRLEEKRRAEEAQRQLEQERRERELREAARREQRYQEQGGEASPQSRTWEQQQEVVSRNRNEQESAVHPREIFKQKERAMSTTSISSPQPGKLRSPFLQKQLTQPETHFGREPAAAISRPRADLPAEEPAPSTPPCLVQAEEEAVYEEPPEQETFYEQPPLVQQQGAGSEHIDHHIQGQGLSGQGLCARALYDYQAADDTEISFDPENLITGIEVIDEGWWRGYGPDGHFGMFPANYVELIE

SEQ ID NO: 58451 - protein, 7 aa, Homo sapiens
LANLEPG

SEQ ID NO: 58452 - protein, 37 aa, Homo sapiens
KRFEIACYKNKVVGWRSGLEKDLDEVLQTHSVFVNVS

SEQ ID NO: 58453 - protein, 71 aa, Homo sapiens
LEVIKQLKEKMKIERAHMRLQFILPVNEGKKLKEKLKPLIKVIESKDYGQQLEIVRVKYFLCFMLPKYCIL

SEQ ID NO: 58454 - protein, 5 aa, Homo sapiens
LASSG

SEQ ID NO: 58455 - protein, 619 aa, Homo sapiens
ISCEDEQARTDYFIRTLLLEFQNESRRLYQFHYVNWPDHDVPSSFDSILDMISLMRKYQEHEDVPICIHCSAGCGRTGAICAIDYTWNLLKAGKIPEEFNVFNLIQEMRTQRHSAVQTKEQYELVHRAIAQLFEKQLQLYEIHGAQKIADGVNEINTENMVSSIEPEKQDSPPPKPPRTRSCLVEGDAKEEILQPPEPHPVPPILTPSPPSAFPTVTTVWQDNDRYHPKPVLHMVSSEQHSADLNRNYSKSTELPGKNESTIEQIDKKLERNLSFEIKKVPLQEGPKSFDGNTLLNRGHAIKIKSASPCIADKISKPQELSSDLNVGDTSQNSCVDCSVTQSNKVSVTPPEESQNSDTPPRPDRLPLDEKGHVTWSFHGPENAIPIPDLSEGNSSDINYQTRKTVSLTPSPTTQVETPDLVDHDNTSPLFRTPLSFTNPLHSDDSDSDERNSDGAVTQNKTNISTASATVSAATSTESISTRKVLPMSIARHNIAGTTHSGAEKDVDVSEDSPPPLPERTPESFVLASEHNTPVRSEWSELQSQERSEQKKSEGLITSENEKCDHPAGGIHYEMCIECPPTFSDKREQISENPTEATDIGFGNRCGKPKGPRDPPSEWT

SEQ ID NO: 58456 - protein, 112 aa, Homo sapiens
MHESMKLFDSICNNKWFTDTSIILFLNKKDLFEEKIKKSPLTICYPEYAGSNTYEEAAAYIQCQFEDLNKRKDTKEIYTHFTCATDTKNVQFVFDAVTDVIIKNNLKDCGLF

SEQ ID NO: 58457 - protein, 38 aa, Homo sapiens
LIFKSILFLPCLRKKILKIRHGWEDVTKINKTEICSQL

SEQ ID NO: 58458 - protein, 164 aa, Homo sapiens
LDLRVLQFALPLSMLIAMGALLLCLIGMCNTAFRSSVPNIKLAKCLVNSAGCHLVAGLLFFLAGTVSLSPSIWVIFYNIHLNKKFEPVFSFDYAVYVTIASAGGLFMTSLILFIWYCTCKSLPSPFWQPLYSHPPSMHTYSQPYSARSRLSAIEIDIPVVSHTT

SEQ ID NO: 58459 - protein, 118 aa, Homo sapiens
LEKLMVRIGVFSVLYTVPATIVIACYFYEQAFRDQWERSWVAQSCKSYAIPCPHLQAGGGAPPHPPMSPDFTVFMIKYLMTLIVGITSGFWIWSGKTLNSWRKFYTRLTNSKQGETTV

SEQ ID NO: 58460 - protein, 54 aa, Homo sapiens
MEYLEFVCHAPSEYFKSRSSPFPTVPTRPEKGYIWTHVGPTPAITIKESVANHL

SEQ ID NO: 58461 - protein, 292 aa, Homo sapiens
RTLRGHLAKIYAMHWGTDSRLLVSASQDGKLIIWDSYTTNKVHAIPLRSSWVMTCAYAPSGNFVACGGLDNICSIYSLKTREGNVRVSRELPGHTGYLSCCRFLDDNQIITSSGDTTCALWDIETGQQTVGFAGHSGDVMSLSLAPDGRTFVSGACDASIKLWDVRDSMCRQTFIGHESDINAVAFFPNGYAFTTGSDDATCRLFDLRADQELLMYSHDNIICGITSVAFSRSGRLLLAGYDDFNCNIWDAMKGDRAGVLAGHDNRVSCLGVTDDGMAVATGSWDSFLKIWN

SEQ ID NO: 58462 - protein, 20 aa, Homo sapiens
LTRIRNNSAIHIRVFRVTPK

SEQ ID NO: 58463 - protein, 270 aa, Homo sapiens
MRSQEGRPVQVIGALIGKQEGRNIEVMNSFELLSHTVEEKIIIDKEYYYTKEEQFKQVFKELEFLGWYTTGGPPDPSDIHVHKQVCEIIESPLFLKLNPMTKHTDLPVSVFESVIDIINGEATMLFAELTYTLATEEAERIGVDHVARMTATGSGENSTVAEHLIAQHSAIKMLHSRVKLILEYVKASEAGEVPFNHEILREAYALCHCLPVLSTDKFKTDFYDQCNDVGLMAYLGTITKTCNTMNQFVNKFNVLYDRQGIGRRMRGLFF

SEQ ID NO: 58464 - protein, 67 aa, Homo sapiens
TRKYTLPPGVDPTQVSSSLSPEGTLTVEAPMPKLATQSNEITIPVTFESRAQLGGPEAAKSDETAAK

SEQ ID NO: 58465 - protein, 437 aa, Homo sapiens
LNVPETRVTCLESGLRVASEDSGLSTCTVGLWIDAGSRYENEKNNGTAHFLEHMAFKGTKKRSQLDLELEIENMGAHLNAYTSREQTVYYAKAFSKDLPRAVEILADIIQNSTLGEAEIERERGVILREMQEVETNLQEVVFDYLHATAYQNTALGRTILGPTENIKSISRKDLVDYITTHYKGPRIVLAAAGGVSHDELLDLAKFHFGDSLCTHKGEIPALPPCKFTGSEIRVRDDKMPLAHLAIAVEAVGWAHPDTICLMVANTLIGNWDRSFGGGMNLSSKLAQLTCHGNLCHSFQSFNTSYTDTGLWGLYMVCESSTVADMLHVVQKEWMRLCTSVTESEVARARNLLKTNMLLQLDGSTPICEDIGRQMLCYNRRIPIPELEARIDAVNAETIREVCTKYIYNRSPAIAAVGPIKQLPDFKQIRSNMCWLRD

SEQ ID NO: 58466 - protein, 25 aa, Homo sapiens
IIHCCRHATCCSKRMDATLYKCHRK

SEQ ID NO: 58467 - protein, 11 aa, Homo sapiens
KNVHIRSKGFG

SEQ ID NO: 58468 - protein, 214 aa, Homo sapiens
KKFAQKMLRKARRKLIYEKAKHYHREYRQMYRTEIRMARMARKAGNYFVPAEPKLAFVIRIRGISGVSPKVRKVLQLLRLRQIYNGTFVKLNKASTNMLRIVEPYIAWGYPNLKSVNELIYKSGYGKINKKRIALTDNALIARSLGKYGIICMEDLIHEIYTVGKRFKEANNFLWPFKLSSPRGGMKKKTTHFVEGGDAGNREDQINRLIRRMN

SEQ ID NO: 58469 - protein, 278 aa, Homo sapiens
KKIICDGSASMQARQTCATCFGVCCFIATDDITELYSTLECLENIFTKSYLKEKDTTVICSTPNTVLHISSLLAWTLLLTICPINEVKKKLEMHFHKLPSLLSCDDVNMRIAAGESLALLFELARGIESDFFYEDMESLTQMLRALATDGNKHRAKVDKRKQRSVFRDVLRAVEERDFPTETIKFGPERMYIDCWVKKHTYDTFKEVLGSGMQYHLQSNEFLRNVFELGPPVMLDAATLKTMKISRFERHLYNSAAFKARTKARSKCRDKRADVGEFF

SEQ ID NO: 58470 - protein, 31 aa, Homo sapiens
MASIKKDYYKALEDADEKVQLANQIYDLQHF

SEQ ID NO: 58471 - protein, 76 aa, Homo sapiens
KIKNGHTGLSNGNGIHHGAKHGSADNRKLSAPVSQKMHRKIQSSLSVNSDISKKSKVNAVFSQKTGSSPEDKQEFW

SEQ ID NO: 58472 - protein, 382 aa, Homo sapiens
ICRNCKCGQEEHDVLLSNEEDRKVGKLFEDTKYTTLIAKLKSDGIPMYKRNVMILTNPVAAKKNVSINTVTYEWAPPVQNQALARQYMQMLPKEKQPVAGSEGAQYRKKQLAKQLPAHDQDPSKCHELSPREVKEMEQFVKKYKSEALGVGDVKLPCEMDAQGPKQMNIPGGDRSTPAAVGAMEDKSAEHKRTQYSCYCCKLSMKEGDPAIYAERAGYDKLWHPACFVCSTCHELLVDMIYFWKNEKLYCGRHYCDSEKPRCAGCDELIFSNEYTQAENQNWHLKHFCCFDCDSILAGEIYVMVNDKPVCKPCYVKNHAVVCQGCHNAIDPEVQRVTYNNFSWHASTECFLCSCCSKCLIGQKFMPVEGMVFCSVECKKRMS

SEQ ID NO: 58473 - protein, 62 aa, Homo sapiens
IYFAILSFLHIWAVVPCIKSFLIEIQCISRVYSIYVHTVCDPLFEAVGKIFSNVRINLQKEI

SEQ ID NO: 58474 - protein, 41 aa, Homo sapiens
VMESLEGLLESPSPGTSWTTRSQLANTEPTKGLPDHPSRSM

SEQ ID NO: 58475 - protein, 23 aa, Homo sapiens
IGDMCSLSMDFWEGPRKGGLEFY

SEQ ID NO: 58476 - protein, 325 aa, Homo sapiens
VGATRKDLIIMDLRQFLMCLSLCTAFALSKPTEKKDRVHHEPQLSDKVHNDAQSFDYDHDAFLGAEEAKTFDQLTPEESKERLGKIVSKIDGDKDGFVTVDELKDWIKFAQKRWIYEDVERQWKGHDLNEDGLVSWEEYKNATYGYVLDDPDPDDGFNYKQMMVRDERRFKMADKDGDLIATKEEFTAFLHPEEYDYMKDIVVQETMEDIDKNADGFIDLEEYIGDMYSHDGNTDEPEWVKTEREQFVEFRDKNRDGKMDKEETKDWILPSDYDHAEAEARHLVYESDQNKDGKLTKEEIVDKYDLFVGSQATDFGEALVRHDEF

SEQ ID NO: 58477 - protein, 317 aa, Homo sapiens
IIMDLRQFLMCLSLCTAFALSKPTEKKDRVHHEPQLSDKVHNDAQSFDYDHDAFLGAEEAKTFDQLTPEESKERLGMIVDKIDADKDGFVTEGELKSWIKHAQKKYIYDNVENQWQEFDMNQDGLISWDEYRNVTYGTYLDDPDPDDGFNYKQMMVRDERRFKMADKDGDLIATKEEFTAFLHPEEYDYMKDIVVQETMEDIDKNADGFIDLEEYIGDMYSHDGNTDEPEWVKTEREQFVEFRDKNRDGKMDKEETKDWILPSDYDHAEAEARHLVYESDQNKDGKLTKEEIVDKYDLFVGSQATDFGEALVRHDEF

SEQ ID NO: 58478 - protein, 74 aa, Homo sapiens
IRLFTEYRNQTNLPTENVDKMNLWVKMFSHQVQKNLAPFFEAWAWPIQKEVATSLAYLPEWKENIMKLYLLTQM

SEQ ID NO: 58479 - protein, 458 aa, Homo sapiens
LGRMYNLVSRIQDGLGELKKLLETHIHNQGLAAIEKCGEAALNDPKMYVQTVLDVHKKYNALVMSAFNNDAGFVAALDKACGRFINNNAVTKMAQSSSKSPELLARYCDSLLKKSSKNPEEAELEDTLNQVMVVFKYIEDKDVFQKFYAKMLAKRLVHQNSASDDAEASMISKLKQACGFEYTSKLQRMFQDIGVSKDLNEQFKKHLTNSEPLDLDFSIQVLSSGSWPFQQSCTFALPSELERSYQRFTAFYASRHSGRKLTWLYQLSKGELVTNCFKNRYTLQASTFQMAILLQYNTEDAYTVQQLTDSTQIKMDILAQVLQILLKSKLLVLEDENANVDEVELKPDTLIKLYLGYKNKKLRVNINVPMKTEQKQEQETTHKNIEEDRKLLIQAAIVRIMKMRKVLKHQQLLGEVLTQLSSRFKPRVPVIKKCIDILIEKEYLERVDGEKDTYSYLA

SEQ ID NO: 58480 - protein, 549 aa, Homo sapiens
KKFGPVVAPKPKVNPFRPGDSEPPPAPGAQRAQMGRVGEIPPPPPEDFPLPPPPLAGDGDDAEGALGGAFPPPPPPIEESFPPAPLEEEIFPSPPPPPEEEGGPEAPIPPPPQPREKVSSIDLEIDSLSSLLDDMTKNDPFKARVSSGYVPPPVATPFSSKSSTKPAAGGTAPLPPWKSPSSSQPLPQVPAPAQSQTQFHVQPQPQPKPQVQLHVQSQTQPVSLANTQPRGPPASSPAPAPKFSPVTPKFTPVASKFSPGAPGGSGSQPNQKLGHPEALSAGTGSPQPPSFTYAQQREKPRVQEKQHPVPPPAQNQNQVRSPGAPGPLTLKEVEELEQLTQQLMQDMEHPQRQNVAVNELCGRCHQPLARAQPAVRALGQLFHIACFTCHQCAQQLQGQQFYSLEGAPYCEGCYTDTLEKCNTCGEPITDRMLRATGKAYHPHCFTCVVCARPLEGTSFIVDQANRPHCVPDYHKQYAPRCSVCSEPIMPEPGRDETVRVVALDKNFHMKCYKCEDCGKPLSIEADDNGCFPLDGHVLCRKCHTARAQT

SEQ ID NO: 58481 - protein, 26 aa, Homo sapiens
KDHLRVHSGGPGPGAPRQLPPPPERD

SEQ ID NO: 58482 - protein, 206 aa, Homo sapiens
LALRADYEIASKEQDFFFELDAMDHLQSFIADCDRRTEVAKKRLAETQEEISAEVAAKAERVHELNEEIGKLLAKVEQLGAEGNVEESQKVMDEVEKARAKKREAEEVYRNSMPASSFQQQKLRVCEVCSAYLGLHDNDRRLADHFGGKLHLGFIEIREKLEELKRVVAEKQEKRNQERLKRREEREREEREKLRRSRSHSKNPKR

SEQ ID NO: 58483 - protein, 278 aa, Homo sapiens
ISAEVAAKAERVHELNEEIGKLLAKVEQLGAEGNVEESQKVMDEVEKARAKKREAEEVYRNSMPASSFQQQKLRVCEVCSAYLGLHDNDRRLADHFGGKLHLGFIEIREKLEELKRVVAEKQEKRNQERLKRREEREREEREKLRRSRSHSKNPKRSRSREHRRHRSRSMSRERKRRTRSKSREKRHRHRSRSSSRSRSRSHQRSRHSSRDRSRERSKRRSSKERFRDQDLASCDRDRSSRDRSPRDRDRKDKKRSYESANGRSEDRRSSEEREAGEI

SEQ ID NO: 58484 - protein, 403 aa, Homo sapiens
RMQMSPALTCLVLGLALVFGEGSAVHHPPSYVAHLASDFGVRVFQQVAQASKDRNVVFSPYGVASVLAMLQLTTGGETQQQIQAAMGFKIDDKGMAPALRHLYKELMGPWNKDEISTTDAIFVQRDLKLVQGFMPHFFRLFRSTVKQVDFSEVERARFIINDWVKTHTKGMISNLLGKGAVDQLTRLVLVNALYFNGQWKTPFPDSSTHRRLFHKSDGSTVSVPMMAQTNKFNYTEFTTPDGHYYDILELPYHGDTLSMFIAAPYEKEVPLSALTNILSAQLISHWKGNMTRLPRLLVLPKFSLETEVDLRKPLENLGMTDMFRQFQADFTSLSDQEPLHVAQALQKVKIEVNESGTVASSSTAVIVSARMAPEEIIMDRPFLFVVRHNPTGTVLFMGQVMEP

SEQ ID NO: 58485 - protein, 6 aa, Homo sapiens
MPAPAR

SEQ ID NO: 58486 - protein, 17 aa, Homo sapiens
IMQQKQKKANEKKEEPK

SEQ ID NO: 58487 - skipped

SEQ ID NO: 58488 - protein, 21 aa, Homo sapiens
TSLPSAAHLSCLGPRREPGDT

SEQ ID NO: 58489 - protein, 91 aa, Homo sapiens
IILFLNKMDLLVEKVKTVSIKKHFPDFRGDPHRLEDVQRYLVQCFDRKRRNRSKPLFHHFTTAIDTENVRFVFHAVKDTILQENLKDIMLQ

SEQ ID NO: 58490 - protein, 4 aa, Homo sapiens
RPNF

SEQ ID NO: 58491 - protein, 425 aa, Homo sapiens; identical to SEQ ID NO: 58433

SEQ ID NO: 58492 - protein, 14 aa, Homo sapiens
LKCSPKRKGKSNFL

SEQ ID NO: 58493 - protein, 319 aa, Homo sapiens
IEALLLGVYNLEIVDKQGHTKVLSFTIPSLSKPSVYHEPSSIGSMALTESALSQHGLSKVVYSGPHPQREMLTAQNRFEVLTFLLLCYNAALTYMPSVSLQSLCQICSRICVCGYPRQHVRKYKGISSRIPVSSGFMVQMLTGIYFAFYNGEWDLAQKALDDIIYRAQLELYPEPLLVANAIKASLPHGPMKSNKEGTRCIQVEITPTSSRISRNAVTSMSIRGHRWKRHEQPDNNNDATELGILVIPEISVTNVAGERTGNGEKGRTLGEIDAQHIQGVQETATDPRTESKGLPEIRRQKSVRKMMEDGINSPGRVQF

SEQ ID NO: 58494 - protein, 4 aa, Homo sapiens
LSLI

SEQ ID NO: 58495 - protein, 6 aa, Homo sapiens
ICIFGF

SEQ ID NO: 58496 - protein, 35 aa, Homo sapiens
LKSSVKAVILKDSKVFPLLLCITLNGLCALGREHS

SEQ ID NO: 58497 - protein, 18 aa, Homo sapiens
LELRKDLGFSKLDHPVLW

SEQ ID NO: 58498 - protein, 267 aa, Homo sapiens
VFPDACKEFQDAGEQVVSSPADVAEKADRIITMLPTSINAIEAYSGANGILKKVKKGSLLIDSSTIDPAVSKELAKEVEKMGAVFMDAPVSGGVGAARSGNLTFMVGGVEDEFAAAQELLGCMGSNVVYCGAVGTGQAAKICNNMLLAISMIGTAEAMNLGIRLGLDPKLLAKILNMSSGRCWSSDTYNPVPGVMDGVPSANNYQGGFGTTLMAKDLGLAQDSATSTKSPILLGSLAHQIYRMMCAKGYSKKDFSSVFQFLREEETF

SEQ ID NO: 58499 - protein, 44 aa, Homo sapiens [sequence omitted]

SEQ ID NO: 58500 - protein, 550 aa, Homo sapiens
IEALKDVDKWSFDVFSLNEASGDHALKFIFYELLTRYDLISRFKIPISALVSFVEALEVGYSKHKNPYHNLMHAADVTQTVHYLLYKTGVANWLTELEIFAIIFSAAIHDYEHTGTTNNFHIQTRSDPAILYNDRSVLENHHLSAAYRLLQDDEEMNILINLSKDDWREFRTLVIEMVMATDMSCHFQQIKAMKTALQQPEAIEKPKALSLMLHTADISHPAKAWDLHHRWTMSLLEEFFRQGDREAELGLPFSPLCDRKSTMVAQSQVGFIDFIVEPTFTVLTDMTEKIVSPLIDETSQTGGTGQRRSSLNSISSSDAKRSGVKTSGSEGSAPINNSVISVDYKSFKATWTEVVHINRERWRAKVPKEEKAKKEAEEKARLAAEEQQKEMEAKSQAEEGASGKAEKKTSGETKNQVNGTRANKSDNPRGKNSKAEKSSGEQQQNGDFKDGKNKTDKKDHSNIGNDSKKTDGTKQRSHGSPAPSTSSTCRLTLPVIKPPLRHFKRPAYASSSYAPSVSKKTDEHPARYKMLDQRIKMKKIQNISHNWNRK

SEQ ID NO: 58501 - protein, 52 aa, Homo sapiens
ILAMKPHFLKINVSELSLWVIQGCFWLFGTVILKYLTSKIFGIADDVSAFFT

SEQ ID NO: 58502 - protein, 137 aa, Homo sapiens
IEWIKYSTKPDAVFAGAMPTMASVKLSALRPIVNHPHYEDAGLRARTKIVYSMYSRKAAEEVKRELIKLKVNYYILEESWCVRRSKPGCSMPEIWDVEDPANAGKTPLCNLLVKDSKPHFTTVFQNSVYKVLEVVKE

SEQ ID NO: 58503 - protein, 44 aa, Homo sapiens
LENYFKPSMLEDPWAGLEPVSVVDISQQYSNTQTFTGKKGRYFC

SEQ ID NO: 58504 - protein, 458 aa, Homo sapiens
IKKSTHTKKPAREGGGKAGPFKKAITTTFAARMPLLWLRGFLLASCWIIVRSSPTPGSEGHSAAPDCPSCALAALPKDVPNSQPEMVEAVKKHILNMLHLKKRPDVTQPVPKAALLNAIRKLHVGKVGENGYVEIEDDIGRRAEMNELMEQTSEIITFAESGTARKTLHFEISKEGSDLSVVERAEVWLFLKVPKANRTRTKVTIRLFQQQKHPQGSLDTGEEAEEVGLKGERSELLLSEKVVDARKSTWHVFPVSSSIQRLLDQGKSSLDVRIACEQCQESGASLVLLGKKKKKEEEGEGKKKGGGEGGAGADEEKEQSHRPFLMLQARQSEDHPHRRRRRGLECDGKVNICCKKQFFVSFKDIGWNDWIIAPSGYHANYCEGECPSHIAGTSGSSLSFHSTVINHYRMRGHSPFANLKSCCVPTKLRPMSMLYYDDGQNIIKKDIQNMIVEECGCS

SEQ ID NO: 58505 - protein, 16 aa, Homo sapiens
KAVTCQWWSVQKSGSS

SEQ ID NO: 58506 - protein, 49 aa, Homo sapiens [sequence omitted]

SEQ ID NO: 58507 - protein, 74 aa, Homo sapiens
LRHDLPLHPAVVKPHLGHVPDYLVPPALRGLVRPHKKRKKLSSSCRKAKRAKSQNPLRSFKHKGKKFRPTAKPS

SEQ ID NO: 58508 - protein, 23 aa, Homo sapiens
KFYGYDNVKEYLESLQKELVEDN

SEQ ID NO: 58509 - protein, 35 aa, Homo sapiens
IIQSLVGWHKALHRRICSRVELVLTYDRMYQNKCF

SEQ ID NO: 58510 - protein, 53 aa, Homo sapiens
KDSIRLVKRCTKPDRKEFQKIAMATAIGFAIMGFIGFFVKLIHIPINNIIVGG

SEQ ID NO: 58511 - protein, 83 aa, Homo sapiens
KIPPKLAYGSEGVSGVIPPNSVLHFDVLLMDIWNSEDRVQIHTYFKPLSCPQTIQVSDFVRYHYNGTFLDGTLFDSSHNRMKT

SEQ ID NO: 58512 - protein, 145 aa, Homo sapiens
VLGMDMGLREMCVGEKRTVIIPPHLGYGEAGVDGEVPGSAVLVFDIELLELVAGLPEGYMFIWNGEVSPNLFEEIDKDGNGEVLLEEFSEYIHAQVASGKGKLAPGFDAELIVKNMFTNQDRNGDGKVTAEEFKLKDQEAKQDEL

SEQ ID NO: 58513 - protein, 24 aa, Homo sapiens
LTMKKKFDADPVELFEIPVKKINI

SEQ ID NO: 58514 - protein, 88 aa, Homo sapiens
IDISNVKIPKHLTDAYFKKQQLRKPRHQEGNIFDTEKEKYEITEQRKIDQKAVDSQILPKVKAISQLQGYLRSVFALTNGIYPHKLVF

SEQ ID NO: 58515 - protein, 52 aa, Homo sapiens
IKGLLDVTCKTVANMIKGKTPEEIRKTFNIKNDFTEEEEAQVRKENQWCEEK

SEQ ID NO: 58516 - protein, 13 aa, Homo sapiens
VDQPTVPQTASES

SEQ ID NO: 58517 - protein, 279 aa, Homo sapiens
LTLLVLLRGPPVARAGASSAGLGPVVRCEPCDARALAQCAPPPAVCAELVREPGCGCCLTCALSEGQPCGIYTERCGSGLRCQPSPDEARPLQALLDGRGLCVNASAVSRLRAYLLPAPPAPGNASESEEDRSAGSVESPSVSSTHRVSDPKFHPLHSKIIIIKKGHAKDSQRYKVDYESQSTDTQNFSSESKRETEYGPCRREMEDTLNHLKFLNVLSPRGVHIPNCDKKGFYKKKQCRPSKGRKRGFCWCVDKYGQPLPGYTTKGKEDVHCYSMQSK

SEQ ID NO: 58518 - protein, 39 aa, Homo sapiens
TPAARLMWSSNMPYFAQKTAKDMTSSWLQPRFIFLFVVN

SEQ ID NO: 58519 - protein, 104 aa, Homo sapiens
RKITINPGCVVVDGMPPGVSFKAPSYLEISSMRRILDSAEFIKFTVIRPFPGLVINNQLVDQSESEGPVIQESAEPSQLEVPATEEIKETDGSSQIKQEPDPTW

SEQ ID NO: 58520 - protein, 219 aa, Homo sapiens
TEAALGDAAQEPTGNNAEICLLPLDYGPCRALLLRYYYDRYTQSCRQFLYGGCEGNANNFYTWEACDDACWRIEKVPKVCRLQVSVDDQCEGSTEKYFFNLSSMTCEKFFSGGCHRNRIENRFPDEATCMGFCAPKKIPSFCYSPKDEGLCSANVTRYYFNPRYRTCDAFTYTGCGGNDNNFVSREDCKRACAKALKKKKKMPKLRFASRIRKIRKKQF

SEQ ID NO: 58521 - protein, 403 aa, Homo sapiens
LEREYFKGEFPPYPKPGEISNDPITFNTNLMGYPDRPGWLRYIQRTPYSDGVLYGSPTAENVGKPTIIEITAYNRRTFETARHNLIINIMSAEDFPLPYQAEFFIKNMNVEEMLASEVLGDFLGAVKNVWQPERLNAINITSALDRGGRVPLPINDLKEGVYVMVGADVPFSSCLREVENPQNQLRCSQEMEPVITCDKKFRTQFYIDWCKISLVDKTKQVSTYQEVIRGEGILPDGGEYKPPSDSLKSRDYYTDFLITLAVPSAVALVLFLILAYIMCCRREGVEKRNMQTPDIQLVHHSAIQKSTKELRDMSKNREIAWPLSTLPVFHPVTGEIIPPLHTDNYDSTNMPLMQTQQWSFAPVAQAGVQWSDLGSLQPPPPRFKNLPHQTQIPQQQTTGKWYP

SEQ ID NO: 58522 - protein, 20 aa, Homo sapiens
VLENKVVWEKDWRHKRIQPR

SEQ ID NO: 58523 - protein, 6 aa, Homo sapiens
LMTFPC

SEQ ID NO: 58524 - protein, 763 aa, Homo sapiens
IFPWILTCISEEMAFRTICVLVGVFICSICVKGSSQPQARVYLTFDELRETKTSEYFSLSHHPLDYRILLMDEDQDRIYVGSKDHILSLNINNISQEALSVFWPASTIKVEECKMAGKDPTHGCGNFVRVIQTFNRTHLYVCGSGAFSPVCTYLNRGRRSEDQVFMIDSKCESGKGRCSFNPNVNTVSVMINEELFSGMYIDFMGTDAAIFRSLTKRNAVRTDQHNSKWLSEPMFVDAHVIPDGTDPNDAKVYFFFKEKLTDNNRSTKQIHSMIARICPNDTGGLRSLVNKWTTFLKARLVCSVTDEDGPETHFDELEDVFLLETDNPRTTLVYGIFTTSSSVFKGSAVCVYHLSDIQTVFNGPFAHKEGPNHQLISYQGRIPYPRPGTCPGGAFTPNMRTTKEFPDDVVTFIRNHPLMYNSIYPIHKRPLIVRIGTDYKYTKIAVDRVNAADGRYHVLFLGTDRGTVQKVVVLPTNNSVSGELILEELEVFKNHAPITTMKISSKKQQLYVSSNEGVSQVSLHRCHIYGTACADCCLARDPYCAWDGHSCSRFYPTGKRRSRRQDVRHGNPLTQCRGFNLKAYRNAAEIVQYGVKNNTTFLECAPKSPQASIKWLLQKDKDRRKEVKLNERIIATSQGLLIRSVQGSDQGLYHCIATENSFKQTIAKINFKVLDSEMVAVVTDKWSPWTWASSVRALPFHPKDIMGAFSHSEMQMINQYCKDTRQQHQQGDESQKMRGDYGKLKALINSRKSRNRRNQLPES

SEQ ID NO: 58525 - protein, 22 aa, Homo sapiens
LDEYEELNVWQVNASRTRITFV

SEQ ID NO: 58526 - protein, 52 aa, Homo sapiens
KPWSLFDVLVEKYGWPHEDAAQFTDFLIPMLEMVPEKRASAGECLRHPWLNS

SEQ ID NO: 58527 - protein, 98 aa, Homo sapiens
ITINKDTKVPKACLFTINKEDHTLGNIIKSQLLKDPQVLFAGYKVPHPLEHKIIIRVQTTPDYSPQEAFTNAITDLISELSLLEERFRTCLLPLRLLP

SEQ ID NO: 58528 - protein, 17 aa, Homo sapiens
MDTSIKNQTQLNTTWLR

SEQ ID NO: 58529 - protein, 38 aa, Homo sapiens
LNLFWICKTCFRCLKRLKMSWFLPTVLDTGQGFKLVKS

SEQ ID NO: 58530 - protein, 4 aa, Homo sapiens
IPTS

SEQ ID NO: 58531 - protein, 210 aa, Homo sapiens
LTFYVISQVFEIKMDASLGNLFARSALDTAARSTKPPRYKCGISKACPEKHFAFKMASGAANVVGPKICLEDNVLMSGVKNNVGRGINVALANGKTGEVLDTKYFDMWGGDVAPFIEFLKAIQDGTIVLMGTYDDGATKLNDEARRLIADLGSTSITNLGFRDNWVFCGGKGIKTKSPFEQHIKNNKDTNKYEGWPEVVEMEGCIPQKQD

SEQ ID NO: 58532 - protein, 503 aa, Homo sapiens [sequence omitted]

SEQ ID NO: 58533 - protein, 9 aa, Homo sapiens
RKRRIANKK

SEQ ID NO: 58534 - protein, 111 aa, Homo sapiens
KKTTGLVGLAVCNTPHERLRILYTKILDVLEEIPKNAAYRKYTEQITNEKLAMVKAEPDVKKLEDQLQGGQLEEVILQAEHELNLARKMREWKLWEPLVEEPPADQWKWPI

SEQ ID NO: 58535 - protein, 21 aa, Homo sapiens
LVTYVPVTTFKNLQTVSVDEN

SEQ ID NO: 58536 - protein, 9 aa, Homo sapiens
LHSYEKRLY

SEQ ID NO: 58537 - protein, 109 aa, Homo sapiens
KDVHMPKHPELADKNVPNLHVMKAMQSLKSRGYVKEHFAWRHFYWYLTNEGIQYLRDYLHLPPEIVPATLPRSRPETGRPWPKGLYVRSAVLPGADKKAEAGAGSATEF

SEQ ID NO: 58538 - protein, 26 aa, Homo sapiens
TDSMSLSEKSRKVFRIFRQWESLCSC

SEQ ID NO: 58539 - protein, 118 aa, Homo sapiens
RICSEEERAKAKHLARQLEEKDRVLKKQDAFYKEQLARLEERSSEFYRVTTEQYQKAAEEVEAKFKRYESHPVCADLQAKILQCYRENTHQTLKCSALATQYMHCVNHAKQSMLEKGG

SEQ ID NO: 58540 - protein, 93 aa, Homo sapiens [sequence omitted]

SEQ ID NO: 58541 - protein, 92 aa, Homo sapiens
IWYWKNESGTWIQYGEEKDKRKNSNVDSSYLESLYQSCPRGVVPFQAGSRNYELSFQGMIQTNIASKTQKDVIRRPTFVPQWYVQQMKRGPE

SEQ ID NO: 58542 - protein, 47 aa, Homo sapiens
VLTLAYTAYRTALSHGHQKDIWAQSLVSLFQALRHDLMRSSQPGVPP

SEQ ID NO: 58543 - protein, 517 aa, Homo sapiens
LESGEQGVLQWDRKLSELSEPGDGEALMYHTHFSELLDEFSQNVLGQLLNDPFLSEKSVSMEVEPSPTSPAPLIQAEHSYSLCEEPRAQSPFTHITTSDSFNDDEVESEKWYLSTDFPSTSIKTEPVTDEPPPGLVPSVTLTITAISTPLEKEEPPLEMNTGVDSSCQTIIPKIKLEPHEVDQFLNFSPKEAPVDHLHLPPTPPSSHGSDSEGSLSPNPRLHPFSLPQTHSPSRAAPRAPSALSSSPLLTAPHKLQGSGPLVLTEEEKRTLIAEGYPIPTKLPLSKSEEKALKKIRRKIKNKISAQESRRKKKEYMDSLEKKVESCSTENLELRKKVEVLENTNRTLLQQLQKLQTLVMGKVSRTCKLAGTQTGTCLMVVVLCFAVAFGSFFQGYGPYPSATKMALPSQHSLQEPYTASVVRSRNLLIYEEHSPPEESSSPGSAGELGGWDRGSSLLRVSGLESRPDVDLPHFIISNETSLEKSVLLELQQHLVSAKLEGNETLKVVELDRRVNTTF

SEQ ID NO: 58544 - protein, 637 aa, Homo sapiens
LLLLGLVQLLAVAGAEGPDEDSSNRENAIEDEEEEEEEDDDEEEDDLEVKEENGVLVLNDANFDNFVADKDTVLLEFYAPWCGHCKQFAPEYEKIANILKDKDPPIPVAKIDATSASVLASRFDVSGYPTIKILKKGQAVDYEGSRTQEEIVAKVREVSQPDWTPPPEVTLVLTKENFDEVVNDADIILVEFYAPWCGHCKKLAPEYEKAAKELSKRSPPIPLAKVDATAETDLAKRFDVSGYPTLKIFRKGRPYDYNGPREKYGIVDYMIEQSGPPSKEILTLKQVQEFLKDGDDVIIIGVFKGESDPAYQQYQDAANNLREDYKFHHTFSTEIAKFLKVSQGQLVVMQPEKFQSKYEPRSHMMDVQQGSTQDSAIKDFVLKYALPLVGHRKVSNDAKRYTRRPLVVVYYSVDFSFDYRAATQFWRSKVLEVAKDFPEYTFAIADEEDYAGEVKDLGLSESGEDVNAAILDESGKKFAMEPEEFDSDTLREFVTAFKKGKLKPVIKSQPVPKNNKGPVKVVVGKTFDSIVMDPKKDVLIEFYAPWCGHCKQLEPVYNSLAKKYKGQKGLVIAKMDATANDVPSDRYKVEGFPTIYFAPSGDKKNPVKFEGGDRDLEHLSKFIEEHATKLSRTKEEL

SEQ ID NO: 58545 - protein, 242 aa, Homo sapiens
RMSGFQINLNPLKEPLGFIKVLEWIASIFAFATCGGFKGQTEIQVNCPPAVTENKTVTATFGYPFRLNEASFQPPPGVNICDVNWKDYVLIGDYSSSAQFYVTFAVFVFLYCIAALLLYVGYTSLYLDSRKLPMIDFVVTLVATFLWLVSTSAWAKALTDIKIATGHNIIDELPPCKKKAVLCYFGSVTSMGSLNVSVIFGFLNMILWGGNAWFVYKETSLHSPSNTSAPHSQGGIPPPTGI

SEQ ID NO: 58546 - protein, 547 aa, Homo sapiens
LASHPNSTDVHIINLSLTFHGQELLSDTKLELNSGRRYGLIGLNGIGKSMLLSAIGKREVPIPEHIDIYHLTREMPPSDKTPLHCVMEVDTERAMLEKEAERLAHEDAECEKLMELYERLEELDADKAEMRASRILHGLGFTPAMQRKKLKDFSGGWRMRVALARALFIRPFMLLLDEPTNHLDLDACVWLEEELKTFKRILVLVSHSQDFLNGVCTNIIHMHNKKLKYYTGNYDQYVKTRLELEENQMKRFHWEQDQIAHMKNYIARFGHGSAKLARQAQSKEKTLQKMMASGLTERVVSDKTLSFYFPPCGKIPPPVIMVQNVSFKYTKDGPCIYNNLEFGIDLDTRVALVGPNGAGKSTLLKLLTGELLPTDGMIRKHSHVKIGRYHQHLQEQLDLDLSPLEYMMKCYPEIKEKEEMRKIIGRYGLTGKQQVSPIRNLSDGQKCRVCLAWLAWQNPHMLFLDEPTNHLDIETIDALADAINEFEGGMMLVSHDFRLIQQVAQEIWVCEKQTITKWPGDILAYKEHLKSKLVDEEPQLTKRTHNV

SEQ ID NO: 58547 - protein, 798 aa, Homo sapiens
LPVYALGYLGLSFSWVLLALALLAWCRRSRGLKALRLCRALALLEDEERVVRLGVRACDLPAWVHFPDTERAEWLNKTVKHMWPFICQFIEKLFRETIEPAVRGANTHLSTFSFTKVDVGQQPLRINGVKVYTENVDKRQIILDLQISFVGNCEIDLEIKRYFCRAGVKSIQIHGTMRVILEPLIGDMPLVGALSIFFLRKPLLEINWTGLTNLLDVPGLNGLSDTIILDIISNYLVLPNRITVPLVSEVQIAQLRFPVPKGVLRIHFIEAQDLQGKDTYLKGLVKGKSDPYGIIRVGNQIFQSRVIKENLSPKWNEVYEALVYEHPGQELEIELFDEDPDKDDFLGSLMIDLIEVEKERLLDEWFTLDEVPKGKLHLRLEWLTLMPNASNLDKVLTDIKADKDQANDGLSSALLILYLDSARNLPSGKKISSNPNPVVQMSVGHKAQESKIRYKTNEPVWEENFTFFIHNPKRQDLEVEVRDEQHQCSLGNLKVPLSQLLTSEDMTVSQRFQLSNSGPNSTIKMKIALRVLHLEKRERPPDHQHSAQVKRPSVSKEGRKTSIKSHMSGSPGPGGSNTAPSTPVIGGSDKPGMEEKAQPPEAGPQGLHDLGRSSSSLLASPGHISVKEPTPSIASDISLPIATQELRQRLRQLENGTTLGQSPLGQIQLTIRHSSQRNKLIVVVHACRNLIAFSEDGSDPYVRMYLLPDKRRSGRRKTHVSKKTLNPVFDQSFDFSVSLPEVQRRTLDVAVKNSGGFLSKDKGLLGKVLVALASEELAKGWTQWYDLTEDGTRPQAMT

SEQ ID NO: 58548 - protein, 49 aa, Homo sapiens
IEWVCRRIATGSFLKRNPGVKEGYKFTHLKWSCFSRMLPIMTHSGLRNS

SEQ ID NO: 58549 - protein, 52 aa, Homo sapiens
KKNFEWVAEKVELLLKSESQCRVVVLMGSTSDLGHCEKIKKACGNFGIPCEL

SEQ ID NO: 58550 - protein, 42 aa, Homo sapiens
LDEAYEEMVNIIEYNKELQAKVNILRRQLAELETEDGMQESP

SEQ ID NO: 58551 - protein, 61 aa, Homo sapiens
LMYFALQKHYPAKEQYGDTLHFCRHCSILFWKDSGHPCTAADPDSCFTPVSPQHFIDLFKF

SEQ ID NO: 58552 - protein, 429 aa, Homo sapiens
ILFFKMREEQIRRWKEREAAMERKESLPVKPRPKKENGKSVHWKLGADKEVWVWVMGEHHLDKPYDVLCNEIIAERARLKAEQEAEEPRKTHSEEFTNSLKTKSQYHDLQAPDNQQTKDIWKKVAEKEELEQGSRPAPTLEEEKIRSLSSSSRNIQQMLADSINRMKAYAFHQKKESMKKKQDEEINQIEEERTKQICKSWKEDSEWQASLRKSKAADEKRRSLAKQAREDYKRLSLGAQKGRGGERLQSPLRVPQKPERPPLPPKPQFLNSGAYPQKPLRNQGVVRTLSSSAQEDIIRWFKEEQLPLRAGYQKTSDTIAPWFHGILTLKKANELLLSTGMPGSFLIRVSERIKGYALSYLSEDGCKHFLIDASADAYSFLGVDQLQHATLADLVEYHKEEPITSLGKELLLYPCGQQDQLPDYLELFE

SEQ ID NO: 58553 - protein, 512 aa, Homo sapiens
KMALRAMRGIVNGAAPELPVPTGGPAVGAREQALAVSRNYLSQPRLTYKTVSGVNGPLVILDHVKFPRYAEIVHLTLPDGTKRSGQVLEVSGSKAVVQVFEGTSGIDAKKTSCEFTGDILRTPVSEDMLGRVFNGSGKPIDRGPVVLAEDFLDIMGQPINPQCRIYPEEMIQTGISAIDGMNSIARGQKIPIFSAAGLPHNEIAAQICRQAGLVKKSKDVVDYSEENFAIVFAAMGVNMETARFFKSDFEENGSMDNVCLFLNLANDPTIERIITPRLALTTAEFLAYQCEKHVLVILTDMSSYAEALREVSAAREEVPGRRGFPGYMYTDLATIYERAGRVEGRNGSITQIPILTMPNDDITHPIPDLTGYITEGQIYVDRQLHNRQIYPPINVLPSLSRLMKSAIGEGMTRKDHADVSNQLYACYAIGKDVQAMKAVVGEEALTSDDLLYLEFLQKFERNFIAQGPYENRTVFETLDIGWQLLRIFPKEMLKRIPQSTLSEFYPRDSAKH

SEQ ID NO: 58554 - protein, 718 aa, Homo sapiens
LLLLPRPGRPLDLADYTYDLAEEDDSEPLNYKDPCKAAAFLGDIALDEEDLRAFQVQQAVDLRRHTARKSSIKAAVPGNTSTPSCQSTNGQPQRGACGRWRGRSRSRRAATSRPERVWPDGVIPFVIGGNFTGSQRAVFRQAMRHWEKHTCVTFLERTDEDSYIVFTYRPCGCCSYVGRRGGGPQAISIGKNCDKFGIVVHELGHVVGFWHEHTRPDRDRHVSIVRENIQPGQEYNFLKMEPQEVESLGETYDFDSIMHYARNTFSRGIFLDTIVPKYEVNGVKPPIGQRTRLSKGDIAQARKLYKCPACGETLQDSTGNFSSPEYPNGYSAHMHCVWRISVTPGEKIILNFTSLDLYRSRLCWYDYVEVRDGFWRKAPLRGRFCGSKLPEPIVSTDSRLWVEFRSSSNWVGKGFFAVYEAICGGDVKKDYGHIQSPNYPDDYRPSKVCIWRIQVSEGFHVGLTFQSFEIERHDSCAYDYLEVRDGHSESSTLIGRYCGYEKPDDIKSTSSRLWLKFVSDGSINKAGFAVNFFKEVDECSRPNRGGCEQRCLNTLGSYKCSCDPGYELAPDKRRCEAACGGFLTKLNGSITSPGWPKEYPPNKNCIWQLVAPTQYRISLQFDFFETEGNDVCKYDFVEVRSGLTADSKLHGKFCGSEKPEVITSQYNNMRVEFKSDNTVSKKGFKAHFFSEKRPALQPPRGRPHQLKFRVQKRNRTPQ

SEQ ID NO: 58555 - protein, 974 aa, Homo sapiens
LLLLPRPGRPLDLADYTYDLAEEDDSEPLNYKDPCKAAAFLGDIALDEEDLRAFQVQQAVDLRRHTARKSSIKAAVPGNTSTPSCQSTNGQPQRGACGRWRGRSRSRRAATSRPERVWPDGVIPFVIGGNFTGSQRAVFRQAMRHWEKHTCVTFLERTDEDSYIVFTYRPCGCCSYVGRRGGGPQAISIGKNCDKFGIVVHELGHVVGFWHEHTRPDRDRHVSIVRENIQPGQEYNFLKMEPQEVESLGETYDFDSIMHYARNTFSRGIFLDTIVPKYEVNGVKPPIGQRTRLSKGDIAQARKLYKCPACGETLQDSTGNFSSPEYPNGYSAHMHCVWRISVTPGEKIILNFTSLDLYRSRLCWYDYVEVRDGFWRKAPLRGRFCGSKLPEPIVSTDSRLWVEFRSSSNWVGKGFFAVYEAICGGDVKKDYGHIQSPNYPDDYRPSKVCIWRIQVSEGFHVGLTFQSFEIERHDSCAYDYLEVRDGHSESSTLIGRYCGYEKPDDIKSTSSRLWLKFVSDGSINKAGFAVNFFKEVDECSRPNRGGCEQRCLNTLGSYKCSCDPGYELAPDKRRCEAACGGFLTKLNGSITSPGWPKEYPPNKNCIWQLVAPTQYRISLQFDFFETEGNDVCKYDFVEVRSGLTADSKLHGKFCGSEKPEVITSQYNNMRVEFKSDNTVSKKGFKAHFFSDKDECSKDNGGCQQDCVNTFGSYECQCRSGFVLHDNKHDCKEAGCDHKVTSTSGTITSPNWPDKYPSKKECTWAISSTPGHRVKLTFMEMDIESQPECAYDHLEVFDGRDAKAPVLGRFCGSKKPEPVLATGSRMFLRFYSDNSVQRKGFQASHATECGGQVRADVKTKDLYSHAQFGDNNYPGGVDCEWVIVAEEGYGVELVFQTFEVEEETDCGYDYMELFDGYDSTAPRLGRYCGSGPPEEVYSAGDSVLVKFHSDDTITKKGFHLRYTSTKFQDTLHSRK

SEQ ID NO: 58556 - protein, 522 aa, Homo sapiens
LLLPPPAAWDLAVRLRGAEAASERQVYSVTMKLLLLHPAFQSCLLLTLLGLWRTTPEAHASSLGAPAISAASFLQDLIHRYGEGDSLTLQQLKALLNHLDVGVGRGNVTQHVQGHRNLSTCFSSGDLFTAHNFSEQSRIGSSELQEFCPTILQQLDSRACTSENQENEENEQTEEGRPSAVEVWGYGLLCVTVISLCSLLGASVVPFMKKTFYKRLLLYFIALAIGTLYSNALFQLIPEAFGFNPLEDYYVSKSAVVFGGFYLFFFTEKILKILLKQKNEHHHGHSHYASESLPSKKDQEEGVMEKLQNGDLDHMIPQHCSSELDGKAPMVDEKVIVGSLSVQDLQASQSACYWLKGVRYSDIGTLAWMITLSDGLHNFIDGLAIGASFTVSVFQGISTSVAILCEEFPHELGDFVILLNAGMSIQQALFFNFLSACCCYLGLAFGILAGSHFSANWIFALAGGMFLYISLADMFPEMNEVCQEDERKGSILIPFIIQNLGLLTGFTIMVVLTMYSGQIQIG

SEQ ID NO: 58557 - protein, 26 aa, Homo sapiens
MFTNQGTVIHFNSRDASKLFHHYRPC

SEQ ID NO: 58558 - protein, 220 aa, Homo sapiens
KMNNGGKAEKENTPSEANLQEEEVRTLFVSGLPLDIKPRELYLLFRPFKGYEGSLIKLTSKQPVGFVSFDSRSEAEAAKNALNGIRFDPEIPQTLRLEFAKANTKMAKNKLVGTPNPSTPLPNTVPQFIAREPYELTVPALYPSSPEVWAPYPLYPAELAPALPPPAFTYPASLHAQCFSPEAKPNTPVFCPLLQQIRFVSGNVFVTYQPTADQQRELPC

SEQ ID NO: 58559 - protein, 139 aa, Homo sapiens
KWFKNGNELNRKNKPQNIKIQKKPGKSELRINKASLADSGEYMCKVISKLGNDSASANITIVESNATSTSTTGTSHLVKCAEKEKTFCVNGGECFMVKDLSNPSRYLCKCPNEFTGDRCQNYVMASFYSTSTPFLSLPE

SEQ ID NO: 58560 - skipped

SEQ ID NO: 58561 - protein, 54 aa, Homo sapiens
KTDKAYWLLEEMLTKELLELDSVETGGQDSVRQARKEAVCKIQAILEKLEKKGL

SEQ ID NO: 58562 - protein, 37 aa, Homo sapiens
LELDSVETGGQDSVRQARKEAVCKIQAILEKLEKKGL

SEQ ID NO: 58563 - protein, 29 aa, Homo sapiens
LIKIKDMFFGQQPELKICWNRVRDHFSCS

SEQ ID NO: 58564 - protein, 27 aa, Homo sapiens
LYTQFRVDSVLFKTRLPHDKTKCFKFI

SEQ ID NO: 58565 - protein, 68 aa, Homo sapiens
LACLTAYTIFLCMETHYEKVLKKVSKYIQEQNEKIYAPQGLLLTDPIERGLRVIEITIYEDRGMSSGR

SEQ ID NO: 58566 - protein, 60 aa, Homo sapiens
RRIMRIFSVPPTEETLSEPNFYDTISKIRLRQQLEMYSISRKYDYQQPQNQADSVQLSLE

SEQ ID NO: 58567 - protein, 290 aa, Homo sapiens
IIYSDKFRDVYDYFRAVLQRDERSERAFKLTRDAIELNAANYTVWHFRRVLLKSLQKDLHEEMNYITAIIEEQPKNYQVWHHRRVLVEWLRDPSQELEFIADILNQDAKNYHAWQHRQWVIQEFKLWDNELQYVDQLLKEDVRNNSVWNQRYFVISNTTGYNDRAVLEREVQYTLEMIKLVPHNESAWNYLKGILQDRGLSKYPNLLNQLLDLQPSHSSPYLIAFLVDIYEDMLENQCDNKEDILNKALELCEILAKEKDTIRKEYWRYIGRSLQSKHSTENDSPTNVQQ

SEQ ID NO: 58568 - protein, 30 aa, Homo sapiens
KEHLTQNIVATALWVLIAYILYRKKIFWKI

SEQ ID NO: 58569 - protein, 232 aa, Homo sapiens
LGFEGGQTPFYIRIPKYGFNEGHSFRRQYKPLSLNRLQYLIDLGRVDPSQPIDLTQLVNGRGVTIQPLKRDYGVQLVEEGADTFTAKVNIEVQLASELAIAAIEKNGGVVTTAFYDPRSLDIVCKPVPFFLRGQPIPKRMLPPEELVPYYTDAKNRGYLADPAKFPEARLELARKYGYILPDITKDELFKMLCTRKDPRQIFFGLAPGWVVNMADKKILKPTDENLLKYYTS

SEQ ID NO: 58570 - protein, 103 aa, Homo sapiens
VDYNAYAGVWSQDKWKGKFEVKWIFVKDVPNNQLRHIRLENNDNKPVTNSRDTQEVPLEKAKQVLKIIATFKHTTSIFDDFAHYEKRQEEEEAMRRERNRNKQ

SEQ ID NO: 58571 - protein, 488 aa, Homo sapiens
RIKNCLNPQFSKTFIIDYYFEVVQKLKFGVYDIDNKTIELSDDDFLGECECTLGQIVSSKKLTRPLVMKTGRPAGKGSITISAEEIKDNRVVLFEMEARKLDNKDLFGKSDPYLEFHKQTSDGNWLMVHRTEVVKNNLNPVWRPFKISLNSLCYGDMDKTIKVECYDYDNDGSHDLIGTFQTTMTKLKEASRSSPVEFECINEKKRQKKKSYKNSGVISVKQCEITVECTFLDYIMGGCQLNFTVGVDFTGSNGDPRSPDSLHYISPNGVNEYLTALWSVGLVIQDYDADKMFPAFGFGAQIPPQWQVSHEFPMNFNPSNPYCNGIQGIVEAYRSCLPQIKLYGPTNFSPIINHVARFAAAATQQQTASQYFVLLIITDGVITDLDETRQAIVNASRLPMSIIIVGVGGADFSAMEFLDGDGGSLRSPLGEVAIRDIVQFVPFRQFQNAPKEALAQCVLAEIPQQVVGYFNTYKLLPPKNPATKQQKQ

SEQ ID NO: 58572 - protein, 244 aa, Homo sapiens
KMDVLKATAEQISSQTGNKVHAIQCDVRDPDMVQNTVSELIKVAGHPNIVINNAAGNFISPTERLSPNAWKTITDIVLNGTAFVTLEIGKQLIKAQKGAAFLSITTIYAETGSGFVVPSASAKAGVEAMSKSLAAEWGKYGMRFNVIQPGPIKTKGAFSRLDPTGTFEKEMIGRIPCGRLGTVEELANLAAFLCSDYASWINGAVIKFDGGEEVLISGEFNDLRKVTKEQWDTIEELIRKTKGS

SEQ ID NO: 58573 - protein, 14 aa, Homo sapiens
MEFEHYFKRFCILD

SEQ ID NO: 58574 - protein, 12 aa, Homo sapiens
KKLKKQKLMAQE

SEQ ID NO: 58575 - protein, 587 aa, Homo sapiens
LTGGKMAARSWQDELAQQAEEGSARLREMLSVGLGFLRTELGLDLGLEPKRYPGWVILVGTGALGLLLLFLLGYGWAAACAGARKKRRSPPRKREEAAAVPAAAPDDLALLKNLRSEEQKKKNRKKLSEKPKPNGRTVEVAEGEAVRTPQSVTAKQPPEIDKKNEKSKKNKKKSKSDAKAVQNSSRHDGKEVDEGAWETKISHREKRQQRKRDKVLTDSGSLDSTIPGIENTITVTTEQLTTASFPVGSKKNKGDSHLNVQVSNFKSGKGDSTLQVSSGLNENLTVNGGGWNEKSVKLSSQISAGEEKWNSVSPASAGKRKTEPSAWSQDTGDANTNGKDWGRSWSDRSIFSGIGSTAEPVSQSTTSDYQWDVSRNQPYIDDEWSGLNGLSSADPNSDWNAPAEEWGNWVDEERASLLKSQEPIPDDQKVSDDDKEKGEGALPTGKSKKKKKKKKKQGEDNSTAQDTEELEKEIREDLPVNTSKTRPKQEKAFSLKTISTSDPAEVLVKNSQPIKTLPPATSTEPSVILSKSDSDKSSSQVPPILQETDKSKSNTKQNSVPPSQTKSETSWESPKQIKKKKKARRET

SEQ ID NO: 58576 - protein, 240 aa, Homo sapiens
LKTCARARATAPGAMKMVAPWTRFYSNSCCLCCHVRTGTILLGVWYLIINAVVLLILLSALADPDQYNFSSSELGGDFEFMDDANMCIAIAISLLMILICAMATYGAYKQRAAWIIPFFCYQIFDFALNMLVAITVLIYPNSIQEYIRQLPPNFPYRDDVMSVNPTCLVLIILLFISIILTFKGYLISCVWNCYRYINGRNSSDVLVYVTSNDTTVLLPPYDDATVNGAAKEPPPPYVSA

SEQ ID NO: 58577 - protein, 72 aa, Homo sapiens
KYSEKEDKYEEEIKLLSDKVKEAETRAEFAERTVAKLEKTIDDLEEKLAQAKEENVGLHQTLDQTLNELNCI

SEQ ID NO: 58578 - protein, 50 aa, Homo sapiens
IRGQAFPAAGAPRRSGQMRNMTLPLRRRKEVPLPPYLCSSASSLFPELFL

SEQ ID NO: 58579 - protein, 7 aa, Homo sapiens
ISYLVII

SEQ ID NO: 58580 - protein, 35 aa, Homo sapiens
INLANDMQVLQGRIIAENLQRTLSADVLNTSENRD

SEQ ID NO: 58581 - protein, 22 aa, Homo sapiens
KVGWGAVYTLSEFTHRFGSKNC

SEQ ID NO: 58582 - protein, 52 aa, Homo sapiens
KDQDGKIGLRLKSIDNDIFVQLVQANSPASLVGLRFGDQVLQISGENCRVEL

SEQ ID NO: 58583 - protein, 74 aa, Homo sapiens
LPIAAGGHFALELTTPEQGRDSPDAGRLFCPFGDTSPPLPGPASLKGSPCSCLDAGFFSGSGKPAASRDDAPQR

SEQ ID NO: 58584 - protein, 99 aa, Homo sapiens
KRPVTSEELLTPGAPYARKTFTIVGDAVGWGFVVRGSKPCHIQAVDPSGPAAAAGMKVCQFVVSVNGLNVLHVDYRTVSNLILTGPRTIVMEVMEELEC

SEQ ID NO: 58585 - protein, 9 aa, Homo sapiens
KDCADPCDS

SEQ ID NO: 58586 - protein, 21 aa, Homo sapiens
VRTGLRRPATGESPARAQERL

SEQ ID NO: 58587 - protein, 133 aa, Homo sapiens
LLISQAMGLALYVLPVLGQHVATQHFPVAEAEAVVLTLLAIYAAGLALPHNTHRVVSTQAPDRGWMALKLVALIYLALQLGCIALTNFSLGFLLATTMVPTAALAKPHGPRYVWISPTSPNACALITDRTLIQ

SEQ ID NO: 58588 - protein, 260 aa, Homo sapiens
MLAAGGAGLAMALHSAVSASDLELHPPSYPWSHRGLLSSLDHTSIRRGFQVYKQVCASCHSMDFVAYRHLVGVCYTEDEAKELAAEVEVQDGPNEDGEMFMRPGKLFDYFPKPYPNSEAARAANNGALPPDLSYIVRARHGGEDYVFSLLTGYCEPPTGVSLREGLYFNPYFPGQAIAMAPPIYTDVLEFDDGTPATMSQIAKDVCTFLRWASEPEHDHRKRMGLKMLMMMALLVPLVYTIKRHKWSVLKSRKLAYRPPK

SEQ ID NO: 58589 - protein, 221 aa, Homo sapiens
MKKIRQVIRKYNYVAMDTEFPGVVARPIGEFRSNADYQYQLLRCNVDLLKIIQLGLTFMNEQGEYPPGTSTWQFNFKFNLTEDMYAQDSIELLTTSGIQFKKHEEEGIETQYFAELLMTSGVVLCEGVKWLSFHSGYDFGYLIKILTNSNLPEEELDFFEILRLFFPVIYDVKYLMKSCKNLKGGLQEVAEQLELERIGPQHQAGSDSLLTGMAFFKMREV

SEQ ID NO: 58590 - protein, 1133 aa, Homo sapiens
KDALRTARARVSGAAVGPDAEAEPPPPASTSPQRFRRRLPCLMCRKKPDTMILTQIEAKEACDWLRATGFPQYAQLYEDFLFPIDISLVKREHDFLDRDAIEALCRRLNTLNKCAVMKLEISPHRKRSDDSDEDEPCAISGKWTFQRDSKRWSRLEEFDVFSPKQDLVPGSPDDSHPKDGPSPGGTLMDLSERQEVSSVRSLSSTGSLPSHAPPSEDAATPRTNSVISVCSSSNLAGNDDSFGSLPSPKELSSFSFSMKGHEKTAKSKTRSLLKRMESLKLKSSHHSKHKAPSKLGLIISGPILQEGMDEEKLKQLNCVEISALNGNRINVPMVRKRSVSNSTQTSSSSSQSETSSAVSTPSPVTRTRSLSACNKRVGMYLEGFDPFNQSTFNNVVEQNFKNRESYPEDTVFYIPEDHKPGTFPKALTNGSFSPSGNNGSVNWRTGSFHGPGHISLRRENSSDSPKELKRRNSSSSMSSRLSIYDNVPGSILYSSSGDLADLENEDIFPELDDILYHVKGMQRIVNQWSEKFSDEGDSDSALDSVSPCPSSPKQIHLDVDNDRTTPSDLDSTGNSLNEPEEPSEIPERRDSGVGASLTRSNRHRLRWHSFQSSHRPSLNSVSLQINCQSVAQMNLLQKYSLLKLTALLEKYTPSNKHGFSWAVPKFMKRIKVPDYKDRSVFGVPLTVNVQRTGQPLPQSIQQAMRYLRNHCLDQVGLFRKSGVKSRIQALRQMNEGAIDCVNYEGQSAYDVADMLKQYFRDLPEPLMTNKLSETFLQIYQYVPKDQRLQAIKAAIMLLPDENREVLQTLLYFLSDVTAAVKENQMTPTNLAVCLAPSLFHLNTLKRENSSPRVMQRKQSLGKPDQKDLNENLAATQGLAHMIAECKKLFQVPEEMSRCRNSYTEQELKPLTLEALGHLGNDDSADYQHFLQDCVDGLFKEVKEKFKGWVSYSTSEQAELSYKKVSEGPPLRLWRSVIEVPAVPEEILKRLLKEQHLWDVDLLDSKVIEILDSQTEIYQYVQNSMAPHPARDYVVLRTWRTNLPKGACALLLTSVDHDRAPVVGVRVNVLLSRYLIEPCGPGKSKLTYMCRVDLRGHMPEWYTKSFGHLCAAEVVKIRDSFSNQNTETKDTKSR

SEQ ID NO: 58591 - protein, 16 aa, Homo sapiens
LIPSYLEKSPAALMIA

SEQ ID NO: 58592 - protein, 464 aa, Homo sapiens
RVPLTEACKDSRIGGMMKTLLLFVGLLLTWESGQVLGDQTVSDNELQEMSNQGSKYVNKEIQNAVNGVKQIKTLIEKTNEERKTLLSNLEEAKKKKEDALNETRESETKLKELPGVCNETMMALWEECKPCLKQTCMKFYARVCRSGSGLVGRQLEEFLNQSSPFYFWMNGDRIDSLLENDRQQTHMLDVMQDHFSRASSIIDELFQDRFFTREPQDTYHYLPFSLPHRRPHFFFPKSRIVRSLMPFSPYEPLNFHAMFQPFLEMIHEAQQAMDIHFHSPAFQHPPTEFIREGDDDRTVCREIRHNSTGCLRMKDQCDKCREILSVDCSTNNPSQAKLRRELDESLQVAERLTRKYNELLKSYQWKMLNTSSLLEQLNEQFNWVSRLANLTQGEDQYYLRVTTVASHTSDSDVPSGVTEVVVKLFDSDPITVTVPVEVSRKNPKFMETVAEKALQEYRKKHREE

SEQ ID NO: 58593 - protein, 79 aa, Homo sapiens
LNRLEKTKVERFPDLAAEKECRDREERNEKKAQIQEMKKREKEEMKKKREMDELRSYSSLMKVENMSSNQDGNDSDEFM

SEQ ID NO: 58594 - protein, 25 aa, Homo sapiens
RSYSSLMKVENMSSNQDGNDSDEFM

SEQ ID NO: 58595 - protein, 60 aa, Homo sapiens
IDTRATCYEDQGISYRGTWSTAESGAECTNWNSSALAQKPYSGRRPDAIRLGLGNHNYCR

SEQ ID NO: 58596 - protein, 14 aa, Homo sapiens
ILPNDYFEIVEVPA

SEQ ID NO: 58597 - protein, 147 aa, Homo sapiens
IYTHQSDVWSFGVLLWEIFTLGGSPYPGVPVEELFKLLKEGHRMDKPSNCTNELYMMMRDCWHAVPSQRPTFKQLVEDLDRIVALTSNQEYLDLSMPLDQYSPSFPDTRSSTCSSGEDSVFSHEPLPEEPCLPRHPAQLANGGLKRR

SEQ ID NO: 58598 - protein, 4 aa, Homo sapiens
LLSI

SEQ ID NO: 58599 - protein, 146 aa, Homo sapiens
MTPPNATEASKPQGTTVCPPCDNELKSEAIIEHLCASEFALRMKIKEVKKENGDKKIVPKKKKPLKLGPIKKKDLKKLVLYLKNGADCPCHQLDNLSHHFLIMGRKVKSQYLLTAIHKWDKKNKEFKNFMKKMKNHECPTFQSVFK

SEQ ID NO: 58600 - protein, 10 aa, Homo sapiens
MKKFLEMRQL

SEQ ID NO: 58601 - protein, 805 aa, Homo sapiens
LKPKSSCCFCTPPVPPSCAGPLRGIISPKTGMERPLCSHLCSCLAMLALLSPLSLAQYDSWPHYPEYFQQPAPEYHQPQAPANVAKIQLRLAGQKRKHSEGRVEVYYDGQWGTVCDDDFSIHAAHVVCRELGYVEAKSWTASSSYGKGEGPIWLDNLHCTGNEATLAACTSNGWGVTDCKHTEDVGVVCSDKRIPGFKFDNSLINQIENLNIQVEDIRIRAILSTYRKRTPVMEGYVEVKEGKTWKQICDKHWTAKNSRVVCGMFGFPGERTYNTKVYKMFASRRKQRYWPFSMDCTGTEAHISSCKLGPQVSLDPMKNVTCENGLPAVVSCVPGQVFSPDGPSRFRKAYKPEQPLVRLRGGAYIGEGRVEVLKNGEWGTVCDDKWDLVSASVVCRELGFGSAKEAVTGSRLGQGIGPIHLNEIQCTGNEKSIIDCKFNAESQGCNHEEDAGVRCNTPAMGLQKKLRLNGGRNPYEGRVEVLVERNGSLVWGMVCGQNWGIVEAMVVCRQLGLGFASNAFQETWYWHGDVNSNKVVMSGVKCSGTELSLAHCRHDGEDVACPQGGVQYGAGVACSETAPDLVLNAEMVQQTTYLEDRPMFMLQCAMEENCLSASAAQTDPTTGYRRLLRFSSQIHNNGQSDFRPKNGRHAWIWHDCHRHYHSMEVFTHYDLLNLNGTKVAEGHKASFCLEDTECEGDIQKNYECANFGDQGITMGCWDMYRHDIDCQWVDITDVPPGDYLFQVVINPNFEVAESDYSNNIMKCRSRYDGHRIWMYNCHIGGSFSEETEKKFEHFSGLLNNQLSPQ

SEQ ID NO: 58602 - protein, 52 aa, Homo sapiens
LLLLYPACPSQLRRAPSWDHQPEDRDGEASVLPPLQLPGYAGPPVPPEPGTV

SEQ ID NO: 58603 - protein, 42 aa, Homo sapiens
LEEEIIAFSKKKATSEIFHSQSFLATGSNLSKDKDHKNSNFL

SEQ ID NO: 58604 - protein, 26 aa, Homo sapiens
VVFAAQLGLSWEGVMGRTGAGERAPV

SEQ ID NO: 58605 - skipped

SEQ ID NO: 58606 - protein, 442 aa, Homo sapiens
ISAEDCEFIQRFEMKRSPEEKQEMLQTEGSQCAKTFINLMTHICKEQTVQYILTMVDDMLQENHQRVSIFFDYARCSKNTAWPYFLPMLNRQDPFTVHMAARIIAKLAAWGKELMEGSDLNYYFNWIKTQLSSQKLRGSGVAVETGTVSSSDSSQYVQCVAGCLQLMLRVNEYRFAWVEADGVNCIMGVLSNKCGFQLQYQMIFSIWLLAFSPQMCEHLRRYNIIPVLSDILQESVKEKVTRIILAAFRNFLEKSTERETRQEYALAMIQCKVLKQLENLEQQKYDDEDISEDIKFLLEKLGESVQDLSSFDEYSSELKSGRLEWSPVHKSEKFWRENAVRLNEKNYELLKILTKLLEVSDDPQVLAVAAHDVGEYVRHYPRGKRVIEQLGGKQLVMNHMHHEDQQVRYNALLAVQKLMVHNWEYLGKQLQSEQPQTAAARS

SEQ ID NO: 58607 - protein, 277 aa, Homo sapiens
LDLLKELKNIPMTLELLQSTRIGMSVNAIRKQSTDEEVTSLAKSLIKSWKKLLDGPSTEKDLDEKKKEPAITSQNSPEAREESTSSGNVSNRKDETNARDTYVSSFPRAPSTSDSVRLKCREMLAAALRTGDDYIAIGADEEELGSQIEEAIYQEIRNTDMKYKNRVRSRISNLKDAKNPNLRKNVLCGNIPPDLFARMTAEEMASDELKEMRKNLTKEAIREHQMAKTGGTQTDLFTCGKCKKKNCTYTQVQTRSADEPMTTFVVCNECGNRWKFC

SEQ ID NO: 58608 - protein, 320 aa, Homo sapiens
IVKATNGPRYVVGCRRQLDKSKLKPGTRVALDMTTLTIMRYLPREVDPLIYNMSHEDPENVSYSEIGGLSEQIRELREVIELPLTNPELFQRVGIIPPKGCLLYGPPGTGKTLLARAIASQLDCNFLKVVSSSIVDKYIGESAHLIREMFNYARDHQPCIIFMDEIDAIGGRRFSEGTSADREIQRTLTELLNQMDGFDTLHRVKMIMATNRPDTLDPALLCPGRLDRKIHIDLPNEQTRLDILKIHAGPITKHGEIDYEAIVKLSDGFNGADLRNVCTEAGMFAIRADHDFVVQEDFMKAVRKVADSKKLEAKLDYKPV

SEQ ID NO: 58609 - protein, 44 aa, Homo sapiens
LRTEGLAPRRLGLYLIRRCGPDGVAGSGLLKLWSEFKILFMCMA

SEQ ID NO: 58610 - protein, 773 aa, Homo sapiens
LKEVRQPSPAPADRAMAQRKNAKSSGNSSSSGSGSGSTSAGSSSPGARRETKHGGHKNGRKGGLSGTSFFTWFMVIALLGVWTSVAVVWFDLVDYEEVLGKLGIYDADGDGDFDVDDAKVLLGLKERSTSEPAVPPEEAEPHTEPEEQVPVEAEPQNIEDEAKEQIQSLLHEMVHAEHVEGEDLQQEDGPTGEPQQEDDEFLMATDVDDRFETLEPEVSHEETEHSYHVEETVSQDCNQDMEEMMSEQENPDSSEPVVEDERLHHDTDDVTYQVYEEQAVYEPLENEGIEITEVTAPPEDNPVEDSQVIVEEVSIFPVEEQQEVPPETNRKTDDPEQKAKVKKKKPKLLNKFDKTIKAELDAAEKLRKRGKIEEAVNAFKELVRKYPQSPRARYGKAQCEDDLAEKRRSNEVLRGAIETYQEVASLPDVPADLLKLSLKRRSDRQQFLGHMRGSLLTLQRLVQLFPNDTSLKNDLGVGYLLIGDNDNAKKVYEEVLSVTPNDGFAKVHYGFILKAQNKIAESIPYLKEGIESGDPGTDDGRFYFHLGDAMQRVGNKEAYKWYELGHKRGHFASVWQRSLYNVNGLKAQPWWTPKETGYTELVKSLERNWKLIRDEGLAVMDKAKGLFLPEDENLREKGDWSQFTLWQQGRRNENACKGAPKTCTLLEKFPETTGCRRGQIKYSIMHPGTHVWPHTGPTNCRLRMHLGLVIPKEGCKIRCANETKTWEEGKVLIFDDSFEHEVWQDASSFRLIFIVDVWHPELTPQQRRSLPAI

SEQ ID NO: 58611 - protein, 146 aa, Homo sapiens [sequence omitted]

SEQ ID NO: 58612 - protein, 242 aa, Homo sapiens
MDSFALPVEGTETRVNAQAAAYEYMAAYIENAKQVGRLENAIGWYHSHPGYGCWLSGIDVSTQMLNQQFQEPFVAVVIDPTRTISAGKVNLGAFRTYPKGYKPPDEGPSEYQTIPLNKIEDFGVHCKQYYALEVSYFKSSLDRKLLELLWNKYWVNTLSSSSLLTNADYTTGQVFDLSEKLEQSEAQLGRGSFMLGLETHDRKSEDKLAKATRDSCKTTIEAIHGLMSQVIKDKLFNQINIS

SEQ ID NO: 58613 - protein, 164 aa, Homo sapiens
RPFRGVGTESGSESGSSNAKEPKTRAGGFASALERHSELLQKVEPLQKGSPKNVESFASMLRHSPLTQMGPAKDKLVIGRIFHIVENDLYIDFGGKFHCVCRRPEVDGEKYQKGTRVRLRLLDLELTSRFLGATTDTTVLEANAVLLGIQESKDSRSKEEHHEK

SEQ ID NO: 58614 - protein, 255 aa, Homo sapiens
LSYLGFETYQVISQAAVVHATAKVEEILEQADYLYESGETEKLYQLLTQYKESEDAELLWRLARASRDVAQLSRTSEEEKKLLVYEALEYAKRALEKNESSFASHKWYAICLSDVGDYEGIKAKIANAYIIKEHFEKAIELNPKDATSIHLMGIWCYTFAEMPWYQRRIAKMLFATPPSSTYEKALGYFHRAEQVDPNFYSKNLLLLGKTYLKLHNKKLAAFWLMKAKDYPAHTEEDKQIQTEAAQLLTSFSEKN

SEQ ID NO: 58615 - protein, 24 aa, Homo sapiens
ILFPRKPLAPKKGDSSAEELKLPQ

SEQ ID NO: 58616 - protein, 64 aa, Homo sapiens
MAIRKKSTKSPPVLSHEFVLQNHADIVSCVAMVFLLGLMFEITAKASIIFVTLQYNVTLPATEN

SEQ ID NO: 58617 - protein, 345 aa, Homo sapiens
VAMVFLLGLMFEITAKASIIFVTLQYNVTLPATEEQATESVSLYYYGIKDLATVFFYMLVAIIIHAVIQEYMLDKINRRMHFSKTKHSKFNESGQLSAFYLFACVWGTFILISENYISDPTILWRAYPHNLMTFQMKFFYISQLAYWLHAFPELYFQKTKKEDIPRQLVYIGLYLFHIAGAYLLNLNHLGLVLLVLHYFVEFLFHISRLFYFSNEKYQKGFSLWAVLFVLGRLLTLILSVLTVGFGLARAENQKLDFSTGNFNVLAVRIAVLASICVTQAFMMWKFINFQLRRWREHSAFQAPAVKKKPTVTKGRSSKKGTENGVNGTLTSNVADSPRNKKEKSS

SEQ ID NO: 58618 - protein, 253 aa, Homo sapiens
VGTGPRRILIDTGEPAIPEYISCLKQALTEFNTAIQEIVVTHWHRDHSGGIGDICKSINNDTTYCIKKLPRNPQREEIIGNGEQQYVYLKDGDVIKTEGATLRVLYTPGHTDDHMALLLEEENAIFSGDCILGEGTTVFEDLYDYMNSLKELLKIKADIIYPGHGPVIHNAEAKIQQYISHRNIREQQILTLFRENFEKSFTVMELVKIIYKNTPENLHEMAKHNLLLHLKKLEKEGKIFSNTDPDKKWKAHL

SEQ ID NO: 58619 - protein, 109 aa, Homo sapiens
KGSAAECKQSQRNAANARERARMRVLSKAFSRLKTSLPWVPPDTKLSKLDTLRLASSYIAHLRQLLQEDRYENGYVHPVNLTWPFVVSGRPDSDTKEVSAANRLCGTTA

SEQ ID NO: 58620 - protein, 6 aa, Homo sapiens
RSTLGP

SEQ ID NO: 58621 - protein, 141 aa, Homo sapiens
ISQENEIGKKRELKEDSLWSAKEISNNDKLQDDSEMLPKKLLLTEFRSLVIKNSTSRNPSGINDDYGQLKNFKKFKKVTYPGAGKLPHIIGGSDLIAHHARKNTELEEWLRQEMEVQNQHAKEESLADDLFRYNPYLKRRR

SEQ ID NO: 58622 - protein, 230 aa, Homo sapiens
KKKRRNFAELKIKRLRKKFAQKMLRKARRKLIYEKAKHYHKEYRQMYRTEIRMARMARKAGNFYVPAEPKLAFVIRIRGINGVSPKVRKVLQLLRLRQIFNGTFVKLNKASINMLRIVEPYIAWGYPNLKSVNELIYKRGYGKINKKRIALTDNALIARSLGKYGIICMEDLIHEIYTVGKRFKEANNFLWPFKLSSPRGGMKKKTTHFVEGGDAGNREDQINRLIRRMN

SEQ ID NO: 58623 - protein, 43 aa, Homo sapiens
IANPVEGSTDRQVTITGSAASISLAQYLINVRLSSETGGMGSS

SEQ ID NO: 58624 - protein, 14 aa, Homo sapiens
LDAMDAKKRRQQNF

SEQ ID NO: 58625 - protein, 269 aa, Homo sapiens
KIRFAVSDGLELRPKYNGILHCLTTIWKLDGLRGLYQGVTPNIWGAGLSWGLYFFFYNAIKSYKTEGRAERLEATEYLVSAAEAGAMTLCITNPLWVTKTRLMLQYDAVVNSPHRQYKGMFDTLVKIYKYEGVRGLYKGFVPGLFGTSHGALQFMAYELLKLKYNQHINRLPEAQLSTVEYISVAALSKIFAVAATYPYQVVRARLQDQHMFYSGVIDVITKTWRKEGVGGFYKGIAPNLIRVTPACCITFVVYENVSHFLLDLREKRK

SEQ ID NO: 58626 - protein, 305 aa, Homo sapiens
IQYPDIWKMYKQAQASFWTAEEVDLSKDLPHWNKLKADEKYFISHILAFFAASDGIVNENLVERFSQEVQVPEARCFYGFQILIENVHSEMYSLLIDTYIRDPKKREFLFNAIETMPYVKKKADWALRWIADRKSTFGERVVAFAAVEGVFFSGSFAAIFWLKKRGLMPGLTFSNELISRDEGLHCDFACLMFQYLVNKPSEERVREIIVDAVKIEQEFLTEALPVGLIGMNCILMKQYIEFVADRLLVELGFSKVFQAENPFDFMENISLEGKTNFFEKRVSEYQRFAVMAETTDNVFTLDADF

SEQ ID NO: 58627 - protein, 489 aa, Homo sapiens
LPPAAKQPTMLNFGASLQQTAEERMEMISERPKESMYSWNKTAEKSDFEAVEALMSMSCSWKSDFKKYVENRPVTPVSDLSEEENLLPGTPDFHTIPAFCLTPPYSPSDFEPSQVSNLMAPAPSTVHFKSLSDTAKPHIAAPFKEEEKSPVSAPKLPKAQATSVIRHTADAQLCNHQTCPMKAASILNYQNNSFRRRTHLNVEAARKNIPCAAVSPNRSKCERNTVADVDEKASAALYDFSVPSSETVICRSQPAPVSPQQKSVLVSPPAVSAGGVPPMPVICQMVPLPANNPVVTTVVPSTPPSQPPAVCPPVVFMGTQVPKGAVMFVVPQPVVQSSKPPVVSPNGTRLSPIAPAPGFSPSAAKVTPQIDSSRIRSHICSHPGCGKTYFKSSHLKAHTRTHTGEKPFSCSWKGCERRFARSDELSRHRRTHTGEKKFACPMCDRRFMRSDHLTKHARRHLSAKKLPNWQMEVSKLNDIALPPTPAPTQ

SEQ ID NO: 58628 - protein, 311 aa, Homo sapiens
IKEPLYYWQQTEDDLTVTIRLPEDSTKEDIQIQFLPDHINIVLKDHQFLEGKLYSSIDHESSTWIIKESNSLEISLIKKNEGLTWPELVIGDKQGELIRDSAQCAAIAERLMHLTSEELNPNPDKEKPPCNAQELEECDIFFEESSSLCRFDGNTLKTTHVVNLGSNQYLFSVIVDPKEMPCFCLRHDVDALLWQPHSSKQDDMWEHIATFNALGYVQASKRDKKFFACAPNYSYAALCECLRRVFIYRQPAPMSTVLYNRKEGRQVGQVAKQQVASLETNDPILGFQATNERLFVLTTKNLFLIKVNTEN

SEQ ID NO: 58629 - skipped

SEQ ID NO: 58630 - protein, 40 aa, Homo sapiens
VFIYNPLDPGRTHAGQKTLFHPALSWLLSRPFVLFRRLAV

SEQ ID NO: 58631 - protein, 752 aa, Homo sapiens
LTQAGHMQAKKRYFILLSAGSCLALLFYFGGLQFRASRSHSRREEHSGRNGLHHPSPDHFWPRFPDALRPFVPWDQLENEDSSVHISPRQKRDANSSIYKGKKCRMESCFDFTLCKKNGFKVYVYPQQKGEKIAESYQNILAAIEGSRFYTSDPSQACLFVLSLDTLDRDQLSPQYVHNLRSKVQSLHLWNNGRNHLIFNLYSGTWPDYTEDVGFDIGQAMLAKASISTENFRPNFDVSIPLFSKDHPRTGGERGFLKFNTIPPLRKYMLVFKGKRYLTGIGSDTRNALYHVHNGEDVVLLTTCKHGKDWQKHKDSRCDRDNTEYEKYDYREMLHNATFCLVPRGRRLGSFRFLEALQAACVPVMLSNGWELPFSEVINWNQAAVIGDERLLLQIPSTIRSIHQDKILALRQQTQFLWEAYFSSVEKIVLTTLEIIQDRIFKHISRNSLIWNKHPGGLFVLPQYSSYLGDFPYYYANLGLKPPSKFTAVIHAVTPLVSQSQPVLKLLVAAAKSQYCAQIIVLWNCDKPLPAKHRWPATAVPVVVIEGESKVMSSRFLPYDNIITDAVLSLDEDTVLSTTEVDFAFTVWQSFPERIVGYPARSHFWDNSKERWGYTSKWTNDYSMVLTGAAIYHKYYHYLYSHYLPASLKNMVDQLANCEDILMNFLVSAVTKLPPIKVTQKKQYKETMMGQTSRASRWADPDHFAQRQSCMNTFASWFGYMPLIHSQMRLDPVLFKDQVSILRKKYRDIERL

SEQ ID NO: 58632 - protein, 407 aa, Homo sapiens
RFPGTTMNNLLCCALVFLDISIKWTTQETFPPKYLHYDEETSHQLLCDKCPPGTYLKQHCTAKWKTVCAPCPDHYYTDSWHTSDECLYCSPVCKELQYVKQECNRTHNRVCECKEGRYLEIEFCLKHRSCPPGFGVVQAGTPERNTVCKRCPDGFFSNETSSKAPCRKHTNCSVFGLLLTQKGNATHDNICSGNSESTQKCGIDVTLCEEAFFRFAVPTKFTPNWLSVLVDNLPGTKVNAESVERIKRQHSSQEQTFQLLKLWKHQNKDQDIVKKIIQDIDLCENSVQRHIGHANLTFEQLRSLMESLPGKKVGAEDIEKTIKACKPSDQILKLLSLWRIKNGDQDTLKGLMHALKHSKTYHFPKTVTQSLKKTIRFLHSFTMYKLYQKLFLEMIGNQVQSVKISCL

SEQ ID NO: 58633 - skipped

SEQ ID NO: 58634 - protein, 64 aa, Homo sapiens
LGGVIFTIYKESKRPFSESKQTVLIVGTLLYACYWVMLLTLYVVLINKCGRRKKGQQYDMVLDV

SEQ ID NO: 58635 - protein, 35 aa, Homo sapiens
VTVSSEEFEDKWFRKIKDHFCPFENQFHTEIQILA

SEQ ID NO: 58636 - protein, 187 aa, Homo sapiens
LGTHPKKEPMEALNTAQGARDFIYSLHSTERSCLLKELHRFESIAIAQEKLEAPPPTPGQLRYVFIHNAIPFIGFGFLDNAIMIVAGTHIEMSIGIILGISTMAAAALGNLVSDLAGLGLAGYVEALASRLGLSIPDLTPKQVDMWQTRLSTHLGKAVGVTIGCILGMFPLIFFGGGEEDEKLETKS

SEQ ID NO: 58637 - protein, 13 aa, Homo sapiens
LLPRSQCCAPPRA

SEQ ID NO: 58638 - protein, 14 aa, Homo sapiens
TWTTRASFSWMIPK

SEQ ID NO: 58639 - protein, 489 aa, Homo sapiens
KKYAMEQSIKSVLVKQTIAHQQQQLTNLQMAAVTMGFGDPLSPLQSMAAQRQRALAIMCRVYVGSIYYELGEDTIRQAFAPFGPIKSIDMSWDSVTMKHKGFAFVEYEVPEAAQLALEQMNSVMLGGRNIKVGRPSNIGQAQPIIDQLAEEARAFNRIYVASVHQDLSDDDIKSVFEAFGKIKSCTLARDPTTGKHKGYGFIEYEKAQSSQDAVSSMNLFDLGGQYLRVGKAVTPPMPLLTPATPGGLPPAAAVAAAAATAKITAQEAVAGAAVLGTLGTPGLVSPALTLAQPLGTLPQAVMAAQAPGVITGVTPARPPIPVTIPSVGVVNPILASPPTLGLLEPKKEKEEEELFPESERPEMLSEQEHMSISGSSARHMVMQKLLRKQESTVMVLRNMVDPKDIDDDLEGEVTEECGKFGAVNRVIIYQEKQGEEEDAEIIVKIFVEFSIASETHKAIQALNGRWFAGRKVVAEVYDQERFDNSDLSA

SEQ ID NO: 58640 - protein, 3367 aa, Homo sapiens
KHLIKAQRHISDLYEDLRDGHNLISLLEVLSGDSLPREKGRMRFHKLQNVQIALDYLRHRQVKLVNIRNDDIADGNPKLTLGLIWTIILHFQISDIQVSGQSEDMTAKEKLLLWSQRMVEGYQGLRCDNFTSSWRDGRLFNAIIHRHKPLLIDMNKVYRQTNLENLDQAFSVAERDLGVTRLLDPEDVDVPQPDEKSIITYVSSLYDAMPRVPDVQDGVRANELQLRWQEYRELVLLLLQWMRHHTAAFEERRFPSSFEEIEILWSQFLKFKEMELPAKEADKNRSKGIYQSLEGAVQAGQLKVPPGYHPLDVEKEWGKLHVAILEREKQLRSEFERLECLQRIVTKLQMEAGLCEEQLNQADALLQSDVRLLAAGKVPQRAGEVERDLDKADSMIRLLFNDVQTLKDGRHPQGEQMYRRVYRLHERLVAIRTEYNLRLKAGVAAPATQVAQVTLQSVQRRPELEDSTLRYLQDLLAWVEENQHRVDGAEWGVDLPSVEAQLGSHRGLHQSIEEFRAKIERARSDEGQLSPATRGAYRDCLGRLDLQYAKLLNSSKARLRSLESLHSFVAAATKELMWLNEKEEEEVGFDWSDRNTNMTAKKESYSALMRELELKEKKIKELQNAGDRLLREDHPARPTVESFQAALQTQWSWMLQLCCCIEAHLKENAAYFQFFSDVREAEGQLQKLQEALRRKYSCDRSATVTRLEDLLQDAQDEKEQLNEYKGHLSGLAKRAKAVVQLKPRHPAHPMRGRLPLLAVCDYKQVEVTVHKGDECQLVGPAQPSHWKVLSSSGSEAAVPSVCFLVPPPNQEAQEAVTRLEAQHQALVTLWHQLHVDMKSLLAWQSLRRDVQLIRSWSLATFRTLKPEEQRQALHSLELHYQAFLRDSQDAGGFGPEDRLMAEREYGSCSHHYQQLLQSLEQGAQEESRCQRCISELKDIRLQLEACETRTVHRLRLPLDKEPARECAQRIAEQQKAQAEVEGLGKGVARLSAEAEKVLALPEPSPAAPTLRSELELTLGKLEQVRSLSAIYLEKLKTISLVIRGTQGAEEVLRAHEEQLKEAQAVPATLPELEATKASLKKLRAQAEAQQPTFDALRDELRGAQEVGERLQQRHGERDVEVERWRERVAQLLERWQAVLAQTDVRQRELEQLGRQLRYYRESADPLGAWLQDARRRQEQIQAMPLADSQAVREQLRQEQALLEEIERHGEKVEECQRFAKQYINAIKDYELQLVTYKAQLEPVASPAKKPKVQSGSESVIQEYVDLRTHYSELTTLTSQYIKFISETLRRMEEEEMQTVQQEQLLQETQALQQSFLSEKDSLLQRERFIEQEKAKLEQLFQDEVAKAQQLREEQQRQQQQMEQERQRLVASMEEARRRQHEAEEGVRRKQEELQQLEQQRRQQEELLAEENQRLREQLQLLEEQHRAALAHSEEVTASQVAATKTLPNGRDALDGPAAEAEPEHSFDGLRRKVSAQRLQEAGILSAEELQRLAQGHTTVDELARREDVRHYLQGRSSIAGLLLKATNEKLSVYAALQRQLLSPGTALILLEAQAASGFLLDPVRNRRLTVNEAVKEGVVGPELHHKLLSAERAVTGYKDPYTGQQISLFQAMQKGLIVREHGIRLLEAQIATGGVIDPVHSHRVPVDVAYRRGYFDEEMNRVLADPSDDTKGFFDPNTHENLTYLQLLERCVEDPETGLCLLPLTDKAAKGGELVYTDSEARDVFEKATVSAPFGKFQGKTVTIWEIINSEYFTAEQRRDLLRQFRTGRITVEKIIKIIITVVEEQEQKGRLCFEGLRSLVPAAELLESRVIDRELYQQLQRGERSVRDVAEVDTVRRALRGANVIAGVWLEEAGQKLSIYNALKKDLLPSDMAVALLEAQAGTGHIIDPATSARLTVDEAVRAGLVGPEFHEKLLSAEKAVTGYRDPYTGQSVSLFQALKKGLIPREQGLRLLDAQLSTGGIVDPSKSHRVPLDVACARGCLDEETSRALSAPRADAKAYSDPSTGEPATYGELQQRCRPDQLTGLSLLPLSEKAARARQEELYSELQARETFEKTPVEVPVGGFKGRTVTVWELISSEYFTAEQRQELLRQFRTGKVTVEKVIKILITIVEEVETLRQERLSFSGLRAPVPASELLASGVLSRAQFEQLKDGKTTVKDLSELGSVRTLLQGSGCLAGIYLEDTKEKVSIYEAMRRGLLRATTAALLLEAQAATGFLVDPVRNQRLYVHEAVKAGVVGPELHEQLLSAEKAVTGYRDPYSGSTISLFQAMQKGLVLRQHGIRLLEAQIATGGIIDPVHSHRVPVDVAYQRGYFSEEMNRVLADPSDDTKGFFDPNTHENLTYRQLLERCVEDPETGLRLLPLKGAEKAEVVETTQVYTEEETRRAFEETQIDIPGGGSHGGSTMSLWEVMQSDLIPEEQRAQLMADFQAGRVTKERMIIIIIEIIEKTEIIRQQGLASYDYVRRRLTAEDLFEARIISLETYNLLREGTRSLREALEAESAWCYLYGTGSVAGVYLPGSRQTLSIYQALKKGLLSAEVARLLLEAQAATGFLLDPVKGERLTVDEAVRKGLVGPELHDRLLSAERAVTGYRDPYTEQTISLFQAMKKELIPTEEALRLLDAQLATGGIVDPRLGFHLPLEVAYQRGYLNKDTHDQLSEPSEVRSYVDPSTDERLSYTQLLRRCRRDDGTGQLLLPLSDARKLTFRGLRKQITMEELVRSQVMDEATALQLREGLTSIEEVTKNLQKFLEGTSCIAGVFVDATKERLSVYQAMKKGIIRPGTAFELLEAQAATGYVIDPIKGLKLTVEEAVRMGIVGPEFKDKLLSAERAVTGYKDPYSGKLISLFQAMKKGLILKDHGIRLLEAQIATGGIIDPEESHRLPVEVAYKRGLFDEEMNEILTDPSDDTKGFFDPNTEENLTYLQLMERCITDPQTGLCLLPLKEKKRERKTSSKSSVRKRRVVIVDPETGKEMSVYEAYRKGLIDHQTYLELSEQECEWEEITISSSDGVVKSMIIDRRSGRQYDIDDAIAKNLIDRSALDQYRAGTLSITEFADMLSGNAGGFRSRSSSVGSSSSYPISPAVSRTQLASWSDPTEETGPVAGILDTETLEKVSITEAMHRNLVDNITGQRLLEAQACTGGIIDPSTGERFPVTDAVNKGLVDKIMVDRINLAQKAFCGFEDPRTKTKMSAAQALKKGWLYYEAGQRFLEVQYLTGGLIEPDTPGRVPLDEALQRGTVDARTAQKLRDVGAYSKYLTCPKTKLKISYKDALDRSMVEEGTGLRLLEAAAQSTKGYYSPYSVSGSGSTAGSRTGSRTGSRAGSRRGSFDATGSGFSMTFSSSSYSSSGYGRRYASGSSASLGGPESAVA

SEQ ID NO: 58641 - protein, 1808 aa, Homo sapiens
LDPVRNRRLTVNEAVKEGVVGPELHHKLLSAERAVTGYKDPYTGQQISLFQAMQKGLIVREHGIRLLEAQIATGGVIDPVHSHRVPVDVAYRRGYFDEEMNRVLADPSDDTKGFFDPNTHENLTYLQLLERCVEDPETGLCLLPLTDKAAKGGELVYTDSEARDVFEKATVSAPFGKFQGKTVTIWEIINSEYFTAEQRRDLLRQFRTGRITVEKIIKIIITVVEEQEQKGRLCFEGLRSLVPAAELLESRVIDRELYQQLQRGERSVRDVAEVDTVRRALRGANVIAGVWLEEAGQKLSIYNALKKDLLPSDMAVALLEAQAGTGHIIDPATSARLTVDEAVRAGLVGPEFHEKLLSAEKAVTGYRDPYTGQSVSLFQALKKGLIPREQGLRLLDAQLSTGGIVDPSKSHRVPLDVACARGCLDEETSRALSAPRADAKAYSDPSTGEPATYGELQQRCRPDQLTGLSLLPLSEKAARARQEELYSELQARETFEKTPVEVPVGGFKGRTVTVWELISSEYFTAEQRQELLRQFRTGKVTVEKVIKILITIVEEVETLRQERLSFSGLRAPVPASELLASGVLSRAQFEQLKDGKTTVKDLSELGSVRTLLQGSGCLAGIYLEDTKEKVSIYEAMRRGLLRATTAALLLEAQAATGFLVDPVRNQRLYVHEAVKAGVVGPELHEQLLSAEKAVTGYRDPYSGSTISLFQAMQKGLVLRQHGIRLLEAQIATGGIIDPVHSHRVPVDVAYQRGYFSEEMNRVLADPSDDTKGFFDPNTHENLTYRQLLERCVEDPETGLRLLPLKGAEKAEVVETTQVYTEEETRRAFEETQIDIPGGGSHGGSTMSLWEVMQSDLIPEEQRAQLMADFQAGRVTKERMIIIIIEIIEKTEIIRQQGLASYDYVRRRLTAEDLFEARIISLETYNLLREGTRSLREALEAESAWCYLYGTGSVAGVYLPGSRQTLSIYQALKKGLLSAEVARLLLEAQAATGFLLDPVKGERLTVDEAVRKGLVGPELHDRLLSAERAVTGYRDPYTEQTISLFQAMKKELIPTEEALRLLDAQLATGGIVDPRLGFHLPLEVAYQRGYLNKDTHDQLSEPSEVRSYVDPSTDERLSYTQLLRRCRRDDGTGQLLLPLSDARKLTFRGLRKQITMEELVRSQVMDEATALQLREGLTSIEEVTKNLQKFLEGTSCIAGVFVDATKERLSVYQAMKKGIIRPGTAFELLEAQAATGYVIDPIKGLKLTVEEAVRMGIVGPEFKDKLLSAERAVTGYKDPYSGKLISLFQAMKKGLILKDHGIRLLEAQIATGGIIDPEESHRLPVEVAYKRGLFDEEMNEILTDPSDDTKGFFDPNTEENLTYLQLMERCITDPQTGLCLLPLKEKKRERKTSSKSSVRKRRVVIVDPETGKEMSVYEAYRKGLIDHQTYLELSEQECEWEEITISSSDGVVKSMIIDRRSGRQYDIDDAIAKNLIDRSALDQYRAGTLSITEFADMLSGNAGGFRSRSSSVGSSSSYPISPAVSRTQLASWSDPTEETGPVAGILDTETLEKVSITEAMHRNLVDNITGQRLLEAQACTGGIIDPSTGERFPVTDAVNKGLVDKIMVDRINLAQKAFCGFEDPRTKTKMSAAQALKKGWLYYEAGQRFLEVQYLTGGLIEPDTPGRVPLDEALQRGTVDARTAQKLRDVGAYSKYLTCPKTKLKISYKDALDRSMVEEGTGLRLLEAAAQSTKGYYSPYSVSGSGSTAGSRTGSRTGSRAGSRRGSFDATGSGFSMTFSSSSYSSSGYGRRYASGSSASLGGPESAVA

SEQ ID NO: 58642 - protein, 574 aa, Homo sapiens
IRDCVDGSDEVNCKNVNQCLGPGKFKCRSGECIDISKVCNQEQDCRDWSDEPLKECHINECLVNNGGCSHICKDLVIGYECDCAAGFELIDRKTCGDIDECQNPGICSQICINLKGGYKCECSRGYQMDLATGVCKAVGKEPSLIFTNRRDIRKIGLERKEYIQLVEQLRNTVALDADIAAQKLFWADLSQKAIFSASIDDKVGRHVKMIDNVYNPAAIAVDWVYKTIYWTDAASKTISVATLDGTKRKFLFNSDLREPASIAVDPLSGFVYWSDWGEPAKIEKAGMNGFDRRPLVTADIQWPNGITLDLIKSRLYWLDSKLHMLSSVDLNGQDRRIVLKSLEFLAHPLALTIFEDRVYWIDGENEAVYGANKFTGSELATLVNNLNDAQDIIVYHELVQPSGKNWCEEDMENGGCEYLCLPAPQINDHSPKYTCSCPSGYNVEENGRDCQSTATTVTYSETKDTNTTEISATSGLVPGGINVTTAVSEVSVPPKGTSAAWAILPLLLLVMAAVGGYLMWRNWQHKNMKSMNFDNPVYLKTTEEDLSIDIGRHSASVGHTYPAISVVSTDDDLA

SEQ ID NO: 58643 - protein, 161 aa, Homo sapiens
KYLTLKVKASYRKINTHILKVPETDEVELTCQATGYPLAEVSWPNVSVPANTSHSRTPEGLYQVTSVLRLKPPPGRNFSCVFWNTHVRELTLASIDLQSQMEPRTHPTWLLHIFIPFCIIAFIFIATVIALRKQLCQKLYSSKDTTKRPVTTTKREVNSAI

SEQ ID NO: 58644 - protein, 26 aa, Homo sapiens
IGSTEWSETLHNLKNMAQFSVLLPRH

SEQ ID NO: 58645 - protein, 15 aa, Homo sapiens
LKIKRLRKKFAQKIF

SEQ ID NO: 58646 - protein, 5 aa, Homo sapiens
MSFPS

SEQ ID NO: 58647 - protein, 23 aa, Homo sapiens
VKQLKLCQLSQFKSRCCGTCGKA

SEQ ID NO: 58648 - protein, 895 aa, Homo sapiens
TWPSVIMSNPFAHLAEPLDPVQPGKKFFNLNKLEDSRYGRLPFSIRVLLEAAIRNCDEFLVKKQDIENILHWNVTQHKNIEVPFKPARVILQDFTGVPAVVDFAAMRDAVKKLGGDPEKINPVCPADLVIDHSIQVDFNRRADSLQKNQDLEFERNRERFEFLKWGSQAFHNMRIIPPGSGIIHQVNLEYLARVVFDQDGYYYPDSLVGTDSHTTMIDGLGILGWGVGGIEAEAVMLGQPISMVLPQVIGYRLMGKPHPLVTSTDIVLTITKHLRQVGVVGKFVEFFGPGVAQLSIADRATIANMCPEYGATAAFFPVDEVSITYLVQTGRDEEKLKYIKKYLQAVGMFRDFNDPSQDPDFTQVVELDLKTVVPCCSGPKRPQDKVAVSDMKKDFESCLGAKQGFKGFQVAPEHHNDHKTFIYDNTEFTLAHGSVVIAAITSCTNTSNPSVMLGAGLLAKKAVDAGLNVMPYIKTSLSPGSGVVTYYLQESGVMPYLSQLGFDVVGYGCMTCIGNSGPLPEPVVEAITQGDLVAVGVLSGNRNFEGRVHPNTRANYLASPPLVIAYAIAGTIRIDFEKEPLGVNAKGQQVFLKDIWPTRDEIQAVERQYVIPGMFKEVYQKIETVNESWNALATPSDKLFFWNSKSTYIKSPPFFENLTLDLQPPKSIVDAYVLLNLGDSVTTDHISPAGNIARNSPAARYLTNRGLTPREFNSYGSRRGNDAVMARGTFANIRLLNRFLNKQAPQTIHLPSGEILDVFDAAERYQQAGLPLIVLAGKEYGAGSSRDWAAKGPFLLGIKAVLAESYERIHRSNLVGMGVIPLEYLPGENADALGLTGQERYTIIIPENLKPQMKVQVKLDTGKTFQAVMRFDTDVELTYFLNGGILNYMIRKMAK

SEQ ID NO: 58649 - protein, 238 aa, Homo sapiens
IRIHQIGPGMVQQIQSVCMECQGHGERISPKDRCKSCNGRKIVREKKILEVHIDKGMKDGQKITFHGEGDQEPGLEPGDIIIVLDQKDHAVFTRRGEDLFMCMDIQLVEALCGFQKPISTLDNRTIVITSHPGQIVKHGDIKCVLNEGMPIYRRPYEKGRLIIEFKVNFPENGFLSPDKLSLLEKLLPERKEVEETDEMDQVELVDFDPNQERRRHYNGEAYEDDEHHPRGGVQCQTS

SEQ ID NO: 58650 - protein, 12 aa, Homo sapiens
IAYSDVAKRLTK

SEQ ID NO: 58651 - protein, 22 aa, Homo sapiens
VNTTLYEKFTYAGIDCSAEEAA

SEQ ID NO: 58652 - protein, 4 aa, Homo sapiens
MPLY

SEQ ID NO: 58653 - protein, 255 aa, Homo sapiens
IARLVLTDEEKSLLEKEGLILPETLPLTKTEEQILKRVRRKIRNKRSAQESRRKKKVYVGGLESRVLKYTAQNMELQNKVQLLEEQNLSLLDQLRKLQAMVIEISNKTSSSSTCILVLLVSFCLLLVPAMYSSDTRGSLPAEHGVLSRQLRALPSEDPYQLELPALQSEVPKDSTHQWLDGSDCVLQAPGNTSCLLHYMPQAPSAEPPLEWPFPDLFSEPLCRGPILPLQANLTRKGGWLPTGSPSVILQDRYSG

SEQ ID NO: 58654 - protein, 26 aa, Homo sapiens
IRRQRLKGDAWVYKRLVEDILSSCKV

SEQ ID NO: 58655 - protein, 50 aa, Homo sapiens
LFIMEEPMDTSEPLSALPFTGQQSFEPSGKFGQYPSMQMNHIQALGKWRT

SEQ ID NO: 58656 - protein, 4 aa, Homo sapiens
MRIS

SEQ ID NO: 58657 - protein, 251 aa, Homo sapiens
ISTMSVGIDHLALDEIKKRGIRVGYTPDVLTDTTAELAVSLLLTTCRRLPEAIEEVKNGGWTSWKPLWLCGYGLTQSTVGIIGLGRIGQAIARRLKPFGVQRFLYTGRQPRPEEAAEFQAEFVSTPELAAQSDFIVVACSLTPATEGLCNKDFFQKMKETAVFINISRGDVVNQDDLYQALASGKIAAAGLDVTSPEPLPTNHPLLTLKNCVILPHIGSATHRTRNTMSLLAANNLLAGLRGEPMPSELKL

SEQ ID NO: 58658 - protein, 46 aa, Homo sapiens
VIREFNLNELYQRAKKLSKAGDNIPEEQPVASTPTTVSDGESKKDK

SEQ ID NO: 58659 - protein, 9 aa, Homo sapiens
TACWSQRFS

SEQ ID NO: 58660 - protein, 65 aa, Homo sapiens
KKECNEDCNFKELILENHYNTYAAAKWTHNGGEMFVALNQKGIPVRGKKTKKEQKTAHFLPMAIT

SEQ ID NO: 58661 - protein, 891 aa, Homo sapiens
IWNCMNSSLPGVFKKSDGWVGLGCCELAIALECRQACKQASSKNDISKVCRKEYENALFSCISRNEMGSVCCSYAGHHTNCREYCQAIFRTDSSPGPSQIKAVENYCASISPQLIHCVNNYTQSYPMRNPTDSLYCCDRAEDHACQNACKRILMSKKTEMEIVDGLIEGCKTQPLPQDPLWQCFLESSQSVHPGVTVHPPPSTGLDGAKLHCCSKANTSTCRELCTKLYSMSWGNTQSWQEFDRFCEYNPVEVSMLTCLADVREPCQLGCRNLTYCTNFNNRPTELFRSCNAQSDQGAMNDMKLWEKGSIKMPFINIPVLDIKKCQPEMWKAIACSLQIKPCHSKSRGSIICKSDCVEILKKCGDQNKFPEDHTAESICELLSPTDDLKNCIPLDTYLRPSTLGNIVEEVTHPCNPNPCPANELCEVNRKGCPSGDPCLPYFCVQGCKLGEASDFIVRQGTLIQVPSSAGEVGCYKICSCGQSGLLENCMEMHCIDLQKSCIVGGKRKSHGTSFSIDCNVCSCFAGNLVCSTRLCLSEHSSEDDRRTFTGLPCNCADQFVPVCGQNGRTYPSACIARCVGLQDHQFEFGSCMSKDPCNPNPCQKNQRCIPKPQVCLTTFDKFGCSQYECVPRQLACDQVQDPVCDTDHMEHNNLCTLYQRGKSLSYKGPCQPFCRATEPVCGHNGETYSSVCAAYSDRVAVDYYGDCQAVGVLSEHSSVAECASVKCPSLLAAGCKPIIPPGACCPLCAGMLRVLFDKEKLDTIAKVTNKKPITVLEILQKIRMHVSVPQCDVFGYFSIESEIVILIIPVDHYPKALQIEACNKEAEKIESLINSDSPTLASHVPLSALIISQVQVSSSVPSAGVRARPSCHSLLLPLSLGLALHLLWTYN

SEQ ID NO: 58662 - protein, 9 aa, Homo sapiens
TACWSQRFS

SEQ ID NO: 58663 - protein, 21 aa, Homo sapiens
MYRTILPGFQRTVAIEDSNYN

SEQ ID NO: 58664 - protein, 25 aa, Homo sapiens
LAFQSVQLSPPCPAPSSPRTSWAAV

SEQ ID NO: 58665 - protein, 182 aa, Homo sapiens
LDAELVKYKDQIKKMREGPAKNMVKQKALRVLKQKRMYEQQRDNLAQQSFNMEQANYTIQSLKDTKTTVDAMKLGVKEMKKAYKQVKIDQIEDLQDQLEDMMEDANEIQEALSRSYGTPELDEDDLEAELDALGDELLADEDSSYLDEAASAPAIPEGVPTDTKNKDGVLVDEFGLPQIPAS

SEQ ID NO: 58666 - protein, 40 aa, Homo sapiens
IDLCCLMTISFNPSLSKAMVLALQDVNMEHLENLKKRLNK

SEQ ID NO: 58667 - protein, 37 aa, Homo sapiens
IQQFPTEDWSAQPATEDWSAAPTAQATEWVGATTDWS

SEQ ID NO: 58668 - protein, 87 aa, Homo sapiens
KSKSGESKSSAMSSDGSLAENGVMAEEKPAPQMNGSTGDARAPSHSESALNNDSKTCNTNPHLNALSTDSACRREAALEAAVLNKEE

SEQ ID NO: 58669 - protein, 38 aa, Homo sapiens
LMEYLENPKKYIPGTKMIFAGIKKKAERKMIAYLKKSY

SEQ ID NO: 58670 - protein, 28 aa, Homo sapiens
LLLTIVDTPGFGDAVDNSNCWQPYNRLH

SEQ ID NO: 58671 - protein, 15 aa, Homo sapiens
MEQVFEMKVKEKVQN

SEQ ID NO: 58672 - protein, 65 aa, Homo sapiens
IMHLCEETAPENQKFILQEDGSLFHEQSKKCVQAARKESSDSFVPLLRDCTNSDHQKWFFKERML

SEQ ID NO: 58673 - protein, 654 aa, Homo sapiens
MGLGFEDTEGSGSTQLLNEPKLSRPTAAIGLKGEKGDRGPKGERGMDGASIVGPPGPRGPPGHIKVLSNSLINITHGFMNFSDIPELVGPPGPDGLPGLPGFPGPRGPKGDTGLPGFPGLKGEQGEKGEPGAILTEDIPLERLMGKKGEPGMHGAPGPMGPKGPPGHKGEFGLPGRPGRPGLNGLKGTKGDPGVIMQGPPGLPGPPGPPGPPGAVINIKGAIFPIPVRPHCKMPVDTAHPGSPELITFHGVKGEKGSWGLPGSKGEKGDQGAQGPPGPPLDLAYLRHFLNNLKGENGDKGFKGEKGEKGDINGSFLMSGPPGLPGNPGPAGQKGETVVGPQGPPGAPGLPGPPGFGRPGDPGPPGPPGPPGPPAILGAAVALPGPPGPPGQPGLPGSRNLVTAFSNMDDMLQKAHLVIEGTFIYLRDSTEFFIRVRDGWKKLQLGELIPIPADSPPPPALSSNPHQLLPPPNPISSANYEKPALHLAALNMPFSGDIRADFQCFKQARAAGLLSTYRAFLSSHLQDLSTIVRKAERYSLPIVNLKGQVLFNNWDSIFSGHGGQFNMHIPIYSFDGRDIMTDPSWPQKVIWHGSSPHGVRLVDNYCEAWRTADTAVTGLASPLSTGKILDQKAYSCANRLIVLCIENSFMTDARK

SEQ ID NO: 58674 - protein, 395 aa, Homo sapiens
IELPTTVKSSPGLGPVELAAVIAGPVCFVCISLMLMVYICHNRTVIHHRVPNEEDPSLDRPFISEGTTLKDLIYDMTTSGSGSGLPLLVQRTIARTIVLQESIGKGRFGEVWRGKWRGEEVAVKIFSSREERSWFREAEIYQTVMLRHENILGFIAADNKDNGTWTQLWLVSDYHEHGSLFDYLNRYTVTVEGMIKLALSTASGLAHLHMEIVGTQGKPAIAHRDLKSKNILVKKNGTCCIADLGLAVRHDSATDTIDIAPNHRVGTKRYMAPEVLDDSINMKHFESFKRADIYAMGLVFWEIARRCSIGGIHEDYQLPYYDLVPSDPSVEEMRKVVCEQKLRPNIPNRWQSCEALRVMAKIMRECWYANGAARLTALRIKKTLSQLSQQEGIKM

SEQ ID NO: 58675 - protein, 11 aa, Homo sapiens
MYSFWIHATWT

SEQ ID NO: 58676 - protein, 57 aa, Homo sapiens
IPFFHRCAPVNISCYAKFAEALITFVSDNSVLHRLISGVMTSKEIILGLCLLSLGST

SEQ ID NO: 58677 - protein, 152 aa, Homo sapiens
INSTNFCTSAKDAFVILVENALRVATINTVGDFMLFLGKVLIVCSTGLAGIMLLNYQQDYTVWVLPLIIVCLFAFLVAHCFLSIYEMVVDVLFLCFAIDTKYNDGSPGREFYMDKVLMEFVENSRKAMKEAGKGGVADSRELKPMASGASSA

SEQ ID NO: 58678 - protein, 421 aa, Homo sapiens
TKVMLPNTGRLAGCTVFITGASRGIGKAIALKAAKDGANIVIAAKTAQPHPKLLGTIYTAAEEIEAVGGKALPCIVDVRDEQQISAAVEKAIKKFGGIDILVNNASAISLTNTLDTPTKRLDLMMNVNTRGTYLASKACIPYLKKSKVAHILNISPPLNLNPVWFKQHCAYTIAKYGMSMYVLGMAEEFKGEIAVNALWPKTAIHTAAMDMLGGPGIESQCRKVDIIADAAYSIFQKPKSFTGNFVIDENILKEEGIENFDVYAIKPGHPLQPDFFLDEYPEAVSKKVESTGAVPEFKEEKLQLQPKPRSGAVEETFRIVKDSLSDDVVKATQAIYLFELSGEDGGTWFLDLKSKGGNVGYGEPSDQADVVMSMTTDDFVKMFSGKLKPTMAFMSGKLKIKGNMALAIKLEKLMNQMNARL

SEQ ID NO: 58679 - protein, 28 aa, Homo sapiens
MEKDSYPRFLRSDLYLDLINQKKMSPPL

SEQ ID NO: 58680 - protein, 33 aa, Homo sapiens
IKKRVGMHIRAKRKQEELSNVLAAMRKAAAKKD

SEQ ID NO: 58681 - protein, 700 aa, Homo sapiens
LKKEAKFELRAFHEDKKPSKLFEDDEHEKEQYCIRKVRPSEEMLELEKERRELIRSQAVKKNPGIAAKWWNPPQEKTIEEQLDEEHLESHKKYKERKERRAQQEQLLLQKQLQQQQQQPPSQLCTAPASSHERASMIDKAKEDIVTEQIDFSAARKQFQLMENSRQAVAKGQSTPRLFSIKPFYRPLGSVNSDKPLTNPRPPSVGGPPEDSGASAAKGQKSPGALETPSAAGSQGNTASQGKEGPYSEPSKRGPLSKLWAEDGEFTSARAVLTVVKDDDHGILDQFSRSVNVSLTQEELDSGLDELSVRSQDTTVLETLSNDFSMDNISDSGASNETTNALQENSLADFSLPQTPQTDNPSEGRGEGVSKSFSDHGFYSPSSTLGDSPLVDDPLEYQAGLLVQNAIQQAIAEQVDKAVSKTSRDGAEQQGPEATVEEAEAAAFGSEKPQSMFEPPQVSSPVQEKRDVLPKILPAEDRALRERGPPQPLPAVQPSGPINMEETRPEGSYFSKYSEAAELRSTASLLATQESDVMVGPFKLRSRKQRTLSMIEEEIRAAQEREEELKRQRQVLQSTQSPRTKNAPSLPSRTCYKTAPGKIEKVKPPPSPTTEGPSLQPDLAPEEAAGTQRPKNLMQTLMEDYETHKSKRRERMDDSSYTSKLLSCKVTSEVLEATRVNRRKSALALRWEAGIYANQEEEDNE

SEQ ID NO: 58682 - protein, 409 aa, Homo sapiens
VLAAAAGRAGPAGRGMALLDLALEGMAVFGFVLFLVLWLMHFMAIIYTRLHLNKKATDKQPYSKLPGVSLLKPLKGVDPNLINNLETFFELDYPKYEVLLCVQDHDDPAIDVCKKLLGKYPNVDARLFIGGKKVGINPKINNLMPGYEVAKYDLIWICDSGIRVIPDTLTDMVNQMTEKVGLVHGLPYVADRQGFAATLEQVYFGTSHPRYYISANVTGFKCVTGMSCLMRKDVLDQAGGLIAFAQYIAEDYFMAKAIADRGWRFAMSTQVAMQNSGSYSISQFQSRMIRWTKLRINMLPATIICEPISECFVASLIIGWAAHHVFRWDIMVFFMCHCLAWFIFDYIQLRGVQGGTLCFSKLDYAVAWFIRESMTIYIFLSALWDPTISWRTGRYRLRCGGTAEEILDV

SEQ ID NO: 58683 - protein, 12 aa, Homo sapiens
VAKQMHIWMSST

SEQ ID NO: 58684 - protein, 139 aa, Homo sapiens
IDEFDENKFVDEQEEAAAAAAEPGPDPSEVDGLLRQGDMLRAFHAALRNSPVNTKNQAVKERAQGVVLKVLTNFKSSEIEQAVQSLDRNGVDLLMKYIYKGFEKPTENSSAVLLQWHEKALAVGGLGSIIRVLTARKTV

SEQ ID NO: 58685 - protein, 17 aa, Homo sapiens
IADRLNVDFALIHKEGQ

SEQ ID NO: 58686 - protein, 117 aa, Homo sapiens
VDNYELYEKLELVKGQKRKVKDRLKAYVRDPYALDLIDKLLVLDPAQRIDSDDALNHDFFWSDPMPSDLKGMLSTHLTSMFEYLAPPRRKGSQITQQSTNQSRNPATTNQTEFERVF

SEQ ID NO: 58687 - protein, 4 aa, Homo sapiens
MMPG

SEQ ID NO: 58688 - protein, 22 aa, Homo sapiens
VMLMCDCCQEPAHMTVWRKFFP

SEQ ID NO: 58689 - protein, 23 aa, Homo sapiens
IPAVSISYVVYENLKITLGVQSR

SEQ ID NO: 58690 - protein, 12 aa, Homo sapiens
RPGAKNEPFSST

SEQ ID NO: 58691 - protein, 584 aa, Homo sapiens
LLLLLGPWLEAAGVAESPLPAVVLAILARNAEHSLPHYLGALERLDYPRARMALWCATDHNVDNTTEMLQEWLAAVGDDYAAVVWRPEGEPRFYPDEEGPKHWTKERHQFLMELKQEALTFARNWGADYILFADTDNILTNNQTLRLLMGQGLPVVAPMLDSQTYYSNFWCGITPQGYYRRTAEYFPTKNRQRRGCFRVPMVHSTFLASLRAEGADQLAFYPPHPNYTWPFDDIIVFAYACQAAGVSVHVCNEHRYGYMNVPVKSHQGLEDERVNFIHLILEALVDGPRMQASAHVTRPSKRPSKIGFDEVFVISLARRPDRRERMLASLWEMEISGRVVDAVDGWMLNSSAIRNLGVDLLPGYQDPYSGRTLTKGEVGCFLSHYSIWEEVVARGLARVLVFEDDVRFESNFRGRLERLMEDVEAEKLSWDLIYLGRKQVNPEKETAVEGLPGLVVAGYSYWTLAYALRLAGARKLLASQPLRRMLPVDEFLPIMFDQHPNEQYKAHFWPRDLVAFSAQPLLAAPTHYAGDAEWLSDTETSSPWDDDSGRLISWSGSQKTLRSPRLDLTGSSGHSLQPQPRDEL

SEQ ID NO: 58692 - protein, 90 aa, Homo sapiens
TEVIFKALTGFRNNKNPKKPLTLSLHGWAGTGKNFVSQIVAENLHPKGLKSNFVHLFVSTLHFPHEQKIKLYQAREPAIISSAGQSDWSG

SEQ ID NO: 58693 - protein, 543 aa, Homo sapiens
LLQLLAEPGLGRVHHLALKDDVRHKVHLNTFGFFKDGYMVVNVSSLSLNEPEDKDVTIGFSLDRTKNDGFSSYLDEDVNYCILKKQSVSVTLLILDISRSEVRVKSPPEAGTQLPKIIFSRDEKVLGQSQEPNVNPASAGNQTQKTQDGGKSKRSTVDSKAMGEKSFSVHNNGGAVSFQFFFNISTDDQEGLYSLYFHKCLGKELPSDKFTFSLDIEITEKNPDSYLSAGEIPLPKLYISMAFFFFLSGTIWIHILRKRRNDVFKIHWLMAALPFTKSLSLVFHAIDYHYISSQGFPIEGWAVVYYITHLLKGALLFITIALIGTGWAFIKHILSDKDKKIFMIVIPLQVLANVAYIIIESTEEGTTEYGLWKDSLFLVDLLCCGAILFPVVWSIRHLQEASATDGKGDSMGPLQQRANLRAGSRIAAINLAKLKLFRHYYVLIVCYIYFTRIIAFLLKLAVPFQWKWLYQLLDETATLVFFVLTGYKFRPASDNPYLQLSQEEEDLEMESVVTTSGVMESMKKVKKVTNGSVEPQGEWEGAV

SEQ ID NO: 58694 - protein, 429 aa, Homo sapiens
VKTDSRRRELTPPIPDAMSSKGSVVLAYSGGLDTSCILVWLKEQGYDVIAYLANIGQKEDFEEARKKALKLGAKKVFIEDVSREFVEEFIWPAIQSSALYEDRYLLGTSLARPCIARKQVEIAQREGAKYVSHGATGKGNDQVRFELSCYSLAPQIKVIAPWRMPEFYNRFKGRNDLMEYAKQHGIPIPVTPKNPWSMDENLMHISYEAGILENPKNQAPPGLYTKTQDPAKAPNTPDILEIEFKKGVPVKVTNVKDGTTHQTSLELFMYLNEVAGKHGVGRIDIVENRFIGMKSRGIYETPAGTILYHAHLDIEAFTMDREVRKIKQGLGLKFAELVYTGFWHSPECEFVRHCIAKSQERVEGKVQVSVLKGQVYILGRESPLSLYNEELVSMNVQGDYEPTDATGFININSLRLKEYHRLQSKVTAK

SEQ ID NO: 58695 - protein, 60 aa, Homo sapiens
VDSIQQMRNKFAFREAINKLENNLRELQICPATAGSGPAATQDFSKLLSSVKEISDIVQR

SEQ ID NO: 58696 - protein, 63 aa, Homo sapiens
ILLSRGISDAESSWRAGQGWQRKGRLRSVVWARTKPPPSECDKLEGGRWATHNFCHVSEHLPN

SEQ ID NO: 58697 - protein, 9 aa, Homo sapiens
TACWSQRFS

SEQ ID NO: 58698 - protein, 23 aa, Homo sapiens
IPTLEKTKSTSKGIEILLEKLST

SEQ ID NO: 58699 - protein, 26 aa, Homo sapiens
IPFDQMTIEDLKKTFPETKLDKKKYP

SEQ ID NO: 58700 - protein, 18 aa, Homo sapiens
IPVTWLITHTMDNLLDFA

SEQ ID NO: 58701 - protein, 72 aa, Homo sapiens
IFRYLQNRSQIQVWLYEQVNMQIEGCIIGFDEYMNLVLDDAEEIHSKTKSRKQLGRIMLKGDNITLLQSVSN

SEQ ID NO: 58702 - protein, 55 aa, Homo sapiens
LPFPTQAILPPAPSSYFSHPTIRYPPHLNPQDTLKNYVPSYDPSSPQTSQSWYLG

SEQ ID NO: 58703 - protein, 24 aa, Homo sapiens
MCCGIELISKQQIYRRLRIASPLG

SEQ ID NO: 58704 - protein, 549 aa, Homo sapiens
MMASASDYFKAMFTGGMKEQDLMCIKLHGVNKVGLKKIIDFIYTAKLSLNMDNLQDTLEAASFLQILPVLDFCKVFLISGVSLDNCVEVGRIANTYNLIEVDKYVNNFILKNFPALLSTGEFLKLPFERLAFVLSSNSLKHCTELELFKAACRWLRLEDPRMDYAAKLMKNIRFPLMTPQDLINYVQTVDFMRTDNTCVNLLLEASNYQMMPYMQPVMQSDRTAIRSDSTHLVTLGGVLRQQLVVSKELRMYDERAQEWRSLAPMDAPRYQHGIAVIGNFLYVVGGQSNYDTKGKTAVDTVFRFDPRYNKWMQVASLNEKRTFFHLSALKGHLYAVGGRSAAGELATVECYNPRMNEWSYVAKMSEPHYGHAGTVYGGLMYISGGITHDTFQNELMCFDPDTDKWMQKAPMTTVRGLHCMCTVGDKLYVIGGNHFRGTSDYDDVLSCEYYSPTLDQWTPIAAMLRGQSDVGVAVFENKIYVVGGYSWNNRCMVEIVQKYDPEKDEWHKVFDLPESLGGIRACTLTVFPPEENPGSPSRESPLSAPSDHS

SEQ ID NO: 58705 - protein, 30 aa, Homo sapiens
LKLPLRCHECQQLLPSIPQLKEHLRKHWTQ

SEQ ID NO: 58706 - protein, 207 aa, Homo sapiens
KYWLYYLHPVLQRQQLDYGIYVINQAGDTIFNRAKLLNVGFQEALKDYDYTCFVFSDVDLIPMNDHNAYRCFSQPRHISVAMDKFGFSLPYVQYFGGVSALSKQQFLTINGFPNNYWGWGGEDDDIFNRLVFRGMSISRPNAVVGRCRMIRHSRDKKNEPNPQRFDRIAHTKETMLSDGLNSLTYQVLDVQRYPLYTQITVDIGTPS

SEQ ID NO: 58707 - protein, 210 aa, Homo sapiens
LFHKMMFETIPMFSGGTCNPQFVVCQLKVKMYSSNSGPTRWEDKFMYFEFPQPLPVCGDIKVEFFHKQNKMLKKDKMFHFWVNTFFIPGPEETSEKVENGSLCDQEIDSICSIERADNDKEYLVLTLTKNDLDKANKDKANRYFSPNFKVKLYFTKTVEEPSNPEASSSTSVTPDVSDNEPDHYRYSDTTDSDPENEPFDEDQHTQITKV

SEQ ID NO: 58708 - protein, 133 aa, Homo sapiens
RFPPYYMRRPYGRRPQYSNPPVQGEVMEGADNQGAGEQGRPVRQNTYRGYRPRFRRGPPRQRQPREDGNDEDKENQGDETQGQQPPQRRYRRNFNCRRRHPENPKPQDGKETKAADPPAENSSTPEAERGRTE

SEQ ID NO: 58709 - protein, 49 aa, Homo sapiens
KKHIRVHTGEKPYACLKCGKRFSQSSHLYKHSKTTCLRWQSSNLPSTLL

SEQ ID NO: 58710 - protein, 23 aa, Homo sapiens
IPVRGKKTKKEQKTAHFLPMAIT

SEQ ID NO: 58711 - protein, 9 aa, Homo sapiens
TACWSQRFS

SEQ ID NO: 58712 - protein, 23 aa, Homo sapiens
IPVRGKKTKKEQKTAHFLPMAIT

SEQ ID NO: 58713 - protein, 12 aa, Homo sapiens
IKRSKKALANAL

SEQ ID NO: 58714 - protein, 40 aa, Homo sapiens
LPKQSVDGKAPLATGEDDGDDDEVPELVENFDEASKNEAN

SEQ ID NO: 58715 - protein, 8 aa, Homo sapiens
RTCPRSLT

SEQ ID NO: 58716 - protein, 34 aa, Homo sapiens
KRLIDLLSPSEIVKQITSISIEPGVEMEVTIVDV

SEQ ID NO: 58717 - protein, 78 aa, Homo sapiens
METHIMHTFKEDFYGEILNVAIVGYLRPEKNFDSLESLISAIQGDIEEAKKRLELPEHLKIKEDNFFQVSKSKIMNGH

SEQ ID NO: 58718 - protein, 23 aa, Homo sapiens
MERFGSRNGKTSKKITIADCGQL

SEQ ID NO: 58719 - protein, 269 aa, Homo sapiens
IRAMDTLKIPYKYEHNKAHAQLVREVDVEKVSAFENPYVDAIKSLWNDPGIQECYDRRREYQLSDSTKYYLNDLDRVADPAYLPTQQDVLRVRVPTTGIIEYPFDLQSVIFRMVDVGGQRSERRKWIHCFENVTSIMFLVALSEYDQVLVESDNENRMEESKALFRTIITYPWFQNSSVILFLNKKDLLEEKIMYSHLVDYFPEYDGPQRDAQAAREFILKMFVDLNPDSDKIIYSHFTCATDTENIRFVFAAVKDTILQLNLKEYNLV

SEQ ID NO: 58720 - protein, 7 aa, Homo sapiens
LLLGPLF

SEQ ID NO: 58721 - protein, 22 aa, Homo sapiens
IIKFQQWNLRILNDTKNYKGWA

SEQ ID NO: 58722 - protein, 41 aa, Homo sapiens
IRKLQIQCVVEDDKVGTDLLEEITKFEEHVQSVDIAAFNKI

SEQ ID NO: 58723 - protein, 379 aa, Homo sapiens
LALQARGCSVKIWTAHYDPGHCFAESRELPVRCAGDWLPRGLGWGGRGAAVCAYVRMVFLALYVLFLADEEFDVVVCDQVSACIPVFRLARRRKKILFYCHFPDLLLTKRDSFLKRLYRAPIDWIEEYTTGMADCILVNSQFTAAVFKETFKSLSHIDPDVLYPSLNVTSFDSVVPEKLDDLVPKGKKFLLLSINRYERKKNLTLALEALVQLRGRLTSQDWERVHLIVAGGYDERVLENVEHYQELKKMVQQSDLGQYVTFLRSFSDKQKISLLHSCTCVLYTPSNEHFGIVPLEAMYMQCPVIAVNSGGPLESIDHSVTGFLCEPDPVHFSEAIEKFIREPSLKATMGLAGRARVKEKFSPEAFTEQLYRYVTKLLV

SEQ ID NO: 58724 - protein, 5 aa, Homo sapiens
MLMLL

SEQ ID NO: 58725 - protein, 11 aa, Homo sapiens
LPPNLKITWSY

SEQ ID NO: 58726 - protein, 786 aa, Homo sapiens
IKGSNYTYLSTLYYECDPGYVLNGTERRTCQDDKNWDEDEPICIPVDCSSPPVSANGQVRGDEYTFQKEIEYTCNEGFLLEGARSRVCLANGSWSGATPDCVPVRCATPPQLANGVTEGLDYGFMKEVTFHCHEGYILHGAPKLTCQSDGNWDAEIPLCKPVNCGPPEDLAHGFPNGFSFIHGGHIQYQCFPGYKLHGNSSRRCLSNGSWSGSSPSCLPCRCSTPVIEYGTVNGTDFDCGKAARIQCFKGFKLLGLSEITCEADGQWSSGFPHCEHTSCGSLPMIPNAFISETSSWKENVITYSCRSGYVIQGSSDLICTEKGVWSQPYPVCEPLSCGSPPSVANAVATGEAHTYESEVKLRCLEGYTMDTDTDTFTCQKDGRWFPERISCSPKKCPLPENITHILVHGDDFSVNRQVSVSCAEGYTFEGVNISVCQLDGTWEPPFSDESCSPVSCGKPESPEHGFVVGSKYTFESTIIYQCEPGYELEGNRERVCQENRQWSGGVAICKETRCETPLEFLNGKADIENRTTGPNVVYSCNRGYSLEGPSEAHCTENGTWSHPVPLCKPNPCPVPFVIPENALLSEKEFYVDQNVSIKCREGFLLQGHGIITCNPDETWTQTSAKCEKISCGPPAHVENAIARGVHYQYGDMITYSCYSGYMLEGFLRSVCLENGTWTSPPICRAVCRFPCQNGGICQRPNACSCPEGWMGRLCEEPICILPCLNGGRCVAPYQCDCPPGWTGSRCHTAVCQSPCLNGGKCVRPNRCHCLSSWTGHNCSRKRRTGF

SEQ ID NO: 58727 - skipped

SEQ ID NO: 58728 - protein, 36 aa, Homo sapiens
IAEIFGNPNYLRLRTYLSEGPYYVKPVSTTAVEGAE

SEQ ID NO: 58729 - protein, 289 aa, Homo sapiens
RKILREHRSSHRCHCYCRYCCRRVCTSRPASVPAGASVDRPRPLSRCVRTPVPGPDAPLPPGKLPSHQQPPSATMATAPYNYSYIFKYIIIGDMGVGKSCLLHQFTEKKFMADCPHTIGVEFGTRIIEVSGQKIKLQIWDTAGQERFRAVTRSYYRGAAGALMVYDITRRSTYNHLSSWLTDARNLTNPNTVIILIGNKADLEAQRDVTYEEAKQFAEENGLLFLEASAKTGENVEDAFLEAAKKIYQNIQDGSLDLNAAESGVQHKPSAPQGGRLTSEPQPQREGCGC

SEQ ID NO: 58730 - protein, 298 aa, Homo sapiens
TGECDCVSGSMAEKRHTRDSEAQRLPDSFKDSPSKGLGPCGWILVAFSFLFTVITFPISIWMCIKIIKEYERAIIFRLGRILQGGAKGPGLFFILPCTDSFIKVDMRTISFDIPPQEILTKDSVTISVDGVVYYRVQNATLAVANITNADSATRLLAQTTLRNVLGTKNLSQILSDREEIAHNMQSTLDDATDAWGIKVERVEIKDVKLPVQLQRAMAAEAEASREARAKVIAAEGEMNASRALKEASMVITESPAALQLRYLQTLTTIAAEKNSTIVFPLPIDMLQGIIGAKHSHLG

SEQ ID NO: 58731 - protein, 141 aa, Homo sapiens
KVKQFDFLFHKSGALEGQPRGYCFVNFETKQEAEQAIQCLNGKLALSKKLVVRWAHAQVKRYDHNKNDKILPISLEPSSSTEPTQSNLSVTAKIKAIEAKLKMMAENPDAEYPAAPVYSYFKPPDKKRTTPYSRTAWKSRR

SEQ ID NO: 58732 - protein, 51 aa, Homo sapiens
IDSQHVIHKYFLPRAYAVAIPLAAGLLLLLFVGLFISYVMLKTKRVTKKAQ

SEQ ID NO: 58733 - protein, 68 aa, Homo sapiens
KTFEGTMTSIFAQIISVALILIFDSGVDLNYSYAWILGSISTVSLLEAYTTQIDNLLLPLYLLILLMA

SEQ ID NO: 58734 - protein, 5 aa, Homo sapiens
LELLS

SEQ ID NO: 58735 - protein, 11 aa, Homo sapiens
RGMRANPGSGS

SEQ ID NO: 58736 - protein, 748 aa, Homo sapiens
LAMGDVLSTHLDDARRQHIAEKTGKILTEFLQFYEDQYGVALFNSMRHEIEGTGLPQAQLLWRKVPLDERIVFSGNLFQHQEDSKKWRNRFSLVPHNYGLVLYENKAAYERQVPPRAVINSAGYKILTSVDQYLELIGNSLPGTTAKSGSAPILKCPTQFPLILWHPYARHYYFCMMTEAEQDKWQAVLQDCIRHCNNGIPEDSKVEGPAFTDAIRMYRQSKELYGTWEMLCGNEVQILSNLVMEELGPELKAELGPRLKGKPQERQRQWIQISDAVYHMVYEQAKARFEEVLSKVQQVQPAMQAVIRTDMDQIITSKEHLASKIRAFILPKAEVCVRNHVQPYIPSILEALMVPTSQGFTEVRDVFFKEVTDMNLNVINEGGIDKLGEYMEKLSRLAYHPLKMQSCYEKMESLRLDGLQQRFDVSSTSVFKQRAQIHMREQMDNAVYTFETLLHQELGKGPTKEELCKSIQRVLERVLKKYDYDSSSVRKRFFREALLQISIPFLLKKLAPTCKSELPRFQELIFEDFARFILVENTYEEVVLQTVMKDILQAVKEAAVQRKHNLYRDSMVMHNSDPNLHLLAEGAPIDWGEEYSNSGGGGSPSPSTPESATLSEKRRRAKQVVSVVQDEEVGLPFEASPESPPPASPDGVTEIRGLLAQGLRPESPPPAGPLLNGAPAGESPQPKAAPEASSPPASPLQHLLPGKAVDLGPPKPSDQETGEQVSSPSSHPALHTTTEDSAGVQTEF

SEQ ID NO: 58737 - protein, 28 aa, Homo sapiens
LLPLLLDRATDLILDHIRERSQGPSLGP

SEQ ID NO: 58738 - protein, 136 aa, Homo sapiens
LLCSTLLVIKMYVVAIITGQVRLRKKAFANPEDALRHGGPQYCRSDPDVERCLRAHRNDMETIYPFLFLGFVYSFLGPNPFVAWMHFLVFLVGRVAHTVAYLGKLRAPIRSVTYTLAQLPCASMALQILWEAARHL

SEQ ID NO: 58739 - protein, 85 aa, Homo sapiens
KKDSETSFVPTNMAVNYVQHNRFYHEELNAPIRRNKEEPKARPLRVGDTEKPEPERSPPNRKRPANEKATDDYHYEKFKKMNRRY

SEQ ID NO: 58740 - protein, 83 aa, Homo sapiens
VAPQAPVHFLVIPKKPIPRISQAEEEDQQLLGHLLLVAKQTAKAEGLGDGYRLVINDGKLGAQSVYHLHIHVLGGRQLQWPPG

SEQ ID NO: 58741 - protein, 29 aa, Homo sapiens
LQYIVTWYGLSAATSYLWFKKFLRGTPGV

SEQ ID NO: 58742 - protein, 19 aa, Homo sapiens
MVLLLKGVPFTLTTVDTRR

SEQ ID NO: 58743 - protein, 33 aa, Homo sapiens
LRPPPLPPLLPTRSPEPAPSPWPRGAMLPRRRR

SEQ ID NO: 58744 - protein, 28 aa, Homo sapiens
LYSFNDNNSIHPLVEVQRKDTSAILDMK

SEQ ID NO: 58745 - protein, 5 aa, Homo sapiens
MSETL

SEQ ID NO: 58746 - protein, 47 aa, Homo sapiens
IRQNVQVFEFQLTAEDMKAIDGLDRNLHYFNSDSFASHPNYPYSDEY

SEQ ID NO: 58747 - protein, 28 aa, Homo sapiens
IDGLDRNLHYFNSDSFASHPNYPYSDEY

SEQ ID NO: 58748 - protein, 732 aa, Homo sapiens
VGAKVYFIYEGYQGMVDGGSNIAEADWESVSSILQVGGTIIGSARCQAFRTREGRLKAACNLLQRGITNLCVIGGDGSLTGANLFRKEWSGLLEELARNGQIDKEAVQKYAYLNVVGMVGSIDNDFCGTDMTIGTDSALHRIIEVVDAIMTTAQSHQRTFVLEVMGRHCGYLALVSALACGADWVFLPESPPEEGWEEQMCVKLSENRARKKRLNIIIVAEGAIDTQNKPITSEKIKELVVTQLGYDTRVTILGHVQRGGTPSAFDRILASRMGVEAVIALLEATPDTPACVVSLNGNHAVRLPLMECVQMTQDVQKAMDERRFQDAVRLRGRSFAGNLNTYKRLAIKLPDDQIPKTNCNVAVINVGAPAAGMNAAVRSAVRVGIADGHRMLAIYDGFDGFAKGQIKEIGWTDVGGWTGQGGSILGTKRVLPGKYLEEIATQMRTHSINALLIIGGFEAYLGLLELSAAREKHEEFCVPMVMVPATVSNNVPGSDFSIGADTALNTITDTCDRIKQSASGTKRRVFIIETMGGYCGYLANMGGLAAGADAAYIFEEPFDIRDLQSNVEHLTEKMKTTIQRGLVLRNESCSENYTTDFIYQLYSEEGKGVFDCRKNVLGHMQQGGAPSPFDRNFGTKISARAMEWITAKLKEARGRGKKFTTDDSICVLGISKRNVIFQPVAELKKQTDFEHRIPKEQWWLKLRPLMKILAKYKASYDVSDSGQLEHVQPWSV

SEQ ID NO: 58749 - protein, 139 aa, Homo sapiens
VVHTSPTIGSNVEEIVVKNTHFLMWDIGGQESLRSSWNTYYSNTEFIILVVDSIDRERLAITKEELYRMLAHEDLRKAAVLIFANKQDMKGCMTAAEISKYLTLSSIKDHPWHIQSCCALTGEGLCQGLEWMTSRIGVR

SEQ ID NO: 58750 - protein, 12 aa, Homo sapiens
MKALQKKRGNVS

SEQ ID NO: 58751 - protein, 314 aa, Homo sapiens
IKSVILPLPQNVKDYLLDDGTLVVSGRDDPPTHSQPDSDDEAEEIQWSDDENTATLTAPEFPEFATKVQEAINSLGGSVFPKLNWSAPRDAYWIAMNSSLKCKTLSDIFLLFKSSDFITRDFTQPFIHCTDDSPDPCIEYELVLRKWCELIPGAEFRCFVKENKLIGISQRDYTQYYDHISKQKEEIRRCIQDFFKKHIQYKFLDEDFVFDIYRDSRGKVWLIDFNPFGEVTDSLLFTWEELISENNLNGDFSEVDAQEQDSPAFRCTNSEVTVQPSPYLSYRLPKDFVDLSTGEDAHKLIDFLKLKRNQQEDD

SEQ ID NO: 58752 - protein, 45 aa, Homo sapiens
MMRTQPRLRHQNFLSLPLKSRKLSIPSGAVSFLSLIGVPQGMRIG

SEQ ID NO: 58753 - protein, 6 aa, Homo sapiens
TMPRKQ

SEQ ID NO: 58754 - protein, 103 aa, Homo sapiens
RNLPADIKESITDIIKFMLQREYVKANDAYLQMAIGNAPWPIGVTMVGIHARTGREKIFSKHVAHVLNDETQRKYIQGLKRLMTICQKHFPTDPSKCVEYNAL

SEQ ID NO: 58755 - protein, 105 aa, Homo sapiens
IYLNNKEAGMYHCVCCDSPLFSSEKKYCSGTGWPSFSEAHGTSGSDESHTGILRRLDTSLGSARTEVVCKQCEAHLGHVFPDGPGPNGQRFCINSVALKFKPRKH

SEQ ID NO: 58756 - protein, 55 aa, Homo sapiens
IKPLISTPPVSSQPKVSTPVVKQGPVSQSATQQPVTADKQQGHEPVSPRSLQRSR

SEQ ID NO: 58757 - protein, 92 aa, Homo sapiens
TPALAAHFSENLIKHVQGWPADHAEKQASRLREEAHNMGTIHMSEICTELKNLRSLVRVCEIQATLREQRILFLRQQIKELEKLKNQNSFMV

SEQ ID NO: 58758 - protein, 122 aa, Homo sapiens
VQELTSSKELWFRAAVIAVPIAGGLILVLLIMLALRMLRSENKRLQDQRQQMLSRLHYSFHGHHSKKGQVAKLDLECMVPVSGHENCCLTCDKMRQADLSNDKILSLVHWGMYSGHGKLEFV

SEQ ID NO: 58759 - protein, 67 aa, Homo sapiens
LHYSFHGHHSKKGQVAKLDLECMVPVSGHENCCLTCDKMRQADLSNDKILSLVHWGMYSGHGKLEFV

SEQ ID NO: 58760 - protein, 5 aa, Homo sapiens
IIILW

SEQ ID NO: 58761 - protein, 28 aa, Homo sapiens
KDLRRSARKRSASADNLTLPRWSPAIIS

SEQ ID NO: 58762 - protein, 37 aa, Homo sapiens
VHKEEKPRKTRGKNIRVKTHLPSWKAGTGRKSVAGLR

SEQ ID NO: 58763 - protein, 149 aa, Homo sapiens
ILPTGANKTRGRFELAFFTIGGCCMTGAAFGAMNGLRLGLKETQNMAWSKPRNVQILNMVTRQGALWANTLGSLALLYSAFGVIIEKTRGAEDDLNTVAAGTMTGMLYKCTGGLRGIARGGLTGLTLTSLYALYNNWEHMKGSLLQQSL

SEQ ID NO: 58764 - protein, 34 aa, Homo sapiens
TIQFVEGQFVDSYDPTIENTFTKLITVNGQEYHL

SEQ ID NO: 58765 - protein, 17 aa, Homo sapiens
TEVSKGSLRLSGRSNPI

SEQ ID NO: 58766 - protein, 250 aa, Homo sapiens
VRLYRTFKDSKYLYMLMEACLGGELWTILRDRGSFEDSTTRFYTACVVEAFAYLHSKGIIYRDLKPENLILDHRGYAKLVDFGFAKKIGFGKKTWTFCGTPEYVAPEIILNKGHDISADYWSLGILMYELLTGSPPFSGPDPMKTYNIILRGIDMIEFPKKIAKNAANLIKKLCRDNPSERLGNLKNGVKDIQKHKWFEGFNWEGLRKGTLTPPIIPSVASPTDTSNFDSFPEDNDEPPPDDNSGWDIDF

SEQ ID NO: 58767 - protein, 14 aa, Homo sapiens
VTVIFSFFLPLESF

SEQ ID NO: 58768 - protein, 55 aa, Homo sapiens
LALLYSAFGVIIEKTRGAEDDLNTVAAGTMTGMLYKCTVSEMALDSPFCVLLSGS

SEQ ID NO: 58769 - protein, 23 aa, Homo sapiens
IEPEEEKTLKKDEENDSKAPPMS

SEQ ID NO: 58770 - protein, 60 aa, Homo sapiens
MFPGATTPLPKAAAYPGVYGSNGRTPQPGSSTEQTSRPFISCRQIRRGYFLSQKGCSISF

SEQ ID NO: 58771 - protein, 48 aa, Homo sapiens
LLAISELNKNRRKLFESPNARTSFLEGGASGRLPRQYHSDIASVSGRW

SEQ ID NO: 58772 - protein, 29 aa, Homo sapiens
IYDPAKRISGKMALNHPYFNDLDNQIKKM

SEQ ID NO: 58773 - protein, 8 aa, Homo sapiens
MNYPSNKS

SEQ ID NO: 58774 - protein, 23 aa, Homo sapiens
LNNLNNHDRKHAVGDDAQFEMDI

SEQ ID NO: 58775 - protein, 82 aa, Homo sapiens
ITLLHARKRVAIQFLKDIRESVTQIMKNPKAKTTGMGAIYGMAQTTVDRNMVAELSSVFLDSLYSTDTVTQGSQMNGSPKPH

SEQ ID NO: 58776 - protein, 849 aa, Homo sapiens
LDEATGLRVREVQIEVSRQQVEELFGLEDYWCQCVAWSSAGTTKSRRAYVRIAYLRKNFDQEPLGKEVPLDHEVLLQCRPPEGVPVAEVEWLKNEDVIDPTQDTNFLLTIDHNLIIRQARLSDTANYTCVAKNIVAKRRSTTATVIVYVNGGWSSWAEWSPCSNRCGRGWQKRTRTCTNPAPLNGGAFCEGQAFQKTACTTICPVDGAWTEWSKWSACSTECAHWRSRECMAPPPQNGGRDCSGTLLDSKNCTDGLCMQNKKTLSDPNSHLLEASGDAALYAGLVVAIFVVVAILMAVGVVVYRRNCRDFDTDITDSSAALTGGFHPVNFKTARPSNPQLLHPSVPPDLTASAGIYRGPVYALQDSTDKIPMTNSPLLDPLPSLKVKVYSSSTTGSGPGLADGADLLGVLPPGTYPSDFARDTHFLHLRSASLGSQQLLGLPRDPGSSVSGTFGCLGGRLSIPGTGVSLLVPNGAIPQGKFYEMYLLINKAESTLPLSEGTQTVLSPSVTCGPTGLLLCRPVILTMPHCAEVSARDWIFQLKTQAHQGHWEEVVTLDEETLNTPCYCQLEPRACHILLDQLGTYVFTGESYSRSAVKRLQLAVFAPALCTSLEYSLRVYCLEDTPVALKEVLELERTLGGYLVEEPKPLMFKDSYHNLRLSLHDLPHAHWRSKLLAKYQEIPFYHIWSGSQKALHCTFTLERHSLASTELTCKICVRQVEGEGQIFQLHTTLAETPAGSLDTLCSAPGSTVTTQLGPYAFKIPLSIRQKICNSLDAPNSRGNDWRMLAQKLSMDRYLNYFATKASPTGVILDLWEALQQDDGDLNSLASALEEMGKSEMLVAVATDGDC

SEQ ID NO: 58777 - protein, 784 aa, Homo sapiens
KMPGKLRSDAGLESDTAMKKGETLRKQTEEKEKKEKPKSDKTEEIAEEEETVFPKAKQVKKKAEPSEVDMNSPKSKKAKKKEEPSQNDISPKTKSLRKKKEPIEKKVVSSKTKKVTKNEEPSEEEIDAPKPKKMKKEKEMNGETREKSPKLKNGFPHPEPDCNPSEAASEESNSEIEQEIPVEQKEGAFSNFPISEETIKLLKGRGVTFLFPIQAKTFHHVYSGKDLIAQARTGTGKTFSFAIPLIEKLHGELQDRKRGRAPQVLVLAPTRELANQVSKDFSDITKKLSVACFYGGTPYGGQFERMRNGIDILVGTPGRIKDHIQNGKLDLTKLKHVVLDEVDQMLDMGFADQVEEILSVAYKKDSEDNPQTLLFSATCPHWVFNVAKKYMKSTYEQVDLIGKKTQKTAITVEHLAIKCHWTQRAAVIGDVIRVYSGHQGRTIIFCETKKEAQELSQNSAIKQDAQSLHGDIPQKQREITLKGFRNGSFGVLVATNVAARGLDIPEVDLVIQSSPPKDVESYIHRSGRTGRAGRTGVCICFYQHKEEYQLVQVEQKAGIKFKRIGVPSATEIIKASSKDAIRLLDSVPPTAISHFKQSAEKLIEEKGAVEALAAALAHISGATSVDQRSLINSNVGFVTMILQCSIEMPNISYAWKELKEQLGEEIDSKVKGMVFLKGKLGVCFDVPTASVTEIQEKWHDSRRWQLSVATEQPELEGPREGYGGFRGQREGSRGFRGQRDGNRRFRGQREGSRGPRGQRSGGGNKSNRSQNKGQKRSFSKAFGQ

SEQ ID NO: 58778 - protein, 151 aa, Homo sapiens
LVKCLRLLRRYRLSHDCISLCIQAQNNLGILWSEREEIETAQAYLESSEALYNQYMKEVGSPPLDPTERFLPEEEKLTEQERSKRFEKVYTHNLYYLAQVYQHLEMFEKAAHYCHSTLKRQLEHNAYHPIEWAINAATLSQFYINKVSFLK

SEQ ID NO: 58779 - protein, 39 aa, Homo sapiens
ISAHFDDSSASSLKNVYFLLFDSESIGIYVQEMAKLDAK

SEQ ID NO: 58780 - protein, 42 aa, Homo sapiens
LGRVWAALGGWHGFAHPFKRQDALVLAVLADRASCGFYAPAL

SEQ ID NO: 58781 - protein, 253 aa, Homo sapiens
LRLLRSGTLSSSANALASVLTMPSLWDRFSSSSTSSSPSSLPRTPTPDRPPRSAWGSATREEGFDRSTSLESSDCESLDSSNSGFGPEEDTAYLDGVSLPDFELLSDPEDEHLCANLMQLLQESLAQARLGSRRPARLLMPSQLVSQVGKELLRLAYSEPCGLRGALLDVCVEQGKSCHSVGQLALDPSLVPTFQLTLVLRLDSRLWPKIQGLFSSANSPFLPGFSQSLTLSTGFRVIKKKLYSSEQLLIEEC

SEQ ID NO: 58782 - protein, 72 aa, Homo sapiens
TEMSVMMACWKQNEFRDDACRKEIQGFLDCAARAQEARKMRSIQETLGESGSLLPNKLNKLLQRFPNKPYLS

SEQ ID NO: 58783 - skipped

SEQ ID NO: 58784 - protein, 156 aa, Homo sapiens
VDANGKPLGRVVLELKADVVPKTAENFRALCTGEKGFGYKGSTFHRVIPSFMCQAGDFTNHNGTGGKSIYGSRFPDENFTLKHVGPGVLSMANAGPNTNGSQFFICTIKTDWLDGKHVVFGHVKEGMDVVKKIESFGSKSGRTSKKIVITDCGQLS

SEQ ID NO: 58785 - protein, 97 aa, Homo sapiens
LVGIDIFTGKKYEDICPSTHNMDVPNIKRNDFQLIGIQDGYLSLLQDSGEVPEDLRLPEGDLGKEIEQKYDCGEEILITVLSAMTEEAAVAIKAMAK

SEQ ID NO: 58786 - protein, 1160 aa, Homo sapiens
LSLRRFPAPWILLLCRPRFAAPLAAAMPVFHTRTIESILEPVAQQISHLVIMHEEGEVDGKAIPDLTAPVAAVQAAVSNLVRVGKETVQTTEDQILKRDMPPAFIKVENACTKLVQAAQMLQSDPYSVPARDYLIDGSRGILSGTSDLLLTFDEAEVRKIIRVCKGILEYLTVAEVVETMEDLVTYTKNLGPGMTKMAKMIDERQQELTHQEHRVMLVNSMNTVKELLPVLISAMKIFVTTKNSKNQGIEEALKNRNFTVEKMSAEINEIIRVLQLTSWDEDAWASKDTEAMKRALASIDSKLNQAKGWLRDPSASPGDAGEQAIRQILDEAGKVGELCAGKERREILGTCKMLGQMTDQVADLRARGQGSSPVAMQKAQQVSQGLDVLTAKVENAARKLEAMTNSKQSIAKKIDAAQNWLADPNGGPEGEEQIRGALAEARKIAELCDDPKERDDILRSLGEISALTSKLADLRRQGKGDSPEARALAKQVATALQNLQTKTNRAVANSRPAKAAVHLEGKIEQAQRWIDNPTVDDRGVGQAAIRGLVAEGHRLANVMMGPYRQDLLAKCDRVDQLTAQLADLAARGEGESPQARALASQLQDSLKDLKARMQEAMTQEVSDVFSDTTTPIKLLAVAATAPPDAPNREEVFDERAANFENHSGKLGATAEKAAAVGTANKSTVEGIQASVKTARELTPQVVSAARILLRNPGNQAAYEHFETMKNQWIDNVEKMTGLVDEAIDTKSLLDASEEAIKKDLDKCKVAMANIQPQMLVAGATSIARRANRILLVAKREVENSEDPKFREAVKAASDELSKTISPMVMDAKAVAGNISDPGLQKSFLDSGYRILGAVAKVREAFQPQEPDFPPPPPDLEQLRLTDELAPPKPPLPEGEVPPPRPPPPEEKDEEFPEQKAGEVINQPMMMAARQLHDEARKWSSKPGIPAAEVGIGVVAEADAADAAGFPVPPDMEDDYEPELLLMPSNQPVNQPILAAAQSLHREATKWSSKGNDIIAAAKRMALLMAEMSRLVRGGSGTKRALIQCAKDIAKASDEVTRLAKEVAKQCTDKRIRTNLLQVCERIPTISTQLKILSTVKATMLGRTNISDEESEQATEMLVHNAQNLMQSVKETVREAEAASIKIRTDAGFTLRWVRKTPWYQ

SEQ ID NO: 58787 - protein, 77 aa, Homo sapiens
LAAHEHYSIDVFIAFYITTRLFLYYHTLANTRAYQQSRRARIWFPMFSFFECNVNGTVPNEYCWPFSKPAIMKRLIG

SEQ ID NO: 58788 - protein, 60 aa, Homo sapiens
IPPSYADLGKAARDIFNKGFGFGLVKLDVKTKSCSGVISQFLAVVSLLFSHQLSSLGLAW

SEQ ID NO: 58789 - protein, 245 aa, Homo sapiens
VEFSTSGSSNTDTGKVTGTLETKYKWCEYGLTFTEKWNTDNTLGTEIAIEDQICQGLKLTFDTTFSPNTGKKSGKIKSSYKRECINLGCDVDFDFAGPAIHGSAVFGYEGWLAGYQMTFDSAKSKLTRNNFAVGYRTGDFQLHTNVNDGTEFGGSIYQKVCEDLDTSVNLAWTSGTNCTRFGIAAKYQLDPTASISAKVNNSSLIGVGYTQTLRPGVKLTLSALVDGKSINAGGHKVGLALELEA

SEQ ID NO: 58790 - protein, 158 aa, Homo sapiens
KKVVDPFSKKDWYDVNAPAMFNIRNIGKTLVTRTQGTKIASDGRVFEVSLADLQNDEVAFRKFKLITEDVQGKNCLTNFHGVDLTSDKMCSMVKKWQTMIEAHVDVKTTDGYLLRLFCVGFTKKRNNQIRKTSYAQHQQVLRNPEDLLCSVPAKSGRR

SEQ ID NO: 58791 - protein, 407 aa, Homo sapiens
RLPDMTAIIKEIVSRNKRRYQEDGFDLDLTYIYPNIIAMGFPAERLEGVYRNNIDDVVRFLDSKHKNHYKIYNLCAERHYDTAKFNCRVAQYPFEDHNPPQLELIKPFCEDLDQWLSEDDNHVAAIHCKAGKGRTGVMICAYLLHRGKFLKAQEALDFYGEVRTRDKKGVTIPSQRRYVYYYSYLLKNHLDYRPVALLFHKMMFETIPMFSGGTCNPQFVVCQLKVKIYSSNSGPTRREDKFMYFEFPQPLPVCGDIKVEFFHKQNKMLKKDKMFHFWVNTFFIPGPEETSEKVENGSLCDQEIDSICSIERADNDKEYLVLTLTKNDLDKANKDKANRYFSPNFKVKLYFTKTVEEPSNPEASSSTSVTPDVSDNEPDHYRYSDTTDSDPENEPFDEDQHTQITKV

SEQ ID NO: 58792 - protein, 268 aa, Homo sapiens
RKARDCTVNGDEPDCVPCQEGKEYTDKAHFSSKCRRCRLCDEGHGLEVEINCTRTQNTKCRCKPNFFCNSTVCEHCDPCTKCEHGIIKECTLTSNTKCKEEGSRSNLGWLCLLLLPIPLIVWVKRKEVQKTCRKHRKENQGSHESPTLNPETVAINLSDVDLSKYITTIAGVMTLSQVKGFVRKNGVNEAKIDEIKNDNVQDTAEQKVQLLRNWHQLHGKKEAYDTLIKDLKKANLCTLAEKIQTIILKDITSDSENSNFRNEIQSLV

SEQ ID NO: 58793 - protein, 19 aa, Homo sapiens
IDPENAEFLTALCELRLSI

SEQ ID NO: 58794 - protein, 216 aa, Homo sapiens
VACPQCNAEYLIVFPKLGPVVYVLDLADRLISKACPFAAAGIMVGSIYWTAVTYGAVTVMQVVGHKEGLDVMERADPLFLLIGLPTIPVMLILGKMIRWEDYVLRLWRKYSNKLQILNSIFPGIGCPVPRIPAEANPLADHVSATRILCGALVFPTIATIVGKLMFSSVNSNLQRTILGGIAFVAIKGAFKVYFKQQQYLRQAHRKILNYPEQEEA

SEQ ID NO: 58795 - protein, 82 aa, Homo sapiens
ISSAAERPLEIRGPYDVANLGLLFGLSESDAKAAVSTNCRAALLHGETRKTAFGIISTVKKPRPSEGDEDCLPASKKAKCEG

SEQ ID NO: 58796 - protein, 6 aa, Homo sapiens
KYEINS

SEQ ID NO: 58797 - protein, 10 aa, Homo sapiens
LRAAGHGGLD

SEQ ID NO: 58798 - protein, 12 aa, Homo sapiens
LCSLGVDPRGLR

SEQ ID NO: 58799 - protein, 16 aa, Homo sapiens
VTKVRTLNAIAKNILV

SEQ ID NO: 58800 - protein, 23 aa, Homo sapiens
KDVQAVKAKALEYVEAKSSVLED

SEQ ID NO: 58801 - protein, 5 aa, Homo sapiens
MMISN

SEQ ID NO: 58802 - protein, 24 aa, Homo sapiens
IWTPALPSKAGVPAAALAQSAASR

SEQ ID NO: 58803 - protein, 174 aa, Homo sapiens
LTESERKVLQATAHAQAQLGCPVIIHPGRSSRAPFQIIRILQEAGADISKTVMSHLDRTILDKKELLEFAQLGCYLEYDLFGTELLHYQLGPDIDMPDDNKRIRRVRLLVEEGCEDRILVAHDIHTKTRLMKYGGHGYSHILTNVVPKMLLRGITENVLDKILIENPKQWLTFK

SEQ ID NO: 58804 - protein, 241 aa, Homo sapiens
VNYESFEVGAGQVSVAYNSLDFEPEIFFALGSPIAMFLTIRGVDRIDENYSLPTCKGFFNIYHPLDPVAYRLEPMIVPDLDLKAVLIPHHKGRKRLHLELKESLSRMGSDLKQGFISSLKSAWQTLNEFARAHTSSTQLQEELEKVANQIKEEEEKQVVEAEKVVESPDFSKDEDYLGKVGMLNGGRRIDYVLQEKPIESFNEYLFALQSHLCYWESEDTALLLLKEIYRTMNISPEQPQH

SEQ ID NO: 58805 - protein, 4 aa, Homo sapiens
MEAY

SEQ ID NO: 58806 - protein, 228 aa, Homo sapiens
VNTAELTDLLIQQNHIGSVIKQTDVSEDSNDDMDEDEVFGFISLLNLTERKGTQCVEQIQELVLRFCEKNCEKSMVEQLDKFLNDTTKPVGLLLSERFINVPPQIALPMYQQLQKELAGAHRTNKPCGKCYFYLLISKTFVEAGKNNSKKKPSNKKKAALMFANAEEEFFYEKAILKFNYSVQEESDTCLGGKWSFDDVPMTPLRTVMLIPGDKMNEIMDKLKEYLSV

SEQ ID NO: 58807 - skipped

SEQ ID NO: 58808 - protein, 36 aa, Homo sapiens
LIDPTEPSNSEYSHSKDSRPMAHPDEDPRNTQTSQI

SEQ ID NO: 58809 - protein, 196 aa, Homo sapiens
VIPKDENGKILFDTVDLCATWEAMEKCKDAGLAKSIGVSNFNHRLLEMILNKPGLKYKPVCNQVECHPYFNQRKLLDFCKSKDIVLVAYSALGSHREEPWVDPNSPVLLEDPVLCALAKKHKRTPALIALRYQLQRGVVVLAKSYNEQRIRQNVQVFEFQLTSEEMKAIDGLNRNVRYLTLDIFAGPPNYPFSDEY

SEQ ID NO: 58810 - protein, 197 aa, Homo sapiens
ISEGKWVKLEKTTYMDPTGKTRTWESVKRTTRKEQTADGVAVIPVLQRTLHYECIVLVKQFRPPMGGYCIEFPAGLIDDGETPEAAALRELEEETGYKGDIAECSPAVCMDPGLSNCTIHIVTVTINGDDAENARPKPKPGDGEFVEVISLPKNDLLQRLDALVAEEHLTVDARVYSYALALKHANAKPFEVPFLKF

SEQ ID NO: 58811 - protein, 71 aa, Homo sapiens
LFSSEKSSWRDCSEEEQKELLCHTLCDILESACCDHSGSYCLVSWLRGKTTEETASISGSPAESSCQVEHS

SEQ ID NO: 58812 - protein, 395 aa, Homo sapiens
IILTVGHYAVVWSIYLEKQLDELLSRKKREKKKKTGSKSVDVSKLGASEKNERLLMKPQWHDLLPCKLGIWFCLTLKALPHLIQDAGQFYAKYKETRLKEKEDALTRTELETLQKQKKVKKPKPEFPVYTPLETTYIQSYDHGTSIEEIEEQMDDWLENRNRTQKKQAPEWTEEDLSQLTRSMVKFPGGTPGRWEKIAHELGRSVTDVTTKAKQLKDSVTCSPGMVRLSELKSTVQNSRPIKTATTLPDDMITQREDAEGVAAEEEQEGDSGEQETGATDARPRRRKPARLLEATAKPEPEEKSRAKRQKDFDIAEQNESSDEESLRKERARSAEEPWTQNQQKLLELALQQYPRGSSDRWDKIARCVPSKSKEDCIARYKLLVELVQKKKQAKS

SEQ ID NO: 58813 - protein, 158 aa, Homo sapiens
IGIVPTSVIVTGVQVSSRIFMVWLITHSIKPIQNEESVVLFLVAWTVTEITRYSFYTFSLLDHLPYFIKWARYNFFIILYPVGVAGELLTIYAALPHVKKTGMFSIRLPNKYNVSFDYYYFLLITMASYIPLFPQLYFHMLRQRRKVLHGEVIVEKDD

SEQ ID NO: 58814 - protein, 358 aa, Homo sapiens
VENTDPECYWLTNWIETILVQSWYPITVATNSREQKKILAKYLLETSGNLDGLEYKLHDFGYRGVSSQETAGIGASAHLVNFKGTDTVAGLALNKKYYGTKDPVPGYSVPAAEHSTITAWGKDHEKDAFEHIVTQFSSVPVSVVSNSYDIYNACEKIWGEDLRHLIVSRSTQAPLIIRPDSGNPLDTVLKVLEILGKKFPVTENSKGYKLLPPYLRVIQGDGVDINTLQEIVEGMKQKMWSIENIAFGSGGGLLQKLTRDLLNCSFKCSYVVTNGLGINVFKDPVADPNKRSKKGRLSLHRTPAGNFVTLEEGKGDLEEYGQDLLHTVFKNGKVTKSYSFDEIRKNAQLNIELEAAHH

SEQ ID NO: 58815 - protein, 39 aa, Homo sapiens
KKSNKFAIETVKNLLESLKGNRTENFTKTSGKRTISTQT

SEQ ID NO: 58816 - protein, 55 aa, Homo sapiens
IYDYTKDKDDELSFMEGAIIYVIKKNDDGWYEGVCNRVTGLFPGNYVESIMHYTD

SEQ ID NO: 58817 - protein, 586 aa, Homo sapiens
IRMLLREIKNDRGGEDPNQKVIHGVINSFVHVEQYKKKFPLKFYQEIFESPFLTETGEYYKQEASNLLQESNCSQYMEKVLGRLKDEEIRCRKYLHPSSYTKVIHECQQRMVADHLQFLHAECHNIIRQEKKNDMANMYVLLRAVSTGLPHMIQELQNHIHDEGLRATSNLTQENMPTLFVESVLEVHGKFVQLINTVLNGDQHFMSALDKALTSVVNYREPKSVCKAPELLAKYCDNLLKKSAKGMTENEVEDRLTSFITVFKYIDDKDVFQKFYARMLAKRLIHGLSMSMDSEEAMINKLKQACGYEFTSKLHRMYTDMSVSADLNNKFNNFIKNQDTVIDLGISFQIYVLQAGAWPLTQAPSSTFAIPQELEKSVQMFELFYSQHFSGRKLTWLHYLCTGEVKMNYLGKPYVAMVTTYQMAVLLAFNNSETVSYKELQDSTQMNEKELTKTIKSLLDVKMINHDSEKEDIDAESSFSLNMNFSSKRTKFKITTSMQKDTPQEMEQTRSAVDEDRKMYLQAAIVRIMKARKVLRHNALIQEVISQSRARFNPSISMIKKCIEVLIDKQYIERSQASADEYSYVA

SEQ ID NO: 58818 - protein, 926 aa, Homo sapiens
TVVIASKPYAFDRVFQSSTSQEQVYNDCAKKIVKDVLEGYNGTIFAYGQTSSGKTHTMEGKLHDPEGMGIIPRIVQDIFNYIYSMDENLEFHIKVSYFEIYLDKIRDLLDVSKTNLSVHEDKNRVPYVKGCTERFVCSPDEVMDTIDEGKSNRHVAVTNMNEHSSRSHSIFLINVKQENTQTEQKLSGKLYLVDLAGSEKVSKTGAEGAVLDEAKNINKSLSALGNVISALAEGSTYVPYRDSKMTRILQDSLGGNCRTTIVICCSPSSYNESETKSTLLFGQRAKTIKNTVCVNVELTAEQWKKKYEKEKEKNKILRNTIQWLENELNRWRNGETVPIDEQFDKEKANLEAFTVDKDITLTNDKPATAIGVIGNFTDAERRKCEEEIAKLYKQLDDKDEEINQQSQLVEKLKTQMLDQEELLASTRRDQDNMQAELNRLQAENDASKEEVKEVLQALEELAVNYDQKSQEVEDKTKEYELLSDELNQKSATLASIDAELQKLKEMTNHQKKRAAEMMASLLKDLAEIGIAVGNNDVKQPEGTGMIDEEFTVARLYISKMKSEVKTMVKRCKQLESTQTESNKKMEENEKELAACQLRISQHEAKIKSLTEYLQNVEQKKRQLEESVDALSEELVQLRAQEKVHEMEKEHLNKVQTANEVKQAVEQQIQSHRETHQKQISSLRDEVEAKAKLITDLQDQNQKMMLEQERLRVEHEKLKATDQEKSRKLHELTVMQDRREQARQDLKGLEETVAKELQTLHNLRKLFVQDLATRVKKSAEIDSDDTGGSAAQKQKISFLENNLEQLTKVHKQLVRDNADLRCELPKLEKRLRATAERVKALESALKEAKENASRDRKRYQQEVDRIKEAVRSKNMARRGHSAQIAKPIRPGQHPAASPTHPSAIRGGGAFVQNSQPVAVRGGGGKQV

SEQ ID NO: 58819 - protein, 398 aa, Homo sapiens
LPWSCSVEDVQNFLSDCTIHDGAAGVHFIYTREGRQSGEAFVELGSEDDVKMALKKDRESMGHRYIEVFKSHRTEMDWVLKHSGPNSADSANDGFVRLRGLPFGCTKEEIVQFFSGLEIVPNGITLPVDPEGKITGEAFVQFASQELAEKALGKHKERIGHRYIEVFKSSQEEVRSYSDPPLKFMSVQRPGPYDRPGTARRYIGIVKQAGLERMRPGAYSTGYGGYEEYSGLSDGYGFTTDLFGRDLSYCLSGMYDHRYGDSEFTVQSTTGHCVHMRGLPYKATENDIYNFFSPLNPVRVHIEIGPDGRVTGEADVEFATHEEAVAAMSKDRANMQHRYIELFLNSTTGASNGAYSSQVMQGMGVSAAQATYSGLESQSVSGCYGAGYSGQNSMGGYD

SEQ ID NO: 58820 - protein, 39 aa, Homo sapiens
MKTHKNPTLKAQSGPVRSGPKPFSAPKPQTSHKEGASCT

SEQ ID NO: 58821 - protein, 617 aa, Homo sapiens
VRRMNTFQDQSGSSSNREPLLRCSDARRDLELAIGGVLRAEQQIKDNLREVKAQIHSCISRHLECLRSREVWLYEQVDLIYQLKEETLQQQAQQLYSLLGQFNCLTHQLECTQNKDLANQVSVCLERLGSLTLKPEDSTVLLFEADTITLRQTITTFGSLKTIQIPEHLMAHASSANIGPFLEKRGCISMPEQKSASGIVAVPFSEWLLGSKPASGYQAPYIPSTDPQDWLTQKQTLENSQTSSRACNFFNNVGGNLKGLENWLLKSEKSSYQKCNSHSTTSSFSIEMEKVGDQELPDQDEMDLSDWLVTPQESHKLRKPENGSRETSEKFKLLFQSYNVNDWLVKTDSCTNCQGNQPKGVEIENLGNLKCLNDHLEAKKPLSTPSMVTEDWLVQNHQDPCKVEEVCRANEPCTSFAECVCDENCEKEALYKWLLKKEGKDKNGMPVEPKPEPEKHKDSLNMWLCPRKEVIEQTKAPKAMTPSRIADSFQVIKNSPLSEWLIRPPYKEGSPKEVPGTEDRAGKQKFKSPMNTSWCSFNTADWVLPGKKMGNLSQLSSGEDKWLLRKKAQEVLLNSPLQEEHNFPPDHYGLPAVCDLFACMQLKVDKEKWLYRTPLQM

SEQ ID NO: 58822 - protein, 17 aa, Homo sapiens
TEVSKGSLRLSGRSNPI

SEQ ID NO: 58823 - protein, 34 aa, Homo sapiens; identical to SEQ ID NO: 58764

SEQ ID NO: 58824 - protein, 103 aa, Homo sapiens
ILVYSVTSIKSFEVIKVIHGKLLDMVGKVQIPIMLVGNKKDLHMERVISYEEGKALAESWNAAFLESSAKENQTAVDVFRRMILEAEKMDGAASQGKSSCSVM

SEQ ID NO: 58825 - protein, 326 aa, Homo sapiens
LMQLQHEKAELEQHLEQEQEFQVNKLMKKIKKLENDTISKQLTLEQLRREKIDLENTLEQEQEALVNRLWKRMDKLEAEKRILQEKLDQPVSAPPSPRDISMEIDSPENMMRHIRFLKNEVERLKKQLRAAQLQHSEKMAQYLEEERHMREENLRLQRKLQREMERREALCRQLSESESSLEMDDERYFNEMSAQGLRPRTVSSPIPYTPSPSSSRPISPGLSYASHTVGFTPPTSLTRAGMSYYNSPGLHVQHMGTSHGITRPSPRRSNSPDKFKRPTPPPSPNTQTPVQPPPPPPPPPMQPTVPSAATSQPTPSQHSAHPSSQP

SEQ ID NO: 58826 - skipped

SEQ ID NO: 58827 - protein, 82 aa, Homo sapiens
ITSMLCWGNASFGQLGLGGIDEEIVLEPRKSDFFINKRVRDVGCGLRHTVFVLDDGTVYTCGCNDLGQLGHEKSRKKPGPYI

SEQ ID NO: 58828 - protein, 525 aa, Homo sapiens
IAIPFGTALVNLEKAPLKVLENWWSVLEPPLFLKIVELFKEVVVHLLKLYKIGIPPSERRIFNSFLHTALKVLEILHRVNEKMGQIIQYDKFYIHEVQELIDIRNDYINWVQQQAYGMLADIPVTICTYPFVFDAQAKTTLLQTDAVLQMQMAIDQAHRQNVSSLFLPVIESVNPCLILVVRRENIVGDAMEVLRKTKNIDYKKPLKVIFVGEDAVDAGGVRKEFFLLIMRELLDPKYGMFRYYEDSRLIWFSDKTFEDSDLFHLIGVICGLAIYNCTIVDLHFPLALYKKLLKKKPSLDDLKELMPDVGRSMQQLLDYPEDDIEETFCLNFTITVENFGATEVKELVLNGADTAVNKQNRQEFVDAYVDYIFNKSVASLFDAFHAGFHKVCGGKVLLLFQPNELQAMVIGNTNYDWKELEKNTEYKGEYWAEHPTIKIFWEVFHELPLEKKKQFLLFLTGSDRIPILGMKSLKLVIQSTGGGEEYLPVSHTCFNLLDLPKYTEKETLRSKLIQAIDHNEGFSLI

SEQ ID NO: 58829 - protein, 441 aa, Homo sapiens
VAFLGASAVTASTGLLWKRAHAESPPCVDNLKSDIGDKGKNKDEGDVCNHEKKTADLAPHPEEKKKKRSGFRDRKVMEYENRIRAYSTPDKIFRYFATLKVISEPGEAEVFMTPEDFVRSITPNEKQPEHLGLDQYIIKRFDGKKISQEREKFADEGSIFYTLGECGLISFSDYIFLTTVLSTPQRNFEIAFKMFDLNGDGEVDMEEFEQVQSIIRSQTSMGMRHRDRPTTGNTLKSGLCSALTTYFFGADLKGKLTIKNFLEFQRKLQHDVLKLEFERHDPVDGRITERQFGGMLLAYSGVQSKKLTAMQRQLKKHFKEGKGLTFQEVENFFTFLKNINDVDTALSFYHMAGASLDKVTMQQVARTVAKVELSDHVCDVVFALFDCDGNGELSNKEFVSIMKQRLMRGLEKPKDMGFTRLMQAMWKCAQETAWDFALPKQ

SEQ ID NO: 58830 - protein, 432 aa, Homo sapiens
ILLLHPPEYLGLQKMIHSLFLINCSGDIFLEKHWKSVVSQSVCDYFFEAQEKAADVENVPPVISTPHHYLISIYRDKLFFVSVIQTEVPPLFVIEFLHRVADTFQDYFGECSEAAIKDNVVIVYELLEEMLDNGFPLATESNILKELIKPPTILRSVVNSITGSSNVGDTLPTGQLSNIPWRRAGVKYTNNEAYFDVVEEIDAIIDKSGSTVFAEIQGVIDACIKLSGMPDLSLSFMNPRLLDDVSFHPCIRFKRWESERVLSFIPPDGNFRLISYRVSSQNLVAIPVYVKHSISFKENSSCGRFDITIGPKQNMGKTIEGITVTVHMPKVVLNMNLTPTQGSYTFDPVTKVLTWDVGKITPQKLPSLKGLVNLQSGAPKPEENPSLNIQFKIQQLAISGLKVNRLDMYGEKYKPFKGVKYVTKAGKFQVRT

SEQ ID NO: 58831 - protein, 539 aa, Homo sapiens
IKSSKMIWYILIIGILLPQSLAHPGFFTSIGQMTDLIHTEKDLVTSLKDYIKAEEDKLEQIKKWAEKLDRLTSTATKDPEGFVGHPVNAFKLMKRLNTEWSELENLVLKDMSDGFISNLTIQRQYFPNDEDQVGAAKALLRLQDTYNLDTDTISKGNLPGVKHKSFLTAEDCFELGKVAYTEADYYHTELWMEQALRQLDEGEISTIDKVSVLDYLSYAVYQQGDLDKALLLTKKLLELDPEHQRANGNLKYFEYIMAKEKDVNKSASDDQSDQKTTPKKKGVAVDYLPERQKYEMLCRGEGIKMTPRRQKKLFCRYHDGNRNPKFILAPAKQEDEWDKPRIIRFHDIISDAEIEIVKDLAKPRLRRATISNPITGDLETVHYRISKSAWLSGYENPVVSRINMRIQDLTGLDVSTAEELQVANYGVGGQYEPHFDFARKDEPDAFKELGTGNRIATWLFYMSDVSAGGATVFPEVGASVWPKKGTAVFWYNLFASGEGDYSTRHAACPVLVGNKWVSNKWLHERGQEFRRPCTLSELE

SEQ ID NO: 58832 - protein, 521 aa, Homo sapiens
IKSSKMIWYILIIGILLPQSLAHPGFFTSIGQMTDLIHTEKDLVTSLKDYIKAEEDKLEQIKKWAEKLDRLTSTATKDPEGFVGHPVNAFKLMKRLNTEWSELENLVLKDMSDGFISNLTIQRQYFPNDEDQVGAAKALLRLQDTYNLDTDTISKGNLPGVKHKSFLTAEDCFELGKVAYTEADYYHTELWMEQALRQLDEGEISTIDKVSVLDYLSYAVYQQGDLDKALLLTKKLLELDPEHQRANGNLKYFEYIMAKEKDVNKSASDDQSDQKTTPKKKGVAVDYLPERQKYEMLCRGEGIKMTPRRQKKLFCRYHDGNRNPKFILAPAKQEDEWDKPRIIRFHDIISDAEIEIVKDLAKPRLSRATVHDPETGKLTTAQYRVSKSAWLSGYENPVVSRINMRIQDLTGLDVSTAEELQKDEPDAFKELGTGNRIATWLFYMSDVSAGGATVFPEVGASVWPKKGTAVFWYNLFASGEGDYSTRHAACPVLVGNKWVSNKWLHERGQEFRRPCTLSELE

SEQ ID NO: 58833 - protein, 336 aa, Homo sapiens
MPSQYPGGQPTYPSQPATVTQVTQGTIRPAANFDAIRDAEILRKAMKGFGTDEQAIVDVVANRSNDQRQKIKAAFKTSYGKDLIKDLKSELSGNMEELILALFMPPTYYDAWSLRKAMQGAGTQERVLIEILCTRTNQEIREIVRCYQSEFGRDLEKDIRSDTSGHFERLLVSMCQGNRDENQSINHQMAQEDAQRLYQAGEGRLGTDESCFNMILATRSFPQLRATMEAYSRMANRDLLSSVSREFSGYVESGLKTILQCALNRPAFFAERLYYAMKGAGTDDSTLVRIVVTRSEIDLVQIKQMFAQMYQKTLGTMIAGDTSGDYRRLLLAIVGQ

SEQ ID NO: 58834 - protein, 461 aa, Homo sapiens
LKNHLVKEGRVDEEIALRIINEGAAILRREKTMIEVEAPITVCGDIHGQFFDLMKLFEVGGSPANTRYLFLGDYVDRGYFSIECVLYLWVLKILYPSTLFLLRGNHECRHLTEYFTFKQECKIKYSERVYEACMEAFDSLPLAALLNQQFLCVHGGLSPEIHTLDDIRRLDRFKEPPAFGPMCDLLWSDPSEDFGNEKSQEHFSHNTVRGCSYFYNYPAVCEFLQNNNLLSIIRAHEAQDAGYRMYRKSQTTGFPSLITIFSAPNYLDVYNNKAAVLKYENNVMNIRQFNCSPHPYWLPNFMDVFTWSLPFVGEKVTEMLVNVLSICSDDELMTEGEDQFDVGSAAARKEIIRNKIRAIGKMARVFSVLREESESVLTLKGLTPTGMLPSGVLAGGRQTLQSAIRGFSPPHRICSFEEAKGLDRINERMPPRKDAVQQDGFNSLNTAHATENHGTGNHTAQ

SEQ ID NO: 58835 - protein, 417 aa, Homo sapiens
MKLFEVGGSPANTRYLFLGDYVDRGYFSIECVLYLWVLKILYPSTLFLLRGNHECRHLTEYFTFKQECKIKYSERVYEACMEAFDSLPLAALLNQQFLCVHGGLSPEIHTLDDIRRLDRFKEPPAFGPMCDLLWSDPSEDFGNEKSQEHFSHNTVRGCSYFYNYPAVCEFLQNNNLLSIIRAHEAQDAGYRMYRKSQTTGFPSLITIFSAPNYLDVYNNKAAVLKYENNVMNIRQFNCSPHPYWLPNFMDVFTWSLPFVGEKVTEMLVNVLSICSDDELMTEGEDQFDGSAAARKEIIRNKIRAIGKMARVFSVLREESESVLTLKGLTPTGMLPSGVLAGGRQTLQSATVEAIEAEKAIRGFSPPHRICSFEEAKGLDRINERMPPRKDAVQQDGFNSLNTAHATENHGTGNHTAQ

SEQ ID NO: 58836 - protein, 9 aa, Homo sapiens
LGYYCRRVQ

SEQ ID NO: 58837 - protein, 5 aa, Homo sapiens
KETFQ

SEQ ID NO: 58838 - protein, 97 aa, Homo sapiens
LVGIDIFTGKKYEDICPSTHNMDVPNIRRNDFQLIGIQDGYLSLLQDSGEVPEDLRLPEGDLGKETEQKYDCGEEILITVLSAMTEEAAVAIKAMAK

SEQ ID NO: 58839 - protein, 25 aa, Homo sapiens
IIHACDIVEDAAIAYGYNNIQMTLP

SEQ ID NO: 58840 - protein, 11 aa, Homo sapiens
IFENITTLVEE

SEQ ID NO: 58841 - protein, 42 aa, Homo sapiens
MAYLYLELLKDSLNEYAYAAELAGLSYDLQNTIYGMYSLHLC

SEQ ID NO: 58842 - protein, 170 aa, Homo sapiens
IQSEKPPHYLESRVEAFLITMEKSIEDMTEEAFQKHIQALAIRRLDKPKKLSAECAKYWGEIISQQYNFDRDNTEVAYLKTLTKEDIIKFYKEMLAVDAPRRHKVSVHVLAREMDSCPVVGEFPCQNDINLSQAPALPQPEVIQNMTEFKRGLPLFPLVKPHINFMAAKL

SEQ ID NO: 58843 - protein, 24 aa, Homo sapiens
LAWLFQRKQRLSDMNTVTLTTRPT

SEQ ID NO: 58844 - protein, 184 aa, Homo sapiens
VARAGVLGVQWLQRASRNVMPLGARTASHMTKDMFPGPYPRTPEERAAAAKKYNMRVEDYEPYPDDGMGYGDYPKLPDRSQHERDPWYSWDQPGLRLNWGEPMHWHLDMYNRNRVDTSPTPVSWHVMCMQLFGFLAFMIFMCWVGDVYPVYQPVGPKQYPYNNLYLERGGDPSKEPERVVHYEI

SEQ ID NO: 58845 - protein, 46 aa, Homo sapiens
KKLIRYIDNQVVSTKGERFKDVRNPEAEEMKATYINLKPARKYRFH

SEQ ID NO: 58846 - protein, 80 aa, Homo sapiens
LLACLVDFFTNCPRYTSCETGFKDGDLFMSYRSMFQDVRDAVDWVHYKGSLKEKTVENLEKYVVKDSKSSRIQYFLKVLW

SEQ ID NO: 58847 - protein, 12 aa, Homo sapiens
MKCDQTLRSPKR

SEQ ID NO: 58848 - protein, 968 aa, Homo sapiens
MILEQYVVVSNYKKQENSELSLQAGEVVDVIEKNESGWWFVSTSEEQGWVPATYLEAQNGTRDDSDINTSKTGEVSKRRKAHLRRLDRRWTLGGMVNRQHSREEKYVTVQPYTSQSKDEIGFEKGVTVEVIRKNLEGWWYIRYLGKEGWAPASYLKKAKDDLPTRKKNLAGPVEIIGNIMEISNLLNKKASGDKETPPAEGEGHEAPIAKKEISLPILCNASNGSAVGVPDRTVSRLAQGSPAVARIAPQRAQISSPNLRTRPPPRRESSLGFQLPKPPEPPSVEVEYYTIAEFQSCISDGISFRGGQKAEVIDKNSGGWWYVQIGEKEGWAPASYIDKRKKPNLSRRTSTLTRPKVPPPAPPSKPKEAEEGPTGASESQDSPRKLKYEEPEYDIPAFGFDSEPELSEEPVEDRASGERRPAQPHRPSPASSLQRARFKVGESSEDVALEEETIYENEGFRPYAEDTLSARGSSGDSDSPGSSSLSLTRKNSPKSGSPKSSSLLKLKAEKNAQAEMGKNHSSASFSSSITINTTCCSSSSSSSSSLSKTSGDLKPRSASDAGIRGTPKVRAKKDADANAGLTSCPRAKPSVRPKPFLNRAESQSQEKMDISTLRRQLRPTGQLRGGLKGSKSEDSELPPQTASEAPSEGSRRSSSDLITLPATTPPCPTKKEWEGPATSYMTCSAYQKVQDSEISFPAGVEVQVLEKQESGWWYVRFGELEGWAPSHYLVLDENEQPDPSGKELDTVPAKGRQNEGKSDSLEKIERRVQALNTVNQSKKATPPIPSKPPGGFGKTSGTPAVKMRNGVRQVAVRPQSVFVSPPPKDNNLSCALRRNESLTATDGLRGVRRNSSFSTARSAAAEAKGRLAERAASQGSDSPLLPAQRNSIPVSPVRPKPIEKSQFIHNNLKDVYVSIADYEGDEETAGFQEGVSMEVLERNPNGWWYCQILDGVKPFKGWVPSNYLEKKN

SEQ ID NO: 58849 - protein, 275 aa, Homo sapiens
KCHKALRQFFDKVPAKHSYGMLFCSCRDIACTERRRQTIVPVCSYEEREKPNCLNLQDSCKTNYICRSRLADFFTNCQPESRSVSSCLKENYADCLLAYSGLIGTVMTPNYIDSSSLSVAPWCDCSNSGNDLEECLKFLNFFKDNTCLKNAIQAFGNGSDVTVWQPAFPVQTTTATTTTALRVKNKPLGPAGSENEIPTHVLPPCANLQAQKLKSNVSGNTHLCISNGNYEKEGLGASSHITTKSMAAPPSCGLSPLLVLVVTALSTLLSLTETS

SEQ ID NO: 58850 - protein, 241 aa, Homo sapiens
RRQTIVPVCSYEEREKPNCLNLQDSCKTNYICRSRLADFFTNCQPESRSVSSCLKENYADCLLAYSGLIGTVMTPNYIDSSSLSVAPWCDCSNSGNDLEECLKFLNFFKDNTCLKNAIQAFGNGSDVTVWQPAFPVQTTTATTTTALRVKNKPLGPAGSENEIPTHVLPPCANLQAQKLKSNVSGNTHLCISNGNYEKEGLGASSHITTKSMAAPPSCGLSPLLVLVVTALSTLLSLTETS

SEQ ID NO: 58851 - protein, 49 aa, Homo sapiens
IDQRIHELQEHIDDKIALLLDLLQNPNSPPTGIPLRHYDSGERLSNGER

SEQ ID NO: 58852 - protein, 919 aa, Homo sapiens
LPLLCAVLALVLAPAGAFRNDKCGDTIKIESPGYLTSPGYPHSYHPSEKCEWLIQAPDPYQRIMINFNPHFDLEDRDCKYDYVEVFDGENENGHFRGKFCGKIAPPPVVSSGPFLFIKFVSDYETHGAGFSIRYEIFKRGPECSQNYTTPSGVIKSPGFPEKYPNSLECTYIVFVPKMSEIILEFESFDLEPDSNPPGGMFCRYDRLEIWDGFPDVGPHIGRYCGQKTPGRIRSSSGILSMVFYTDSAIAKEGFSANYSVLQSSVSEDFKCMEALGMESGEIHSDQITASSQYSTNWSAERSRLNYPENGWTPGEDSYREWIQVDLGLLRFVTAVGTQGAISKETKKKYYVKTYKIDVSSNGEDWITIKEGNKPVLFQGNTNPTDVVVAVFPKPLITRFVRIKPATWETGISMRFEVYGCKITDYPCSGMLGMVSGLISDSQITSSNQGDRNWMPENIRLVTSRSGWALPPAPHSYINEWLQIDLGEEKIVRGIIIQGGKHRENKVFMRKFKIGYSNNGSDWKMIMDDSKRKAKSFEGNNNYDTPELRTFPALSTRFIRIYPERATHGGLGLRMELLGCEVEAPTAGPTTPNGNLVDECDDDQANCHSGTGDDFQLTGGTTVLATEKPTVIDSTIQSEFPTYGFNCEFGWGSHKTFCHWEHDNHVQLKWSVLTSKTGPIQDHTGDGNFIYSQADENQKGKVARLVSPVVYSQNSAHCMTFWYHMSGSHVGTLRVKLRYQKPEEYDQLVWMAIGHQGDHWKEGRVLLHKSLKLYQVIFEGEIGKGNLGGIAVDDISINNHISQEDCAKPADLDKKNPEIKIDETGSTPGYEGEGEGDKNISRKPGNVLKTLDPILITIIAMSALGVLLGAVCGVVLYCACWHNGMSERNLSALENYNFELVDGVKLKKDKLNTQSTYSEA

SEQ ID NO: 58853 - protein, 604 aa, Homo sapiens
KEKLKENNAPKWVPSLNEVPLHYLKPNSFVKFRCMIQDMFDPEFYMGVYETVNQNTKAHVLHFGKYRDVAECGPQQELDLNSPRNTTLERQTFYCVPVPGESTWVKEAYVNANQARVSPSTSYTPSRHKRSYEDDDDMDLQPNKQKDQHAGARQAGSVGGLQWCGEPKRLETEASTGQQLNSLNLSSPFDLNFPLPGEKGPACLVKVYEDWDCFKVNDILELYGILSVDPVLSILNNDERDASALLDPMECTDTAEEQRVHSPPASLVPRIHVILAQKLQHINPLLPACLNKEESKTFVSSFMSELSPVRAELLGFLTHALLGDSLAAEYLILHLISTVYTRRDVLPLGKFTVNLSGCPRNSTFTEHLYRIIQHLVPASFRLQMTIENMNHLKFIPHKDYTANRLVSGLLQLPSNTSLVIDETLLEQGQLDTPGVHNVTALSNLITWQKVDYDFSYHQMEFPCNINVFITSEGRSLLPADCQIHLQPQLIPPNMEEYMNSLLSAVLPSVLNKFRIYLTLLRFLEYSISDEITKAVEDDFVEMRKNDPQSITADDLHQLLVVARCLSLSAGQTTLSRERWLRAKQLESLRRTRLQQQKCVNGNEL

SEQ ID NO: 58854 - protein, 25 aa, Homo sapiens
IKEHTWTCGTWKCAHRKRKSIILLK

SEQ ID NO: 58855 - protein, 57 aa, Homo sapiens
ILATRGLRYWLYGDKILDDSFIEGVSRIRGWFPRKCVEKCPCDAETDQAPEGEKKNR

SEQ ID NO: 58856 - protein, 199 aa, Homo sapiens
LPSGAMSQNGAPGMQEESLQGSWVELHFSNNGNGGSVPASVSIYNGDMEKILLDAQHESGRSSSKSSHCDSPPRSQTPQDTNRASETDTHSIGEKNSSQSEEDDIERRKEVESILKKNSDWIWDWSSRPENIPPKEFLFKHPKRTATLSMRNTSVMKKGGIFSAEFLKVFLPSLLLSHLLAIGLGIYIGRRLTTSTSTF

SEQ ID NO: 58857 - protein, 7 aa, Homo sapiens
VMFVPQS

SEQ ID NO: 58858 - skipped

SEQ ID NO: 58859 - protein, 14 aa, Homo sapiens
LCFFPIPRFTISSP

SEQ ID NO: 58860 - protein, 183 aa, Homo sapiens
RKFLKAQVLPPLRDVRTRPEVGEMLRNKLVRLMTHLDTDVKRVAAEFLFVLCSESVPRFIKYTGYGNAAGLLAARGLMAGGRPEGQYSEDEDTDTDEYKEAKASINPVTGRVEEKPPNPMEGMTEEQKEHEAMKLVTMFDKLSRNRVIQPMGMSPRGHLTSLQDAMCETMEQQLSSDPDSDPD

SEQ ID NO: 58861 - protein, 102 aa, Homo sapiens
VINIHSETSVPDHVVWSLFNTLFLNWCCLGFIAFAYSVKSRDRKMVGDVTGAQAYASTAKCLNIWALILGILMTIGFILLLVFGSVTVYHIMLQIIQEKRGY

SEQ ID NO: 58862 - protein, 232 aa, Homo sapiens
LFTYNCCFWLAGLAVMAVGIWTLALKSDYISLLASGTYLATAYILVVAGTVVMVTGVLGCCATFKERRNLLRLYFILLLIIFLLEIIAGILAYAYYQQLNTELKENLKDTMTKRYHQPGHEAVTSAVDQLQQEFHCCGSNNSQDWRDSEWIRSQEAGGRVVPDSCCKTVVALCGQRDHASNIYKGGCITKLETFIQEHLRVIGAVGIGIACVQVFGMIFTCCLYRSLKLEHY

SEQ ID NO: 58863 - protein, 36 aa, Homo sapiens
VGAWGFLGRTHHLPAHWSAFRDPEHRLVSFLWPAQN

SEQ ID NO: 58864 - protein, 876 aa, Homo sapiens
IFLLGHDIDFGHMEAVNLLSSNRYTEKQIGYLFISVLVNSNSELIRLINNAIKNDLASRNPTFMGLALHCIASVGSREMAEAFAGEIPKVLVAGDTMDSVKQSAALCLLRLYRTSPDLVPMGDWTSRVVHLLNDQHLGVVTAATSLITTLAQKNPEEFKTSVSLAVSRLSRIVTSASTDLQDYTYYFVPAPWLSVKLLRLLQCYPPPEDPAVRGRLTECLETILNKAQEPPKSKKVQHSNAKNAVLFEAISLIIHHDSEPNLLVRACNQLGQFLQHRETNLRYLALESMCTLASSEFSHEAVKTHIETVINALKTERDVSVRQRAVDLLYAMCDRSNAPQIVAEMLSYLETADYSIREEIVLKVAILAEKYAVDYTWYVDTILNLIRIAGDYVSEEVWYRVIQIVINRDDVQGYAAKTVFEALQAPACHENLVKVGGYILGEFGNLIAGDPRSSPLIQFHLLHSKFHLCSVPTRALLLSTYIKFVNLFPEVKPTIQDVLRSDSQLRNADVELQQRAVEYLRLSTVASTDILATVLEEMPPFPERESSILAKLKKKKGPSTVTDLEDTKRDRSVDVNGGPEPAPASTSAVSTPSPSADLLGLGAAPPAPAGPPPSSGGSGLLVDVFSDSASVVAPLAPGSEDNFARFVCKNNGVLFENQLLQIGLKSEFRQNLGRMFIFYGNKTSTQFLNFTPTLICSDDLQPNLNLQTKPVDPTVEGGAQVQQVVNIECVSDFTEAPVLNIQFRYGGTFQNVSVQLPITLNKFFQPTEMASQDFFQRWKQLSNPQQEVQNIFKAKHPMDTEVTKAKIIGFGSALLEEVDPNPANFVGAGIIHTKTTQIGCLLRLEPNLQAQMYRLTLRTSKEAVSQRLCELLSAQF

SEQ ID NO: 58865 - protein, 456 aa, Homo sapiens
IKESVIISRGESSCPVCQTRFQPGNLRPNRHLANIVERVKEVKMSPQEGQKRDVCEHHGKKLQIFCKEDGKVICWVCELSQEHQGHQTFRINEVVKECQEKLQVALQRLIKEDQEAEKLEDDIRQERTAWKNYIQIERQKILKGFNEMRVILDNEEQRELQKLEEGEVNVLDNLAAATDQLVQQRQDASTLISDLQRRLRGSSVEMLQDVIDVMKRSESWTLKKPKSVSKKLKSVFRVPDLSGMLQVLKELTDVQYYWVDVMLNPGSATSNVAISVDQRQVKTVRTCTFKNSNPCDFSAFGVFGCQYFSSGKYYWEVDVSGKIAWILGVHSKISSLNKRKSSGFAFDPSVNYSKVYSRYRPQYGYWVIGLQNTCEYNAFEDSSSSDPKVLTLFMAVPPCRIGVFLDYEAGIVSFFNVTNHGALIYKFSGCRFSRPAYPYFNPWNCLVPMTVCPPSS

SEQ ID NO: 58866 - protein, 369 aa, Homo sapiens
LSGLGPAGPFDMVYWTGDIPAHDVWHQTRQDQLRALTTVTALVRKFLGPVPVYPAVGNHESTPVNSFPPPFIEGNHSSRWLYEAMAKAWEPWLPAEALRTLRIGGFYALSPYPGLRLISLNMNFCSRENFWLLINSTDPAGQLQWLVGELQAAEDRGDKVHIIGHIPPGHCLKSWSWNYYRIVARYENTLAAQFFGHTHVDEFEVFYDEETLSRPLAVAFLAPSATTYIGLNPGYRVYQIDGNYSGSSHVVLDHETYILNLTQANIPGAIPHWQLLYRARETYGLPNTLPTAWHNLVYRMRGDMQLFQTFWFLYHKGHPPSEPCGTPCRLATLCAQLSARADSPALCRHLMPDGSLPEAQSLWPRPLFC

SEQ ID NO: 58867 - protein, 49 aa, Homo sapiens
KLIHSNHRLMAAYVQLMPALVQRRIADYEAASAVPGVAAEQPGVSPSGS

SEQ ID NO: 58868 - protein, 83 aa, Homo sapiens
MCLDIGNGQRKDRKKTSLGPGGSYQISEHAPEASQPAENISKDLYIEVYPGTYSVTVGSNDLTKKTHVVAVDSGQSVDLVFPV

SEQ ID NO: 58869 - protein, 28 aa, Homo sapiens
VRPRDKQMELLENKAIHDLGKAHGSLKP

SEQ ID NO: 58870 - protein, 508 aa, Homo sapiens
LEKVQDNFDKIEFNRMCWTLCVKKNLTKNPLLITEEDAFKIWVIFNFLSEDKYPLIIVSEEIEYLLKKLTEAMGGGWQQEQFEHYKINFDDSKNGLSAWELIELIGNGQFSKGMDRQTVSMAINEVFNELILDVLKQGYMMKKGHRRKNWTERWFVLKPNIISYYVSEDLKDKKGDILLDENCCVESLPDKDGKKCLFLVKCFDKTFEISASDKKKKQEWIQAIHSTIHLLKLGSPPPHKEARQRRKELRKKQLAEQEELERQMKELQAANESKQQELEAVRKKLEEAASRAAEEEKKRLQTQVELQARFSTELEREKLIRQQMEEQVAQKSSELEQYLQRVRELEDMYLKLQEALEDERQARQDEETVRKLQARLLEEESSKRAELEKWHLEQQQAIQTTEAEKQELENQRVLKEQALQEAMEQLEQLELERKQALEQYEEVKKKLEMATNKTKSWKDKVAHHEGLIRLIEPGSKNPHLITNWGPAAFTEAELEEREKNWKEKKTTE

SEQ ID NO: 58871 - protein, 93 aa, Homo sapiens
KKWSKGKVRDKLNNLVLFDKATYDKLCKEVPNYKLITPAVVSERLKIRGSLARAALQELLSKGLIKLVSKHRAKVIYTRNTKGGDAAAAGEDA

SEQ ID NO: 58872 - protein, 350 aa, Homo sapiens
LPLLSLAQRLPLGRPLLGTMARGGRGRRLGLALGLLLALVLAPRVLRAKPTVRKERVVRPDSELGERPPEDNQSFQYDHEAFLGKEDSKTFDQLTPDESKERLGKIVDRIDNDGDGFVTTEELKTWIKRVQKRYIFDNVAKVWKDYDRDKDDKISWEEYKQATYGYYLGNPAEFHDSSDHHTFKKMLPRDERRFKAADLNGDLTATREEFTAFLHPEEFEHMKEIVVLETLEDIDKNGDGFVDQDEYIADMFSHEENGPEPDWVLSEREQFNEFRDLNKDGKLDKDEIRHWILPQDYDHAQAEARHLVYESDKNKDEKLTKEEILENWNMFVGSQATNYGEDLTKNHDEL

SEQ ID NO: 58873 - protein, 29 aa, Homo sapiens
IKFARLVNYNKMVFCPYYDAILSKILVRS

SEQ ID NO: 58874 - protein, 110 aa, Homo sapiens
IELVERLKFKSSDPKVTRDQMKMFIQQEFKKVQKVIADEEQKALHLVDIQEAMATAHVTEILADIQSHMDRLMTQMAQAKEQLDTSNESAEPKAEGDEEGPSGASEEEDT

SEQ ID NO: 58875 - protein, 677 aa, Homo sapiens
MFQFWPHSIESSNDWNVEKRSIRDVPVVRLPADSPIPERGDLSCRMHTCFDVYRCGFNPKNKIKVYIYALKKYVDDFGVSVSNTISREYNELLMAISDSDYYTDDINRACLFVPSIDVLNQNTLRIKETAQAMAQLSRWDRGTNHLLFNMLPGGPPDYNTALDVPRDRALLAGGGFSTWTYRQGYDVSIPVYSPLSAEVDLPEKGPGPRQYFLLSSQVGLHPEYREDLEALQVKHGESVLVLDKCTNLSEGVLSVRKRCHKHQVFDYPQVLQEATFCVVLRGARLGQAVLSDVLQAGCVPVVIADSYILPFSEVLDWKRASVVVPEEKMSDVYSILQSIPQRQIEEMQRQARWFWEAYFQSIKAIALATLQIINDRIYPYAAISYEEWNDPPAVKWGSVSNPLFLPLIPPQSQGFTAIVLTYDRVESLFRVITEVSKVPSLSKLLVVWNNQNKNPPEDSLWPKIRVPLKVVRTAENKLSNRFFPYDEIETEAVLAIDDDIIMLTSDELQFGYEVWREFPDRLVGYPGRLHLWDHEMNKWKYESEWTNEVSMVLTGAAFYHKYFNYLYTYKMPGDIKNWVDAHMNCEDIAMNFLVANVTGKAVIKVTPRKKFKCPECTAIDGLSLDQTHMVERSECINKFASVFGTMPLKVVEHRADPVLYKDDFPEKLKSFPNIGSL

SEQ ID NO: 58876 - protein, 12 aa, Homo sapiens
IVVMVLFSLFVD

SEQ ID NO: 58877 - protein, 40 aa, Homo sapiens
IAKIRSYIHIRPGQLDVLKEFHKQITARATKDGTFVISKT

SEQ ID NO: 58878 - protein, 212 aa, Homo sapiens
VAHKQLSAFGEYVAEILPKYVQQVQVSCFNELEVCIHPDGVIPVLTFLRDHTNAQFKSLVDLTAVDVPTRQNRFEIVYNLLSLRFNSRIRVKTYTDELTPIESAVSVFKAANWYEREIWDMFGVFFANHPDLRRILTDYGFEGHPFRKDFPLSGYVELRYDDEVKRVVAEPVELAQEFRKFDLNSPWEAFPVYRQPPESLKLEAGDKKPDAK

SEQ ID NO: 58879 - protein, 128 aa, Homo sapiens
LDIPFAMFAPKNLELEDTDPMVNPPDSPETESPLQGSLHSDGSSGGSSGNTHDDFVMIDFKPAFSKDDILPMDLGTFYREFQNPPQLSSLSIDIGAQSMAEDLDSLPEKLAVHEKNVREFDAFVETLQ

SEQ ID NO: 58880 - protein, 23 aa, Homo sapiens
KNMASRILSFPLVLHELCRKQSP

SEQ ID NO: 58881 - protein, 107 aa, Homo sapiens
IFLMFFNTFVFQAGLVNLLFHKFKGTIILTAVYFALSISLHVWVMNLRWKNSNSFIWTDGLQMLFVFQRLAAVLYCYFYKRTAVRLGDPHFYQDSLWLRKEFMQVRR

SEQ ID NO: 58882 - protein, 303 aa, Homo sapiens
VAVTAEKMAVLAPLIALVYSVPRLSRWLAQPYYLLSALLSAAFLLVRKLPPLCHGLPTQREDGNPCDFDWREVEILMFLSAIVMMKNRRSITVEQHIGNIFMFSKVANTILFFRLDIRMGLLYITLCIVFLMTCKPPLYMGPEYIKYFNDKTIDEELERDKRVTWIVEFFANWSNDCQSFAPIYADLSLKYNCTGLNFGKVDVGRYTDVSTRYKVSTSPLTKQLPTLILFQGGKEAMRRPQIDKKGRAVSWTFSEENVIREFNLNELYQRAKKLSKAGDNIPEEQPVASTPTTVSDGENKKDK

SEQ ID NO: 58883 - protein, 40 aa, Homo sapiens
LLRPDGSSAELWTGIKKGPPRKLKFPEPQEVVEELKKYLS

SEQ ID NO: 58884 - protein, 37 aa, Homo sapiens
VAKNQLPCWICLSQHLGEALGFFLKGLIFRTPHLSVK

SEQ ID NO: 58885 - protein, 7 aa, Homo sapiens
VAGMLLP

SEQ ID NO: 58886 - protein, 242 aa, Homo sapiens
IMAQQDRIQQEIAVQNPLVSERLELSVLYKEYAEDDNIYQQKIKDLHKKYSYIRKTRPDGNCFYRAFGFSHLEALLDDSKELQRFKAVSAKSKEDLVSQGFTEFTIEDFHNTFMDLIEQVEKQTSVADLLASFNDQSTSDYLVVYLRLLTSGYLQRESKFFEHFIEGGRTVKEFCQQEVEPMCKESDHIHIIALAQALSVSIQVEYMDRGEGGTTNPHIFPEGSEPKVYLLYRPGHYDILYK

SEQ ID NO: 58887 - protein, 40 aa, Homo sapiens
LAAVNRQPKDANVRRYLQLTQSELSSYHRKEKQLYLGMFG

SEQ ID NO: 58888 - protein, 539 aa, Homo sapiens
LRRVAGSAGTMSQDTEVDMKEVELNELEPEKQPMNAASGAAMSLAGAEKNGLVKIKVAEDEAEAAAAAKFTGLSKEELLKVAGSPGWVRTRWALLLLFWLGWLGMLAGAVVIIVRAPRCRELPAQKWWHTGALYRIGDLQAFQGHGAGNLAGLKGRLDYLSSLKVKGLVLGPIHKNQKDDVAQTDLLQIDPNFGSKEDFDSLLQSAKKKSIRVILDLTPNYRGENSWFSTQVDTVATKVKDALEFWLQAGVDGFQVRDIENLKDASSFLAEWQNITKGFSEDRLLIAGTNSSDLQQILSLLESNKDLLLTSSYLSDSGSTGEHTKSLVTQYLNATGNRWCSWSLSQARLLTSFLPAQLLRLYQLMLFTLPGTPVFSYGDEIGLDAAALPGQPMEAPVMLWDESSFPDIPGAVSANMTVKGQSEDPGSLLSLFRRLSDQRSKERSLLHGDFHAFSAGPGLFSYIRHWDQNERFLVVLNFGDVGLSAGLQASDLPASASLPAKADLLLSTQPGREEGSPLELERLKLEPHEGLLLRFPYAA

SEQ ID NO: 58889 - protein, 139 aa, Homo sapiens
RIYKSVIQAVQKSEEGHPFKAYLDVDITLSSEAFHNYMNAAMVHINRALKLIIRLFLVEDLVDSLKLAVFMWLMTYVGAVFNGITLLILAELLIFSVPIVYEKYKTQIDHYVGIARDQTKSIVEKIQAKLPGIAKKKAE

SEQ ID NO: 58890 - protein, 155 aa, Homo sapiens
LMLALSRHSLLSPLLSVTSFRRFYRGDSPTDSQKDMIEIPLPPWQERTDESIETKRARLLYESRKRGMLENCILLSLFAKEHLQHMTEKQLNLYDRLINEPSNDWDIYYWATEAKPAPEIFENEVMALLRDFAKNKNKEQRLRAPDLEYLFEKPR

SEQ ID NO: 58891 - protein, 30 aa, Homo sapiens
IKVTLATLKMSVQPMVSLGGFEITPPVSYG

SEQ ID NO: 58892 - protein, 229 aa, Homo sapiens
VAPARRRSGSGRGAGMGLAGVCALRRSAGYILVGGAGGQSAAAAARRYSEGEWASGGVRSFSRAAAAMAPIKVGDAIPAVEVFEGEPGNKVNLAELFKGKKGVLFGVPGAFTPGCSKTHLPGFVEQAEALKAKGVQVVACLSVNDAFVTGEWGRAHKAEGKVRLLADPTGAFGKETDLLLDDSLVSIFGNRRLKRFSMVVQDGIVKALNVEPDGTGLTCSLAPNIISQL

SEQ ID NO: 58893 - protein, 708 aa, Homo sapiens
TPVYCTGVSAQVQKQRARELGLGRHENAIKYLGQDYEQLRVRCLQSGTLFRDEAFPPVPQSLGYKDLGPNSSKTYGIKWKRPTELLSNPQFIVDGATRTDICQGALGDCWLLAAIASLTLNDTLLHRVVPHGQSFQNGYAGIFHFQLWQFGEWVDVVVDDLLPIKDGKLVFVHSAEGNEFWSALLEKAYAKVNGSYEALSGGSTSEGFEDFTGGVTEWYELRKAPSDLYQIILKALERGSLLGCSIDISSVLDMEAITFKKLVKGHAYSVTGAKQVNYRGQVVSLIRMRNPWGEVEWTGAWSDSSSEWNNVDPYERDQLRVKMEDGEFWMSFRDFMREFTRLEICNLTPDALKSRTIRKWNTTLYEGTWRRGSTAGGCRNYPATFWVNPQFKIRLDETDDPDDYGDRESGCSFVLALMQKHRRRERRFGRDMETIGFAVYEVPPELVGQPAVHLKRDFFLANASRARSEQFINLREVSTRFRLPPGEYVVVPSTFEPNKEGDFVLRFFSEKSAGTVELDDQIQANLPDEQVLSEEEIDENFKALFRQLAGEDMEISVKELRTILNRIISKHKDLRTKGFSLESCRSMVNLMDRDGNGKLGLVEFNILWNRIRNYLSIFRKFDLDKSGSMSAYEMRMAIESAGFKLNKKLYELIITRYSEPDLAVDFDNFVCCLVRLETMFRFFKTLDTDLDGVVTFDLFKWLQLTMFA

SEQ ID NO: 58894 - protein, 19 aa, Homo sapiens
LCLDLLKEKASIYQNQNSS

SEQ ID NO: 58895 - protein, 6 aa, Homo sapiens
KLEGKA

SEQ ID NO: 58896 - protein, 39 aa, Homo sapiens
IDLRGCKQITRKACEHFISDLSINSLYCLSDEKLIQKIS

SEQ ID NO: 58897 - protein, 136 aa, Homo sapiens
LGHPGERRREGDKRDASSKNTLKSVFRSVQVSRLPHSGEAQLSGTMAMTVVTKEKNKKVPTIFLSKKPREKEVDSKSQVIEGISRLICSAKQQQTMLRVSIDGVEWSDIKFFQLAAQWPTHVKHFPVGLFSGSKAT

SEQ ID NO: 58898 - protein, 191 aa, Homo sapiens
LLLIGDSGVGKSCLLLRFADDTYTESYISTIGVDFKIRTIELDGKTIKLQIWDTAGQERFRTITSSYYRGAHGIIVVYDVTDQESYANVKQWLQEIDRYASENVNKLLVGNKSDLTTKKVVDNTTAKEFADSLGIPFLETSAKNATNVEQAFMTMAAEIKKRMGPGAASGGERPNLKIDSTPVKPAGGGCC

SEQ ID NO: 58899 - protein, 79 aa, Homo sapiens
LSCNHVFHEFCIRGWCIVGKKQTCPYCKEKVDLKRMFSNPWERPHVMYGQLLDWLRYLVAWQPVIIGVVQGINYILGLE

SEQ ID NO: 58900 - protein, 187 aa, Homo sapiens
KIDDKPVKIDKWDGSAVKNSLDDSAKKVLLEKYKYVENFGLIDGRLTICTISCFFAIVALIWDYMHPFPESKPVLALCVISYFVMMGILTIYTSYKEKSIFLVAHRKDPTGMDPDDIWQLSSSLKRFDDKYTLKLTFISGRTKQQREAEFTKSIAKFFDHSGTLVMDAYEPEISRLHDSLAIERKIK

SEQ ID NO: 58901 - protein, 386 aa, Homo sapiens
VLGMAGIPGLLFLLFFLLCAVGQVSPYSAPWKPTWPAYRLPVVLPQSTLNLAKPDFGAEAKLEVSSSCGPQCHKGTPLPTYEEAKQYLSYETLYANGSRTETQVGIYILSSSGDGAQHRDSGSSGKSRRKRQIYGYDSRFSIFGKDFLLNYPFSTSVKLSTGCTGTLVAEKHVLTAAHCIHDGKTYVKGTQKLRVGFLKPKFKDGGRGANDSTSAMPEQMKFQWIRVKRTHVPKGWIKGNANDIGMDYDYALLELKKPHKRKFMKIGVSPPAKQLPGGRIHFSGYDNDRPGNLVYRFCDVKDETYDLLYQQCDAQPGASGSGVYVRMWKRQQQKWERKIIGIFSGHQWVDMNGSPQDFNVAVRITPLKYAQICYWIKGNYLDCREG

SEQ ID NO: 58902 - protein, 6 aa, Homo sapiens
MWTPVS

SEQ ID NO: 58903 - protein, 44 aa, Homo sapiens
RSRSRSRSSSMTRSPPRVSKRKSKSRSRSKRPPKSPEEEGQMSS

SEQ ID NO: 58904 - protein, 36 aa, Homo sapiens
LLFDTAFGTLGGLFQVVFSVCKRIGYKVTFDNSGEL

SEQ ID NO: 58905 - protein, 78 aa, Homo sapiens
VDKNMKYIPTEDVSGLSLEEQLRRLQEERTCKVCMDKEVSVVFIPCGHLVVCQECAPSLRKCPICRGIIKGTVRTFLS

SEQ ID NO: 58906 - protein, 299 aa, Homo sapiens
VPSMEGVRWAFSCGTWLPSRAEWLLAVRSIQPEEKERIGQFVFARDAKAAMAGRLMIRKLVAEKLNIPWNHIRLQRTAKGKPVLAKDSSNPYPNFNFNISHQGDYAVLAAEPELQVGIDIMKTSFPGRGSIPEFFHIMKRKFTNKEWETIRSFKDEWTQLDMFYRNWALKESFIKAIGVGLGFELQRLEFDLSPLNLDIGQVYKETRLFLDGEEEKEWAFEESKIDEHHFVAVALRKPDGSRHQDVPSQDDSKPTQRQFTILNFNDLMSSAVPMTPEDPSFWDCFCFTEEIPIRNGTKS

SEQ ID NO: 58907 - protein, 19 aa, Homo sapiens
INSLRLKEYHRLQSKVTAK

SEQ ID NO: 58908 - protein, 95 aa, Homo sapiens
INLIGRLQLTTERMREEENEGIVQLRILRTQEAIIQIMKMRKKISNAQLQTELVEILKNMFLPQKKMIKEQIEWLIEHKYIRRDESDINTFIYMA

SEQ ID NO: 58909 - protein, 352 aa, Homo sapiens
IEKAGIPKEEVKEAYMGNVLQGGEGQAPTRQAVLGAGLPISTPCTTINKVCASGMKAIMMASQSLMCGHQDVMVAGGMESMSNVPYVMNRGSTPYGGVKLEDLIVKDGLTDVYNKIHMGSCAENTAKKLNIARNEQDAYAINSYTRSKAAWEAGKFGNEVIPVTVTVKGQPDVVVKEDEEYKRVDFSKVPKLKTVFQKENGTVTAANASTLNDGAAALVLMTADAAKRLNVTPLARIVAFADAAVEPIDFPIAPVYAASMVLKDVGLKKEDIAMWEVNEAFSLVVLANIKMLEIDPQKVNINGGAVSLGHPIGMSGARIVGHLTHALKQGEYGLASICNGGGGASAMLIQKL

SEQ ID NO: 58910 - protein, 118 aa, Homo sapiens
ITVHFINRDGETLTTKGKVGDSLLDVVVENNLDIDGFGACEGTLACSTCHLIFEDHIYEKLDAITDEENDMLDLAYGLTDRSRLGCQICLTKSMDNMTVRVPETVADARQSIDVGKTS

SEQ ID NO: 58911 - protein, 66 aa, Homo sapiens
MCDPVVLPSSRVTVDRSTIARHLLSDQTDPFNRSPLTMDQIRPNTELKEKIQRWLAERKQQKEQLE

SEQ ID NO: 58912 - protein, 19 aa, Homo sapiens
RKFLNGLEPENIHMMIGMT

SEQ ID NO: 58913 - protein, 42 aa, Homo sapiens
MSQGYSYQDIQKALVIAQNNIEMAKNILREFVSISSPAHVAT

SEQ ID NO: 58914 - protein, 42 aa, Homo sapiens
IMEYIHKIEADLEHLKKVEESYTILCQRLAGSALTDKHSDKS

SEQ ID NO: 58915 - protein, 29 aa, Homo sapiens
MLFTLLMAFFRVYLTIYTLLSFHYTRWFI

SEQ ID NO: 58916 - protein, 48 aa, Homo sapiens
IMLFEVKTTALTPWKGPGAVSEVSNGTSRRAGCVWLLPLLVLHLLLKF

SEQ ID NO: 58917 - protein, 10 aa, Homo sapiens
VCVRVQAPAG

SEQ ID NO: 58918 - protein, 109 aa, Homo sapiens
LSNIERNWPYYFGFGLPLAFLTAMQSSYIISGCLFSILFPLFIISANEAKTPGKAYLFQLRLFSLVVFLSNRLFHKTVYLQSALSSSTSAEKFPSPHPSPAKLKATAGH

SEQ ID NO: 58919 - protein, 706 aa, Homo sapiens
KMTKFGFLRLSYEKQDTLLKLLILSMAAVLSFSTRLFAVLRFESVIHEFDPYFNYRTTRFLAEEGFYKFHNWFDDRAWYPLGRIIGGTIYPGLMITSAAIYHVLHFFHITIDIRNVCVFLAPLFSSFTTIVTYHLTKELKDAGAGLLAAAMIAVVPGYISRSVAGSYDNEGIAIFCMLLTYYMWIKAVKTGSICWAAKCALAYFYMVSSWGGYVFLINLIPLHVLVLMLTGRFSHRIYVAYCTVYCLGTILSMQISFVGFQPVLSSEHMAAFGVFGLCQIHAFVDYLRSKLNPQQFEVLFRSVISLVGFVLLTVGALLMLTGKISPWTGRFYSLLDPSYAKNNIPIIASVSEHQPTTWSSYYFDLQLLVFMFPVGLYYCFSNLSDARIFIIMYGVTSMYFSAVMVRLMLVLAPVMCILSGIGVSQVLSTYMKNLDISRPDKKSKKQQDSTYPIKNEVASGMILVMAFFLITYTFHSTWVTSEAYSSPSIVLSARGGDGSRIIFDDFREAYYWLRHNTPEDAKVMSWWDYGYQITAMANRTILVDNNTWNNTHISRVGQAMASTEEKAYEIMRELDVSYVLVIFGGLTGYSSDDINKFLWMVRIGGSTDTGKHIKENDYYTPTGEFRVDREGSPVLLNCLMYKMCYYRFGQVYTEAKRPPGFDRVRNAEIGNKDFELDVLEEAYTTEHWLVRIYKVKDLDNRGLSRT

SEQ ID NO: 58920 - protein, 136 aa, Homo sapiens
LDTMNHTVQTFFSPVNSGQPPNYEMLKEEHEVAVLGAPHNPAPPTSTVIHIRSETSVPDHVVWSLFNTLFMNPCCLGFIAFAYSVKSRDRKMVGDVTGAQAYASTAKCLNIWALILGILMTILLIVIPVLIFQAYG

SEQ ID NO: 58921 - protein, 41 aa, Homo sapiens
LSKPSSLLSTVASPPTMRCSRRSTRWLCWGRPTTLLPRRPP

SEQ ID NO: 58922 - protein, 349 aa, Homo sapiens
VQDRGLVVTDLKAESVVLEHRSYCSAKARDRHFAGDVLGYVTPWNSHGYDVTKVFGSKFTQISPVWLQLKRRGREMFEVTGLHDVDQGWMRAVRKHAKGLHIVPRLLFEDWTYDDFRNVLDSEDEIEELSKTVVQVAKNQHFDGFVVEVWNQLLSQKRVGLIHMLTHLAEALHQARLLALLVIPPAITPGTDQLGMFTHKEFEQLAPVLDGFSLMTYDYSTAHQPGPNAPLSWVRACVQVLDPKSKWRSKILLGLNFYGMDYATSKDAREPVVGARYIQTLKDHRPRMVWDSQASEHFFEYKKSRSGRHVVFYPTLKSLQVRLELARELGVGVSIWELGQGLDYFYDLL

SEQ ID NO: 58923 - protein, 41 aa, Homo sapiens
LKAIQDMFPNMDQEVIRSVLEAQRGNKDAAINSLLQMGEEP

SEQ ID NO: 58924 - protein, 406 aa, Homo sapiens
LPLALCLLAAPASALVRIPLHKFTSIRRTMSEVGGSVEDLIAKGPVSKYSQAVPAVTEGPIPEVLKNYMDAQYYGEIGIGTPPQCFTVVFDTGSSNLWVPSIHCKLLDIACWIHHKYNSDKSSTYVKNGTSFDIHYGSGSLSGYLSQDTVSVPCQSASSASALGGVKVERQVFGEATKQPGITFIAAKFDGILGMAYPRISVNNVLPVFDNLMQQKLVDQNIFSFYLSRDPDAQPGGELMLGGTDSKYYKGSLSYLNVTRKAYWQVHLDQVEVASGLTLCKEGCEAIVDTGTSLMVGPVDEVRELQKAIGAVPLIQGEYMIPCEKVSTLPAITLKLGGKGYKLSPEDYTLKVSQAGKTLCLSGFMGMDIPPPSGPLWILGDVFIGRYYTVFDRDNNRVGFAEAARL

SEQ ID NO: 58925 - protein, 48 aa, Homo sapiens
IETSAKTRQGVEDAFYTLVREIRQHKLRKLNPPDESGPGCMSCKCVLS

SEQ ID NO: 58926 - protein, 710 aa, Homo sapiens
KEVFIPQDGKKVTWYCCGPTVYDASHMGHARSYISFDILRRVLKDYFKFDVFYCMNITDIDDKIIKRARQNHLFEQYREKRPEAAQLLEDVQAALKPFSVKLNETTDPDKKQMLERIQHAVQLATEPLEKAVQSRLTGEEVNSCVEVLLEEAKDLLSDWLDSTLGCDVTDNSIFSKLPKFWEGDFHRDMEALNVLPPDVLTRVSEYVPEIVNFVQKIVDNGYGYVSNGSVYFDTAKFASSEKHSYGKLVPEAVGDQKALQEGEGDLSISADRLSEKRSPNDFALWKASKPGEPSWPCPWGKGRPGWHIECSAMAGTLLGASMDIHGGGFDLRFPHHDNELAQSEAYFENDCWVRYFLHTGHLTIAGCKMSKSLKNFITIKDALKKHSARQLRLAFLMHSWKDTLDYSSNTMESALQYEKFLNEFFLNVKDILRAPVDITGQFEKWGEEEAELNKNFYDKKTAIHKALCDNVDTRTVMEEMRALVSQCNLYMAARKAVRKRPNQALLENIALYLTHMLKIFGAVEEDSSLGFPVGGPGTSLSLEATVMPYLQVLSEFREGVRKIAREQKVPEILQLSDALRDNILPELGVRFEDHEGLPTVVKLVDRNTLLKEREEKRRVEEEKRKKKEEAARRKQEQEAAKLAKMKIPPSEMFLSETDKYSKFDENGLPTHDMEGKELSKGQAKKLKKLFEAQEKLYKEYLQMAQNGSFQ

SEQ ID NO: 58927 - protein, 164 aa, Homo sapiens
KNFEDVRCKCICPPYKENSGHIYNKNISQKDCDCLHVVEPMPVRGPDVEAYCLRCECKYEERSSVTIKVTIIIYLSILGLLLLYMVYLTLVEPILKRRLFGHAQLIQSDDDIGDHQPFANAHDVLARSRSRANVLNKVEYAQQRWKLQVQEQRKSVFDRHVVLS

SEQ ID NO: 58928 - protein, 269 aa, Homo sapiens
VVTLLEKLASMLETLRERQGGLARRQGGLAGSVRRIQSGLGALSRSHDTTSNTLAQLLAKAERVSSHANAAQERAVRRAAQVQRLEANHGLLVARGKLHVLLFKASPTLQRFAVRTQLSLPLPSHACLSPQTLAAEEEGEVPASAFQKAPEPLGPADQSELGPEQLEAEVGESSDEEPVESRAQRLRRTGLQKVQSLRRALSGRKGPAAPPPTPVKPPRLGPGRSAEAQPEAQPALEPTLEPEPPQDTEEDPGRPGAAEEALLQMESVA

SEQ ID NO: 58929 - protein, 102 aa, Homo sapiens
VDFLMQLEDYTPTIPDAVTGYYLNRAGFEASDPRIIRLISLAAQKFISDIANDALQHCKMKGTASGSSRSKSKDRKYTLTMEDLTPALSEYGINVKKPHYFT

SEQ ID NO: 58930 - protein, 12 aa, Homo sapiens
IVWDGLGQPSSG

SEQ ID NO: 58931 - protein, 26 aa, Homo sapiens
LKEDTVTEKLQSSASSIHSLQQQLKL

SEQ ID NO: 58932 - protein, 102 aa, Homo sapiens
LLTKIILEHVSTWRTEAQANQISLPRLVDLDWRVDIKTSSDSISRMAVPTCLLQMKIQEDPSLCGDKPSISAVTVELSKETLDTMLDGLGRIRDQLSAVASK

SEQ ID NO: 58933 - protein, 71 aa, Homo sapiens
LKQYFYETKCNPMGYTKEGCRGIDKRHWNSQCRTTQSYVRALTMDSKKRIGWRFIRIDTSCVCTLTIKRGR

SEQ ID NO: 58934 - protein, 278 aa, Homo sapiens
ILSFAGGRNQARAATMFRNQYDNDVTVWSPQGRIHQIEYAMEAVKQGSATVGLKSKTHAVLVALKRAQSELAAHQKKILHVDNHIGISIAGLTADARLLCNFMRQECLDSRFVFDRPLPVSRLVSLIGSKTQIPTQRYGRRPYGVGLLIAGYDDMGPHIFQTCPSANYFDCRAMSIGARSQSARTYLERHMSEFMECNLNELVKHGLRALRETLPAEQDLTTKNVSIGIVGKDLEFTIYDDDDVSPFLEGLEERPQRKAQPAQPADEPAEKADEPMEH

SEQ ID NO: 58935 - protein, 6 aa, Homo sapiens
LIFWHP

SEQ ID NO: 58936 - protein, 6 aa, Homo sapiens
VIFWHP

SEQ ID NO: 58937 - protein, 104 aa, Homo sapiens
IEMSKDALPEKACQLDSRYWRITNAKGDVEEVQGPGVVGEFPIISPGRVYEYTSCTTFSTTSGYMEGYYTFHFLYFKDKIFNVAIPRFHMACPTFRVSIARLVS

SEQ ID NO: 58938 - protein, 59 aa, Homo sapiens
IILLKILRCQAAKVESAIAEGGASRFRNGFLHEALDEMTTPQQTTPQTKKNDMMQSSGK

SEQ ID NO: 58939 - protein, 920 aa, Homo sapiens
IILLKILRCQAAKVESAIAEGGASRFSASSGGGGSRGAPQHYPKTAGNSEFLGKTPGQNAQKWIPARSTRRDDNSAANNSANEKERHDAIFRKVRGILNKLTPEKFDKLCLELLNVGVESKLILKGVILLIVDKALEEPKYSSLYAQLCLRLAEDAPNFDGPAAEGQPGQKQSTTFRRLLISKLQDEFENRTRNVDVYDKRENPLLPEEEEQRAIAKIKMLGNIKFIGELGKLDLIHESILHKCIKTLLEKKKRVQLKDMGEDLECLCQIMRTVGPRLDHERAKSLMDQYFARMCSLMLSKELPARIRFLLQDTVELREHHWVPRKAFLDNGPKTINQIRQDAVKDLGVFIPAPMAQGMRSDFFLEGPFMPPRMKMDRDPLGGLADMFGQMPGSGIGTGPGVIQDRFSPTMGRHRSNQLFNGHGGHIMPPTQSQFGEMGGKFMKSQGLSQLYHNQSQGLLSQLQGQSKDMPPRFSKKGQLNADEISLRPAQSFLMNKNQVPKLQPQITMIPPSAQPPRTQTPPLGQTPQLGLKTNPPLIQEKPAKTSKKPPPSKEELLKLTETVVTEYLNSGNANEAVNGVREMRAPKHFLPEMLSKVIILSLDRSDEDKEKASSLISLLKQEGIATSDNFMQAFLNVLDQCPKLEVDIPLVKSYLAQFAARAIISELVSISELAQPLESGTHFPLFLLCLQQLAKLQDREWLTELFQQSKVNMQKMLPEIDQNKDRMLEILEGKGLSFLFPLLKLEKELLKQIKLDPSPQTIYKWIKDNISPKLHVDKGFVNILMTSFLQYISSEVNPPSDETDSSSAPSKEQLEQEKQLLLSFKPVMQKFLHDHVDLQVSALYALQVHCYNSNFPKGMLLRFFVHFYDMEIIEEEAFLAWKEDITQEFPGKGKALFQVNQWLTWLETAEEEESEEEAD

SEQ ID NO: 58940 - protein, 15 aa, Homo sapiens
LKSLTSYALSSSMWV

SEQ ID NO: 58941 - protein, 36 aa, Homo sapiens
ILFTNLSFISASKHFWKRRRESNSKIWERIWSASVR

SEQ ID NO: 58942 - protein, 301 aa, Homo sapiens [sequence omitted]

SEQ ID NO: 58943 - protein, 21 aa, Homo sapiens
LEDYQQKVDKATRDLLYRRTL

SEQ ID NO: 58944 - protein, 5 aa, Homo sapiens
MFAEP

SEQ ID NO: 58945 - protein, 164 aa, Homo sapiens
LKNSSQFFQSYVERGLRVIEMEREGKGRISTSTGISPQMEVTCVPTPTSTVSSIGNTNGEEVGPSVYLERLKILRQRCGLDNTKQDDRPPLTSLLSKPAVPTVASSTDMLHSKLSQLRESREQHQHSDLDSNQTHSSGTVTSSSSTANIDDLKKRLERIKSSRK

SEQ ID NO: 58946 - protein, 33 aa, Homo sapiens
IAQFKQGVKSVAGKMAVLANGVMNSLQDRYGSY

SEQ ID NO: 58947 - protein, 146 aa, Homo sapiens
KIKSDHPGISITDLSKKAGEIWKGMSKEKKEEWDRKAEDARRDYEKAMKEYEGGRGESSKRDKSKKKKKVKVKMEKKSTPSRGSSSKSSSRQLSESFKSKEFVSSDESSSGENKSKKKRRRSEDSEEEELASTPPSSEDSASGSDE

SEQ ID NO: 58948 - protein, 21 aa, Homo sapiens
MERFGSRNGKTSKKITIADCG

SEQ ID NO: 58949 - protein, 136 aa, Homo sapiens
KNMFAIWRVPAPFKPITRKSVGHRMGGGKGAIDHYVTPVKAGRLVVEMGGRCEFEEVQGFLDQVAHKLPFAAKAVSRGTLEKMRKDQEERERNNQNPWTFERIATANMLGIRKVLSPYDLTHKGKYWGKFYMPKRV

SEQ ID NO: 58950 - protein, 501 aa, Homo sapiens
ICSISNEVPEHPCVSPVSNHVYERRLIEKYIAENGTDPINNQPLSEEQLIDIKVAHPIRPKPPSATSIPAILKALQDEWDAVMLHSFTLRQQLQTTRQELSHALYQHDAACRVIARLTKEVTAAREALATLKPQAGLIVPQAVPSSQPSVVGAGEPMDLGELVGMTPEIIQKLQDKATVLTTERKKRGKTVPEELVKPEELSKYRQVASHVGLHSASIPGILALDLCPSDTNKILTGGADKNVVVFDKSSEQILATLKGHTKKVTSVVFHPSQDLVFSASPDATIRIWSVPNASCVQVVRAHESAVTGLSLHATGDYLLSSSDDQYWAFSDIQTGRVLTKVTDETSGCSLTCAQFHPDGLIFGTGTMDSQIKIWDLKERTNVANFPGHSGPITSIAFSENGYYLATAADDSSVKLWDLRKLKNFKTLQLDNNFEVKSLIFDQSGTYLALGGTDVQIYICKQWTEILHFTEHSGLTTGVAFGHHAKFIASTGMDRSLKFYSL

SEQ ID NO: 58951 - protein, 462 aa, Homo sapiens
LLGPRPPPGIPRTRACSMGGVGEPGPREGPAQPGAPLPTFCWEQIRAHDQPGDKWLVIERRVYDISRWAQRHPGGSRLIGHHGAEDATDAFRAFHQDLNFVRKFLQPLLIGELAPEEPSQDGPLNAQLVEDFRALHQAAEDMKLFDASPTFFAFLLGHILAMEVLAWLLIYLLGPGWVPSALAAFILAISQAQSWCLQHDLGHASIFKKSWWNHVAQKFVMGQLKGFSAHWWNFRHFQHHAKPNIFHKDPDVTVAPVFLLGESSVEYGKKKRRYLPYNQQHLYFFLIGPPLLTLVNFEVENLAYMLVCMQWADLLWAASFYARFFLSYLPFYGVPGVLLFFVAVRVLESHWFVWITQMNHIPKEIGHEKHRDWVSSQLAATCNVEPSLFTNWFSGHLNFQIEHHLFPRMPRHNYSRVAPLVKSLCAKHGLSYEVKPFLTALVDIVRSLKKSGDIWLDAYLHQ

SEQ ID NO: 58952 - protein, 104 aa, Homo sapiens
IVKKELLYDVAGSDKYQVNNKHDDKYSPLPCSKIIQRAEELVGQEVLYKLTSENCEHFVNELRYGVARSDQVRDVIIAASVAGMGLAAMSLIGVMFSRNKRQKQ

SEQ ID NO: 58953 - protein, 5 aa, Homo sapiens
KTIHG

SEQ ID NO: 58954 - protein, 28 aa, Homo sapiens
VSLGRRQRQWSSLRAVGGHLSFRLCPSF

SEQ ID NO: 58955 - protein, 121 aa, Homo sapiens
KKYGGSVGSQPPPVAPEPGPVPSSPSQEPPTKREYDQCRIQVRLPDGTSLTQTFRAREQLAAVRLYVELHRGEELGGGQDPVQLLSGFPRRAFSEADMERPLQELGLVPSAVLIVAKKCPS

SEQ ID NO: 58956 - protein, 359 aa, Homo sapiens
ISKDSLADRALLPHVLCKNCVVELNFGQKEEPFFPPPEEFVFIHAVPVEERVRTAVPPKTIEECEVILMVGLPGSGKTQWALKYAKENPEKRYNVLGAETVLNQMRMKGLEEPEMDPKSRDLLVQQASQCLSKLVQIASRTKRNFILDQCNVYNSGQRRKLLLFKTFSRKVVVVVPNEEDWKKRLELRKEVEGDDVPESIMLEMKANFSLPEKCDYMDEVTYGELEKEEAQPIVTKYKEEARKLLPPSEKRTNRRNNRNKRNRQNRSRGQGYVGGQRRGYDNRAYGQQYWGQPGNRGGYRNFYDRYRGDYDRFYGRDYEYNRYRDYYRQYNRDWQSYYYHHPQDRDRYYRNYYGYQGYR

SEQ ID NO: 58957 - protein, 24 aa, Homo sapiens
ISTTGPTVIPPPPHSAPSLLPMSR

SEQ ID NO: 58958 - protein, 531 aa, Homo sapiens
KRSRWNQDTMEQKTVIPGMPTVIPPGLTREQERAYIVQLQIEDLTRKLRTGDLGIPPNPEDRSPSPEPIYNSEGKRLNTREFRTRKKLEEERHNLITEMVALNPDFKPPADYKPPATRVSDKVMIPQDEYPEINFVGLLIGPRGNTLKNIEKECNAKIMIRGKGSVKEGKVGRKDGQMLPGEDEPLHALVTANTMENVKKAVEQIRNILKQGIETPEDQNDLRKMQLRELARLNGTLREDDNRILRPWQSSETRSITNTTVCTKCGGAGHIASDCKFQRPGDPQSAQDKARMDKEYLSLMAELGEAPVPASVGSTSGPATTPLASAPRPAAPANNPPPPSLMSTTQSRPPWMNSGPSESRPYHGMHGGGPGGPGGGPHSFPHPLPSLTGGHGGHPMQHNPNGPPPPWMQPPPPPMNQGPHPPGHHGPPPMDQYLGSTPVGSGVYRLHQGKGMMPPPPMGMMPPPPPPPSGQPPPPPSGPLPPWQQQQQQPPPPPPPSSSMASSTPLPWQQRSLPAAAMARAMRVRTFRAHW

SEQ ID NO: 58959 - protein, 389 aa, Homo sapiens
LDSISIIDTPGILSGEKQRISRGYDFAAVLEWFAERVDRIILLFDAHKLDISDEFSEVIKALKNHEDKIRVVLNKADQIETQQLMRVYGALMWSLGKIINTPEVVRVYIGSFWSHPLLIPDNRKLFEAEEQDLFKDIQSLPRNAALRKLNDLIKRARLAKVHAYIISSLKKEMPNVFGKESKKKELVNNLGEIYQKIEREHQISPGDFPSLRKMQELLQTQDFSKFQALKPKLLDTVDDMLANDIARLMVMVRQEESLMPSQVVKGGAFDGTMNGPFGHGYGEGAGEGIDDVEWVVGKDKPTYDEIFYTLSPVNGKITGANAKKEMVKSKLPNTVLGKIWKLADVDKDGLLDDEEFALANHLIKVKLEGHELPADLPPHLVPPSKRRHE

SEQ ID NO: 58960 - protein, 117 aa, Homo sapiens
KDRRYADLTEDLLPSCESLKDTIARALTFWNEEIVPQIKEGKRVLIAAHGNSLRGIAKHLEGLSEEAIMELNLPTGIPIVYEWDKNLKPIKPMQFLGDEEMVRKAMEAVAAQGKAKK

SEQ ID NO: 58961 - protein, 248 aa, Homo sapiens
RTYETFKSIMKKSPFSGPTDPRPPPRRIAVPSRSSASVPKPAPQPYPFTSSLSTINYDEFPTMVFPSGQISQASALAPAPPQVLPQAPAPAPAPAMVSALAQAPAPVPVLAPGPPQAVAPPAPKPTQAGEGTLSEALLQLQFDDEDLGALLGNSTDPAVFTDLASVDNSEFQQLLNQGIPVAPHTTEPMLMEYPEAITRLVTGAQRPPDPAPAPLGAPGLPNGLLSGDEDFSSIADMDFSALLSQISS

SEQ ID NO: 58962 - protein, 116 aa, Homo sapiens
TPAIRQGPEGLEVSFRGRCLRGEEVAVPPGLVGYVMVTEEKKVSMGKPDPLRDSGTDDQEEEPLERDFDRFIGATANFSRFTLWGLETIPGPDAKVRGALTWPSLAAAIHAQVPED

SEQ ID NO: 58963 - protein, 19 aa, Homo sapiens
LPGDGITFQTTADVGHTAS

SEQ ID NO: 58964 - protein, 54 aa, Homo sapiens
LAGLSSSPQLPPSLPAWVAAMGRKRLITDSYPVVKRREGPAGHSKGELAPELGL

SEQ ID NO: 58965 - protein, 80 aa, Homo sapiens
LFNDFGPPSMGYVQAMKPPGAQGSQSTYTDLLSVIEEMGKEIRPTYAGSKSAMERLKRGIIHARALVRECLAETERNART

SEQ ID NO: 58966 - protein, 19 aa, Homo sapiens
KDYTQVDYLINGMYADSEM

SEQ ID NO: 58967 - protein, 112 aa, Homo sapiens
VVSKYLAVESPFLKEVLSEPWRLSTSQTPQQQVELFDLENNPEYVSSGGGFGPVADDGYGVSYILVGENLINFHISSKFSCPETDSHRFGRHLKEAMTDIITLFGLSSNSKK

SEQ ID NO: 58968 - protein, 11 aa, Homo sapiens
MEMQCPPGNAS

SEQ ID NO: 58969 - protein, 18 aa, Homo sapiens
IHEYGQEFRRPCSSSPED

SEQ ID NO: 58970 - protein, 22 aa, Homo sapiens
LLTLPSGRIDVPSASCSRRRGR

SEQ ID NO: 58971 - protein, 93 aa, Homo sapiens [sequence omitted]

SEQ ID NO: 58972 - protein, 4 aa, Homo sapiens
VENT

SEQ ID NO: 58973 - protein, 33 aa, Homo sapiens
IILTFILVSAILLTTLAACCCVRRQKFNQQYKA

SEQ ID NO: 58974 - protein, 183 aa, Homo sapiens [sequence omitted]

SEQ ID NO: 58975 - protein, 14 aa, Homo sapiens
VVFVYVATRPTITE

SEQ ID NO: 58976 - protein, 37 aa, Homo sapiens
LRLCEKVFDPQNDKPSKWWTCFVKRQFMNKSLSGPGQ

SEQ ID NO: 58977 - protein, 109 aa, Homo sapiens
KLERLMVKIGVFSVLYTVPATCVIACYFYEISNWALFRYSADDSNMAVEMLKIFMSLLVGITSGMWIWSAKTLHTWQKCSNRLVNSGKVKREKRGNGWVKPGKGSETVV

SEQ ID NO: 58978 - protein, 429 aa, Homo sapiens
LLGTWVFQVGSSGSQRDVNCSVMGPQEKKVVVYLQKLDTAYDDLGNSGHFTIIYNQGFEIVLNDYKWFAFFKYKEEGSKVTTYCNETMTGWVHDVLGRNWACFTGKKVGTASENVYVNIAHLKNSQEKYSNRLYKYDHNFVKAINAIQKSWTATTYMEYETLTLGDMIRRSGGHSRKIPRPKPAPLTAEIQQKILHLPTSWDWRNVHGINFVSPVRNQASCGSCYSFASMGMLEARIRILTNNSQTPILSPQEVVSCSQYAQGCEGGFPYLIAGKYAQDFGLVEEACFPYTGTDSPCKMKEDCFRYYSSEYHYVGGFYGGCNEALMKLELVHHGPMAVAFEVYDDFLHYKKGIYHHTGLRDPFNPFELTNHAVLLVGYGTDSASGMDYWIVKNSWGTGWGENGYFRIRRGTDECAIESIAVAATPIPKL

SEQ ID NO: 58979 - protein, 81 aa, Homo sapiens
MGPQEKKVVVYLQKLDTAYDDLGNSGHFTIIYNQGFEIVLNDYKWFAFFKDVTDFISHLFMQLGTVGIYDLPHLRNKLVIK

SEQ ID NO: 58980 - protein, 716 aa, Homo sapiens
VPDILSDSAGDTSRFSLDWWQRAAPNRAPGRQAGKEPVGVGGAVGGGDPPALGGPSPRRLLSGWGGGGAAEMSGQSLTDRITAAQHSVTGSAVSKTVCKATTHEIMGPKKKHLDYLIQCTNEMNVNIPQLADSLFERTTNSSWVVVFKSLITTHHLMVYGNERFIQYLASRNTLFNLSNFLDKSGLQGYDMSTFIRRYSRYLNEKAVSYRQVAFDFTKVKRGADGVMRTMNTEKLLKTVPIIQNQMDALLDFNVNSNELTNGVINAAFMLLFKDAIRLFAAYNEGIINLLEKYFDMKKNQCKEGLDIYKKFLTRMTRISEFLKVAEQVGIDRGDIPDLSQAPSSLLDALEQHLASLEGKKIKDSTAASRATTLSNAVSSLASTGLSLTKVDEREKQAALEEEQARLKALKEQRLKELAKKPHTSLTTAASPVSTSAGGIMTAPAIDIFSTPSSSNSTSKLPNDLLDLQQPTFHPSVHPMSTASQVASTWGDAVDDAIPSLNPFLTKSSGDVHLSISSDVSTFTTRTPTHEMFVGFTPSPVAQPHPSAGLNVDFESVFGNKSTNVIVDSGGFDELGGLLKPTVASQNQNLPVAKLPPSKLVSDDLDSSLANLVGNLGIGNGTTKNDVNWSQPGEKKLTGGSNWQPKVAPTTAWNAATMAPPVMAYPATTPTGMIGYGIPPQMGSVPVMTQPTLIYSQPVMRPPNPFGPVSGAQIQFM

SEQ ID NO: 58981 - protein, 19 aa, Homo sapiens
MPTIERLSMTRYFYLFPGN

SEQ ID NO: 58982 - protein, 11 aa, Homo sapiens
VSTGSFTRLHI

SEQ ID NO: 58983 - protein, 191 aa, Homo sapiens
LKELTSQLTPHTHLATMDIAIHHPWIRRPFFPFHSPSRLFDQFFGEHLLESDLFPTSTSLSPFYLRPPSFLRAPSWFDTGLSEMRLEKDRFSVNLDVKHFSPEELKVKVLGDVIEVHGKHEERQDEHGFISREFHRKYRIPADVDPLTITSSLSSDGVLTVNGPRKQVSGPERTIPITREEKPAVTAAPKK

SEQ ID NO: 58984 - protein, 68 aa, Homo sapiens
IAKEGQLMARDLLQPHRLYCYYYQVLQKYAERQSSKPEVRDGMELVPQPEDSTAICQCHRKKPSREEL

SEQ ID NO: 58985 - protein, 56 aa, Homo sapiens
IMDDPAGNSYLQNVYAPEDDPEMKVERYKRTFDQNEELGLNDMKTEGYEAGLAPQR

SEQ ID NO: 58986 - protein, 4 aa, Homo sapiens
IMVA

SEQ ID NO: 58987 - protein, 44 aa, Homo sapiens
VTFIFFLVWICLLMHLFQNPKLHKCVNILRNKMNPTRRMIFSHT

SEQ ID NO: 58988 - protein, 8 aa, Homo sapiens
MFAKISNR

SEQ ID NO: 58989 - protein, 18 aa, Homo sapiens
LAKLTYLGKKVIKQENMR

SEQ ID NO: 58990 - protein, 96 aa, Homo sapiens
LSLQSSRIEKGNQMPLKRFSMEGISNILQSGIRQTFGSSGTDKQYLNTVIPYEKKASPPSVEDLQMLTNILFAMKEDNEKVPTLLTDYILKVLCPT

SEQ ID NO: 58991 - protein, 271 aa, Homo sapiens [sequence omitted]

SEQ ID NO: 58992 - protein, 246 aa, Homo sapiens
IMIQNVDVYDEGPYTCSVQTDNHPKTSRVHLIVQVPPQIMNISSDITVNEGSSVTLLCLAIGRPEPTVTWRHLSVKEGQGFVSEDEYLEISDIKRDQSGEYECSALNDVAAPDVRKVKITVNYPPYISKAKNTGVSVGQKGILSCEASAVPMAEFQWFKEETRLATGLDGMRIENKGRMSTLTFFNVSEKDYGNYTCVATNKLGNTNASITLYGPGAVIDGVNSASRALACLWLSGTLLAHFFIKF

SEQ ID NO: 58993 - protein, 366 aa, Homo sapiens
LLVSYYVGTLGTHTEIKRVAEEKVTLPCHHQLGLPEKDTLDIEWLLTDNEGNQKVVITYSSRHVYNNLTEEQKGRVAFASNFLAGDASLQIEPLKPSDEGRYTCKVKNSGRYVWSHVILKVLVRPSKPKCELEGELTEGSDLTLQCESSSGTEPIVYYWQRIREKEGEDERLPPKSRIDYNHPGRVLLQNLTMSYSGLYQCTAGNEAGKESCVVRVTVQYVQSIGMVAGAVTGIVAGALLIFLLVWLLIRRKDKERYEEEERPNEIREDAEAPKARLVKPSSSSSGSRSSRSGSSSTRSTANSASRSQRTLSTDAAPQPGLATQAYSLVGPEVRGSEPKKVHHANLTKAETTPSMIPSQSRAFQTV

SEQ ID NO: 58994 - protein, 229 aa, Homo sapiens
LPQGPRRRSSAAQPPPPPPPLLSRRHDDRVHLAGAPELPPGLRGRHQPPDQPGALRLLRLPVHDRHSYLSLGIPSITHSVFPFQSYYFDRDDVALKNFAKYFLHQSHEEREHAEKLMKLQNQRGGRIFLQDIKKPDCDDWESGLNAMECALHLEKNVNQSLLELHKLATDKNDPHLCDFIETHYLNEQVKAIKELGDHVTNLRKMGAPESGLAEYLFDKHTLGDSDNES

SEQ ID NO: 58995 - protein, 9 aa, Homo sapiens
LTLTFLVPM

SEQ ID NO: 58996 - protein, 439 aa, Homo sapiens
ITMAAGTLYTYPENWRAFKALIAAQYSGAQVRVLSAPPHFHFGQTNRTPEFLRKFPAGKVPAFEGDDGFCVFESNAIAYYVSNEELRGSTPEAAAQVVQWVSFADSDIVPPASTWVFPTLGIMHHNKQATENAKEEVRRILGLLDAYLKTRTFLVGERVTLADITVVCTLLWLYKQVLEPSFRQAFPNTNRWFLTCINQPQFRAVLGEVKLCEKMAQFDAKKFAETQPKKDTPRKEKGSREEKQKPQAERKEEKKAAAPAPEEEMDECEQALAAEPKAKDPFAHLPKSTFVLDEFKRKYSNEDTLSVALPYFWEHFDKDGWSLWYSEYRFPEELTQTFMSCNLITGMFQRLDKLRKNAFASVILFGTNNSSSISGVWVFRGQELAFPLSPDWQVDYESYTWRKLDPGSEETQTLVREYFSWEGAFQHVGKAFNQGKIFK

SEQ ID NO: 58997 - protein, 22 aa, Homo sapiens
VTLLNETDILSQYLEKEVRKRC

SEQ ID NO: 58998 - protein, 925 aa, Homo sapiens
LAFLGVCLGITLAVDRSNFKTCEESSFCKRQRSIRPGLSPYRALLDSLQLGPDSLTVHLIHEVTKVLLVLELQGLQKNMTRFRIDELEPRRPRYRVPDVLVADPPIARLSVSGRDENSVELTMAEGPYKIILTARPFRLDLLEDRSLLLSVNARGLLEFEHQRAPRVSQGSKDPAEGDGAQPEETPRDGDKPEETQGKAEKDEPGAWEETFKTHSDSKPYGPMSVGLDFSLPGMEHVYGIPEHADNLRLKVTEGGEPYRLYNLDVFQYELYNPMALYGSVPVLLAHNPHRDLGIFWLNAAETWVDISSNTAGKTLFGKMMDYLQGSGETPQTDVRWMSETGIIDVFLLLGPSISDVFRQYASLTGTQALPPLFSLGYHQSRWNYRDEADVLEVDQGFDDHNLPCDVIWLDIEHADGKRYFTWDPSRFPQPRTMLERLASKRRKLVAIVDPHIKVDSGYRVHEELRNLGLYVKTRDGSDYEGWCWPGSAGYPDFTNPTMRAWWANMFSYDNYEGSAPNLFVWNDMNEPSVFNGPEVTMLKDAQHYGGWEHRDVHNIYGLYVHMATADGLRQRSGGMERPFVLARAFFAGSQRFGAVWTGDNTAEWDHLKISIPMCLSLGLVGLSFCGADVGGFFKNPEPELLVRWYQMGAYQPFFRAHAHLDTGRREPWLLPSQHNDIIRDALGQRYSLLPFWYTLLYQAHREGIPVMRPLWVQYPQDVTTFNIDDQYLLGDALLVHPVSDSGAHGVQVYLPGQGEVWYDIQSYQKHHGPQTLYLPVTLSSIPVFQRGGTIVPRWMRVRRSSECMKDDPITLFVALSPQGTAQGELFLDDGHTFNYQTRQEFLLRRFSFSGNTLVSSSADPEGHFETPIWIERVVIIGAGKPAAVVLQTKGSPESRLSFQHDPETSVLVLRKPGINVASDWSIHLR

SEQ ID NO: 58999 - protein, 818 aa, Homo sapiens
IILTARPFRLDLLEDRSLLLSVNARGLLEFEHQRAPRVSFSDKVNLTLGSIWDKIKNLFSRQGSKDPAEGDGAQPEETPRDGDKPEETQGKAEKDEPGAWEETFKTHSDSKPYGPMSVGLDFSLPGMEHVYGIPEHADNLRLKVTEGGEPYRLYNLDVFQYELYNPMALYGSVPVLLAHNPHRDLGIFWLNAAETWVDISSNTAGKTLFGKMMDYLQGSGETPQTDVRWMSETGIIDVFLLLGPSISDVFRQYASLTGTQALPPLFSLGYHQSRWNYRDEADVLEVDQGFDDHNLPCDVIWLDIEHADGKRYFTWDPSRFPQPRTMLERLASKRRKLVAIVDPHIKVDSGYRVHEELRNLGLYVKTRDGSDYEGWCWPGSAGYPDFTNPTMRAWWANMFSYDNYEGSAPNLFVWNDMNEPSVFNGPEVTMLKDAQHYGGWEHRDVHNIYGLYVHMATADGLRQRSGGMERPFVLARAFFAGSQRFGAVWTGDNTAEWDHLKISIPMCLSLGLVGLSFCGADVGGFFKNPEPELLVRWYQMGAYQPFFRAHAHLDTGRREPWLLPSQHNDIIRDALGQRYSLLPFWYTLLYQAHREGIPVMRPLWVQYPQDVTTFNIDDQYLLGDALLVHPVSDSGAHGVQVYLPGQGEVWYDIQSYQKHHGPQTLYLPVTLSSIPVFQRGGTIVPRWMRVRRSSECMKDDPITLFVALSPQGTAQGELFLDDGHTFNYQTRQEFLLRRFSFSGNTLVSSSADPEGHFETPIWIERVVIIGAGKPAAVVLQTKGSPESRLSFQHDPETSVLVLRKPGINVASDWSIHLR

SEQ ID NO: 59000 - protein, 64 aa, Homo sapiens
IAEAYLGKTVTHAVVAVPAYFNDSQRQATKDAGTIVGLNVLRIINEPTAAAYGLDKRLEQKEMY

SEQ ID NO: 59001 - protein, 143 aa, Homo sapiens
VKMRGIDFFEFLCQLILKEADQKEQFSQGSPSNCLETSLAEIFPLGKNHSSKVNSDSGIPGLAASVLVVSHGAYMRSLFDYFLTDLKCSLPATLSRSELMSVTPNTGMSLFIINFEEGREVKPTVQCICMNLQDHLNGLTETR

SEQ ID NO: 59002 - protein, 42 aa, Homo sapiens
LPQLVDAPKKSEAAVGAEVSMTSPGQSKNFSLKNTNVLPPIV

SEQ ID NO: 59003 - protein, 439 aa, Homo sapiens
LTPLSHEVISRQATINIGTIGHVAHGKSTVVKAISGVHTVRFKNELERNITIKLGYANAKIYQLDDPSCPRPECYRSCGSSMPDEFPTDIPGTKGNFRLVRHVSFVDCPGHDILMATMLNGAAVMDAALLLIAGNESCPQPQTSEHLAAIEIMKLKHILILQNKIDLVKERQAKEQYEQILAFVQGTVAEGAPIIPISAQLKYNIEVVCEYIVKKIPVPPRDFTSEPRLIVIRSFDVNKPGCEVDDLKGGVAGGSILKGVLKVGQETEVRPGIVSKDSEGKLMCKSIFSKIVSLFAEHNDLQYAAPGGLIGVGTKIDPTLCRADRMVGQILGAVGALPEIFTELEISYFLLRRLLGVRTEGDKKAAKVQKLSKNEVLMVNIGSLSTGGRVSAVKADLGKIVLTNPVCTEIHLIHLDLIKELEWGPVLTNETQRKSAANF

SEQ ID NO: 59004 - protein, 10 aa, Homo sapiens
ILNIRLQVHI

SEQ ID NO: 59005 - protein, 33 aa, Homo sapiens
MKTPDEIMSGRTDRLEHLESQELDEQIYQEDEC

SEQ ID NO: 59006 - protein, 58 aa, Homo sapiens
MHTRVGNLMNRTRTGRLAGGSCRGSVKALCCCPWGPEGLPSMPTGRREGTDPLAPTSF

SEQ ID NO: 59007 - protein, 694 aa, Homo sapiens
VDKSPEMWCIVLFSLLAWVYAEPTMYGEILSPNYPQAYPSEVEKSWDIEVPEGYGIHLYFTHLDIELSENCAYDSVQIISGDTEEGRLCGQRSSNNPHSPIVEEFQVPYNKLQVIFKSDFSNEERFTGFAAYYVATDINECTDFVDVPCSHFCNNFIGGYFCSCPPEYFLHDDMKNCGVNCSGDVFTALIGEIASPNYPKPYPENSRCEYQIRLEKGFQVVVTLRREDFDVEAADSAGNCLDSLVFVAGDRQFGPYCGHGFPGPLNIETKSNALDIIFQTDLTGQKKGWKLRYHGDPMPCPKEDTPNSVWEPAKAKYVFRDVVQITCLDGFEVVEGRVGATSFYSTCQSNGKWSNSKLKCQPVDCGIPESIENGKVEDPESTLFGSVIRYTCEEPYYYMENGGGGEYHCAGNGSWVNEVLGPELPKCVPVCGVPREPFEEKQRIIGGSDADIKNFPWQVFFDNPWAGGALINEYWVLTAAHVVEGNREPTMYVGSTSVQTSRLAKSKMLTPEHVFIHPGWKLLEVPEGRTNFDNDIALVRLKDPVKMGPTVSPICLPGTSSDYNLMDGDLGLISGWGRTEKRDRAVRLKAARLPVAPLRKCKEVKVEKPTADAEAYVFTPNMICAGGEKGMDSCKGDSGGAFAVQDPNDKTKFYAAGLVSWGPQCGTYGLYTRVKNYVDWIMKTMQENSTPRED

SEQ ID NO: 59008 - protein, 30 aa, Homo sapiens
IEFDFLGYAIVRFNQYFKMKPEVTALKVPE

SEQ ID NO: 59009 - protein, 13 aa, Homo sapiens
LDILSPSPPHSVQ

SEQ ID NO: 59010 - protein, 276 aa, Homo sapiens
VMSAEVKVTGQNQEQFLLLAKSAKGAALATLIHQVLEAPGVYVFGELLDMPNVRELAESDFASTFRLLTVFAYGTYADYLAEARNLPPLTEAQKNKLRHLSVVTLAAKVKCIPYAVLLEALALRNVRQLEDLVIEAVYADVLRGSLDQRNQRLEVDYSIGRDIQRQDLSAIARTLQEWCVGCEVVLSGIEEQVSRANQHKEQQLGLKQQIESEVANLKKTIKVTTAAAAAATSQDPEQHLTELREPAPGTNQRQPSKKASKGKGLRGSAKIWSKSN

SEQ ID NO: 59011 - protein, 36 aa, Homo sapiens
IKKEGRWVIYNDQKVCASEKPPKDLGYIYFYQRVAS

SEQ ID NO: 59012 - protein, 81 aa, Homo sapiens
IHLETMCEVKKIYLQDEFRILKKKSFTFPRDHKSVTADTEMWPVYVELTNEKIYGCDFIVSATGVTPNVEPFLHGNSVSLI

SEQ ID NO: 59013 - protein, 52 aa, Homo sapiens
MRNSILTQVLDQSAGPGLSNLALVKPEKTKAVENYLIQMARYGQLRRCQNKV

SEQ ID NO: 59014 - protein, 13 aa, Homo sapiens
LIRKVFNLYLSKQ

SEQ ID NO: 59015 - protein, 102 aa, Homo sapiens
VGRVHRLLRKGNYAERVGAGAPVYLAAVLEYLTAEILELAGNAARDNKKTRIIPRHLQLAIRNDEELNKLLGKVTIAQGGVLPNIQAVLLPKKTESQKTKSK

SEQ ID NO: 59016 - protein, 5 aa, Homo sapiens
IPDQN

SEQ ID NO: 59017 - protein, 509 aa, Homo sapiens
RPPGQDTSMDDNPFGTRKVRSSFGRGFFKIKSNKRTASAPNLAETEKETAEHLDLAGASSRPKDSQRNSPFQIPPPSPDSKKKSRGIMKLFGKLRRSQSTTFNPDDMSEPEFKRGGTRATAGPRLGWSRDLGQSNSDLDMPFAKWTKEQVCNWLMEQGLGSYLNSGKHWIASGQTLLQASQQDLEKELGIKHSLHRKKLQLALQALGSEEETNHGKLDFNWVTRWLDDIGLPQYKTQFDEGRVDGRMLHYMTVDDLLSLKVVSVLHHLSIKRAIQVLRINNFEPNCLRRRPSDENTIAPSEVQKWTNHRVMEWLRSVDLAEYAPNLRGSGVHGGLMVLEPRFNVETMAQLLNIPPNKTLLRRHLATHFNLLIGAEAQHQKRDAMELPDYVLLTATAKVKPKKLAFSNFGNLRKKKQEDGEEYVCPMELGQASGSASKKGFKPGLDMRLYEEDDLDRLEQMEDSEGTVRQIGAFSEGINNLTHMLKEDDMFKDFAARSPSASITDEDSNV

SEQ ID NO: 59018 - protein, 428 aa, Homo sapiens
KKSRGIMKLFGKLRRSQSTTFNPDDMSEPEFKRGGTRATAGPRLGWSRDLGQSNSDLDMPFAKWTKEQVCNWLMEQGLGSYLNSGKHWIASGQTLLQASQQDLEKELGIKHSLHRKKLQLALQALGSEEETNHGKLDFNWVTRWLDDIGLPQYKTQFDEGRVDGRMLHYMTVDDLLSLKVVSVLHHLSIKRAIQVLRINNFEPNCLRRRPSDENTIAPSEVQKWTNHRVMEWLRSVDLAEYAPNLRGSGVHGGLMVLEPRFNVETMAQLLNIPPNKTLLRRHLATHFNLLIGAEAQHQKRDAMELPDYVLLTATAKVKPKKLAFSNFGNLRKKKQEDGEEYVCPMELGQASGSASKKGFKPGLDMRLYEEDDLDRLEQMEDSEGTVRQIGAFSEGINNLTHMLKEDDMFKDFAARSPSASITDEDSNV

SEQ ID NO: 59019 - protein, 31 aa, Homo sapiens
ITGTSQADCAVLIFAAGVGEFEAGISKNGQT

SEQ ID NO: 59020 - protein, 14 aa, Homo sapiens
IKKVQQLLQEMTAS

SEQ ID NO: 59021 - protein, 23 aa, Homo sapiens
RAIPQGVTRRNGKEQYVPPRSPK

SEQ ID NO: 59022 - protein, 162 aa, Homo sapiens
IAIAPNGALQLASPGTDGVQGLQTLTMTNSGSTQQGTTILQYAQTSDGQQILVPSNQVVVQTASGDMQTYQIRTTPSATSLPQTVVMTSPVTLTSQTTKTDDPQLKREIRLMKNREAARECRRKKKEYVKCLENRVAVLENQNKTLIEELKTLKDLYSNKSV

SEQ ID NO: 59023 - protein, 34 aa, Homo sapiens
LGAGRRPRDTRGVRSSLVTWTVELVSCGSAPCGG

SEQ ID NO: 59024 - protein, 10 aa, Homo sapiens
LPTPDHPCLD

SEQ ID NO: 59025 - protein, 25 aa, Homo sapiens
IPSPSPSPLYSIPLPPPFPILIIWP

SEQ ID NO: 59026 - protein, 17 aa, Homo sapiens
RKLADSKERKEEEVPLY

SEQ ID NO: 59027 - protein, 62 aa, Homo sapiens
LELEKEFLFNMYLTRERRLEISKTINLTDRQVKIWFQNRRMKLKKMNRENRIRELTSNFNFT

SEQ ID NO: 59028 - protein, 4 aa, Homo sapiens
RMEI

SEQ ID NO: 59029 - protein, 13 aa, Homo sapiens
INYEAFLKHILSV

SEQ ID NO: 59030 - protein, 31 aa, Homo sapiens
MSVACQLELFTSSVKGRRKHLLTKGLGSLSC

SEQ ID NO: 59031 - protein, 42 aa, Homo sapiens
TASAEMWAAGQDGHSGSAQQRSPDSDWGSKQGLDRPGEPVGQ

SEQ ID NO: 59032 - protein, 65 aa, Homo sapiens
IDSLKKTQPENVDGNTWAQVIALYPTLVECITCSSSEVCSALKEALVPFKDFMQPPASRVQNGES

SEQ ID NO: 59033 - protein, 26 aa, Homo sapiens
MLLNDRKVFVGRFMSHKEREAELGAT

SEQ ID NO: 59034 - protein, 1220 aa, Homo sapiens
LLEKMTSSDKDFRFMATNDLMTELQKDSIKLDDDSERKVVKMILKLLEDKNGEVQNLAVKCLGPLVSKVKEYQVETIVDTLCTNMLSDKEQLRDISSIGLKTVIGELPPASSGSALAANVCKKITGRLTSAIAKQEDVSVQLEALDIMADMLSRQGGLLVNFHPSILTCLLPQLTSPRLAVRKRTIIALGHLVMSCGNIVFVDLIEHLLSELSKNDSMSTTRTYIQCIAAISRQAGHRIGEYLEKIIPLVVKFCNVDDDELREYCIQAFESFVRRCPKEVYPHVSTIINICLKYLTYDPNYNYDDEDEDENAMDADGGDDDDQGSDDEYSDDDDMSWKVRRAAAKCLDAVVSTRHEMLPEFYKTVSPALISRFKEREENVKADVFHAYLSLLKQTRPVQSWLCDPDAMEQGETPLTMLQSQVPNIVKALHKQMKEKSVKTRQCCFNMLTELVNVLPGALTQHIPVLVPGIIFSLNDKSSSSNLKIDALSCLYVILCNHSPQVFHPHVQALVPPVVACVGDPFYKITSEALLVTQQLVKVIRPLDQPSSFDATPYIKDLFTCTIKRLKAADIDQEVKERAISCMGQIICNLGDNLGSDLPNTLQIFLERLKNEITRLTTVKALTLIAGSPLKIDLRPVLGEGVPILASFLRKNQRALKLGTLSALDILIKNYSDSLTAAMIDAVLDELPPLISESDMHVSQMAISFLTTLAKVYPSSLSKISGSILNELIGLVRSPLLQGGALSAMLDFFQALVVTGTNNLGYMDLLRMLTGPVYSQSTALTHKQSYYSIAKCVAALTRACPKEGPAVVGQFIQDVKNSRSTDSIRLLALLSLGEVGHHIDLSGQLELKSVILEAFSSPSEEVKSAASYALGSISVGNLPEYLPFVLQEITSQPKRQYLLLHSLKEIISSASVVGLKPYVENIWALLLKHCECAEEGTRNVVAECLGKLTLIDPETLLPRLKGYLISGSSYARSSVVTAVKFTISDHPQPIDPLLKNCIGDFLKTLEDPDLNVRRVALVTFNSAAHNKPSLIRDLLDTVLPHLYNETKVRKELIREVEMGPFKHTVDDGLDIRKAAFECMYTLLDSCLDRLDIFEFLNHVEDGLKDHYDIKMLTFLMLVRLSTLCPSAVLQRLDRLVEPLRATCTTKVKANSVKQEFEKQDELKRSAMRAVAALLTIPEAEKSPLMSEFQSQISSNPELAAIFESIQKDSSSTNLESMDTS

SEQ ID NO: 59035 - protein, 365 aa, Homo sapiens
MPKQQPSRQPFTVNSMSGFGMNRNQAFGMNNSLSSNIFNGTDGSENVTGLDLSDFPALADRNRREGSGNPTPLINPLAGRAPYVGMVTKPANEQSQDFSIHNEDFPALPGSSYKDPTSSNDDSKSNLNTSGKTTSSTDGPKFPGDKSSTTQNNNQQKKGIQVLPDGRVTNIPQGMVTDQFGMIGLLTFIRAAETDPGMVHLALGSDLTTLGLNLNSPENLYPKFASPWASSPCRPQDIDFHVPSEYLTNIHIRDKLAAIKLGRYGEDLLFYLYYMNGGDVLQLLAAVELFNRDWRYHKEERVWITRAPGMEPTMKTNTYERGTYYFFDCLNWRKVAKEFHLEYDKLEERPHLPSTFNYNPAQQAF

SEQ ID NO: 59036 - protein, 293 aa, Homo sapiens
LSTQAITLSETAAALDCSLPRLHARQSMRVTLATIAWMVSFVSNYSHTANILPDIENEDFIKDCVRIHNKFRSEVKPTASDMLYMTWDPALAQIAKAWASNCQFSHNTRLKPPHKLHPNFTSLGENIWTGSVPIFSVSSAITNWYDEIQDYDFKTRICKKVCGHYTQVVWADSYKVGCAVQFCPKVSGFDALSNGAHFICNYGPGGNYPTWPYKRGATCSACPNNDKCLDNLCVNRQRDQVKRYYSVVYPGWPIYPRNRYTSLFLIVNSVILILSVIITILVQHKYPNLVLLD

SEQ ID NO: 59037 - protein, 1065 aa, Homo sapiens
LPACLPGATQEKVPGDAERLEARGPGQHRLWRCSCGRGGGLRRQGRGPLSQLSACRAAPLRWLTIWSAGWEAGWSDREDVYKFFCGIRGHAYYNQKTTSITARMDEQALLGLNPNADSDFRQRALAYFEQLKISPDAWQVCAEALAQRTYSDDHVKFFCFQVLEHQVKYKYSELTTVQQQLIRETLISWLQAQMLNPQPEKTFIRNKAAQVFALLFVTEYLTKWPKFFFDILSVVDLNPRGVDLYLRILMAIDSELVDRDVVHTSEEARRNTLIKDTMREQCIPNLVESWYQILQNYQFTNSEVTCQCLEVVGAYVSWIDLSLIANDRFINMLLGHMSIEVLREEACDCLFEVVNKGMDPVDKMKLVESLCQVLQSAGFFSIDQEEDVDFLARFSKLVNGMGQSLIVSWSKLIKNGDIKNAQEALQAIETKVALMLQLLIHEDDDISSNIIGFCYDYLHILKQLTVLSDQQKANVEAIMLAVMKKLTYDEEYNFENEGEDEAMFVEYRKQLKLLLDRLAQVSPELLLASVRRVFSSTLQNWQTTRFMEVEVAIRLLYMLAEALPVSHGAHFSGDVSKASALQDMMRTLVTSGVSSYQHTSVTLEFFETVVRYEKFFTVEPQHIPCVLMAFLDHRGLRHSSAKVRSRTAYLFSRFVKSLNKQMNPFIEDILNRIQDLLELSPPENGHQSLLSSDDQLFIYETAGVLIVNSEYPAERKQALMRNLLTPLMEKFKILLEKLMLAQDEERQASLADCLNHAVGFASRTSKAFSNKQTVKQCGCSEVYLDCLQTFLPALSCPLQKDILRSGVRTFLHRMIICLEEEVLPFIPSASEHMLKDCEAKDLQEFIPLINQITAKFKIQVSPFLQQMFMPLLHAIFEVLLRPAEENDQSAALEKQMLRRSYFAFLQTVTGSGMSEVIANQGAENVERVLVTVIQGAVEYPDPIAQKTCFIILSKLVELWGGKDGPVGFADFVYKHIVPACFLAPLKQTFDLADAQTVLALSECAVTLKTIHLKRGPECVQYLQQEYLPSLQVAPEIIQEFCQALQQPDAKVFKNYLKVFFQRAKP

SEQ ID NO: 59038 - protein, 5 aa, Homo sapiens
METAL

SEQ ID NO: 59039 - protein, 8 aa, Homo sapiens
KTLQMEYS

SEQ ID NO: 59040 - protein, 348 aa, Homo sapiens
ISRGELLLKMNKPLKAKEAYLKALELDRNNADLWYNLAIVHIELKEPNEALKNFNRALELNPKHKLALFNSAIVMQESGEVKLRPEARKRLLSYINEEPLDANGYFNLGMLAMDDKKDNEAEIWMKKAIKLQADFRSALFNLALLYSQTAKELKALPILEELLRYYPDHIKGLILKGDILMNQKKDILGAKKCFERILEMDPSNVQGKHNLCVVYFEEKDLLKAERCLLETLALAPHEEYIQRHLNIVRDKISSSSFIEPIFPTSKISSVEGKKIPTESVKEIRGESRQTQIVKTSDNKSQSKSNKQLGKNGDEETPHKTTKDIKEIEKKRVAALKRLEEIERILNGE

SEQ ID NO: 59041 - protein, 100 aa, Homo sapiens
LGIFENQDRKHRTYVYVLTVTEILEDWEDSVNIGRKREWFKVEDAIKVLQCHKPVHAEYLEKLKLGCSPANGNSTVPSLPDNNALFVTAAQTSGLPSSVR

SEQ ID NO: 59042 - protein, 4 aa, Homo sapiens
LCLS

SEQ ID NO: 59043 - protein, 362 aa, Homo sapiens
RKATKKTDKPRQEDKDDLDVTELTNEDLLDQLVKYGVNPGPIVGTTRKLYEKKLLKLREQGTESRSSTPLPTISSSAENTRQNGSNDSDRYSDNEEDSKIELKLEKREPLKGRAKTPVTLKQRRVEHNQSYSQAGITETEWTSGSSKGGPLQALTRESTRGSRRTPRKRVETSEHFRIDGPVISESTPIAETIMASSNESLVVNRVTGNFKHASPILPITEFSDIPRRAPKKPLTRAEVGEKTEERRVERDILKEMFPYEASTPTGISASCRRPIKGAAGRPLELSDFRMEESFSSKYVPKYVPLADVKSEKTKKGRSIPVWIKILLFVVVAVFLFLVYQAMETNQVNPFSNFLHVDPRKSN

SEQ ID NO: 59044 - protein, 92 aa, Homo sapiens
ILSSDPSRTHQALGILSKTYDAASYICEAAFDEVKMAAHTMGNATVGRRYLWLKDCKINLASKNKLASTPFKGGTLFGGEVCKVIKKRGNKH

SEQ ID NO: 59045 - protein, 144 aa, Homo sapiens [sequence omitted]

SEQ ID NO: 59046 - protein, 408 aa, Homo sapiens
LERSALEDKERDEDDEDGDGDGDGATGKKKKKKKKKRGPKVQTDPPSVPICDLYPNGVFPKGQECEYPPTQDGRTAAWRTTSEEKKALDQASEEIWNDFREAAEAHRQVRKYVMSWIKPGMTMIEICEKLEDCSRKLIKENGLNAGLAFPTGCSLNNCAAHYTPNAGDTTVLQYDDICKIDFGTHISGRIIDCAFTVTFNPKYDTLLKAVKDATNTGIKCAGIDVRLCDVGEAIQEVMESYEVEIDGKTYQVKPIRNLNGHSIGQYRIHAGKTVPIVKGGEATRMEEGEVYAIETFGSTGKGVVHDDMECSHYMKNFDVGHVPIRLPRTKHLLNVINENFGTLAFCRRWLDRLGESKYLMALKNLCDLGIVDPYPPLCDIKGSYTAQFEHTILLRPTCKEVVSRGDDY

SEQ ID NO: 59047 - protein, 118 aa, Homo sapiens
LRLGTCGTCCSHEGRAAAWSAESSLQHSAVVTMSLPLNPKPFLNGLTGKPVMVKLKWGMEYKGYLVSVDGYMNMQLANTEEYIDGALSGHLGEVLIRCNNVLYIRGVEEEEEDGEMRE

SEQ ID NO: 59048 - protein, 383 aa, Homo sapiens
TVYGSNDQDPYVTLKDTEQYEREDFLIKPSDNLIVCGRAEQDQCNLEVHVYNQEEDSFYVHHDILLSAYPLSVEWLNFDPSPDDSTGNYIAVGNMTPVIEVWDLDIVDSLEPVFTLGSKLSKKKKKKGKKSSSAEGHTDAVLDLSWNKLIRNVLASASADNTVILWDMSLGKPAASLAVHTDKVQTLQFHPFEAQTLISGSYDKSVALYDCRSPDESHRMWRFSGQIERVTWNHFSPCHFLASTDDGFVYNLDARSDKPIFTLNAHNDEISGLDLSSQIKGCLVTASADKYVKIWDILGDRPSLVHSRDMKMGVLFCSSCCPDLPFIYAFGGQKEGLRVWDISTVSSVNEAFGRRERLVLGSARNSSISGPFGSRSSDTPMES

SEQ ID NO: 59049 - protein, 168 aa, Homo sapiens
KMAAAGAFRLRRAASALLLRSPRLPARELSAPARLYHKKVVDHYENPRNVGSLDKTSKNVGTGLVGAPACGDVMKLQIQVDEKGKIVDARFKTFGCGSAIASSSLATEWVKGKTVEEALTIKNTDIAKELCLPPVKLHCSMLAEDAIKAALADYKLKQEPKKGEAEKK

SEQ ID NO: 59050 - protein, 11 aa, Homo sapiens
VSSQTKTVRKN

SEQ ID NO: 59051 - protein, 25 aa, Homo sapiens
IKERIERVKKAREKHERAQREEEAR

SEQ ID NO: 59052 - protein, 479 aa, Homo sapiens
IFINNEWHDAVSRKTFPTVNPSTGEVICQVAEGDKEDVDKAVKAARAAFQLGSPWRRMDASHRGRLLNRLADLIERDRTYLAALETLDNGKPYVISYLVDLDMVLKCLRYYAGWADKYHGKTIPIDGDFFSYTRHEPVGVCGQIIPWNFPLLMQAWKLGPALATGNVVVMKVAEQTPLTALYVANLIKEAGFPPGVVNIVPGFGPTAGAAIASHEDVDKVAFTGSTEIGRVIQVAAGSSNLKRVTLELGGKSPNIIMSDADMDWAVEQAHFALFFNQGQCCCAGSRTFVQEDIYDEFVERSVARAKSRVVGNPFDSKTEQGPQVDETQFKKILGYINTGKQEGAKLLCGGGIAADRGYFIQPTVFGDVQDGMTIAKEEIFGPVMQILKFKTIEEVVGRANNSTYGLAAAVFTKDLDKANYLSQALQAGTVWVNCYDVFGAQSPFGGYKMSGSGRELGEYGLQAYTEVKTVTVKVPQKNS

SEQ ID NO: 59053 - protein, 15 aa, Homo sapiens
KMSDLFESSIQPKSR

SEQ ID NO: 59054 - protein, 17 aa, Homo sapiens
MATHYYDLALAFPYNHV

SEQ ID NO: 59055 - protein, 52 aa, Homo sapiens
VNFPTPKMKVLTTSPVAPVHRKARLLTRCLLKGAAAAANSLALLLMVEDEMR

SEQ ID NO: 59056 - protein, 244 aa, Homo sapiens
IWAVNAGGEAHVDVHGIHFRKDPLEGRVGRASDYGMKLPILRSNPEDQILYQTERYNEETFGYEVPIKEEGDYVLVLKFAEVYFAQSQQKVFDVRLNGHVVVKDLDIFDRVGHSTAHDEIIPMSIRKGKLSVQGEVSTFTGKLYIEFVKGYYDNPKVCALYIMAGTVDDVPKLQPHPGLEKKEEEEEEEEYDEGSNLKKQTNKNRVQSGPRTPNPYASDNSSLMFPILVAFGVFIPTLFCLCRL

SEQ ID NO: 59057 - protein, 180 aa, Homo sapiens
LESQKGIGMNEPLVDCEGYPRSDVDLYQVRTARHNIICLQNDHKAVMKQVEEALHQLHARDKEKQARDMAEAHKEAMSRKLGQSESQGPPRAFAKVNSISPGSPASIAGLQVDDEIVEFGSVNTQNFQSLHNIGSVVQHSEGKPLNVTVIRRGEKHQLRLVPTRWAGKGLLGCNIIPLQR

SEQ ID NO: 59058 - protein, 6 aa, Homo sapiens
LSGVRR

SEQ ID NO: 59059 - protein, 1031 aa, Homo sapiens
VLGHFGVNESTGLSLEQVKKLKERWGSNELPAEEGKTLLELVIEQFEDLLVRILLLAACISFVLAWFEEGEETITAFVEPFVILLILVANAIVGVWQERNAENAIEALKEYEPEMGKVYRQDRKSVQRIKAKDIVPGDIVEIAVGDKVPADIRLTSIKSTTLRVDQSILTGESVSVIKHTDPVPDPRAVNQDKKNMLFSGTNIAAGKAMGVVVATGVNTEIGKIRDEMVATEQERTPLQQKLDEFGEQLSKVISLICIAVWIINIGHFNDPVHGGSWIRGAIYYFKIAVALAVAAIPEGLPAVITTCLALGTRRMAKKNAIVRSLPSVETLGCTSVICSDKTGTLTTNQMSVCRMFILDRVEGDTCSLNEFTITGSTYAPIGEVHKDDKPVNCHQYDGLVELATICALCNDSALDYNEAKGVYEKVGEATETALTCLVEKMNVFDTELKGLSKIERANACNSVIKQLMKKEFTLEFSRDRKSMSVYCTPNKPSRTSMSKMFVKGAPEGVIDRCTHIRVGSTKVPMTSGVKQKIMSVIREWGSGSDTLRCLALATHDNPLRREEMHLEDSANFIKYETNLTFVGCVGMLDPPRIEVASSVKLCRQAGIRVIMITGDNKGTAVAICRRIGIFGQDEDVTSKAFTGREFDELNPSAQRDACLNARCFARVEPSHKSKIVEFLQSFDEITAMTGDGVNDAPALKKAEIGIAMGSGTAVAKTASEMVLADDNFSTIVAAVEEGRAIYNNMKQFIRYLISSNVGEVVCIFLTAALGFPEALIPVQLLWVNLVTDGLPATALGFNPPDLDIMNKPPRNPKEPLISGWLFFRYLAIGCYVGAATVGAAAWWFIAADGGPRVSFYQLSHFLQCKEDNPDFEGVDCAIFESPYPMTMALSVLVTIEMCNALNSLSENQSLLRMPPWENIWLVGSICLSMSLHFLILYVEPLPLIFQITPLNVTQWLMVLKISLPVILMDETLKFVARNYLEPGKECVQPATKSCSFSACTDGISWPFVLLIMPLVIWVYSTDTNFSDMFWS

SEQ ID NO: 59060 - protein, 74 aa, Homo sapiens
KKRKKLKKKGKEKAEAQQSIIRKVVDPETGRTRLIKGDGEVLEEIVTKERHREINKQATRGDCLAFQMRAGLLP

SEQ ID NO: 59061 - protein, 33 aa, Homo sapiens
LIIEAPQVPPYSTFGESSFNNELPQDSQEVTCT

SEQ ID NO: 59062 - protein, 5 aa, Homo sapiens
LKVSA

SEQ ID NO: 59063 - protein, 333 aa, Homo sapiens
ITLLGLAVNVVTTLVLISYCPTATEEAPYWTYLLCALGLFIYQSLDAIDGKQARRTNSCSPLGELFDHGCDSLSTVFMAVGASIAARLGTYPDWFFFCSFIGMFVFYCAHWQTYVSGMLRFGKVDVTEIQIALVIVFVLSAFGGATMWDYTIPILEIKLKILPVLGFLGGVIFSCSNYFHVILHGGVGKNGSTIAGTSVLSPGLHIGLIIILAIMIYKKSATDVFEKHPCLYILMFGCVFAKVSQKLVVAHMTKSELYLQDTVFLGPGLLFLDQYFNNFIDEYVVLWMAMVISSFDMVIYFSALCLQISRHLHLNIFKTACHQAPEQVHKHID

SEQ ID NO: 59064 - protein, 238 aa, Homo sapiens
LNHMDDHTLPGKYGIGFTNMVERTTPGSKDLSSKEFREGGRILVQKLQKYQPRIAVFNGKCIYEIFSKEVFGVKVKNLEFGLQPHKIPDTETLCYVMPSSSARCAQFPRAQDKVHYYIKLKDLRDQLKGIERNMDVQEVQYTFDLQLAQEDAKKMAVKEEKYDPGYEAAYGGAYGENPCSSEPCGFSSNGLIESVELRGESAFSGIPNGQWMTQSFTDQIPSFSNHCGTQEQEEESHA

SEQ ID NO: 59065 - protein, 178 aa, Homo sapiens
IYLKEEKGVTLLYYGRYNSSCISKPEQCGPEGVTFSFFWKTQGEQSRPIPSAYGGQVISNGFKVCSSGGRGSVELYTRDNSMTWEASFSPPGPYWTHVLFTWKSKEGLKVYVNGTLSTSDPSGKVSRDYGESNVNLVIGSEQDQAKCYENGAFDEFIIWERALTPDEIAMYFTAAIGQ

SEQ ID NO: 59066 - protein, 66 aa, Homo sapiens
ILWTEAPVLAFGVQDHWDQAVISMPESQPSTVTPRHLGRPGQTESREAPALPLPHCPEPKWGSERP

SEQ ID NO: 59067 - protein, 406 aa, Homo sapiens
IHPQNNSICCTKCHKGTYLYNDCPGPGQDTDCRECESGSFTASENHLRHCLSCSKCRKEMGQVEISSCTVDRDTVCGCRKNQYRHYWSENLFQCFNCSLCLNGTVHLSCQEKQNTVCTCHAGFFLRENECVSCSNCKKSLECTKLCLPQIENVKGTEDSGTTVLLPLVIFFGLCLLSLLFIGLMYRYQRWKSKLYSIVCGKSTPEKEGELEGTTTKPLAPNPSFSPTPGFTPTLGFSPVPSSTFTSSSTYTPGDCPNFAAPRREVAPPYQGADPILATALASDPIPNPLQKWEDSAHKPQSLDTDDPATLYAVVENVPPLRWKEFVRRLGLSDHEIDRLELQNGRCLREAQYSMLATWRRRTPRREATLELLGRVLRDMDLLGCLEDIEEALCGPAALPPAPSLLR

SEQ ID NO: 59068 - protein, 1252 aa, Homo sapiens
IQDYDLFKQSYWNHRELMRGEEGRPGKKLKKVKLRKLERPPETPTVDPTVKYERQPEYLDATGGTLHPYQMEGLNWLRFSWAQGTDTILADEMGLGKTVQTAVFLYSLYKEGHSKGPFLVSAPLSTIINWEREFEMWAPDMYVVTYVGDKDSRAIIRENEFSFEDNAIRGGKKASRMKKEASVKFHVLLTSYELITIDMAILGSIDWACLIVDEAHRLKNNQSKFFRVLNGYSLQHKLLLTGTPLQNNLEELFHLLNFLTPERFHNLEGFLEEFADIAKEDQIKKLHDMLGPHMLRRLKADVFKNMPSKTELIVRVELSPMQKKYYKYILTRNFEALNARGGGNQVSLLNVVMDLKKCCNHPYLFPVAAMEAPKMPNGMYDGSALIRASGKLLLLQKMLKNLKEGGHRVLIFSQMTKMLDLLEDFLEHEGYKYERIDGGITGNMRQEAIDRFNAPGAQQFCFLLSTRAGGLGINLATADTVIIYDSDWNPHNDIQAFSRAHRIGQNKKVMIYRFVTRASVEERITQVAKKKMMLTHLVVRPGLGSKTGSMSKQELDDILKFGTEELFKDEATDGGGDNKEGEDSSVIHYDDKAIERLLDRNQDETEDTELQGMNEYLSSFKVAQYVVREEEMGEEEEVEREIIKQEESVDPDYWEKLLRHHYEQQQEDLARNLGKGKRIRKQVNYNDGSQEDRDWQDDQSDNQSDYSVASEEGDEDFDERSEAPRRPSRKGLRNDKDKPLPPLLARVGGNIEVLGFNARQRKAFLNAIMRYGMPPQDAFTTQWLVRDLRGKSEKEFKAYVSLFMRHLCEPGADGAETFADGVPREGLSRQHVLTRIGVMSLIRKKVQEFEHVNGRWSMPELAEVEENKKMSQPGSPSPKTPTPSTPGDTQPNTPAPVPPAEDGIKIEENSLKEEESIEGEKEVKSTAPETAIECTQAPAPASEDEKVVVEPPEGEEKVEKAEVKERTEEPMETEPKGAADVEKVEEKSAIDLTPIVVEDKEEKKEEEEKKEVMLQNGETPKDLNDEKQKKNIKQRFMFNIADGGFTELHSLWQNEERAATVTKKTYEIWHRRHDYWLLAGIINHGYARWQDIQNDPRYAILNEPFKGEMNRGNFLEIKNKFLARRFKLLEQALVIEEQLRRAAYLNMSEDPSHPSMALNTRFAEVECLAESHQHLSKESMAGNKPANAVLHKVLKQLEELLSDMKADVTRLPATIARIPPVAVRLQMSERNILSRLANRAPEPTPQQVAQQQ

SEQ ID NO: 59069 - protein, 25 aa, Homo sapiens
IRSSRPPPAKRKKSQSRGNSQLLLS

SEQ ID NO: 59070 - protein, 233 aa, Homo sapiens
LMDPFAIHRQHMSRMLSGGFGYSPFLSITDGNMPGTRPASRRMQQAGAVSPFGMLGMSGGFMDMFGMMNDMIGNMEHMTAGGNCQTFSSSTVISYSNTGDGAPKVYQETSEMRSAPGGIRETRRTVRDSDSGLEQMSIGHHIRDRAHILQRSRNHRTGDQEERQDYINLDESEAAAFDDEWRRETSRFRQQRPLEFRRLESSGAGGRRAEGPPRLAIQGPEDSPSRQSRRYDW

SEQ ID NO: 59071 - protein, 33 aa, Homo sapiens
LAFLLSLISLFQRRPNLKSFPGSGSVHLIRQPK

SEQ ID NO: 59072 - protein, 413 aa, Homo sapiens
LRREIRPGLPESEPRPPRPPAALTADQPPPRRLSESRGGGGMSEAGEATTTTTTTLPQAPTEAAAAAPQDPAPKSPVGSGAPQAAAPAPAAHVAGNPGGDAAPAATGTAAAASLATAAGSEDAEKKVLATKVLGTVKWFNVRNGYGFINRNDTKEDVFVHQTAIKKNNPRKYLRSVGDGETVEFDVVEGEKGAEAANVTGPDGVPVEGSRYAADRRRYRRGYYGRRRGPPRNYAGEEEEEGSGSSEGFDPPATDRQFSGARNQLRRPQYRPQYRQRRFPPYHVGQTFDRRSRVLPHPNRIQAGEIGEMKDGVPEGAQLQGPVHRNPTYRPRYRSRGPPRPRPAPAVGEAEDKENQQATSGPNQPSVRRGYRRPYNYRRRPRPPNAPSQDGKEAKAGEAPTENPAPPTQQSSAE

SEQ ID NO: 59073 - protein, 4 aa, Homo sapiens
LDRF

SEQ ID NO: 59074 - protein, 15 aa, Homo sapiens
IKKSTYFSDEEELSD

SEQ ID NO: 59075 - protein, 665 aa, Homo sapiens
LKEIWIILETNLERKRMASVSALTEELDSITSELHAVEIQIQELTERQQELIQKKKVLTKKIKQCLEDSDAGASNEYDSSPAAWNKEDFPWSGKVKDILQNVFKLEKFRPLQLETINVTMAGKEVFLVMPTGGGKSLCYQLPALCSDGFTLVICPLISLMEDQLMVLKQLGISATMLNASSSKEHVKWVHAEMVNKNSELKLIYVTPEKIAKSKMFMSRLEKAYEARRFTRIAVDEVHCCSQWGHDFRPDYKALGILKRQFPNASLIGLTATATNHVLTDAQKILCIEKCFTFTASFNRPNLYYEVRQKPSNTEDFIEDIVKLINGRYKGQSGIIYCFSQKDSEQVTVSLQNLGIHAGAYHANLEPEDKTTVHRKWSANEIQVVVATVAFGMGIDKPDVRFVIHHSMSKSMENYYQESGRAGRDDMKADCILYYGFGDIFRISSMVVMENVGQQKLYEMVSYCQNISKCRRVLMAQHFDEVWNSEACNKMCDNCCKDSAFERKNITEYCRDLIKILKQAEELNEKLTPLKLIDSWMGKGAAKLRVAGVVAPTLPREDLEKIIAHFLIQQYLKEDYSFTAYATISYLKIGPKANLLNNEAHAITMQVTKSTQNSFRAESSQTCHSEQGDKKMEEKNSGNFQKKAANMLQQSGSKNTGAKKRKIDDA

SEQ ID NO: 59076 - protein, 25 aa, Homo sapiens
RNNSSLMVPKVQFMTPEGNQNTSES

SEQ ID NO: 59077 - protein, 27 aa, Homo sapiens
LPPPLSTQPILSPVQPNPFPAGFSPVP

SEQ ID NO: 59078 - protein, 5 aa, Homo sapiens
IPHHG

SEQ ID NO: 59079 - protein, 96 aa, Homo sapiens
IHHYREQIKRVKDSEDVPMVLVGNKCDLPSRTVDTKQAQDLARSYGIPFIETSAKTRQGVDDAFYTLVREIRKHKEKMSKDGKKKKKKSKTKCVIM

SEQ ID NO: 59080 - protein, 197 aa, Homo sapiens
LPLLGPHCPQKAAAVIMGNIFGNLLKSLIGKKEMRILMVGLDAAGKTTILYKLKLGEIVTTIPTIGFNVETVEYKNISFTVWDVGGQDKIRPLWRHYFQNTQGLIFVVDSNDRERVNEAREELMRMLAEDELRDAVLLVFANKQDLPNAMNAAEITDKLGLHSLRHRNWYIQATCATSGDGLYEGLDWLANQLKNKK

SEQ ID NO: 59081 - protein, 169 aa, Homo sapiens
TLSWLPPPEQPVLVPRLPAPRPVMTLRPSLLPLHLLLLLLLSAAVCRAEAGLETESPVRTLQVETLVEPPEPCAEPAAFGDTLHIHYTGSLVDGRIIDTSLTRDPLVIELGQKQVIPGLEQSLLDMCVGEKRRAIIPSHLAYGKRGFPPSVPGTKDNLMRPPGMTSSSQ

SEQ ID NO: 59082 - protein, 220 aa, Homo sapiens
LPPPEQPVLVPRLPAPRPVMTLRPSLLPLHLLLLLLLSAAVCRAEAGLETESPVRTLQVETLVEPPEPCAEPAAFGDTLHIHYTGSLVDGRIIDTSLTRDPLVIELGQKQVIPGLEQSLLDMCVGEKRRAIIPSHLAYGKRGFPPSVPADAVVQYDVELIALIRANYWLKLVKGILPLVGMAMVPALLGLIGYHLYRKANRPKVSKKKLKEEKRNKSKKK

SEQ ID NO: 59083 - protein, 332 aa, Homo sapiens
RLLFERFIAKPCALCIGIEDSGPYQAQPNAILEKVFISITKYPDKKRLEGLSKQLDWNVRKIQCWFRHRRNQDKPPTLTKFCESMWRFTFYLCIFCYGIRFLWSSPWFWDIRQCWHNYPFQPLSSGLYHYYIMELAFYWSLMFSQFTDIKRKDFLIMFVHHLVTIGLISFSYINNMVRVGTLIMCLHDVSDFLLEAAKLANYAKYQRLCDTLFVIFSAVFMVTRLGIYPFWILNTTLFESWEIIGPYASWWLLNGLLLTLQLLHVIWSYLIARIALKALIRGKVSKDDRSDVESSSEEEDVTTCTKSPCDSSSSNGANRVNGHMGGSYWAEE

SEQ ID NO: 59084 - protein, 663 aa, Homo sapiens
IRHRADHPPAEVTSHAASGAKADQEEQIHPRSRLRSPPEALVQGRYPHIKDGEDLKDHSTESKKMENCLGESRHEVEKSEISENTDASGKIEKYNVPLNRLKMMFEKGEPTQTKILRAQSRSASGRKISENSYSLDDLEIGPGQLSSSTFDSEKNESRRNLELPRLSETSIKDRMAKYQAAVSKQSSSTNYTNELKASGGEIKIHKMEQKENVPPGPEVCITHQEGEKISANENSLAVRSTPAEDDSRDSQVKSEVQQPVHPKPLSPDSRASSLSESSPPKAMKKFQAPARETCVECQKTVYPMERLLANQQVFHISCFRCSYCNNKLSLGTYASLHGRIYCKPHFNQLFKSKGNYDEGFGHRPHKDLWASKNENEEILERPAQLANARETPHSPGVEDAPIAKVGVLAASMEAKASSQQEKEDKPAETKKLRIAWPPPTELGSSGSALEEGIKMSKPKWPPEDEISKPEVPEDVDLDLKKLRRSSSLKERSRPFTVAASFQSTSVKSPKTVSPPIRKGWSMSEQSEESVGGRVAERKQVENAKASKKNGNVGKTTWQNKESKGETGKRSKEGHSLEMENENLVENGADSDEDDNSFLKQQSPQEPKSLNWSSFVDNTFAEEFTTQNQKSQDVELWEGEVVKELSVEEQIKRNRYYDEDEDEE

SEQ ID NO: 59085 - protein, 14 aa, Homo sapiens
MKAETNDSYHIILK

SEQ ID NO: 59086 - protein, 9 aa, Homo sapiens
LGLLPLLLK

SEQ ID NO: 59087 - protein, 213 aa, Homo sapiens
VSDHSQSRGPGGLSLSGGTVCDMGKKTKRTADSSSSEDEEEYVVEKVLDRRVVKGQVEYLLKWKGFSEEHNTWEPEKNLDCPELISEFMKKYKKMKEGENNKPREKSESNKRKSNFSNSADDIKSKKKREQSNDIARGFERGLEPEKIIGATDSCGDLMFLMKWKDTDEADLVLAKEANVKCPQIVIAFYEERLTWHAYPEDAENKEKETAKS

SEQ ID NO: 59088 - protein, 8 aa, Homo sapiens
IDRLRVAL

SEQ ID NO: 59089 - protein, 39 aa, Homo sapiens
KLDLKTKSENGLEFTSSDSANTVATKVMGSLETKYRWTE

SEQ ID NO: 59090 - protein, 118 aa, Homo sapiens
ITSEIPQTERMQKRAERFNVPVSLESKKAARAARFGISSVPTKGLSSDNKPMVNLDKLKERAQRFGLNVSSISRKSEDDEKLKKRKERFGIVTSSAGTGTTEDTEAKKRKRAERFGIA

SEQ ID NO: 59091 - protein, 15 aa, Homo sapiens
KPEDITEALSLRSAG

SEQ ID NO: 59092 - protein, 20 aa, Homo sapiens
RSVGTPCSTILSSPSWPVRP

SEQ ID NO: 59093 - protein, 8 aa, Homo sapiens
RNCISGRC

SEQ ID NO: 59094 - protein, 33 aa, Homo sapiens
IITVLKSVPFTARTAKRGSRFFCDAAHHDESNC

SEQ ID NO: 59095 - protein, 1069 aa, Homo sapiens
LGGLGSGSGSVAPGQGRAGAMGSRTPESPLHAVQLRWGPRRRPPLLPLLLLLLPPPPRVGGFNLDAEAPAVLSGPPGSFFGFSVEFYRPGTDGVSVLVGAPKANTSQPGVLQGGAVYLCPWGASPTQCTPIEFDSKGSRLLESSLSSSEGEEPVEYKSLQWFGATVRAHGSSILACAPLYSWRTEKEPLSDPVGTCYLSTDNFTRILEYAPCRSDFSWAAGQGYCQGGFSAEFTKTGRVVLGGPGSYFWQGQILSATQEQIAESYYPEYLINLVQGQLQTRQASSIYDDSYLGYSVAVGEFSGDDTEDFVAGVPKGNLTYGYVTILNGSDIRSLYNFSGEQMASYFGYAVAATDVNGDGLDDLLVGAPLLMDRTPDGRPQEVGRVYVYLQHPAGIEPTPTLTLTGHDEFGRFGSSLTPLGDLDQDGYNDVAIGAPFGGETQQGVVFVFPGGPGGLGSKPSQVLQPLWAASHTPDFFGSALRGGRDLDGNGYPDLIVGSFGVDKAVVYRGRPIVSASASLTIFPAMFNPEERSCSLEGNPVACINLSFCLNASGKHVADSIGFTVELQLDWQKQKGGVRRALFLASRQATLTQTLLIQNGAREDCREMKIYLRNESEFRDKLSPIHIALNFSLDPQAPVDSHGLRPALHYQSKSRIEDKAQILLDCGEDNICVPDLQLEVFGEQNHVYLGDKNALNLTFHAQNVGEGGAYEAELRVTAPPEAEYSGLVRHPGNFSSLSCDYFAVNQSRLLVCDLGNPMKAGASLWGGLRFTVPHLRDTKKTIQFDFQILSKNLNNSQSDVVSFRLSVEAQAQVTLNGVSKPEAVLFPVSDWHPRDQPQKEEDLGPAVHHVYELINQGPSSISQGVLELSCPQALEGQQLLYVTRVTGLNCTTNHPINPKGLELDPEGSLHHQQKREAPSRSSASSGPQILKCPEAECFRLRCELGPLHQQESQSLQLHFRVWAKTFLQREHQPFSLQCEAVYKALKMPYRILPRQLPQKERQVATAVQWTKAEGSYGVPLWIIILAILFGLLLLGLLIYILYKLGFFKRSLPYGTAMEKAQLKPPATSDA

SEQ ID NO: 59096 - protein, 754 aa, Homo sapiens
KLVATFRQILQGEKKAVMEQFRHLPMPFHWKQEELKFKTGLRRLQHRVGEIHLLREALQKGAEAGQVSLHSLIETPANGTGPSEALAMLLQETTGELEAAKALVLKRIQIWKRQQQLAGNGAPFEESLAPLQERCESLVDIYSQLQQEVGAAGGELEPKTRASLTGRLDEVLRTLVTSCFLVEKQPPQVLKTQTKFQAGVRFLLGLRFLGAPAKPPLVRADMVTEKQARELSVPQGPGAGAESTGEIINNTVPLENSIPGNCCSALFKNLLLKKIKRCERKGTESVTEEKCAVLFSASFTLGPGKLPIQLQALSLPLVVIVHGNQDNNAKATILWDNAFSEMDRVPFVVAERVPWEKMCETLNLKFMAEVGTNRGLLPEHFLFLAQKIFNDNSLSMEAFQHRSVSWSQFNKEILLGRGFTFWQWFDGVLDLTKRCLRSYWSDRLIIGFISKQYVTSLLLNEPDGTFLLRFSDSEIGGITIAHVIRGQDGSPQIENIQPFSAKDLSIRSLGDRIRDLAQLKNLYPKKPKDEAFRSHYKPEQMGKDGRGYVPATIKMTVERDQPLPTPELQMPTMVPSYDLGMAPDSSMSMQLGPDMVPQVYPPHSHSIPPYQGLSPEESVNVLSAFQEPHLQMPPSLGQMSLPFDQPHPQGLLPCQPQEHAVSSPDPLLCSDVTMVEDSCLSQPVTAFPQGTWIGEDIFPPLLPPTEQDLTKLLLEGQGESGGGSLGAQPLLQPSHYGQSGISMSHMDLRANPSW

SEQ ID NO: 59097 - protein, 570 aa, Homo sapiens
LCVPPSRPVPGSPRSLSAMRLLPLAPGRLRRGSPRHLPSCSPALLLLVLGGCLGVFGVAAGTRRPNVVLLLTDDQDEVLGGMTPLKKTKALIGEMGMTFSSAYVPSALCCPSRASILTGKYPHNHHVVNNTLEGNCSSKSWQKIQEPNTFPAILRSMCGYQTFFAGKYLNEYGAPDAGGLEHVPLGWSYWYALEKNSKYYNYTLSINGKARKHGENYSVDYLTDVLANVSLDFLDYKSNFEPFFMMIATPAPHSPWTAAPQYQKAFQNVFAPRNKNFNIHGTNKHWLIRQAKTPMTNSSIQFLDNAFRKRWQTLLSVDDLVEKLVKRLEFTGELNNTYIFYTSDNGYHTGQFSLPIDKRQLYEFDIKVPLLVRGPGIKPNQTSKMLVANIDLGPTILDIAGYDLNKTQMDGMSLLPILRGASNLTWRSDVLVEYQGEGRNVTDPTCPSLSPGVSQCFPDCVCEDAYNNTYACVRTMSALWNLQYCEFDDQEVFVEVYNLTADPDQITNIAKTIDPELLGKMNYRLMMLQSCSGPTCRTPGVFDPGYRFDPRLMFSNRGSVRTRRFSKHLL

SEQ ID NO: 59098 - protein, 11 aa, Homo sapiens
KESMLGNLAAE

SEQ ID NO: 59099 - protein, 926 aa, Homo sapiens
KTDVCTVHLPNDFPTCLTSESKVYQPVSCPLSDLSENVESVVNEEKITESSLVEITEHKDFTLKTEELIESPKLESSEGEIIQTVDRQSVKSPEVQLLGHVETEDVEIIATCDTFGNEDFNNIQDSENNLLKNNLLNTKLEKSLEEKNESLTEHPRSTELPKTHIEQIQKHFSEDNNEMIPMECDSFCSDQNESEVEPSVNADLKQMNENSVTHCSENNMPSSDLADEKVETVSQPSESPKDTIDKTKKPRTRRSRFHSPSTTWSPNKDTPQEKKRPQSPSPRRETGKESRKSQSPSPKNESARGRKKSRSQSPKKDIARERRQSQSRSPKRDTTRESRRSESLSPRRETSRENKRSQPRVKDSSPGEKSRSQSRERESDRDGQRRERERRTRKWSRSRSHSRSPSRCRTKSKSSSFGRIDRDSYSPRWKGRWANDGWRCPRGNDRYRKNDPEKQNENTRKEKNDIHLDADDPNSADKHRNDCPNWITEKINSGPDPRTRNPEKLKESHWEENRNENSGNSWNKNFGSGWVSNRGRGRGNRGRGTYRSSFAYKDQNENRWQNRKPLSGNSNSSGSESFKFVEQQSYKRKSEQEFSFDTPADRSGWTSASSWAVRKTLPADVQNYYSRRGRNSSGPQSGWMKQEEETSGQDSSLKDQTNQQVDGSQLPINMMQPQMNVMQQQMNAQHQPMNIFPYPVGVHAPLMNIQRNPFNIHPQLPLHLHTGVPLMQVATPTSVSQGLPPPPPPPPPSQQVNYIASQPDGKQLQGIPSSSHVSNNMSTPVLPAPTAAPGNTGMVQGPSSGNTSSSSHSKASNAAVKLAESKVSVAVEASADSSKTDKKLQIQEKAAQEVKLAIKPFYQNKDITKEEYKEIVRKAVDKVCHSKSGEVNSTKVANLVKAYVDKYKYSRKGSQKKTLEEPVSTEKNIG

SEQ ID NO: 59100 - protein, 488 aa, Homo sapiens
IMMHFKSGLELTELQNMTVPEDDNISNDSNDFTEVENGQINSKFISDRESRRSLTNSHLEKKKCDEYIPGTTSLGMSVFNLSNAIMGSGILGLAFALANTGILLFLVLLTSVTLLSIYSINLLLICSKETGCMVYEKLGEQVFGTTGKFVIFGATSLQNTGAMLSYLFIVKNELPSAIKFLMGKEETFSAWYVDGRVLVVIVTFGIILPLCLLKNLGYLGYTSGFSLSCMVFFLIVVIYKKFQIPCIVPELNSTISANSTNADTCTPKYVTFNSKTVYALPTIAFAFVCHPSVLPIYSELKDRSQKKMQMVSNISFFAMFVMYFLTAIFGYLTFYDNVQSDLLHKYQSKDDILILTVRLAVIVAVILTVPVLFFTVRSSLFELAKKTKFNLCRHTVVTCILLVVINLLVIFIPSMKDIFGVVGVTSANMLIFILPSSLYLKITDQDGDKGTQRIWAALFLGLGVLFSLVSIPLVIYDWACSSSSDEGH

SEQ ID NO: 59101 - protein, 13 aa, Homo sapiens
LLLDLGKFFVCFL

SEQ ID NO: 59102 - protein, 5 aa, Homo sapiens
IFKMQ

SEQ ID NO: 59103 - protein, 504 aa, Homo sapiens
VRLQEGNESLTVEVSIDRNPPQLQGFRKFNILTSNQKTLTPEKGQSQGLIWDFGYLTLVEQRSGGSGKGSNKGPLGVTEELHIISFTVKYTYQGLKQELKTDTLPVVIISNMNQLSIAWASVLWFNLLSPNLQNQQFFSNPPKAPWSLLGPALSWQFSSYVGRGLNSDQLSMLRNKLFGQNCRTEDPLLSWADFTKRESPPGKLPFWTWLDKILELVHDHLKDLWNDGRIMGFVSRSQERRLLKKTMSGTFLLRFSESSEGGITCSWVEHQDDDKVLIYSVQPYTKEVLQSLPLTEIIRHYQLLTEENIPENPLRFLYPRIPRDEAFGCYYQEKVNLQERRKYLKHRLIVVSNRQVDELQQPLELKPEPELESLELELGLVPEPELSLDLEPLLKAGLDLGPELESVLESTLEPVIEPTLCMVSQTVPEPDQGPVSQPVPEPDLPCDLRHLNTEPMEIFRNCVKIEEIMPNGDPLLAGQNTVDEVYVSRPSHFYTDGPLMPSDF

SEQ ID NO: 59104 - protein, 18 aa, Homo sapiens
ICSRRRLLLLPLLLPLPP

SEQ ID NO: 59105 - protein, 18 aa, Homo sapiens
LAPHTSRRYLEFLQHGRH

SEQ ID NO: 59106 - protein, 6 aa, Homo sapiens
ILVNCF

SEQ ID NO: 59107 - protein, 13 aa, Homo sapiens
VKSKKREAVAGRS

SEQ ID NO: 59108 - protein, 14 aa, Homo sapiens
ILGPEVEPAAAAVA

SEQ ID NO: 59109 - protein, 94 aa, Homo sapiens
LVPRSLHKMPGEATETVPATEQELPQPQAETGSGTESDSDESVPELEEQDSTQATTQQAQLAAAAEIDEEPVSKAKQSRSEKKMSTRALLQILT

SEQ ID NO: 59110 - protein, 6 aa, Homo sapiens
IWKQIL

SEQ ID NO: 59111 - protein, 952 aa, Homo sapiens
TTAAERSWGLTRRLRGLGPRRRGDLGGTGSLRPASLGAPHGICRFTEWLHINGKRSINLSSFIMEGGLADGEPDRTSLLGDSKDVLGPSTVVANSDESQLLTPGKMSQRQGKEAYPTPTKDLHQPSLSPASPHSQGFERGKEDISQNKDESSLSMSKSKSESKLYNGSEKDSSTSSKLTKKESLKVQKKNYREEKKRATKELLSTITDPSVIVMADWLKIRGTLKSWTKLWCVLKPGVLLIYKTQKNGQWVGTVLLNACEIIERPSKKDGFCFKLFHPLEQSIWAVKGPKGEAVGSITQPLPSSYLIIRATSESDGRCWMDALELALKCSSLLKRTMIREGKEHDLSVSSDSTHVTFYGLLRANNLHSGDNFQLNDSEIERQHFKDQDMYSDKSDKENDQEHDESDNEVMGKSEESDTDTSERQDDSYIEPEPVEPLKETTYTEQSHEELGEAGEASQTETVSEENKSLIWTLLKQVRPGMDLSKVVLPTFILEPRSFLDKLSDYYYHADFLSEAALEENPYFRLKKVVKWYLSGFYKKPKGLKKPYNPILGETFRCLWIHPRTNSKTFYIAEQVSHHPPISAFYVSNRKDGFCLSGSILAKSKFYGNSLSAILEGEARLTFLNRGEDYVMTMPYAHCKGILYGTMTLELGGTVNITCQKTGYSAILEFKLKPFLGSSDCVNQISGKLKLGKEVLATLEGHWDSEVFITDKKTDNSEVFWNPTPDIKQWRLIRHTVKFEEQGDFESEKLWQRVTRAINAKDQTEATQEKYVLEEAQRQAARDRKTKNEEWSCKLFELDPLTGEWHYKFADTRPWDPLNDMIQFEKDGVIQTKVKHRTPMVSVPKMKHKPTRQQKKVAKGYSSPEPDIQDSSGSEAQSVKPSTRRKKGIELGDIQSSIESIKQTQEEIKRNIMALRNHLVSSTPATDYFLQQKDYFIIFLLILLQVIINFMFK

SEQ ID NO: 59112 - protein, 70 aa, Homo sapiens
KMNLHFLCQRASLNLNFIMAQRRTVQLQANSQKKNLLRYKRKITEKKRKEPQRSCSVQSQILLLLLWLIG

SEQ ID NO: 59113 - protein, 994 aa, Homo sapiens
KFDDGAVFLAACSSGDTDEVLKLLHRGADINYANVDGLTALHQACIDDNVDMVKFLVENGANINQPDNEGWIPLHAAASCGYLDIAEFLIGQGAHVGAVNSEGDTPLDIAEEEAMEELLQNEVNRQGVDIEAARKEEERIMLRDARQWLNSGHINDVRHAKSGGTALHVAAAKGYTEVLKLLIQAGYDVNIKDYDGWTPLHAAAHWGKEEACRILVDNLCDMEMVNKVGQTAFDVADEDILGYLEELQKKQNLLHSEKRDKKSPLIESTANMDNNQSQKTFKNKETLIIEPEKNASRIESLEQEKVDEEEEGKKDESSCSSEEDEEDDSESEAETDKTKPLASVTNANTSSTQAAPVAVTTPTVSSGQATPTSPIKKFPTTATKISPKEEERKDESPATWRLGLRKTGSYGALAEITASKEGQKEKDTAGVTRSASSPRLSSSLDNKEKEKDSKGTRLAYVAPTIPRRLASTSDIEEKENRDSSSLRTSSSYTRRKWEDDLKKNSSVNEGSTYHKSCSFGRRQDDLISSSVPSTTSTPTVTSAAGLQKSLLSSTSTTTKITTGSSSAGTQSSTSNRLWAEDSTEKEKDSVPTAVTIPVAPTVVNAAASTTTLTTTTAGTVSSTTEVRERRRSYLTPVRDEESESQRKARSRQARQSRRSTQGVTLTDLQEAEKTIGRSRSTRTREQENEEKEKEEKEKQDKEKQEEKKESETSREDEYKQKYSRTYDETYQRYRPVSTSSSTTPSSSLSTMSSSLYASSQLNRPNSLVGITSAYSRGITKENEREGEKREEEKEGEDKSQPKSIRERRRPREKRRSTGVSFWTQDSDENEQEQQSDTEEGSNKKETQTDSISRYETSSTSAGDRYDSLLGRSGSYSYLEERKPYSSRLEKDDSTDFKKLYEQILAENEKLKAQLHDTNMELTDLKLQLEKATQRQERFADRSLLEMEKRERRALERRISEMEEELKMLPDLKADNQRLKDENGALIRVISKLSK

SEQ ID NO: 59114 - protein, 36 aa, Homo sapiens
MFTIFSFFAEQLIALKRKIFPRRRIHKEASPNRIRV

SEQ ID NO: 59115 - protein, 38 aa, Homo sapiens
VKVGDKVLLPEYGGTKVVLDDKDYFLFRDGDILRKYVD

SEQ ID NO: 59116 - protein, 1187 aa, Homo sapiens
LRALMELRSTDALRKIQESYGDVYGICTKLKTSPNEGLSGNPADLERREAVFGKNFIPPKKPKTFLQLVWEALQDVTLIILEIAAIVSLGLSFYQPPEGDNALCGEVSVGEEEGEGETGWIEGAAILLSVVCVVLVTAFNDWSKEKQFRGLQSRIEQEQKFTVIRGGQVIQIPVADITVGDIAQVKYGDLLPADGILIQGNDLKIDESSLTGESDHVKKSLDKDPLLLSGTHVMEGSGRMVVTAVGVNSQTGIIFTLLGAGGEEEEKKDEKKKEKKNKKQDGAIENRNKAKAQDGAAMEMQPLKSEEGGDGDEKDKKKANLPKKEKSVLQGKLTKLAVQIGKAGLLMSAITVIILVLYFVIDTFWVQKRPWLAECTPIYIQYFVKFFIIGVTVLVVAVPEGLPLAVTISLAYSVKKMMKDNNLVRHLDACETMGNATAICSDKTGTLTMNRMTVVQAYINEKHYKKVPEPEAIPPNILSYLVTGISVNCAYTSKILPPEKEGGLPRHVGNKTECALLGLLLDLKRDYQDVRNEIPEEALYKVYTFNSVRKSMSTVLKNSDGSYRIFSKGASEIILKKCFKILSANGEAKVFRPRDRDDIVKTVIEPMASEGLRTICLAFRDFPAGEPEPEWDNENDIVTGLTCIAVVGIEDPVRPEVPDAIKKCQRAGITVRMVTGDNINTARAIATKCGILHPGEDFLCLEGKDFNRRIRNEKGEIEQERIDKIWPKLRVLARSSPTDKHTLVKGIIDSTVSDQRQVVAVTGDGTNDGPALKKADVGFAMGIAGTDVAKEASDIILTDDNFTSIVKAVMWGRNVYDSISKFLQFQLTVNVVAVIVAFTGACITQDSPLKAVQMLWVNLIMDTLASLALATEPPTESLLLRKPYGRNKPLISRTMMKNILGHAFYQLVVVFTLLFAGEKFFDIDSGRNAPLHAPPSEHYTIVFNTFVLMQLFNEINARKIHGERNVFEGIFNNAIFCTIVLGTFVVQIIIVQFGGKPFSCSELSIEQWLWSIFLGMGTLLWGQLISTIPTSRLKFLKEAGHGTQKEEIPEEELAEDVEEIDHAERELRRGQILWFRGLNRIQTQIRVVNAFRSSLYEGLEKPESRSSIHNFMTHPEFRIEDSEPHIPLIDDTDAEDDAPTKRNSSPPPSPNKNNNAVDSGIHLTIEMNKSATSSSPGSPLHSLETSL

SEQ ID NO: 59117 - protein, 302 aa, Homo sapiens
LLSLGTCLGLAWFVFQQSEKFAKVENQYQLLKLETNEFQQLQSKISLISEKWQKSEAIMEQLKSFQIIAHLKRLQEEINEVKTWSNRITEKQDILNNSLTTLSQDITKVDQSTTSMAKDVGLKITSVKTDIRRISGLVTDVISLTDSVQELENKIEKVEKNTVKNIGDLLSSSIDRTATLRKTASENSQRINSVKKTLTELKSDFDKHTDRFLSLEGDRAKVLKTVTFANDLKPKVYNLKKDFSRLEPLVNDLTLRIGRLVTDLLQREKEIAFLSEKISNLTIVQAEIKDIKDEIAHISDMN

SEQ ID NO: 59118 - protein, 82 aa, Homo sapiens
KIKKVLKSTKLKIFRGKRTLYPESWTDRGCTCPILNPGLEYLVAGHEDIRTGKLIVNMKSFVQHWKPSLGRKVMDILKRECK

SEQ ID NO: 59119 - protein, 48 aa, Homo sapiens
LGPRIHALPESVSIFSLKEIQLQKDPGFRNSSYPETGVFVINHFTCRS

SEQ ID NO: 59120 - protein, 351 aa, Homo sapiens
IHMALLRKINQVLLFLLIVTLCVILYKKVHKGTVPKNDADDESETPEELEEEIPVVICAAAGRMGATMAAINSIYSNTDANILFYVVGLRNTLTRIRKWIEHSKLREINFKIVEFNPMVLKGKIRPDSSRPELLQPLNFVRFYLPLLIHQHEKVIYLDDDVIVQGDIQELYDTTLALGHAAAFSDDCDLPSAQDINRLVGLQNTYMGYLDYRKKAIKDLGISPSTCSFNPGVIVANMTEWKHQRITKQLEKWMQKNVEENLYSSSLGGGVATSPMLIVFHGKYSTINPLWHIRHLGWNPDARYSEHFLQEAKLLHWNGRHKPWDFPSVHNDLWESWFVPDPAGIFKLNHHS

SEQ ID NO: 59121 - protein, 24 aa, Homo sapiens
MGNPRCDGHQQGYPRKWRTDDAPL

SEQ ID NO: 59122 - protein, 164 aa, Homo sapiens
KADISGNITKIKAVYDTNPAKFRTLQNILEVEKEMYGAEWPKVGATLALMWLKRGLRFIQVFLQSICDGERDENHPNLIRVNATKAYEMALKKYHGWIVQKIFQAALYAAPYKSDFLKALSKGQNVTEEECLEKIRLFLVNYTATIDVIYEMYTQMNAELNYKV

SEQ ID NO: 59123 - protein, 30 aa, Homo sapiens
LVTQQVIQCAYDIAKAAKQLVTITTKENNN

SEQ ID NO: 59124 - protein, 179 aa, Homo sapiens
KMPAYHSSLMDPDTKLIGNMALLPIRSQFKGPAPRETKDTDIVDEAIYYFKANVFFKNYEIKNEADRTLIYITLYISECLKKLQKCNSKSQGEKEMYTLGITNFPIPGEPGFPLNAIYAKPANKQEDEVMRAYLQQLRQETGLRLCEKVFDPQNDKPSKWWTCFVKRQFMNKSLSGPGQ

SEQ ID NO: 59125 - protein, 194 aa, Homo sapiens
LENCLGHVEDDYILFDCPGQIELYTHLPVMKQLVQQLEQWEFRVCGVFLVDSQFMVESFKFISGILAALSAMISLEIPQVNIMTKMDLLSKKAKKEIEKFLDPDMYSLLEDSTSDLRSKKFKKLTKAICGLIDDYSMVRFLPYDQSDEESMNIVLQHIDFAIQYGEDLEFKEPKEREDESSSMFDEYFQECQDE

SEQ ID NO: 59126 - protein, 194 aa, Homo sapiens
LKKTQQRESGYYSSPERSESSELLDSNDVMGSSIPSPSPPDPARVTSHSLSCRRKGILKHSSKYSAGTMDPALVSPEMPTLESLSEPGVPAEGLSRSYSRPSSVISDDSVLSSDSFDLLDLQENRPARQRIRSCVSAENFLQIQDFEGLQNRPRPQYLKRYRNRLADSSFSLLTDMDDVTQVYKQALEICSKLN

SEQ ID NO: 59127 - protein, 12 aa, Homo sapiens
KAKAKELATKLG

SEQ ID NO: 59128 - protein, 17 aa, Homo sapiens
LVSGLEAKPDRSRSASP

SEQ ID NO: 59129 - protein, 18 aa, Homo sapiens
IEGLEFMGHGKEKPENSS

SEQ ID NO: 59130 - protein, 57 aa, Homo sapiens [sequence omitted]

SEQ ID NO: 59131 - protein, 10 aa, Homo sapiens
MRFKEMKSLA

SEQ ID NO: 59132 - protein, 674 aa, Homo sapiens
IEESCPQLANSVQIRIKLMAEGELKDMEQFFDDLSDSFSGTEPEVHKTSVVGLFLRHMILAYSKLSFSQVFKLYTALQQYFQNGEKKTVEDADMELTSRDEGERKMEKEELDVSVREEEVSCSGPLSQKQAEFFLSQQASLLKNDETKALTPASLQKELNNLLKFNPDFAEAHYLSYLNNLRVQDVFSSTHSLLHYFDRLILTGAESKSNGEEGYGRSLRYAALNLAALHCRFGHYQQAELALQEAIRIAQESNDHVCLQHCLSWLYVLGQKRSDSYVLLEHSVKKAVHFGLPYLASLGIQSLVQQRAFAGKTANKLMDALKDSDLLHWKHSLSELIDISIAQKTAIWRLYGRSTMALQQAQMLLSMNSLEAVNAGVQQNNTESFAVALCHLAELHAEQGCFAAASEVLKHLKERFPPNSQHAQLWMLCDQKIQFDRAMNDGKYHLADSLVTGITALNSIEGVYRKAVVLQAQNQMSEAHKLLQKLLVHCQKLKNTEMVISVLLSVAELYWRSSSPTIALPMLLQALALSKEYRLQYLASETVLNLAFAQLILGIPEQALSLLHMAIEPILADGAILDKGRAMFLVAKCQVASAASYDQPKKAEALEAAIENLNEAKNYFAKVDCKERIRDVVYFQARLYHTLGKTQERNRCAMLFRQLHQELPSHGVPLINHL

SEQ ID NO: 59133 - protein, 170 aa, Homo sapiens
IFAGAARAADNKKCAGARRALGRARGCSATARPRRRRRRPRGLAPPRPARPPPGGMSYKPNLAAHMPAAALNAAGSVHSPSTSMATSSQYRQLLSDYGPPSLGYTQGTGNSQVPQSKYAELLAIIEELGKEIRPTYAGSKSAMERLKRGIIHARGLVRECLAETERNARS

SEQ ID NO: 59134 - protein, 34 aa, Homo sapiens
IYTFGEVGTTLSVQESAEGIARKNAQNSSGAACP

SEQ ID NO: 59135 - protein, 9 aa, Homo sapiens
MIHQRNHII

SEQ ID NO: 59136 - protein, 19 aa, Homo sapiens
KKRMRRLKRKRRKMRQRSK

SEQ ID NO: 59137 - protein, 137 aa, Homo sapiens
LAEPVPGIKAEPDESNARYFHVVIAGPQDSPFEGGTFKLELFLPEEYPMAAPKVRFMTKIYHPNVDKLGRICLDILKDKWSPALQIRTVLLSIQALLSAPNPDDPLANDVAEQWKTNEAQAIETARAWTRLYAMNNI

SEQ ID NO: 59138 - protein, 245 aa, Homo sapiens
IDKITQYVEEVKKNHSIILSAPNPEGKIKEELEDLNKEIKKTANKIRAKLKAIEQSFDQDESGNRTSVDLRIRRTQHSVLSRKFVEAMAEYNEAQTLFRERSKGRIQRQLEITGRTTTDDELEEMLESGKPSIFTSDIISDSQITRQALNEIESRHKDIMKLETSIRELHEMFMDMAMFVETQGEMINNIERNVMNATDYVEHAKEETKKAIKYQSKARRKLMFIIICVIVLLVILGIILATTLS

SEQ ID NO: 59139 - protein, 161 aa, Homo sapiens
TEASYVNLPTIALCNTDSPLRYVDIAIPCNNKGAYSVGLMWWMLAREVLCMLGTISCEHPWEVMPDLYFYRDPEEIEKEEQAAAEKAVTKEEFQGEWTAPAPEFTAIQPEVADWSEGVQVPSVPIQQFPTEDWSSQPAMEDWSAAPTAQATEWVGATTDWS

SEQ ID NO: 59140 - protein, 177 aa, Homo sapiens
LLRFADNTFSGSYITTIGVDFKIRTVEINGEKVKLQIWDTAGQERFRTITSTYYRGTHGVIVVYDVTSAESFVNVKRWLHEINQNCDDVCRILVGNKNDDPERKVVETEDAYKFAGQMGIQLFETSAKENVNVEEMFNCITELVLRAKKDNLAKQQQQQQNDVVKLTKNSKRKKRCC

SEQ ID NO: 59141 - protein, 129 aa, Homo sapiens
ITSTYYRGTHGVIVVYDVTSAESFVNVKRWLHEINQNCDDVCRILVGNKNDDPERKVVETEDAYKFAGQMGIQLFETSAKENVNVEEMFNCITELVLRAKKDNLAKQQQQQQNDVVKLTKNSKRKKRCC

SEQ ID NO: 59142 - protein, 519 aa, Homo sapiens
VYGSSAKTSSVSNPQDSVGSPCSRVGEEEHVYSFPNKQKSAEPSPTVMSTSLGSNLSELDRLLLELNAVQHNPPGFPADEANSSPPLPGALSPLYGVPETNSPLGGKAGPLTKEKPKRNGGRGLEDVRPSVESLLDELESSVPSPVPAITVNQGEMSSPQRVTSTQQQTRISASSATRELDELMASLSDFKGSWPLEEVVLLVSISSSVQEGEKYPHPCAARHRTPSLRSPDQPPPCPQFMAQGKTGSSSPPGGPPKPGSQLDSMLGSLQSDLNKLGVATVAKGVCGACKKPIAGQVVTAMGKTWHPEHFVCTHCQEEIGSRNFFERDGQPYCEKDYHNLFSPRCYYCNGPILDKVVTALDRTWHPEHFFCAQCGAFFGPEGFHEKDGKAYCRKDYFDMFAPKCGGCARAILENYISALNTLWHPECFVCRECFTPFVNGSFFEHDGQPYCEVHYHERRGSLCSGCQKPITGRCITAMAKKFHPEHFVCAFCLKQLNKGTFKEQNDKPYCQNCFLKLFC

SEQ ID NO: 59143 - protein, 687 aa, Homo sapiens
LTMQIFVKTLTGKTITLEVEPSDTIENVKAKIQDKEGIPPDQQRLIFAGKQLEDGRTLSDYNIQKESTLHLVLRLRGGMQIFVKTLTGKTITLEVEPSDTIENVKAKIQDKEGIPPDQQRLIFAGKQLEDGRTLSDYNIQKESTLHLVLRLRGGMQIFVKTLTGKTITLEVEPSDTIENVKAKIQDKEGIPPDQQRLIFAGKQLEDGRTLSDYNIQKESTLHLVLRLRGGMQIFVKTLTGKTITLEVEPSDTIENVKAKIQDKEGIPPDQQRLIFAGKQLEDGRTLSDYNIQKESTLHLVLRLRGGMQIFVKTLTGKTITLEVEPSDTIENVKAKIQDKEGIPPDQQRLIFAGKQLEDGRTLSDYNIQKESTLHLVLRLRGGMQIFVKTLTGKTITLEVEPSDTIENVKAKIQDKEGIPPDQQRLIFAGKQLEDGRTLSDYNIQKESTLHLVLRLRGGMQIFVKTLTGKTITLEVEPSDTIENVKAKIQDKEGIPPDQQRLIFAGKQLEDGRTLSDYNIQKESTLHLVLRLRGGMQIFVKTLTGKTITLEVEPSDTIENVKAKIQDKEGIPPDQQRLIFAGKQLEDGRTLSDYNIQKESTLHLVLRLRGGMQIFVKTLTGKTITLEVEPSDTIENVKAKIQDKEGIPPDQQRLIFAGKQLEDGRTLSDYNIQKESTLHLVLRLRGGV

SEQ ID NO: 59144 - protein, 131 aa, Homo sapiens
MKEEDVLKFLAAGTHLGGTNLDFQMEQYIYKRKSDGIYIINLKKTWEKLLLAARAIVAIENPADVSVISSRNTGQRAVLKFAAATGATPIAGRFTPGTFTNQIQAAFREPRLLVVTDPRADPPASHGGVLC

SEQ ID NO: 59145 - protein, 49 aa, Homo sapiens
IDVQQVSLVINYDLPTNRENYIHRIGRRGQFGRKGVAINMVTEEDKRTL

SEQ ID NO: 59146 - protein, 380 aa, Homo sapiens
VPAGLPASGSLGGAARAVRLAPERPPRPGQAGRPTPSSPRARLTQAGRPAPPGDHQVPAGGCRHRTEAGGVRTDDAGMAGAACEPVARPSLTSISSGELRSLWTCDCELALLPLAQLLRLQPGAFQLSGDQLVVARPGEPAAARGGFNVFGDGLVRLDGQLYRLSSYIKRYVELTNYCDYKDYRETILSKPMLFFINVQTKKDTSKERTYAFLVNTRHPKIRRQIEQGMDMVISSVIGESYRLQFDFQEAVKNFFPPGNEVVNGENLSFAYEFKADALFDFFYWFGLSNSVVKVNGKVLNLSSTSPEKKETIKLFLEKMSEPLIRRSSFSDRKFSVTSRGSIDDVFNCNLSPRSSLTEPLLAELPFPSVLESEETPNQFI

SEQ ID NO: 59147 - protein, 12 aa, Homo sapiens
TDVGSGMYSNIY

SEQ ID NO: 59148 - protein, 23 aa, Homo sapiens
INEYKDPENILHRSPQQVQTLLS

SEQ ID NO: 59149 - protein, 15 aa, Homo sapiens
IEAHKECMRALGFKI

SEQ ID NO: 59150 - protein, 406 aa, Homo sapiens
LKTLNAVQYHHAAKAKFLCIMCCSNISYERDGEQDNCEIETSNGLSALLEEFEIVSCPSMAATLYTIKQKIDEKNLSSIKVIVPRHRKTLMKAFIDQLFTDVYNFEFEDLQVTFRGGLFKQSIEINVITAQELRGIQNEIETFLRSLPALRGKLTIITSSLIPDIFIHGFTTRTGGISYIPTLSSFNLFSSSKRRDPKVVVQENLRRLANAAGFNVEKFYRIKTHHSNDIWIMGRKEPDSYDGITTNQRGVTIAALGADCIPIVFADPVKKACGVAHAGWKGTLLGVAMATVNAMIAEYGCSLEDIVVVLGPSVGPCCFTLPRESAEAFHNLHPACVQLFDSPNPCIDIRKATRILLEQGGILPQNIQDQNQDLNLCTSCHPDKFFSHVRDGLNFGTQIGFISIKE

SEQ ID NO: 59151 - protein, 5 aa, Homo sapiens
MPYLL

SEQ ID NO: 59152 - protein, 43 aa, Homo sapiens
IEQSVFYWEQVTDGFFIFNERFKNFTLVVLNNVAEFVCKYKLL

SEQ ID NO: 59153 - protein, 192 aa, Homo sapiens
VFPNCILLLKLPGLEKLLHHVTEEKGNPEIDNKKYYKYSKEKTLKWLEKKVNQTVAALKTNNVNVSSRVQSTAFFSGDQASTDKEEDYIRYAHGLISDYIPKELSDDLSKYLKLPEPSASLPNPPSKKIKLSDEPVEAKEDYTKFNTKDLKTEKKNSKMTAAQKALAKVDKSGMKSIDTFFGVKNKKKIGKV

SEQ ID NO: 59154 - protein, 66 aa, Homo sapiens
IKPDRAHHCSTCDSCILKMDHHCPWVNNCVGFSNYKFFLLFLLYSLLYCLFVAAYSFRVLYKILDE

SEQ ID NO: 59155 - protein, 14 aa, Homo sapiens
RIFLMLFRRHSNVF

SEQ ID NO: 59156 - protein, 297 aa, Homo sapiens
KKSLELNPNNSTAMLRKGICEYHEKNYAAALETFTEGQKLDIETGFHRVGQAGLQLLTSSDPPALDSQSAGITGADANFSVWIKRCQEAQNGSESEVWTHQSKIKYDWYQTESQVVITLMIKNVQKNDVNVEFSEKELSALVKLPSGEDYNLKLELLHPIIPEQSTFKVLSTKIEIKLKKPEAVRWEKLEGQGDVPTPKQFVADVKNLYPSSSPYTRNWDKLVGEIKEEEKNEKLEGDAALNRLFQQIYSDGSDEVKRAMNKSFMESGGTVLSTNWSDVGKRKVEINPPDDMEWKKY

SEQ ID NO: 59157 - protein, 269 aa, Homo sapiens
TSSTGVAVGAEHGEDSLSRKPDPEPGRMDHHQPGTGRYQVLLNEEDNSESSAIEQPPTSNPAPQIVQAASSAPALETDSSPPPYSSITVEVPTTSDTEVYGEFYPVPPPYSVATSLPTYDEAEKAKAAAMAAAAAETSQRIQEEECPPRDDFSDADQLRVGNDGIFMLAFFMAFIFNWLGFCLSFCITNTIAGRYGAICGFGLSLIKWILIVRFSDYFTGYFNGQYWLWWIFLVLGLLLFFRGFVNYLKVRNMSESMAAAHRTRYFFLL

SEQ ID NO: 59158 - protein, 329 aa, Homo sapiens
LALLWLAVVPGWSRVSGIPSRRHWPVPYKRFDFRPKPDPYCQAKYTFCPTGSPIPVMEGDDDIEVFRLQAPVWEFKYGDLLGHLKIMHDAIGFRSTLTGKNYTMEWYELFQLGNCTFPHLRPEMDAPFWCNQGAACFFEGIDDVHWKENGTLVQVATISGNMFNQMAKWVKQDNETGIYYETWNVKASPEKGAETWFDSYDCSKFVLRTFNKLAEFGAEFKNIETNYTRIFLYSGEPTYLGNETSVFGPTGNKTLGLAIKRFYYPFKPHLPTKEFLLSLLQIFDAVIVHKQFYLFYNFEYWFLPMKFPFIKITYEEIPLPIRNKTLSGL

SEQ ID NO: 59159 - protein, 535 aa, Homo sapiens
LGVRGSVCPAICWWHLSLLPPPSVNPTLQKCSSPGAAQELSMRPPGFRNFLLLASSLLFAGLSAVPQSFSPSLRSWPGAACRLSRAESERRCRAPGQPPGAALCHGRGRCDCGVCICHVTEPGMFFGPLCECHEWVCETYDGSTCAGHGKCDCGKCKCDQGWYGDACQYPTNCDLTKKKSNQMCKNSQDIICSNAGTCHCGRCKCDNSDGSGLVYGKFCECDDRECIDDETEEICGGHGKCYCGNCYCKAGWHGDKCEFQCDITPWESKRRCTSPDGKICSNRGTCVCGECTCHDVDPTGDWGDIHGDTCECDERDCRAVYDRYSDDFCSGHGQCNCGRCDCKAGWYGKKCEHPQSCTLSAEESIRKCQGSSDLPCSGRGKCECGKCTCYPPGDRRVYGKTCECDDRRCEDLDGVVCGGHGTCSCGRCVCERGWFGKLCQHPRKCNMTEEQSKNLCESADGILCSGKGSCHCGKCICSAEEWYISGEFCDCDDRDCDKHDGLICTGNGICSCGNCECWDGWNGNACEIWLGSEYP

SEQ ID NO: 59160 - protein, 28 aa, Homo sapiens
LDLSFFREAVTAAETCCSQSLSALMRSH

SEQ ID NO: 59161 - protein, 93 aa, Homo sapiens
IENPHLLTLFHRLCKLLFFRIRPIFVFDGDAPLLKKQTLVKRRQRKDLASSDSRKTTEKLLKTFLKRQAIKTAFRSKRQEENYSRVRDEVLKK

SEQ ID NO: 59162 - skipped

SEQ ID NO: 59163 - protein, 112 aa, Homo sapiens
LKKFLEESVSMSPEERARYLENYDAIRVTHETSAHEGQTEAPSIDEKVDLHFIALVHVDGHLYELDGRKPFPINHGETSDETLLEDAIEVCKKFMERDPDELRFNAIALSAA

SEQ ID NO: 59164 - protein, 1249 aa, Homo sapiens
INKLKPGVIKKINRLSTPIAGLDNINVFLKACEQIGLKEAQLFHPGDLQDLSNRVTVKQEETDRRVKNVLITLYWLGRKAQSNPYYNGPHLNLKAFENLLGQALTKALEDSSFLKRSGRDSGYGDIWCPERGEFLAPPRHHKREDSFESLDSLGSRSLTSCSSDITLRGGREGFESDTDSEFTFKMQDYNKDDMSYRRISAVEPKTALPFNRFLPNKSRQPSYVPAPLRKKKPDKHEDNRRSWASPVYTEADGTFSRLFQKIYGENGSKSMSDVSAEDVQNLRQLRYEEMQKIKSQLKEQDQKWQDDLAKWKDRRKSYTSDLQKKKEEREEIEKQALEKSKRSSKTFKEMLQDRESQNQKSTVPSRRRMYSFDDVLEEGKRPPTMTVSEASYQSERVEEKGATYPSEIPKEDSTTFAKREDRVTTEIQLPSQSPVEEQSPASLSSLRSRSTQMESTRVSASLPRSYRKTDTVRLTSVVTPRPFGSQTRGISSLPRSYTMDDAWKYNGDVEDIKRTPNNVVSTPAPSPDASQLASSLSSQKEVAATEEDVTRLPSPTSPFSSLSQDQAATSKATLSSTSGLDLMSESGEGEISPQREVSRSQDQFSDMRISINQTPGKSLDFGFTIKWDIPGIFVASVEAGSPAEFSQLQVDDEIIAINNTKFSYNDSKEWEEAMAKAQETGHLVMDVRRYGKAGSPETKWIDATSGIYNSEKSSNLSVTTDFSESLQSSNIESKEINGIHDESNAFESKASESISLKNLKRRSQFFEQGSSDSVVPDLPVPTISAPSRWVWDQEEERKRQERWQKEQDRLLQEKYQREQEKLREEWQRAKQEAERENSKYLDEELMVLSSNSMSLTTREPSLATWEATWSEGSKSSDREGTRAGEEERRQPQEEVVHEDQGKKPQDQLVIERERKWEQQLQEEQEQKRLQAEAEEQKRPAEEQKRQAEIERETSVRIYQYRRPVDSYDIPKTEEASSGFLPGDRNKSRSTTELDDYSTNKNGNNKYLDQIGNMTSSQRRSKKEQVPSGAELERQQILQEMRKRTPLHNDNSWIRQRSASVNKEPVSLPGIMRRGESLDNLDSPRSNSWRQPPWLNQPTGFYASSSVQDFSRPPPQLVSTSNRAYMRNPSSSVPPPSAGSVKTSTTGVATTQSPTPRSHSPSASQSGSQLRNRSVSGKRICSYCNNILGKGAAMIIESLGLCYHLHCFKCVACECDLGGSSSGAEVRIRNHQLYCNDCYLRFKSGRPTAM

SEQ ID NO: 59165 - protein, 1230 aa, Homo sapiens
LKEAQLFHPGDLQDLSNRVTVKQEETDRRVKNVLITLYWLGRKAQSNPYYNGPHLNLKAFENLLGQALTKALEDSSFLKRSGRDSGYGDIWCPERGEFLAPPRHHKREDSFESLDSLGSRSLTSCSSDITLRGGREGFESDTDSEFTFKMQDYNKDDMSYRRISAVEPKTALPFNRFLPNKSRQPSYVPAPLRKKKPDKHEDNRRSWASPVYTEADGTFSRSKSMSDVSAEDVQNLRQLRYEEMQKIKSQLKEQDQKWQDDLAKWKDRRKSYTSDLQKKKEEREEIEKQALEKSKRSSKTFKEMLQDRESQNQKSTVPSRRRMYSFDDVLEEGKRPPTMTVSEASYQSERVEEKGATYPSEIPKEDSTTFAKREDRVTTEIQLPSQSPVEEQSPASLSSLRSRSTQMESTRVSASLPRSYRKTDTVRLTSVVTPRPFGSQTRGISSLPRSYTMDDAWKYNGDVEDIKRTPNNVVSTPAPSPDASQLASSLSSQKEVAATEEDVTRLPSPTSPFSSLSQDQAATSKATLSSTSGLDLMSESGEGEISPQREVSRSQDQFSDMRISINQTPGKSLDFGFTIKWDIPGIFVASVEAGSPAEFSQLQVDDEIIAINNTKFSYNDSKEWEEAMAKAQETGHLVMDVRRYGKADWGKDQPSLPFIRHKTLNLTSMATKIIGSPETKWIDATSGIYNSEKSSNLSVTTDFSESLQSSNIESKEINGIHDESNAFESKASESISLKNLKRRSQFFEQGSSDSVVPDLPVPTISAPSRWVWDQEEERKRQERWQKEQDRLLQEKYQREQEKLREEWQRAKQEAERENSKYLDEELMVLSSNSMSLTTREPSLATWEATWSEGSKSSDREGTRAGEEERRQPQEEVVHEDQGKKPQDQLVIERERKWEQQLQEEQEQKRLQAEAEEQKRPAEEQKRQAEIERETSVRIYQYRRPVDSYDIPKTEEASSGFLPGDRNKSRSTTELDDYSTNKNGNNKYLDQIGNMTSSQRRSKKEQVPSGAELERQQILQEMRKRTPLHNDNSWIRQRSASVNKEPVSLPGIMRRGESLDNLDSPRSNSWRQPPWLNQPTGFYASSSVQDFSRPPPQLVSTSNRAYMRNPSSSVPPPSAGSVKTSTTGVATTQSPTPRSHSPSASQSGSQLRNRSVSGKRICSYCNNILGKGAAMIIESLGLCYHLHCFKCVACECDLGGSSSGAEVRIRNHQLYCNDCYLRFKSGRPTAM

SEQ ID NO: 59166 - protein, 7 aa, Homo sapiens
MILKSLY

SEQ ID NO: 59167 - protein, 85 aa, Homo sapiens
VENLCSHKVSPMLYKQLRQACEDHVQAQILPFREDSLDSVLFLKKINTCWQDHCRQMIMIRSIFLFLDRTYVLQNSTLPSICQNH

SEQ ID NO: 59168 - protein, 16 aa, Homo sapiens
TVMLGPDGRARIPASR

SEQ ID NO: 59169 - protein, 20 aa, Homo sapiens
LPVCRRRVLLEGPMRSGSSP

SEQ ID NO: 59170 - protein, 60 aa, Homo sapiens
LEELRNQELQKRKQIQLRHEEEHRRREEEMIRHREQEELRRQQEGFKPNYMENGDKRKCG

SEQ ID NO: 59171 - protein, 313 aa, Homo sapiens
IFGNEENGKTVVYLVAFHLFFVMFVWSYWMTIFTSPASPSKEFYLSNSEKERYEKEFSQERQQEILRRAARALPIYTTSASKTIRYCEKCQLIKPDRAHHCSACDSCILKMDHHCPWVNNCVGFSNYKFFLLFLLYSLLYCLFVAATVLEYFIKFWTNELTDTRAKFHVLFLFFVSAMFFISVLSLFSYHCWLVGKNRTTIESFRAPTFSYGPDGNGFSLGCSKNWRQVFGDEKKYWLLPIFSSLGDGCSFPTRLVGMDPEQASVTNQNEYARSGSNQPFPIKPLSESKNRLLDSESQWLENGAEEGIVKSGV

SEQ ID NO: 59172 - protein, 85 aa, Homo sapiens
IKQRKNKQTDGILTKELLHSVHPESPNLKTSLCFKEQTLLPVNDALRTIEGSSPADNRYSEYAEEFSKSEPAVVSLEYGVARMTC

SEQ ID NO: 59173 - protein, 118 aa, Homo sapiens
KMSSNVPADMINLRLILVSGKTKEFLFSPNDSASDIAKHVYDNWPMDWEEEQVSSPNILRLIYQGRFLHGNVTLGALKLPFGKTTVMHLVARETLPEPNSQGQRNREKTGESNCCVIL

SEQ ID NO: 59174 - protein, 795 aa, Homo sapiens
VSNFKRFHGRAFNDPFIQKEKENLSYDLVPLKNGGVGIKVMYMGEEHLFSVEQITAMLLTKLKETAENSLKKPVTDCVISVPSFFTDAERRSVLDAAQIVGLNCLRLMNDMTAVALNYGIYKQDLPSLDEKPRIVVFVDMGHSAFQVSACAFNKGKLKVLGTAFDPFLGGKNFDEKLVEHFCAEFKTKYKLDAKSKIRALLRLYQECEKLKKLMSSNSTDLPLNIECFMNDKDVSGKMNRSQFEELCAELLQKIEVPLYSLLEQTHLKVEDVSAVEIVGGATRIPAVKERIAKFFGKDISTTLNADEAVARGCALQCAILSPAFKVREFSVTDAVPFPISLIWNHDSEDTEGVHEVFSRNHAAPFSKVLTFLRRGPFELEAFYSDPQGVPYPEAKIGRFVVQNVSAQKDGEKSRVKVKVRVNTHGIFTISTASMVEKVPTEENEMSSEADMECLNQRPPENPDTDKNVQQDNSEAGTQPQVQTDAQQTSQSPPSPELTSEENKIPDADKANEKKVDQPPEAKKPKIKVVNVELPIEANLVWQLGKDLLNMYIETEGKMIMQDKLEKERNDAKNAVEEYVYEFRDKLCGPYEKFICEQDHQNFLRLLTETEDWLYEEGEDQAKQAYVDKLEELMKIGTPVKVRFQEAEERPKMFEELGQRLQHYAKIAADFRNKDEKYNHIDESEMKKVEKSVNEVMEWMNNVMNAQAKKSLDQDPVVRAQEIKTKIKELNNTCEPVVTQPKPKIESPKLERTPNGPNIDKKEEDLEDKNNFGAEPPHQNGECYPNEKNSVNMDLD

SEQ ID NO: 59175 - protein, 82 aa, Homo sapiens
IKETLRLRPPIMIMMRMARTPQTVVGYTIPPGHQVCVSPTVNQRPKDSWVERLDFNPDCYLQDNPASGEKFAYVPFGAGCHR

SEQ ID NO: 59176 - protein, 13 aa, Homo sapiens
IYNCYKNASTPST

SEQ ID NO: 59177 - protein, 358 aa, Homo sapiens
IIYIGKPSLRKQRFMQFSSLEHEGEYYMTPRDFLFSVMFEQMERKTSVKKLTKKDIEDTLSGIQTAGCGSTFFRDLGDKGLISYTEYLFLLTILTKPHSGFHVAFKMLDTDGNEMIEKREFFKLQKIISKQDDLMTVKTNETGYQEAIVKEPEINTTLQMRFFGKRGQRKLHYKEFRRFMENLQTEIQEMEFLQFSKGLSFMRKEDFAEWLLFFTNTENKDIYWKNVREKLSAGESISLDEFKSFCHFTTHLEDFAIAMQMFSLAHRPVRLAEFKRAVKVATGQELSNNILDTVFKIFDLDGDECLSHEEFLGVLKNRMHRGLWVPQHQSIQEYWKCVKKESIKGVKEVWKQAGKGLF

SEQ ID NO: 59178 - protein, 53 aa, Homo sapiens
LELYASYVYLSMSYYFDRDDVALKNFAKYFLHQSHEEREHAEKLMELQNQLGG

SEQ ID NO: 59179 - protein, 77 aa, Homo sapiens
LEKNVNQSLLELHKLATDKNDPHLCDFIETHYLNEQVKAIKELGDQVTNLRKMGAPESGLAEYLFDKHILGDSDNES

SEQ ID NO: 59180 - protein, 37 aa, Homo sapiens
LPFSVENKWSLLAKMCLYFGSAFATPFLVVRQQLLKT

SEQ ID NO: 59181 - protein, 368 aa, Homo sapiens [sequence omitted]

SEQ ID NO: 59182 - protein, 216 aa, Homo sapiens
KLLQAGEENQVLELLIHRDGEFQELMKLALNQGKIHHEMQVLEKEVEKRDSDIQQLQKQLKEAEQILATAVYQAKEKLKSIEKARKGAISSEEIIKYAHRISASNAVCAPLTWVPGDPRRPYPTDLEMRSGLLGQMNNPSTNGVNGHLPGDALAAGRLPDVLAPQYPWQSNDMSMNMLPPNHSSDFLLEPPGHNKENEDDVEIMSTDSSSSSSESD

SEQ ID NO: 59183 - protein, 5 aa, Homo sapiens
MNQEN

SEQ ID NO: 59184 - protein, 186 aa, Homo sapiens
LLAAGCALGLRLGRGQGAADRGALIWLCYDALVHFALEGPFVYLSLVGNVANSDGLIASLWKEYGKADARWVYFDPTIVSVEILTVALDGSLALFLIYAIVKEKYYRHFLQITLCVCELYGCWMTFLPEWLTRSPNLNTSNWLYCWLYLFFFNGVWVLIPGLLLWQSWLELKKMHQKETSSVKKFQ

SEQ ID NO: 59185 - protein, 80 aa, Homo sapiens
RLPANSLPQEGDVVGITYDHVELNVYLNGKNMHCPASGIRGTVYPVVYVDDSAILDCQFSEFYHTPPPGFEKILFEQQIF

SEQ ID NO: 59186 - protein, 42 aa, Homo sapiens
METLSICVRLCEQGINPEALSSVIKELRKATEALKAAENMTS

SEQ ID NO: 59187 - protein, 107 aa, Homo sapiens
ILFVRKNAIVVLIPKYGLEGTVFFEEKDKPNPQLIYDDEIPSLKIEDTVFHVFDKVKVKIMLDSSNLQHQKIRMSLVEPQIPGISIPTDTSNMDLNGPKKKKMKLGK

SEQ ID NO: 59188 - protein, 334 aa, Homo sapiens
LSRPGHLSVMALADSTRGLPNGGGGGGGSGSSSSSAEPPLFPDIVELNVGGQVYVTRRCTVVSVPDSLLWRMFTQQQPQELARDSKGRFFLDRDGFLFRYILDYLRDLQLVLPDYFPERSRLQREAEYFELPELVRRLGAPQQPGPGPPPSRRGVHKEGSLGDELLPLGYSEPEQQEGASAGAPSPTLELASRSPSGGAAGPLLTPSQSLDGSRRSGYITIGYRGSYTIGRDAQADAKFRRVARITVCGKTSLAKEVFGDTLNESRDPDRPPERYTSRYYLKFNFLEQAFDKLSESGFHMVACSSTGTCAFASSTDQSEDKIWTSYTEYVFCRE

SEQ ID NO: 59189 - protein, 32 aa, Homo sapiens
KFAQKMLRKARRKLIYEKAKHYHKEYRQIYGT

SEQ ID NO: 59190 - protein, 405 aa, Homo sapiens
LRTTNEHSQTCDWGNLLQDIILQVFKYLPLLDRAHASQVCRNWNQVFHMPDLWRCFEFELNQPATSYLKATHPELIKQIIKRHSNHLQYVSFKVDSSKESAEAACDILSQLVNCSLKTLGLISTARPSFMDLPKSHFISALTVVFVNSKSLSSLKIDDTPVDDPSLKVLVANNSDTLKLLKMSSCPHVSPAGILCVADQCHGLRELALNYHLLSDELLLALSSEKHVRLEHLRIDVVSENPGQTHFHTIQKSSWDAFIRHSPKVNLVMYFFLYEEEFDPFFRYEIPATHLYFGRSVSKDVLGRVGMTCPRLVELVVCANGLRPLDEELIRIAERCKNLSAIGLGECEVSCSAFVEFVKMCGGRLSQLSIMEEVLIPDQKYSLEQIHWEVSKHLGRVWFPDMMPTW

SEQ ID NO: 59191 - protein, 9 aa, Homo sapiens
MNFMSLKKK

SEQ ID NO: 59192 - skipped

SEQ ID NO: 59193 - protein, 59 aa, Homo sapiens
VLRDGRCSGYTGTLDCLLQTWKNEGFFALYKGFWPNWLRLGPWNIIFFVTYEQLKKLDL

SEQ ID NO: 59194 - protein, 94 aa, Homo sapiens
IDNKIEQAMDLVKSHLMYAVREEVEVLKEQIKELIEKNSQLEQENNLLKTLASPEQLAQFQAQLQTGSPPATTQPQGTTQPPAQPASQGSGPTA

SEQ ID NO: 59195 - protein, 16 aa, Homo sapiens
IDFLSHHLKEATIVKE

SEQ ID NO: 59196 - protein, 547 aa, Homo sapiens
IVDPLTREAQKMAQLLVVLGKIINMKIKLFMNCRGRLSEAPLESFYRFVLEPELMSGANDVSSLGPVAKFLDIPESPLLILNMITPEGWLVETVHSNCDLDNIHLKDTEKTVTAEYELEYLLLEGQCFDKVTEQPPRGLQFTLGTKNKPAVVDTIVMAHHGYFQLKANPGAWILRLHQGKSEDIYQIVGHEGTDSQADLEDIIVVLNSFKSKILKVKVKKETDKIKEDILTDEDEKTKGLWDSIKSFTVSLHKENKKEKDVLNIFSVASGHLYERFLRIMMLSVLRNTKTPVKFWLLKNYLSPTFKEVIPHMAKEYGFRYELVQYRWPRWLRQQTERQRIIWGYKILFLDVLFPLAVDKIIFVDADQIVRHDLKELRDFDLDGAPYGYTPFCDSRREMDGYRFWKTGYWASHLLRRKYHISALYVVDLKKFRRIGAGDRLRSQYQALSQDPNSLSNLDQDLPNNMIYQVAIKSLPQDWLWCETWCDDESKQRAKTIDLCNNPKTKESKLKAAARIVPEWVEYDAEIRQLLDHLENKKQDTILTHDEL

SEQ ID NO: 59197 - protein, 18 aa, Homo sapiens
KRPPGVTRCHWVSWNART

SEQ ID NO: 59198 - protein, 782 aa, Homo sapiens
KMIPFLPMFSLLLLLIVNPINANNHYDKILAHSRIRGRDQGPNVCALQQILGTKKKYFSTCKNWYKKSICGQKTTVLYECCPGYMRMEGMKGCPAVLPIDHVYGTLGIVGATTTQRYSDASKLREEIEGKGSFTYFAPSNEAWDNLDSDIRRGLESNVNVELLNALHSHMINKRMLTKDLKNGMIIPSMYNNLGLFINHYPNGVVTVNCARIIHGNQIATNGVVHVIDRVLTQIGTSIQDFIEAEDDLSSFRAAAITSDILEALGRDGHFTLFAPTNEAFEKLPRGVLERIMGDKVASEALMKYHILNTLQCSESIMGGAVFETLEGNTIEIGCDGDSITVNGIKMVNKKDIVTNNGVIHLIDQVLIPDSAKQVIELAGKQQTTFTDLVAQLGLASALRPDGEYTLLAPVNNAFSDDTLSMDQRLLKLILQNHILKVKVGLNELYNGQILETIGGKQLRVFVYRTAVCIENSCMEKGSKQGRNGAIHIFREIIKPAEKSLHEKLKQDKRFSTFLSLLEAADLKELLTQPGDWTLFVPTNDAFKGMTSEEKEILIRDKNALQNIILYHLTPGVFIGKGFEPGVTNILKTTQGSKIFLKEVNDTLLVNELKSKESDIMTTNGVIHVVDKLLYPADTPVGNDQLLEILNKLIKYIQIKFVRGSTFKEIPVTVYRPTLTKVKIEGEPEFRLIKEGETITEVIHGEPIIKKYTKIIDGVPVEITEKETREERIITGPEIKYTRISTGGGETEETLKKLLQEDTPVRKLQANKKVQGSRRRLREGRSQ

SEQ ID NO: 59199 - protein, 12 aa, Homo sapiens
MILGLSVAEEQL

SEQ ID NO: 59200 - protein, 133 aa, Homo sapiens
LTLLGLGLVQPSYGQDGMYQRFLRQHVHPEETGGSDRYCNLMMQRRKMTLYHCKRFNTFIHEDIWNIRSICSTTNIQCKNGKMNCHEGVVKVTDCRDTGSSRAPNCRYRAIASTRRVVIACEGNPQVPVHFDG

SEQ ID NO: 59201 - protein, 193 aa, Homo sapiens
IEDPELEAIKARVREMEEEAEKLKELQNEVEKQMNMSPPPGNAGPVIMSIEEKMEADARSIYVGNVDYGATAEELEAHFHGCGSVNRVTILCDKFSGHPKGFAYIEFSDKESVRTSLALDESLFRGRQIKVIPKRTNRPGISTTDRGFPRARYRARTTNYNSSRSRFYSGFNSRPRGRVYRGRARATSWYSPY

SEQ ID NO: 59202 - protein, 67 aa, Homo sapiens
LSVSKREKGRRKRANVMSSQLHSLTHFSDISALTGGTVHLDEDQNPIKKRKKIPQKGRKKKGFRRRR

SEQ ID NO: 59203 - protein, 20 aa, Homo sapiens
KIKNRKRGEEQTGTLRNNPL

SEQ ID NO: 59204 - protein, 46 aa, Homo sapiens
LEEWSSTRPALGADSRQSLARRGSGLKPRQVATRPDQGRSLPAGGL

SEQ ID NO: 59205 - protein, 763 aa, Homo sapiens
LASRVRVEPGPWSPPGEAAPGSLGARGSAATPSGRPQKLRDPSGTSGQPRMLLATLLLLLLGGALAHPDRIIFPNHACEDPPAVLLEVQGTLQRPLVRDSRTSPANCTWLILGSKEQTVTIRFQKLHLACGSERLTLRSPLQPLISLCEAPPSPLQLPGGNVTITYSYAGARAPMGQGFLLSYSQDWLMCLQEEFQCLNHRCVSAVQRCDGVDACGDGSDEAGCSSDPFPGLTPRPVPSLPCNVTLEDFYGVFSSPGYTHLASVSHPQSCHWLLDPHDGRRLAVRFTALDLGFGDAVHVYDGPGPPESSRLLRSLTHFSNGKAVTVETLSGQAVVSYHTVAWSNGRGFNATYHVRGYCLPWDRPCGLGSGLGAGEGLGERCYSEAQRCDGSWDCADGTDEEDCPGCPPGHFPCGAAGTSGATACYLPADRCNYQTFCADGADERRCRHCQPGNFRCRDEKCVYETWVCDGQPDCADGSDEWDCSYVLPRKVITAAVIGSLVCGLLLVIALGCTCKLYAIRTQEYSIFAPLSRMEAEIVQQQAPPSYGQLIAQGAIPPVEDFPTENPNDNSVLGNLRSLLQILRQDMTPGGGPGARRRQRGRLMRRLVRRLRRWGLLPRTNTPARASEARSQVTPSAAPLEALDGGTGPAREGGAVGGQDGEQAPPLPIKAPLPSASTSPAPTTVPEAPGPLPSLPLEPSLLSGVVQALRGRLLPSLGPPGPTRSPPGPHTAVLALEDEDDVLLVPLAEPGVWVAEAEDEPLLT

SEQ ID NO: 59206 - protein, 7 aa, Homo sapiens
VAALPEG

SEQ ID NO: 59207 - protein, 22 aa, Homo sapiens
MDFTIRNTLRLEKEESSHYIGH

SEQ ID NO: 59208 - protein, 612 aa, Homo sapiens
VPHIKNSTGEPVWKVLIYDRFGQDIISPLLSVKELRDMGITLHLLLHSDRDPIPDVPAVYFVMPTEENIDRMCQDLRNQLYESYYLNFISAISRSKLEDIANAALAASAVTQVAKVFDQYLNFITLEDDMFVLCNQNKELVSYRAINRPDITDTEMETVMDTIVDSLFCFFVTLGAVPIIRCSRGTAAEMVAVKLDKKLRENLRDARNSLFTGDTLGAGQFSFQRPLLVLVDRNIDLATPLHHTWTYQALVHDVLDFHLNRVNLEESSGVENSPAGARPKRKNKKSYDLTPVDKFWQKHKGSPFPEVAESVQQELESYRAQEDEVKRLKSIMGLEGEDEGAISMLSDNTAKLTSAVSSLPELLEKKRLIDLHTNVATAVLEHIKARKLDVYFEYEEKIMSKTTLDKSLLDIISDPDAGTPEDKMRLFLIYYISTQQAPSEADLEQYKKALTDAGCNLNPLQYIKQWKAFTKMASAPASYGSTTTKPMGLLSRVMNTGSQFVMEGVKNLVLKQQNLPVTRILDNLMEMKSNPETDDYRYFDPKMLRGNDSSVPRNKNPFQEAIVFVVGGGNYIEYQNLVDYIKGKQGKHILYGCSELFNATQFIKQLSQLGQK

SEQ ID NO: 59209 - protein, 57 aa, Homo sapiens
MKHMEPQVKQVFQSLPKSAFSGGYYRGGFEPKMTKREAALILGVSPTANKGKIRDAH

SEQ ID NO: 59210 - protein, 7 aa, Homo sapiens
VSFASSS

SEQ ID NO: 59211 - skipped

SEQ ID NO: 59212 - protein, 313 aa, Homo sapiens
LDSLRKAQGIDNVLVIFSHDFWSTEINQLIAGVNFCPVLQVFFPFSIQLYPNEFPGSDPRDCPRDLPKNAALKLGCINAEYPDSFGHYREAKFSQTKHHWWWKLHFVWERVKILRDYAGLILFLEEDHYLAPDFYHVFKKMWKLKQQECPECDVLSLGTYSASRSFYGMADKVDVKTWKSTEHNMGLALTRNAYQKLIECTDTFCTYDDYNWDWTLQYLTVSCLPKFWKVLVPQIPRIFHAGDCGMHHKKTCRPSTQSAQIESLLNNNKQYMFPETLTISEKFTVVAISPPRKNGGWGDIRDHELCKSYRRLQ

SEQ ID NO: 59213 - protein, 401 aa, Homo sapiens
VIDLGEAFTKCGFAGETGPRCIIPSVIKRAGMPKPVRVVQYNINTEELYSYLKEFIHILYFRHLLVNPRDRRVVIIESVLCPSHFRETLTRVLFKYFEVPSVLLAPSHLMALLTLGINSAMVLDCGYRESLVLPIYEGIPVLNCWGALPLGGKALHKELETQLLEQCTVDTSVAKEQSLPSVMGSVPEGVLEDIKARTCFVSDLKRGLKIQAAKFNIDGNNERPSPPPNVDYPLDGEKILHILGSIRDSVVEILFEQDNEEQSVATLILDSLIQCPIDTRKQLAENLVVIGGTSMLPGFLHRLLAEIRYLVEKPKYKKALGTKTFRIHTPPAKANCVAWLGGAIFGALQDILGSRSVSKEYYNQTGRIPDWCSLNNPPLEMMFDVGKTQPPLMKRAFSTEK

SEQ ID NO: 59214 - protein, 29 aa, Homo sapiens
RSFWAHDGRYIQKVPRRNFLLEKMKKQYL

SEQ ID NO: 59215 - protein, 97 aa, Homo sapiens
MAWRMGEPACWGRGLPRGFLSWGLPRAGTPRGLSWTGTSRRLPWSTWSLSRSTCTWSLPRATQRPWGLPIFWTAKCHRSLPCHWPLWRPCWATDCAL

SEQ ID NO: 59216 - protein, 99 aa, Homo sapiens
ILLDAQHESGRSSSKSSHCDSPPRSQTPQDTNRASETDTHSIGEKNSSQSEEDDIERRKEVESILKKNSDWIWVGQVGRKIFPPRSSSLNTRSARPPSA

SEQ ID NO: 59217 - protein, 65 aa, Homo sapiens
KEFLFKHPKRTATLSMRNTSVMKKGGIFSAEFLKVFFPSLLLSHLLAIGLGIYIGRRLTTSTSTF

SEQ ID NO: 59218 - protein, 6 aa, Homo sapiens
LMLKTF

SEQ ID NO: 59219 - protein, 4 aa, Homo sapiens
MRKI

SEQ ID NO: 59220 - protein, 80 aa, Homo sapiens
IDLRDDPKTLARLLYMKEKPLTYEHGVKLAKAIGAQCYLECSALTQKGLKAVFDEAILTIFHPKKKKKRCSEGHSCCSII

SEQ ID NO: 59221 - protein, 29 aa, Homo sapiens
MSTMPGLPTRPCFYDIDLDPETEQVNGLF

SEQ ID NO: 59222 - protein, 729 aa, Homo sapiens
ILLLRKQLNCLRRRDAGLLNQLQELDKQISDLRLDVEKTSEEHLETDSRPSSGFYELSDGASGSLSNSSNSVFSECLSSCHSSTCFCSPLEATLSLSDGCPKSADLIGLLEYKEGHCEDQASGAVCRSLSTPQFNSLDVIADVNPKYQCDLVSKNGNDVYRYPSPLHAVAVQSPMFLLCLTGNPLREEDRLGNHASDICGGSELDAVKTDSSLPSPSSLWSASHPSSSKKMDGYILSLVQKKTHPVRTNKPRTSVNADPTKGLLRNGSVCVRAPGGVSQGNSVNLKNSKQACLPSGGIPSLNNGTFSPPKQWSKESKAEQAESKRVPLPEGCPSGAASDLQSKHLPKTAKPASQEHARCSAIGTGESPKESAQLSGASPKESPSRGPAPPQENKVVQPLKKMSQKNSLQGVPPATPPLLSTAFPVEERPALDFKSEGSSQSLEEAHLVKAQFIPGQQPSVRLHRGHRNMGVVKNSSLKHRGPALQGLENGLPTVREKTRAGSKKCRFPDDLDTNKKLKKASSKGRKSGGGPEAGVPGRPAGGGHRAGSRAHGHGREAVVAKPKHKRTDYRRWKSSAEISYEEALRRARRGRRENVGLYPAPVPLPYASPYAYVASDSEYSAECESLFHSTVVDTSEDEQSNYTTNCFGDSESSVSEGEFVGESTTTSDSEESGGLIWSQFVQTLPIQTVTAPDLHNHPAKTFVKIKASHNLKKKILRFRSGSLKLMTTV

SEQ ID NO: 59223 - protein, 95 aa, Homo sapiens
KRIHGVGFKKRAPWALKEIRKFAMKEMGTPDVRIDTRLNKAVWAKGIRNVLYRIHVRLSRKRNEDEDSPNKLYTLVTYVTVTTFKNLQTVNVDEN

SEQ ID NO: 59224 - protein, 19 aa, Homo sapiens
RLINKLDTEPQWVPSTWLR

SEQ ID NO: 59225 - protein, 177 aa, Homo sapiens
LKGITAAVVINGSVANVGGTLRYKGETLPPVGVNRNRIKVTKDGYADIVDVLNSPLEGPDQKSFIPVERAESTFLFLVGQDDHNWKSEFYANEACKRLQAHGRRKPQIICYPETGHYIEPPYFPLCRASLHALVGSPIIWGGEPRAHAMAQVDAWKQLQTFFHKHLGGHEGTIPSKV

SEQ ID NO: 59226 - protein, 12 aa, Homo sapiens
ILVGNKCDLEDE

SEQ ID NO: 59227 - protein, 48 aa, Homo sapiens
LEITEGSEFLRLQVEGGGCSGFQYKFSLDTVINPDDRQGGRGWGKSGG

SEQ ID NO: 59228 - protein, 140 aa, Homo sapiens
IETTVMTDAAIFAVMSRVNKVIIGTKTILANGALRAVTGTHTLALAAKHHSTPLIVCAPMFKLSPQFPNEEDSFHKFVAPEEVLPFTEGDILEKVSVHCPVFDYVPPELITLFISNIGGNAPSYIYRLMSELYHPDDHVL

SEQ ID NO: 59229 - protein, 46 aa, Homo sapiens
IEELKQERQQLILMLNRHRPTCIVRTDSVKTPESEGNPLLEQLEKK

SEQ ID NO: 59230 - protein, 14 aa, Homo sapiens
IKMFKLLGCWDKLT

SEQ ID NO: 59231 - protein, 51 aa, Homo sapiens
KLTERFFKTTPWPEAEAIAPQVGNNAVFLVLYKELYYRHIYAKVSGGPSLE

SEQ ID NO: 59232 - protein, 118 aa, Homo sapiens
LAGLIGGAVIFVLVVLLSVFCWHMHKKGRYTSQKWKYNRGRRKDDYCEAGTKKDNSILEMTETSFQIVSLNNDQLLKGDFRLQPIYTPNGGINYTDCHIPNNMRYCNSSVPDLEHCHT

SEQ ID NO: 59233 - skipped

SEQ ID NO: 59234 - protein, 690 aa, Homo sapiens
MGQMFMYDLYQSRHNTEDFTLFTLDDVDAAFDKIQQLKFSQIVNLKGKGHGLSITPLPAGHMIGGTIWKIVKDGEEEIVYAVDFNHKREIHLNGCSLEMLSRPSLLITDSFNATYVQPRRKQRDEQLLTNVLETLRGDGNVLIAVDTAGRVLELAQLLDQIWRTKDAGLGVYSLALLNNVSYNVVEFSKSQVEWMSDKLMRCFEDKRNNPFQFRHLSLCHGLSDLARVPSPKVVLASQPDLECGFSRDLFIQWCQDPKNSIILTYRTTPGTLARFLIDNPSEKITEIELRKRVKLEGKELEEYLEKEKLKKEAAKKLEQSKEADIDSSDESDIEEDIDQPSAHKTKHDLMMKGEGSRKGSFFKQAKKSYPMFPAPEERIKWDEYGEIIKPEDFLVPELQATEEEKSKLESGLTNGDEPMDQDLSDVPTKCISTTESIEIKARVTYIDYEGRSDGDSIKKIINQMKPRQLIIVHGPPEASQDLAECCRAFGGKDIKVYMPKLHETVDATSETHIYQVRLKDSLVSSLQFCKAKDAELAWIDGVLDMRVSKVDTGVILEEGELKDDGEDSEMQVEAPSDSSVIAQQKAMKSLFGDDEKETGEESEIIPTLEPLPPHEVPGHQSVFMNEPRLSDFKQVLLREGIQAEFVGGVLVCNNQVAVRRTETGRIGLEGCLCQDFYRIRDLLYEQYAIV

SEQ ID NO: 59235 - protein, 313 aa, Homo sapiens
LNLESSKQELIDYKQKATRILQSKEKLINSLKEGSGFEGLDSSTASSMELEELRHEKEMQREEIQKLMGQIHQLRSELQDMEAQQVNEAESAREQLQDLHDQIAGQKASKQELETELERLKQEFHYIEEDLYRTKNTLQSRIKDRDEEIQKLRNQLTNKTLSNSSQSELENRLHQLTETLIQKQTMLESLSTEKNSLVFQLERLEQQMNSASGSSSNGSSINMSGIDNGEGTRLRNVPVLFNDTETNLAGMYGKVRKAASSIDQFSIRLGIFLRRYPIARVFVIIYMALLHLWVMIVLLTYTPEMHHDQPYGK

SEQ ID NO: 59236 - protein, 5 aa, Homo sapiens
MQITS

SEQ ID NO: 59237 - protein, 24 aa, Homo sapiens
LLWIAIIATLGNIVVVGVVYAFTF

SEQ ID NO: 59238 - protein, 5 aa, Homo sapiens
MLWSS

SEQ ID NO: 59239 - protein, 16 aa, Homo sapiens
VNAFIFCLRSQSVGPD

SEQ ID NO: 59240 - protein, 72 aa, Homo sapiens
VETKERNRYCLELTEAGLKVVGYAFDQVDDHLQTPYHETVYSLLDTLSPAYREAFGNALLQRLEALKRDGQS

SEQ ID NO: 59241 - protein, 700 aa, Homo sapiens
LKPFGVFEEEEELQRRILILGKLNNLVKEWIREISESKNLPQSVIENVGGKIFTFGSYRLGVHTKGADIDALCVAPRHVDRSDFFTSFYDKLKLQEEVKDLRAVEEAFVPVIKLCFDGIEIDILFARLALQTIPEDLDLRDDSLLKNLDIRCIRSLNGCRVTDEILHLVPNIDNFRLTLRAIKLWAKRHNIYSNILGFLGGVSWAMLVARTCQLYPNAIASTLVHKFFLVFSKWEWPNPVLLKQPEECNLNLPVWDPRVNPSDRYHLMPIITPAYPQQNSTYNVSVSTRMVMVEEFKQGLAITDEILLSKAEWSKLFEAPNFFQKYKHYIVLLASAPTEKQRLEWVGLVESKIRILVGSLEKNEFITLAHVNPQSFPAPKENPDKEEFRTMWVIGLVFKKTENSENLSVDLTYDIQSFTDTVYRQAINSKMFEVDMKIAAMHVKRKQLHQLLPNHVLQKKKKHSTEGVKLTALNDSSLDLSMDSDNSMSVPSPTSATKTSPLNSSGSSQGRNSPAPAVTAASVTNIQATEVSVPQVNSSESSGGTSSESIPQTATQPAISPPPKPTVSRVVSSTRLVNPPPRSSGNAATSGNAATKIPTPIVGVKRTSSPHKEESPKKTKTEEDETSEDANCLALSGHDKTEAKEQLDTETSTTQSETIQTAASLLASQKTSSTDLSDIPALPANPIPVIKNSIKLRLNR

SEQ ID NO: 59242 - protein, 203 aa, Homo sapiens
IKTLEGEFSVTMWSSDEKKDIDHETVVEEQIIGENSPPDYSEYMTGKKLPPGGIPGIDLSDPKQLAEFARMKPRKIKEDDAPRTIACPHKGCTKMFRDNSAMRKHLHTHGPRVHVCAECGKAFVESSKLKRHQLVHTGEKPFQCTFEGCGKRFSLDFNLRTHVRIHTGDRPYVCPFDGCNKKFAQSTNLKSHILTHAKAKNNQ

SEQ ID NO: 59243 - protein, 79 aa, Homo sapiens
IGKVVQVYRKKYVIYIEQVQREKANGTTVHAGVHPSKVVITRLKLDKDRKKILERKAKSCQVGKEKGKYKEETIEKMQE

SEQ ID NO: 59244 - protein, 370 aa, Homo sapiens
ITHNRNVITEPIYPEVVHMFAVNMFRTLPPSSNPTGAEFDPEEDEPTLEAAWPHLQLVYEFFLRFLESPDFQPNIAKKYIDQKFVLQLLELFDSEDPRERDFLKTTLHRIYGKFLGLRAYIRKQINNIFYRFIYETEHHNGIAELLEILGSIINGFALPLKEEHKIFLLKVLLPLHKVKSLSVYHPQLAYCVVQFLEKDSTLTEPVVMALLKYWPKTHSPKEVMFLNELEEILDVIEPSEFVKIMEPLFRQLAKCVSSPHFQVAERALYYWNNEYIMSLISDNAAKILPIMFPSLYRNSKTHWNKTIHGLIYNALKLFMEMNQKLFDDCTQQFKAEKLKEKLKMKEREEAWVKIENLAKANPQVLKKRIT

SEQ ID NO: 59245 - protein, 10 aa, Homo sapiens
RMKLFLRQSK

SEQ ID NO: 59246 - protein, 814 aa, Homo sapiens
ISSERRKEKSRDAARSRRSKESEVFYELAHQLPLPHNVSSHLDKASVMRLTISYLRVRKLLDAGDLDIEDDMKAQMNCFYLKALDGFVMVLTDDGDMIYISDNVNKYMGLTQFELTGHSVFDFTHPCDHEEMREMLTHRNGLVKKGKEQNTQRSFFLRMKCTLTSRGRTMNIKSATWKVLHCTGHIHVYDTNSNQPQCGYKKPPMTCLVLICEPIPHPSNIEIPLDSKTFLSRHSLDMKFSYCDERITELMGYEPEELLGRSIYEYYHALDSDHLTKTHHDMFTKGQVTTGQYRMLAKRGGYVWVETQATVIYNTKNSQPQCIVCVNYVVSGIIQHDLIFSLQQTECVLKPVESSDMKMTQLFTKVESEDTSSLFDKLKKEPDALTLLAPAAGDTIISLDFGSNDTETDDQQLEEVPLYNDVMLPSPNEKLQNINLAMSPLPTAETPKPLRSSADPALNQEVALKLEPNPESLELSFTMPQIQDQTPSPSDGSTRQSSPEPNSPSEYCFYVDSDMVNEFKLELVEKLFAEDTEAKNPFSTQDTDLDLEMLAPYIPMDDDFQLRSFDQLSPLESSSASPESASPQSTVTVFQQTQIQEPTANATTTTATTDELKTVTKDRMEDIKILIASPSPTHIHKETTSATSSPYRDTQSRTASPNRAGKGVIEQTEKSHPRSPNVLSVALSQRTTVPEEELNPKILALQNAQRKRKMEHDGSLFQAVGIGTLLQQPDDHAATTSLSWKRVKGCKSSEQNGMEQKTIILIPSDLACRLLGQSMDESGLPQLTSYDCEVNAPIQGSRNLLQGEELLRALDQVN

SEQ ID NO: 59247 - protein, 323 aa, Homo sapiens [sequence omitted]

SEQ ID NO: 59248 - protein, 24 aa, Homo sapiens
KMIPMILKMFLHRNEGNTKNQIQF

SEQ ID NO: 59249 - protein, 85 aa, Homo sapiens [sequence omitted]

SEQ ID NO: 59250 - protein, 23 aa, Homo sapiens
VLCLGRALYWACMKVSHPVQNFS

SEQ ID NO: 59251 - protein, 307 aa, Homo sapiens
TMASNVTNKTDPRSMNSRVFIGNLNTLVVKKSDVEAIFSKYGKIVGCSVHKGFAFVQYVNERNARAAVAGEDGRMIAGQVLDINLAAEPKVNRGKAGVKRSAAEMYGSVTEHPSPSPLLSSSFDLDYDFQRDYYDRMYSYPARVPPPPPIARAVVPSKRQRVSGNTSRRGKSGFNSKSGQRGSSKSGKLKGDDLQAIKKELTQIKQKVDSLLENLEKIEKEQSKQAVEMKNDKSEEEQSSSSVKKDETNVKMESEGGADDSAEEGDLLDDDDNEDRGDDQLELIKDDEKEAEEGEDDRDSANGEDDS

SEQ ID NO: 59252 - protein, 219 aa, Homo sapiens
LPQKIIYLNQLLQEDSLNVADLTSLRAPLDIPIPDPPPKDDEMETDKQEKKEGKRDKRKGLNPLFLTVHKCGFLPGNEKVLSLLALVKPEVWTLKEKCILVITWIQHLIPKIEDGNDFGVAIQEKVLERVNAVKTKVEAFQTTISKYFSERGDAVAKASKETHVMDYRALVHERDEAAYGELRAMVLDLRAFYAELYHIISSNLEKIVNPKGEEKPSMY

SEQ ID NO: 59253 - protein, 82 aa, Homo sapiens
KMLIKVKTLTGKEIEIDIEPTDKVERIKERVEEKEGIPPQQQRLIYSGKQMNDEKTAADYKILGGSVLHLVLALRGGGGLRQ

SEQ ID NO: 59254 - protein, 114 aa, Homo sapiens
INRVVSHPTLPVTITAHEDRHIKFFDNKTGKMIHSMVAHLDAVTSLAVDPNGIYLMSGSHDCSIRLWNLDSKTCVQEITAHRKKLDESIYDVAFHSSKAYIASAGADALAKVFV

SEQ ID NO: 59255 - protein, 25 aa, Homo sapiens
LLDRDARSAEEDPQRFLLLGILTKV

SEQ ID NO: 59256 - protein, 15 aa, Homo sapiens
VDQVSTPPAAKKSRI

SEQ ID NO: 59257 - protein, 55 aa, Homo sapiens
MDSKLSGRYRRHCGLGFSEVEDYDGEGDVAGDDDDDDDDSPDPESLDDSESDSEP

SEQ ID NO: 59258 - protein, 200 aa, Homo sapiens
IIKFLQEHGSDSFLAEHKLLGNIKNVAKTANKDHLVTAYNHLFETKRFKGTESISKVSEQVKNVKLNEDKPKETKSEETLDEGPPKYTKSVLKKGDKTNFPKKGDVVHCWYTGTLQDGTVFDTNIQTSAKKKKNAKPLSFKVGVGKVIRGWDEALLTMSKGEKARLEIEPEWAYGKKGQPDAKIPPNAKLTFEVELVDID

SEQ ID NO: 59259 - protein, 6 aa, Homo sapiens
RKIFWL

SEQ ID NO: 59260 - protein, 72 aa, Homo sapiens
KDELDIMKFICKDFWTTVFKKQIDNLRTNHQYLAFTCGLIRGGLSNLGIKSIVTAEVSSMPACKFQVMIQKL

SEQ ID NO: 59261 - protein, 24 aa, Homo sapiens
IKSIVTAEVSSMPACKFQVMIQKL

SEQ ID NO: 59262 - protein, 40 aa, Homo sapiens
MKELEQIVKMYEAYRQALLTELENRKQRQQWYAQQHGKNF

SEQ ID NO: 59263 - protein, 26 aa, Homo sapiens
IQQPLRGHQRHHLHSGLPQGNAVCGL

SEQ ID NO: 59264 - protein, 1281 aa, Homo sapiens
VDYDFPTDFPAIAPFLADIDTSHGRGRVLYREDTSPAVLGLAARYVRAGFPRSARFTPTHAFLATWEQVGAYEEVKRGALPSGELNTFQAVLASDGSDSYALFLYPANGLQFLGTRPKESYNVQLQLPARVGFCRGEADDLKSEGPYFSLTSTEQSVKNLYQLSNLGIPGVWAFHIGSTSPLDNVRPAAVGDLSAAHSSVPLGRSFSHATALESDYNEDNLDYYDVNEEEAEYLPGEPEEALNGHSSIDVSFQSKVDTKPLEESSTLDPHTKEGTSLGEVGGPDLKGQVEPWDERETRSPAPPEVDRDSLAPSWETPPPYPENGSIQPYPDGGPVPSEMDVPPAHPEEEIVLRSYPASGHTTPLSRGTYEVGLEDNIGSNTEVFTYNAANKETCEHNHRQCSRHAFCTDYATGFCCHCQSKFYGNGKHCLPEGAPHRVNGKVSGHLHVGHTPVHFTDVDLHAYIVGNDGRAYTAISHIPQPAAQALLPLTPIGGLFGWLFALEKPGSENGFSLAGAAFTHDMEVTFYPGEETVRITQTAEGLDPENYLSIKTNIQGQVPYVSANFTAHISPYKELYHYSDSTVTSTSSRDYSLTFGAINQTWSYRIHQNITYQVCRHAPRHPSFPTTQQLNVDRVFALYNDEERVLRFAVTNQIGPVKEDSDPTPGNPCYDGSHMCDTTARCHPGTGVDYTCECASGYQGDGRNCVDENECATGFHRCGPNSVCINLPGSYRCECRSGYEFADDRHTCILITPPANPCEDGSHTCAPAGQARCVHHGGSTFSCACLPGYAGDGHQCTDVDECSENRCHPAATCYNTPGSFSCRCQPGYYGDGFQCIPDSTSSLTPCEQQQRHAQAQYAYPGARFHIPQCDEQGNFLPLQCHGSTGFCWCVDPDGHEVPGTQTPPGSTPPHCGPSPEPTQRPPTICERWRENLLEHYGGTPRDDQYVPQCDDLGHFIPLQCHGKSDFCWCVDKDGREVQGTRSQPGTTPACIPTVAPPMVRPTPRPDVTPPSVGTFLLYTQGQQIGYLPLNGTRLQKDAAKTLLSLHGSIIVGIDYDCRERMVYWTDVAGRTISRAGLELGAEPETIVNSGLISPEGLAIDHIRRTMYWTDSVLDKIESALLDGSERKVLFYTDLVNPRAIAVDPIRGNLYWTDWNREAPKIETSSLDGENRRILINTDIGLPNGLTFDPFSKLLCWADAGTKKLECTLPDGTGRRVIQNNLKYPFSIVSYADHFYHTDWRRDGVVSVNKHSGQFTDEYLPEQRSHLYGITAVYPYCPTGRK

SEQ ID NO: 59265 - protein, 433 aa, Homo sapiens
IQNVFEIKLQSFVKEQLEECRKSDAEQYLKNLYDLYTRTTNLSSKLMEFNLGTDKQTFLSKLIKSIFISYLENYIEVETGYLKSRSAMILQRYYDSKNHQKRSIGTGGIQDLKERIRQRTNLPLGPSIDTHGETFLSQEVVVNLLQETKQAFERCHRLSDPSDLPRNAFRIFTILVEFLCIEHIDYALETGLAGIPSSDSRNANLYFLDVVQQANTIFHLFDKQFNDHLMPLISSSPKLSECLQKKKEIIEQMEMKLDTGIDRTLNCMIGQMKHILAAEQKKTDFKPEDENNVLIQYTNACVKVCAYVRKQVEKIKNSMDGKNVDTVLMELGVRFHRLIYEHLQQYSYSCMGGMLAICDVAEYRKCAKDFKIPMVLHLFDTLHALCNLLVVAPDNLKQVCSGEQLANLDKNILHSFVQLRADYRSARLARHFS

SEQ ID NO: 59266 - protein, 147 aa, Homo sapiens
TAGRKMSESLVVCDVAEDLVEKLRKFRFRKETNNAAIIMKIDKDKRLVVLDEELEGISPDELKDELPERQPRFIVYSYKYQHDDGRVSYPLCFIFSSPVGCKPEQQMMYAGSKNKLVQTAELTKVFEIRNTEDLTEEWLREKLGFFH

SEQ ID NO: 59267 - protein, 469 aa, Homo sapiens
RDMSSAPTTPPSVDKVDGFSRKSVRKARQKRSQSSSQFRSQGKPIELTPLPLLKDVPSSEQPELFLKKLQQCCVIFDFMDTLSDLKMKEYKRSTLNELVDYITISRGCLTEQTYPEVVRMVSCNIFRTLPPSDSNEFDPEEDEPTLEASWPHLQLVYEFFIRFLESQEFQPSIAKKYIDQKFVLQLLELFDSEDPRERDYLKTVLHRIYGKFLGLRAFIRKQINNIFLRFVYETEHFNGVAELLEILGSIINGFALPLKAEHKQFLVKVLIPLHTVRSLSLFHAQLAYCIVQFLEKDPSLTEPVIRGLMKFWPKTCSQKEVMFLGELEEILDVIEPSQFVKIQEPLFKQIAKCVSSPHFQVAERALYYWNNEYIMSLIEENSNVILPIMFSSLYRISKEHWNPAIVALVYNVLKAFMEMNSTMFDELTATYKSDRQREKKKEKEREELWKKLEDLELKRGLRRDGIIPT

SEQ ID NO: 59268 - protein, 442 aa, Homo sapiens
IMSLRQRLAQLVGRLQDPQKVARFQRLCGVEAPPRRSADRREDEKAEAPLAGDPRLRGRQPGAPGGPQPPGSDRNQCPAKPDGGGAPNGVRNGLAAELGPASPRRAGALRRNSLTGEEGQLARVSNWPLYCLFCFGTELGNELFYILFFPFWIWNLDPLVGRRLVVIWVLVMYLGQCTKDIIRWPRPASPPVVKLEVFYNSEYSMPSTHAMSGTAIPISMVLLTYGRWQYPLIYGLILIPCWCSLVCLSRIYMGMHSILDIIAGFLYTILILAVFYPFVDLIDNFNQTHKYAPFIIIGLHLALGIFSFTLDTWSTSRGDTAEILGSGAGIACGSHVTYNMGLVLDPSLDTLPLAGPPITVTLFGKAILRILIGMVFVLIIRDVMKKITIPLACKIFNIPCDDIRKARQHMEVELPYRYITYGMVGFSITFFVPYIFFFIGIS

SEQ ID NO: 59269 - protein, 198 aa, Homo sapiens
VRFHSVPAFVLATDLMVDVPGHGKVMVDIAYGGAFYAFVTAEKLGLDICSAKTRDLVDAASAVTEAVKAQFKINHPDSEDLAFLYGTILTDGKDAYTKEPTTNICVFADEQVDRSPTGSGVTARIALQYHKGLLELNQMRAFKSSATGSVFTGKAVREAKCGDFKAVIVEVSGQAHYTGTASFIIEDDDPLRDGFLLK

SEQ ID NO: 59270 - protein, 11 aa, Homo sapiens
KGLENWLLKSQ

SEQ ID NO: 59271 - protein, 25 aa, Homo sapiens
LLSIIILLELAILGGLVYYKFFRSH

SEQ ID NO: 59272 - protein, 157 aa, Homo sapiens
LEADKPVEDILTYEEFHPFLFSQHSQCPYIEFESFDKAVDEFYSKIEGQKIDLKALQQEKQALKKLDNVRKDHENRLEALQQAQEIDKLKGELIEMNLQIVDRAIQVVRSALANQIDWTEIGLIVKEAQAQGDPVASAIKELKLQTNHVTMLLRGGR

SEQ ID NO: 59273 - protein, 4 aa, Homo sapiens
IVTA

SEQ ID NO: 59274 - protein, 563 aa, Homo sapiens
KMRPEPGGCCCRRTVRANGCVANGEVRNGYVRSSAAAAAAAAAGQIHHVTQNGGLYKRPFNEAFEETPMLVAVLTYVGYGVLTLFGYLRDFLRYWRIEKCHHATEREEQKDFVSLYQDFENFYTRNLYMRIRDNWNRPICSVPGARVDIMERQSHDYNWSFKYTGNIIKGVINMGSYNYLGFARNTGSCQEAAAKVLEEYGAGVCSTRQEIGNLDKHEELEELVARFLGVEAAMAYGMGFATNSMNIPALVGKGCLILSDELNHASLVLGARLSGATIRIFKHNNMQSLEKLLKDAIVYGQPRTRRPWKKILILVEGIYSMEGSIVRLPEVIALKKKYKAYLYLDEAHSIGALGPTGRGVVEYFGLDPEDVDVMMGTFTKSFGASGGYIGGKKELIDYLRTHSHSAVYATSLSPPVVEQIITSMKCIMGQDGTSLGKECVQQLAENTRYFRRRLKEMGFIIYGNEDSPVVPLMLYMPAKIGAFGREMLKRNIGVVVVGFPATPIIESRARFCLSAAHTKEILDTALKEIDEVGDLLQLKYSRHRLVPLLDRPFDETTYEETED

SEQ ID NO: 59275 - protein, 11 aa, Homo sapiens
MTSTFLCLTSD

SEQ ID NO: 59276 - protein, 813 aa, Homo sapiens
VVAEAKATALGVGTGPERRMRVRIGLTLLLCAVLLSLASASSDEEGSQDESLDSKTTLTSDESVKDHTTAGRVVAGQIFLDSEESELESSIQEEEDSLKSQEGESVTEDISFLESPNPENKDYEEPKKVRKPALTAIEGTAHGEPCHFPFLFLDKEYDECTSDGREDGRLWCATTYDYKADEKWGFCETEEEAAKRRQMQEAEMMYQTGMKILNGSNKKSQKREAYRYLQKAASMNHTKALERVSYALLFGDYLPQNIQAAREMFEKLTEEGSPKGQTALGFLYASGLGVNSSQAKALVYYTFGALGGNLIAHMVLGYRYWAGIGVLQSCESALTHYRLVANHVASDISLTGGSVVQRIRLPDEVENPGMNSGMLEEDLIQYYQFLAEKGDVQAQVGLGQLHLHGGRGVEQNHQRAFDYFNLAANAGNSHAMAFLGKMYSEGSDIVPQSNETALHYFKKAADMGNPVGQSGLGMAYLYGRGVQVNYDLALKYFQKAAEQGWVDGQLQLGSMYYNGIGVKRDYKQALKYFNLASQGGHILAFYNLAQMHASGTGVMRSCHTAVELFKNVCERGRWSERLMTAYNSYKDGDYNAAVIQYLLLAEQGYEVAQSNAAFILDQREASIVGENETYPRALLHWNRAASQGYTVARIKLGDYHFYGFGTDVDYETAFIHYRLASEQQHSAQAMFNLGYMHEKGLGIKQDIHLAKRFYDMAAEASPDAQVPVFLALCKLGVVYFLQYIRETNIRDMFTQLDMDQLLGPEWDLYLMTIIALLLGTVIAYRQRQHQDMPAPRPPGPRPAPPQQEGPPEQQPPQ

SEQ ID NO: 59277 - protein, 128 aa, Homo sapiens
VLTAVHGIQSAFDEAMSYCRYHPSKGYWWHFKDHEEQDKVRPKAKRKEEPSSIFQRQRVDALLLDLRQKFPPKFVQLKPGEKPVPVDQTKKEAEPIPETVKPEEKETTKNVQQTVSAKGPPEKRMRLQ

SEQ ID NO: 59278 - protein, 573 aa, Homo sapiens
KIKLKKSKNVATEGTSTQKEFEVKDPELEAQGDDMVCDDPEAGEMTSENLVQTAPKKKKNKGKKGLEPSQSTAAKVPKKAKTWIPEVHDQKADVSAWKDLFVPRPVLRALSFLGFSAPTPIQALTLAPAIRDKLDILGAAETGSGKTLAFAIPMIHAVLQWQKRNAAPPPSNTEAPPGETRTEAGAETRSPGKAEAESDALPDDTVIESEALPSDIAAEARAKTGGTVSDQALLFGDDDAGEGPSSLIREKPVPKQNENEEENLDKEQTGNLKQELDDKSATCKAYPKRPLLGLVLTPTRELAVQVKQHIDAVARFTGIKTAILVGGMSTQKQQRMLNRRPEIVVATPGRLWELIKEKHYHLRNLRQLRCLVVDEADRMVEKGHFAELSQLLEMLNDSQYNPKRQTLVFSATLTLVHQAPARILHKKHTKKMDKTAKLDLLMQKIGMRGKPKVIDLTRNEATVETLTETKIHCETDEKDFYLYYFLMQYPGRSLVFANSISCIKRLSGLLKVLDIMPLTLHACMHQKQRLRNLEQFARLEDCVLLATDVAARGLDIPKVQHVIHYQVGASENL

SEQ ID NO: 59279 - protein, 456 aa, Homo sapiens
ISSSRVLDMPGIKRILTVTILALCLPSPGNAQAQCTNGFDLDRQSGQCLDIDECRTIPEACRGDMMCVNQNGGYLCIPRTNPVYRGPYSNPYSTPYSGPYPAAAPPLSAPNYPTISRPLICRFGYQMDESNQCVDVDECATDSHQCNPTQICINTEGGYTCSCTDGYWLLEGQCLDIDECRYGYCQQLCANVPGSYSCTCNPGFTLNEDGRSCQDVNECATENPCVQTCVNTYGSFICRCDPGYELEEDGVHCSDMDECSFSEFLCQHECVNQPGTYFCSCPPGYILLDDNRSCQDINECEHRNHTCNLQQTCYNLQGGFKCIDPIRCEEPYLRISDNRCMCPAENPGCRDQPFTILYRDMDVVSGRSVPADIFQMQATTRYPGAYYIFQIKSGNEGREFYMRQTGPISATLVMTRPIKGPREIQLDLEMITVNTVINFRGSSVIRLRIYVSQYPF

SEQ ID NO: 59280 - protein, 53 aa, Homo sapiens
LACGTPDRRGCAFPAPGPSRHTRSSPLARANAQDDHHPRVCHHLRLERSFMQG

SEQ ID NO: 59281 - protein, 316 aa, Homo sapiens [sequence omitted]

SEQ ID NO: 59282 - protein, 18 aa, Homo sapiens
KVEEEIQTLARAHHHGPL

SEQ ID NO: 59283 - protein, 858 aa, Homo sapiens
KTFTAWCNSHLRKAGTQIENIEEDFRDGLKLMLLLEVISGERLAKPERGKMRVHKISNVNKALDFIASKGVKLVSIGAEEIVDGNVKMTLGMIWTIILRFAIQDISVEETSAKEGLLLWCQRKTAPYKNVNIQNFHISWKDGLGFCALIHRHRPELIDYGKLRKDDPLTNLNTAFDVAEKYLDIPKMLDAEDIVGTARPDEKAIMTYVSSFYHAFSGAQKAETAANRICKVLAVNQENEQLMEDYEKLASDLLEWIRRTIPWLENRVPENTMHAMQQKLEDFRDYRRLHKPPKVQEKCQLEINFNTLQTKLRLSNRPAFMPSEGRMVSDINNAWGCLEQVEKGYEEWLLNEIRRLERLDHLAEKFRQKASIHEAWTDGKEAMLRQKDYETATLSEIKALLKKHEAFESDLAAHQDRVEQIAAIAQELNELDYYDSPSVNARCQKICDQWDNLGALTQKRREALERTEKLLETIDQLYLEYAKRAAPFNNWMEGAMEDLQDTFIVHTIEEIQGLTTAHEQFKATLPDADKERLAILGIHNEVSKIVQTYHVNMAGTNPYTTITPQEINGKWDHVRQLVPRRDQALTEEHARQQHNERLRKQFGAQANVIGPWIQTKMEEIGRISIEMHGTLEDQLSHLRQYEKSIVNYKPKIDQLEGDHQLIQEALIFDNKHTNYTMEHIRVGWEQLLTTIARTINEVENQILTRDAKGISQEQMNEFRASFNHFDRDHSGTLGPEEFKACLISLGYDIGNDPQGEAEFARIMSIVDPNRLGVVTFQAFIDFMSRETADTDTADQVMASFKILAGDKNYITMDELRRELPPDQAEYCIARMAPYTGPDSVPGALDYMSFSTALYGESDL

SEQ ID NO: 59284 - protein, 24 aa, Homo sapiens
KKTGMMDTDDFRACLISMGYNMVT

SEQ ID NO: 59285 - protein, 32 aa, Homo sapiens
RAVHGHSGLKRQRIELEDTDSENSSSEKKLKT

SEQ ID NO: 59286 - protein, 20 aa, Homo sapiens
VRLAQNILSYLDLKSDEWEY

SEQ ID NO: 59287 - protein, 69 aa, Homo sapiens
VWQHVYEKKLSPPFKPQVTSETDTRYFDEEFTAQMITITPPDQDDSMECVDSERRPHFPQFSYSASGTA

SEQ ID NO: 59288 - protein, 207 aa, Homo sapiens
KLSSLGTGSSSGNGKVATAPTRYYDDIYFDSDSEDEDRAVQVTKKKKKKQHKIPTNDELLYDPEKDNRDQAWVDAQRRGYHGLGPQRSRQQQPVPNSDAVLNCPACMTTLCLDCQRHESYKTQYRAMFVMNCSINKEEVLRYKASENRKKRRVHKKMRSNREDAAEKAETDVEEIYHPVMCTECSTEVAVYDKDEVFHFFNVLASHS

SEQ ID NO: 59289 - protein, 23 aa, Homo sapiens
ICFRNSGFYRYMQVFSQSFRTVR

SEQ ID NO: 59290 - protein, 15 aa, Homo sapiens
MRGLSCPSEEGAWCG

SEQ ID NO: 59291 - protein, 1856 aa, Homo sapiens
LAAGRGRENSPRASSVPTTKLFAVPARTTLQPPRAMRPRTKARSPGRALRNPWRGFLPLTLALFVGAGHAQRDPVGRYEPAGGDANRLRRPGGSYPAAAAAKVYSLFREQDAPVAGLQPVERAQPGWGSPRRPTEAEARRPSRAQQSRRVQPPAQTRRSTPLGQQQPAPRTRAAPALPRLGTPQRSGAAPPTPPRGRLTGRNVCGGQCCPGWTTANSTNHCIKPVCEPPCQNRGSCSRPQLCVCRSGFRGARCEEVIPDEEFDPQNSRLAPRRWAERSPNLRRSSAAGEGTLARAQPPAPQSPPAPQSPPAGTLSGLSQTHPSQQHVGLSRTVRLHPTATASSQLSSNALPPGPGLEQRDGTQQAVPLEHPSSPWGLNLTEKIKKIKIVFTPTICKQTCARGHCANSCERGDTTTLYSQGGHGHDPKSGFRIYFCQIPCLNGGRCIGRDECWCPANSTGKFCHLPIPQPDREPPGRGSRPRALLEAPLKQSTFTLPLSNQLASVNPSLVKVHIHHPPEASVQIHQVAQVRGGVEEALVENSVETRPPPWLPASPGHSLWDSNNIPARSGEPPRPLPPAAPRPRGLLGRCYLNTVNGQCANPLLELTTQEDCCGSVGAFWGVTLCAPCPPRPASPVIENGQLECPQGYKRLNLTHCQDINECLTLGLCKDAECVNTRGSYLCTCRPGLMLDPSRSRCVSDKAISMLQGLCYRSLGPGTCTLPLAQRITKQICCCSRVGKAWGSECEKCPLPGTEAFREICPAGHGYTYASSDIRLSMRKAEEEELARPPREQGQRSSGALPGPAERQPLRVVTDTWLEAGTIPDKGDSQAGQVTTSVTHAPAWVTGNATTPPMPEQGIAEIQEEQVTPSTDVLVTLSTPGIDRCAAGATNVCGPGTCVNLPDGYRCVCSPGYQLHPSQAYCTDDNECLRDPCKGKGRCINRVGSYSCFCYPGYTLATSGATQECQDINECEQPGVCSGGQCTNTEGSYHCECDQGYIMVRKGHCQDINECRHPGTCPDGRCVNSPGSYTCLACEEGYRGQSGSCVDVNECLTPGVCAHGKCTNLEGSFRCSCEQGYEVTSDEKGCQDVDECASRASCPTGLCLNTEGSFACSACENGYWVNEDGTACEDLDECAFPGVCPSGVCTNTAGSFSCKDCDGGYRPSPLGDSCEDVDECEDPQSSCLGGECKNTVGSYQCLCPQGFQLANGTVCEDVNECMGEEHCAPHGECLNSHGSFFCLCAPGFVSAEGGTSCQDVDECATTDPCVGGHCVNTEGSFNCLCETGFQPSPESGECVDIDECEDYGDPVCGTWKCENSPGSYRCVLGCQPGFHMAPNGDCIDIDECANDTMCGSHGFCDNTDGSFRCLCDQGFEISPSGWDCVDVNECELMLAVCGAALCENVEGSFLCLCASDLEEYDAQEGHCRPRGAGGQSMSEAPTGDHAPAPTRMDCYSGQKGHAPCSSVLGRNTTQAECCCTQGASWGDACDLCPSEDSAEFSEICPSGKGYIPVEGAWTFGQTMYTDADECVIFGPGLCPNGRCLNTVPGYVCLCNPGFHYDASHKKCEDHDECQDLACENGECVNTEGSFHCFCSPPLTLDLSQQRCMNSTSSTEDLPDHDIHMDICWKKVTNDVCSEPLRGHRTTYTECCCQDGEAWSQQCALCPPRSSEVYAQLCNVARIEAEREAGVHFRPGYEYGPGPDDLHYSIYGPDGAPFYNYLGPEDTVPEPAFPNTAGHSADRTPILESPLQPSELQPHYVASHPEPPAGFEGLQAEECGILNGCENGRCVRVREGYTCDCFEGFQLDAAHMACVDVNECDDLNGPAVLCVHGYCENTEGSYRCHCSPGYVAEAGPPHCTAKE

SEQ ID NO: 59292 - protein, 66 aa, Homo sapiens [sequence omitted]

SEQ ID NO: 59293 - protein, 53 aa, Homo sapiens
ISKAKATENGLVNGENSIPNGTRSENESLNQESKRAVEDAKGSSSDSTAGVKE

SEQ ID NO: 59294 - protein, 13 aa, Homo sapiens
RLLDEEEATDNDL

SEQ ID NO: 59295 - protein, 176 aa, Homo sapiens
VANRGRRFKWAIELSGPGGGSRGRSDRGSGQGDSLYPVGYLDKQVPDTSVQETDRILVEKRCWDIALGPLKQIPMNLFIMYMAGNTISIFPTMMVCMMAWRPIQALMAISATFKMLESSSQKFLQGLVYLIGNLMGLALAVYKCQSMGLLPTHASDWLAFIEPPERMEFSGGGLLL

SEQ ID NO: 59296 - protein, 27 aa, Homo sapiens
TVSPAEKWSVHIAMHPQVNIYRVTPKR

SEQ ID NO: 59297 - protein, 64 aa, Homo sapiens
KKFSCPICEKRFMRSDHLTKHARRHANFHPGMLQRRGGGSRTGSLSDYSRSDASSPTISPASSP

SEQ ID NO: 59298 - protein, 32 aa, Homo sapiens
LTPRRAPAALAAAALSATRRKRRPRGPAALTV

SEQ ID NO: 59299 - protein, 121 aa, Homo sapiens
LAEGLLSHYLPDLQRSKQALQELTQNQVVLLDTLEQEISKFKECHSMLDINALFAEAKHYHAKLVNIRKEMLMLHEKTSKLKKRALKLQQKRQKEELEREQQREKEFEREKQLTARPAKRM

SEQ ID NO: 59300 - protein, 5 aa, Homo sapiens
IMPSW

SEQ ID NO: 59301 - protein, 34 aa, Homo sapiens
MKADLMPFLYWNMMLRGYWGGPAFLRKLFHLGMS

SEQ ID NO: 59302 - protein, 107 aa, Homo sapiens
IPPMEKAVVKTDIQIALPSGCYGRVAPRSGLAAKHFIDVGAGVIDEDYRGNVGVVLFNFGKEKFEVKKGDRIAQLICERIFYPEIEEVQALDDTERGSGGFGSTGKN

SEQ ID NO: 59303 - protein, 379 aa, Homo sapiens
VARGRLEKRNSDLLLLVDTHKKQIDQKEADYGRLSSRLQAREGLGKRCEDDKVKLQNNISYQMADIHHLKEQLAELRQEFLRQEDQLQDYRKNNTYLVKRLEYESFQCGQQMKELRAQHEENIKKLADQFLEEQKQETQKIQSNDGKELDINNQVVPKNIPKVAENVADKNEEPSSNHIPHGKEQIKRGGDAGMPGIEENDLAKVDDLPPALRKPPISVSQHESHQAISHLPTGQPLSPNMPPDSHINHNGNPGTSKQNPSSPLQRLIPGSNLDSEPRIQTDILKQATKDRVSDFHKLKQSRFFDENESPVDPQHGSKLADYNGDDGNVGEYEADKQAELAYNEEEDGDGGEEDVQDDEERELQMDPADYGKQHFNDVL

SEQ ID NO: 59304 - protein, 65 aa, Homo sapiens
IIDNSPQAFAYQLSNGIPIESWFMDKNDNELLKLIPFLEKLVELNEDVRPHIRDRFRLHDLLPPD

SEQ ID NO: 59305 - protein, 178 aa, Homo sapiens
IKEKERQQKKRQEEIKKRLEEPEEPKVLTPEEQLADKLRLKKLQEESDLELAKETFGVNNAVYGIDAMNPSSRDDFTEFGKLLKDKITQYEKSLYYASFLEVLVRDVCISLEIDDLKKITNSLTVLCSEKQKQEKQSKAKKKKKGVVPGGGLKATMKDDLADYGGYDGGYVQDYEDFM

SEQ ID NO: 59306 - protein, 12 aa, Homo sapiens
IMLFMNTRSTTL

SEQ ID NO: 59307 - protein, 212 aa, Homo sapiens
IDIIKHPNETDGKSTAIHAKLLAPEFVNIYTYPCIPEYEEKDHEVALIFPGPQSISIKDISFHLQKRIQNNVRGKNDDPDKPSFKRKRTEEQEFCDLNDSKCKGTTLKKIIFIDSTWNQTNKIFTDERLQGLLQVELKTRKTCFWRHQKGKPDTFLSTIEAIYYFLVDYHTDILKEKYRGQYDNLLFFYSFMYQLIKNAKCSGDKETGKLTH

SEQ ID NO: 59308 - protein, 423 aa, Homo sapiens
MSQSSSYGNLHSHDRLSYPPHSVSPTDINTSLPPMSSFHRGSTSSSPYVAASHTPPINGSDSILGTRGNAAGSSQTGDALGKALASIYSPDHTSSSFPSNPSTPVGSPSPLTGTSQWPRPGGQAPSSPSYENSLHSLQSRMEDRLDRLDDAIHVLRNHAVGPSTSLPAGHSDIHSLLGPSHNAPIGSLNSNYGGSSLVASSRSASMVGTHREDSVSLNGNHSVLSSTVTTSSTDLNHKTQENYRGGLQSQSGTVVTTEIKTENKEKDENLHEPPSSDDMKSDDESSQKDIKVSSRGRTSSTNEDEDLNPEQKIEREKERRMANNARERLRVRDINEAFKELGRMCQLHLKSEKPQTKLLILHQAVAVILSLEQQVRERNLNPKAACLKRREEEKVSAVSAEPPTTLPGTHPGLSETTNPMGHM

SEQ ID NO: 59309 - protein, 16 aa, Homo sapiens
MVTNSALENTGTSRKR

SEQ ID NO: 59310 - protein, 10 aa, Homo sapiens
MSRRSPVVSE

SEQ ID NO: 59311 - protein, 246 aa, Homo sapiens
KKVVDPFSKKDWYDVKAPAMFNIRNIGKTLVTRTQGTKIASDGLKGRVFEVSLADLQNDEVAFRKFKLITEDVQGKNCLTNFHGMDLTRDKMCSMVKKWQTMIEAHVDVKTTDGYLLRLFCVGFTKKRKNQIRKTSYAQHQQVRQIRKKMMEIMIREVQTNDLKEVVNKLIPDSIGKDIEKACQSIYPLHDVFVRKVKMLKKPKFELGKLMELHGEGSSSGKATGDETGAKVERADGYEPPVQESV

SEQ ID NO: 59312 - protein, 73 aa, Homo sapiens
VPNLHVMKAMQSLKSRGYMKEQFAWRHFYWYLTNEGIHHLRDYLHLPPEIVPATLCHSRPETGRPRPKGLEGE

SEQ ID NO: 59313 - protein, 49 aa, Homo sapiens
LDDSAKKLLLEKYKYVENFGLIDGRLTICTISCFFAIVALIWDYMHPFP

SEQ ID NO: 59314 - protein, 264 aa, Homo sapiens
KAFIAVYYLLPKDQGITLRKLVRGATLDIVDGMAQLMEVLSVTPTQSPENNDLISYNSVWVACQQMPQIPRDNKAAALLMLTKNVDFVKDAHEEMEQAVEECDPYSGLLNDTEENNSDNHNHEDDVLGFPSNQDLYWSEDDQELIIPCLALVRASKACLKKIRMLVAENGKKDQVAQLDDIVDISDEISPSVDDLALSIYPPMCHLTVRINSAKLVSVLKKALEITKASHVTPQPEDSWIPLLINAIDHCMNRIKELTQSELEL

SEQ ID NO: 59315 - protein, 306 aa, Homo sapiens
KPSGLVMARKLIHLEIKPAIRNQIIRELQVLHECNSPYIVGFYGAFYSDGEISICMEHMDGGSLDQVLKKAGRIPEQILGKVSIAVIKGLTYLREKHKIMHRDVKPSNILVNSRGEIKLCDFGVSGQLIDSMANSFVGTRSYMSPERLQGTHYSVQSDIWSMGLSLVEMAVGRYPIPPPDAKELELMFGCQVEGDAAETPPRPRTPGRPLSSYGMDSRPPMAIFELLDYIVNEPPPKLPSGVFSLEFQDFVNKCLIKNPAERADLKQLMVHAFIKRSDAEEVDFAGWLCSTIGLNQPSTPTHAAGV

SEQ ID NO: 59316 - protein, 52 aa, Homo sapiens
MSFVKGWGAEYRRQTVTSTPCWIELHLNGPLQWLDKVLTQMGSPSIRCSSVS

SEQ ID NO: 59317 - protein, 105 aa, Homo sapiens
VPYSAVRNDQFGLSHFNWPVQGANYHVLRTGCFPFIKYHCSKAPWQDLARQNRFFTALKVVNLGIPTLLYGLGSWLFARVTETVHTSYGPITVYFLNKEDEGAMY

SEQ ID NO: 59318 - protein, 136 aa, Homo sapiens
RPSLHPATSTASGSASPTLARAMASVSELACIYSALILHDDEVTVTEDKINALIKAAGVNVEPFWPGLFAKALANVNIGSLICNVGAGGPAPAAGAAPAGGPAPSTAAAPAEEKKVEAKKEESEESDDDMGFGLFD

SEQ ID NO: 59319 - protein, 246 aa, Homo sapiens
LEDELVSLQKKLKGTEDELDKYSEALKDAQEKLELAEKKATDAEADVASLNRRIQLVEEELDRAQERLATALQKLEEAEKAADESERGMKVIESRAQKDEEKMEIQEIQLKEAKHIAEDADRKYEEVARKLVIIESDLERAEERAELSEGKCAELEEELKTVTNNLKSLEAQAEKYSQKEDRYEEEIKVLSDKLKEAETRAEFAERSVTKLEKSIDDLEEKVAHAKEENLSMHQMLDQTLLELNNM

SEQ ID NO: 59320 - protein, 197 aa, Homo sapiens
LNRRIQLVEEELDRAQERLATALQKLEEAEKAADESERGMKVIESRAQKDEEKMEIQEIQLKEAKHIAEDADRKYEEVARKLVIIESDLERAEERAELSEGQVRQLEEQLRIMDQTLKALMAAEDKYSQKEDRYEEEIKVLSDKLKEAETRAEFAERSVTKLEKSIDDLEEKVAHAKEENLSMHQMLDQTLLELNNM

SEQ ID NO: 59321 - protein, 36 aa, Homo sapiens
LEKSIDDLEDELYAQKLKYKAISEELDHALNDMTSM

SEQ ID NO: 59322 - protein, 90 aa, Homo sapiens
KNDFEQGELYLREKFENSIESLRLFKNDPLFFKPGSQFLYSTFGYTLLAAIVERASGCKYLDYMQKIFHDLDMLTTVQEENEPVIYNRAR

SEQ ID NO: 59323 - protein, 26 aa, Homo sapiens
ICNMQSVGLNSTALKIALEFDKDRSD

SEQ ID NO: 59324 - protein, 17 aa, Homo sapiens
ITENRSKKTSFFRCSLL

SEQ ID NO: 59325 - protein, 30 aa, Homo sapiens [sequence omitted]

SEQ ID NO: 59326 - protein, 30 aa, Homo sapiens
ILRKCNEVKDDDLFHSYTTIMALIHLGSSK

SEQ ID NO: 59327 - protein, 535 aa, Homo sapiens
KMLRRRGSPGMGVHVGAALGALWFCLTGALEVQVPEDPVVALVGTDATLCCSFSPEPGFSLAQLNLIWQLTDTKQLVHSFAEGQDQGSAYANRTALFPDLLAQGNASLRLQRVRVADEGSFTCFVSIRDFGSAAVSLQVAAPYSKPSMTLEPNKDLRPGDTVTITCSSYQGYPEAEVFWQDGQGVPLTGNVTTSQMANEQGLFDVHSILRVVLGANGTYSCLVRNPVLQQDAHSSVTITPQRSPTGAVEVQVPEDPVVALVGTDATLRCSFSPEPGFSLAQLNLIWQLTDTKQLVHSFTEGRDQGSAYANRTALFPDLLAQGNASLRLQRVRVADEGSFTCFVSIRDFGSAAVSLQVAAPYSKPSMTLEPNKDLRPGDTVTITCSSYRGYPEAEVFWQDGQGVPLTGNVTTSQMANEQGLFDVHSVLRVVLGANGTYSCLVRNPVLQQDAHGSVTITGQPMTFPPEALWVTVGLSVCLIALLVALAFVCWRKIKQSCEEENAGAEDQDGEGEGSKTALQPLKHSDSKEDDGQEIA

SEQ ID NO: 59328 - skipped

SEQ ID NO: 59329 - protein, 14 aa, Homo sapiens
LGSSSIPSSSCLAA

SEQ ID NO: 59330 - protein, 439 aa, Homo sapiens
ILPGCVTSGGTMQELHLLWWALLLGLAQACPEPCDCGEKYGFQIADCAYRDLESVPPGFPANVTTLSLSANRLPGLPEGAFREVPLLQSLWLAHNEIRTVAAGALASLSHLKSLDLSHNLISDFAWSDLHNLSALQLLKMDSNELTFIPRDAFRSLRALRSLQLNHNRLHTLAEGTFTPLTALSHLQINENPFDCTCGIVWLKTWALTTAVSIPEQDNIACTSPHVLKGTPLSRLPPLPCSAPSVQLSYQPSQDGAELRPGFVLALHCDVDGQPAPQLHWHIQIPSGIVEITSPNVGTDGRALPGTPVASSQPRFQAFANGSLLIPDFGKLEEGTYSCLATNELGSAESSVDVALATPGEGGEDTLGRRFHGKAVEGKGCYTVDNEVQPSGPEDNVVIIYLSRAGNPEAAVAEGVPGQLPPGLLLLGQSLLLFFFLTSF

SEQ ID NO: 59331 - protein, 90 aa, Homo sapiens
MGLGQAAWKEARVFLQNLLSVSQARLRDDTELRKCAFISQASATMHLPATIGDYTDFYSSRQHATNVGIMFRDKENALMPNWYELGQMSA

SEQ ID NO: 59332 - protein, 1262 aa, Homo sapiens
LIDNGGELHAGSALCPFQGNFTIILYGRADEGIQPDPYYGLKYIGVGKGGALELHGQKKLSWTFLNKTLHPGGMAEGGYFFERSWGHRGVIVHVIDPKSGTVIHSDRFDTYRSKKESERLVQYLNAVPDGRILSVAVNDEGSRNLDDMARKAMTKLGSKHFLHLGFRHPWSFLTVKGNPSSSVEDHIEYHGHRGSAAARVFKLFQTEHGEYFNVSLSSEWVQDVEWTEWFDHDKVSQTKGGEKISDLWKAHPGKICNRPIDIQATTMDGVNLSTEVVYKKGQDYRFACYDRGRACRSYRVRFLCGKPVRPKLTVTIDTNVNSTILNLEDNVQSWKPGDTLVIASTDYSMYQAEEFQVLPCRSCAPNQVKVAGKPMYLHIGEEIDGVDMRAEVGLLSRNIIVMGEMEDKCYPYRNHICNFFDFDTFGGHIKFALGFKAAHLEGTELKHMGQQLVGQYPIHFHLAGDVDERGGYDPPTYIRDLSIHHTFSRCVTVHGSNGLLIKDVVGYNSLGHCFFTEDGPEERNTFDHCLGLLVKSGTLLPSDRDSKMCKMITEDSYPGYIPKPRQDCNAVSTFWMANPNNNLINCAAAGSEETGFWFIFHHVPTGPSVGMYSPGYSEHIPLGKFYNNRAHSNYRAGMIIDNGVKTTEASAKDKRPFLSIISARYSPHQDADPLKPREPAIIRHFIAYKNQDHGAWLRGGDVWLDSCRFADNGIGLTLASGGTFPYDDGSKQEIKNSLFVGESGNVGTEMMDNRIWGPGGLDHSGRTLPIGQNFPIRGIQLYDGPINIQNCTFRKFVALEGRHTSALAFRLNNAWQSCPHNNVTGIAFEDVPITSRVFFGEPGPWFNQLDMDGDKTSVFHDVDGSVSEYPGSYLTKNDNWLVRHPDCINVPDWRGAICSGCYAQMYIQAYKTSNLRMKIIKNDFPSHPLYLEGALTRSTHYQQYQPVVTLQKGYTIHWDQTAPAELAIWLINFNKGDWIRVGLCYPRGTTFSILSDVHNRLLKQTSKTGVFVRTLQMDKVEQSYPGRSHYYWDEDSGLLFLKLKAQNEREKFAFCSMKGCERIKIKALIPKNAGVSDCTATAYPKFTERAVVDVPMPKKLFGSQLKTKDHFLEVKMESSKQHFFHLWNDFAYIEVDGKKYPSSEDGIQVVVIDGNQGRVVSHTSFRNSILQGIPWQLFNYVATIPDNSIVLMASKGRYVSRGPWTRVLEKLGADRGLKLKEQMAFVGFKGSFRPIWVTLDTEDHKAKIFQVVPIPVVKKKKL

SEQ ID NO: 59333 - protein, 42 aa, Homo sapiens
VDSLLENLEKIEKEQSKHAVEMRNDKSEEEQSSSSVKKMRLM

SEQ ID NO: 59334 - protein, 126 aa, Homo sapiens
MDHIRIFQEQVEKLKALHVDSAEYSCLKAIVLFTSDACGLSDVAHVESLQEKSQCALEEYVRSQYPNQPTRFGKLLLRLPSLRTVSSSVIEQLFFVRLVGKTPIETLIRDMLLSGSSFNWPYMAIQ

SEQ ID NO: 59335 - protein, 17 aa, Homo sapiens
VAYCCSTQCLQTFDLLS

SEQ ID NO: 59336 - protein, 310 aa, Homo sapiens
LKPAEQTPLTALYLGSLIKEAGFPPGVVNIVPGFGPTVGAAISSHPQINKIAFTGSTEVGKLVKEAASRSNLKRVTLELGGKNPCIVCADADLDLAVECAHQGVFFNQGQCCTAASRVFVEEQVYSEFVRRSVEYAKKRPVGDPFDVKTEQGPQIDQKQFDKILELIESGKKEGAKLECGGSAMEDKGLFIKPTVFSEVTDNMRIAKEEIFGPVQPILKFKSIEEVIKRANSTDYGLTAAVFTKNLDKALKLASALESGTVWINCYNALYAQAPFGGFKMSGNGRELGEYALAEYTEVKTVTIKLGDKNP

SEQ ID NO: 59337 - protein, 38 aa, Homo sapiens
VKVGDKVLLPEYGGTKVVLDDKDYFLFRDGDILGKYID

SEQ ID NO: 59338 - protein, 462 aa, Homo sapiens
ITTSLLPINNGSKENGIHEEQDQEPQDLFADATVELSLDSTQNNQKKVLAKTLISLPPQEATNSSKPQPTYEELEEEEQEDQFDLTVGITDPEKIGDGMNAYVAYKVTTQTSLPLFRSKQFAVKRRFSDFLGLYEKLSEKHSQNGFIVPPPPEKSLIGMTKVKVGKEDSSSAEFLEKRRAALERYLQRIVNHPTMLQDPDVREFLEKEELPRAVGTQTLSGAGLLKMFNKATDAVSKMTIKMNESDIWFEEKLQEVECEEQRLRKLHAVVETLVNHRKELALNTAQFAKSLAMLGSSEDNTALSRALSQLAEVEEKIEQLHQEQANNDFFLLAELLSDYIRLLAIVRAAFDQRMKTWQRWQDAQATLQKKREAEARLLWANKPDKLQQAKDEILEWESRVTQYERDFERISTVVRKEVIRFEKEKSKDFKNHVIKYLETLLYSQQQLAKYWEAFLPEAKAIS

SEQ ID NO: 59339 - protein, 5 aa, Homo sapiens
KKKIH

SEQ ID NO: 59340 - protein, 34 aa, Homo sapiens
MGRFLRDAKLYEIGAGTSEVRRLVIGRAFNADFH

SEQ ID NO: 59341 - protein, 1178 aa, Homo sapiens
LLGTNSSTMGLAWGLGVLFLMHVCGTNRIPESGGDNSVFDIFELTGAARKGSGRRLVKGPDPSSPAFRIEDANLIPPVPDDKFQDLVDAVRAEKGFLLLASLRQMKKTRGTLLALERKDHSGQVFSVVSNGKAGTLDLSLTVQGKQHVVSVEEALLATGQWKSITLFVQEDRAQLYIDCEKMENAELDVPIQSVFTRDLASIARLRIAKGGVNDNFQGVLQNVRFVFGTTPEDILRNKGCSSSTSVLLTLDNNVVNGSSPAIRTNYIGHKTKDLQAICGISCDELSSMVLELRGLRTIVTTLQDSIRKVTEENKELANELRRPPLCYHNGVQYRNNEEWTVDSCTECHCQNSVTICKKVSCPIMPCSNATVPDGECCPRCWPSDSADDGWSPWSEWTSCSTSCGNGIQQRGRSCDSLNNRCEGSSVQTRTCHIQECDKRFKQDGGWSHWSPWSSCSVTCGDGVITRIRLCNSPSPQMNGKPCEGEARETKACKKDACPINGGWGPWSPWDICSVTCGGGVQKRSRLCNNPTPQFGGKDCVGDVTENQICNKQDCPIDGCLSNPCFAGVKCTSYPDGSWKCGACPPGYSGNGIQCTDVDECKEVPDACFNHNGEHRCENTDPGYNCLPCPPRFTGSQPFGQGVEHATANKQVCKPRNPCTDGTHDCNKNAKCNYLGHYSDPMYRCECKPGYAGNGIICGEDTDLDGWPNENLVCVANATYHCKKDNCPNLPNSGQEDYDKDGIGDACDDDDDNDKIPDDRDNCPFHYNPAQYDYDRDDVGDRCDNCPYNHNPDQADTDNNGEGDACAADIDGDGILNERDNCQYVYNVDQRDTDMDGVGDQCDNCPLEHNPDQLDSDSDRIGDTCDNNQDIDEDGHQNNLDNCPYVPNANQADHDKDGKGDACDHDDDNDGIPDDKDNCRLVPNPDQKDSDGDGRGDACKDDFDHDSVPDIDDICPENVDISETDFRRFQMIPLDPKGTSQNDPNWVVRHQGKELVQTVNCDPGLAVGYDEFNAVDFSGTFFINTERDDDYAGFVFGYQSSSRFYVVMWKQVTQSYWDTNPTRAQGYSGLSVKVVNSTTGPGEHLRNALWHTGNTPGQVRTLWHDPRHIGWKDFTAYRWRLSHRPKTGFIRVVMYEGKKIMADSGPIYDKTYAGGRLGLFVFSQEMVFFSDLKYECRDP

SEQ ID NO: 59342 - protein, 329 aa, Homo sapiens
LPLPDGADMSEQSKDLSDPNFAAEAPNSEVHSSPGVSEGVPPSATLAEPQSPPLGPTAAPQAAPPPQAPNDEGDPKALQQAAEEGRAHQAPSAAQPGPAPPAPAQLVQKAHELMWYVLVKDQKKMIIWFPDMVKDVIGSYKKWCRSILRRTSLILARVFGLHLRLTSLHTMEFALVKALEPEELDRVALSNRMPMTGLLLMILSLIYVKGRGARESAVWNVLRILGLRPWKKHSTFGDVRKLITEEFVQMNYLKYQRVPYVEPPEYEFFWGSRASREITKMQIMEFLARVFKKDPQAWPSRYREALEEARALREANPTAHYPRSSVSED

SEQ ID NO: 59343 - protein, 10 aa, Homo sapiens
KRYQVKFRRR

SEQ ID NO: 59344 - protein, 88 aa, Homo sapiens
LQSAGDHLEEELDLLLNLDAPIKEGDNILPDQTSQDLKSKEDGEVVQEEEVCAKPSVTEEKNMEPEQPSTSKNVTEEELEDWLDSMIS

SEQ ID NO: 59345 - protein, 17 aa, Homo sapiens
LILEFTSSSEVWRNMSY

SEQ ID NO: 59346 - protein, 91 aa, Homo sapiens
VDSCPEGEGQREVADFAVQPAVKPWAPLQDSEVYLASLEKKLRRIKGLNQEVTSKDMLRTLAQAKKECWDRFLQEKLASEFFVDGLDSDER

SEQ ID NO: 59347 - protein, 49 aa, Homo sapiens
IRNFLGEKYIRRVQMRPGVACSVSQAQKDGLILEGNDIELVSNSASHNS

SEQ ID NO: 59348 - protein, 31 aa, Homo sapiens
IKIKLDGYELPSSLPPHLVPPSHRKSLPKAD

SEQ ID NO: 59349 - protein, 562 aa, Homo sapiens
RHSTAVKMAAAAWLQVLPVILLLLGAHPSPLSFFSAGPATVAAADRSKWHIPIPSGKNYFSFGKILFRNTTIFLKFDGEPCDLSLNITWYLKSADCYNEIYNFKAEEVELYLEKLKEKRGLSGKYQTSSKLFQNCSELFKTQTFSGDFMHRLPLLGEKQEAKENGTNLTFIGDKTAMHEPLQTWQDAPYIFIVHIGISSSKESSKENSLSNLFTMTVEVKGPYEYLTLEDYPLMIFFMVMCIVYVLFGVLWLAWSACYWRDLLRIQFWIGAVIFLGMLEKAVFYAEFQNIRYKGESVQGALILAELLSAVKRSLARTLVIIVSLGYGIVKPRLGVTLHKVVVAGALYLLFSGMEGVLRVTGAQTDLASLAFIPLAFLDTALCWWIFISLTQTMKLLKLRRNIVKLSLYRHFTNTLILAVAASIVFIIWTTMKFRIVTCQSDWRELWVDDAIWRLLFSMILFVIMVLWRPSANNQRFAFSPLSEEEEEDEQKEPMLKESFEGMKMRSTKQEPNGNSKVNKAQEDDLKWVEENVPSSVTDVALPALLDSDEERMITHFERSKME

SEQ ID NO: 59350 - protein, 5 aa, Homo sapiens
KNETG

SEQ ID NO: 59351 - protein, 51 aa, Homo sapiens
IYYTKFQGPSQMPSRMSNLSATRQVFLWSLGQATCLFYCKSCHEILRCEIG

SEQ ID NO: 59352 - protein, 14 aa, Homo sapiens
ILPRGVFVFPSILI

SEQ ID NO: 59353 - skipped

SEQ ID NO: 59354 - protein, 278 aa, Homo sapiens
IWSLYDAGPRSIRCPLIFLPPVSGTADVFFRQILALTGWGYRVIALQYPVYWDHLEFCDGFRKLLDHLQLDKVHLFGASLGGFLAQKFAEYTHKSPRVHSLILCNSFSDTSIFNQTWTANSFWLMPAFMLKKIVLGNFSSGPVDPMMADAIDFMVDRLESLGQSELASRLTLNCQNSYVEPHKIRDIPVTIMDVFDQSALSTEAKEEMYKLYPNARRAHLKTGGNFPYLCRSAEVNLYVQIHLLQFHGTKYAAIDPSMVSAEELEVQKGSLGISQEEQ

SEQ ID NO: 59355 - protein, 78 aa, Homo sapiens
VDPMLDLDIQELASLTTGGGDVENFERLFSKLKEMKDKAATLPHEQRKVHAEKVAKAFWMAIGGDRDEIEGLSSDEEH

SEQ ID NO: 59356 - protein, 329 aa, Homo sapiens
LDYQEFVVDIESRLRMEGVELKEEWQDEDFPIPLPEDDSIEADILAITGPEDQPGSLEVNGNKVRKKLMAPDISLTLDPSDGSVLSDDLDESGEIDLDGLDTPSENSNEFEWEDDLPKPKTTEVIRKGSITEYTAAEEKEDGRRWRMFRIGEQDHRVDMKAIEPYKKVISHGGYYGDGLNAIVVFAVCFMPESSQPNYRYLMDNLFKYVIGTLELLVAENYMIVYLNGATTRRKMPSLGWLRKCYQQIDRRLRKNLKSLIIVHPSWFIRTLLAVTRPFISSKFSQKIRYVFNLAELAELVPMEYVGIPECIKQVDQELNGKQDEPKNEQ

SEQ ID NO: 59357 - protein, 242 aa, Homo sapiens
IIRDSPVLPVTLQCNLTSSSHTLTYSYWTKNGVELSATRKNASNMEYRINKPRAEDSGEYHCVYHFVSAPKANATIEVKAAPDITGHKRSENKNEGQDATMYCKSVGYPHPDWIWRKKENGMPMDIVNTSGRFFIINKENYTELNIVNLQITEDPGEYECNATNAIGSASVVTVLRVRSHLAPLWPFLGILAEIIILVVIIVVYEKRKRPDEVPDDDEPAGPMKTNSTNNHKDKNLRQRNTN

SEQ ID NO: 59358 - skipped

SEQ ID NO: 59359 - protein, 28 aa, Homo sapiens
LSCDISADDKYIVTGSGDKKATVYEVIY

SEQ ID NO: 59360 - protein, 19 aa, Homo sapiens
LQPGPEWRRRSMKRRRPAP

SEQ ID NO: 59361 - protein, 72 aa, Homo sapiens
LACRPPPPLHTGPSRRAAGHGPAQGPGGGLGAQPVARVHGHLQHGHQEAPGHPWLQDRLLWLHSAAARHQWQ

SEQ ID NO: 59362 - protein, 1192 aa, Homo sapiens
VPRAMDLPRGLVVAWALSLWPGFTDTFNMDTRKPRVIPGSRTAFFGYTVQQHDISGNKWLVVGAPLETNGYQKTGDVYKCPVIHGNCTKLNLGRVTLSNVSERKDNMRLGLSLATNPKDNSFLACSPLWSHECGSSYYTTGMCSRVNSNFRFSKTVAPALQRCQTYMDIVIVLDGSNSIYPWVEVQHFLINILKKFYIGPGQIQVGVVQYGEDVVHEFHLNDYRSVKDVVEAASHIEQRGGTETRTAFGIEFARSEAFQKGGRKGAKKVMIVITDGESHDSPDLEKVIQQSERDNVTRYAVAVLGYYNRRGINPETFLNEIKYIASDPDDKHFFNVTDEAALKDIVDALGDRIFSLEGTNKNETSFGLEMSQTGFSSHVVEDGVLLGAVGAYDWNGAVLKETSAGKVIPLRESYLKEFPEELKNHGAYLGYTVTSVVSSRQGRVYVAGAPRFNHTGKVILFTMHNNRSLTIHQAMRGQQIGSYFGSEITSVDIDGDGVTDVLLVGAPMYFNEGRERGKVYVYELRQNLFVYNGTLKDSHSYQNARFGSSIASVRDLNQDSYNDVVVGAPLEDNHAGAIYIFHGFRGSILKTPKQRITASELATGLQYFGCSIHGQLDLNEDGLIDLAVGALGNAVILWSRPVVQINASLHFEPSKINIFHRDCKRSGRDATCLAAFLCFTPIFLAPHFQTTTVGIRYNATMDERRYTPRAHLDEGGDRFTNRAVLLSSGQELCERINFHVLDTADYVKPVTFSVEYSLEDPDHGPMLDDGWPTTLRVSVPFWNGCNEDEHCVPDLVLDARSDLPTAMEYCQRVLRKPAQDCSAYTLSFDTTVFIIESTRQRVAVEATLENRGENAYSTVLNISQSANLQFASLIQKEDSDGSIECVNEERRLQKQVCNVSYPFFRAKAKVAFRLDFEFSKSIFLHHLEIELAAGSDSNERDSTKEDNVAPLRFHLKYEADVLFTRSSSLSHYEVKPNSSLERYDGIGPPFSCIFRIQNLGLFPIHGMMMKITIPIATRSGNRLLKLRDFLTDEANTSCNIWGNSTEYRPTPVEEDLRRAPQLNHSNSDVVSINCNIRLVPNQEINFHLLGNLWLRSLKALKYKSMKIMVNAALQRQFHSPFIFREEDPSRQIVFEISKQEDWQVPIWIIVGSTLGGLLLLALLVLALWKLGFFRSARRRREPGLDPTPKVLE

SEQ ID NO: 59363 - protein, 236 aa, Homo sapiens
RKAAELERKERELQNTVANLHVRQNNWPPLPSWCPVKPCFYQDFSTEIPADYQRICKMLYYLWMLHSVTLFLNLLACLAWFSGNSSKGVDFGLSILWFLIFTPCAFLCWYRPIYKAFRSDNSFSFFVFFFVFFCQIGIYIIQLVGIPGLGDSGWIAALSTLDNHSLAISVIMMVVAGFFTLCAVLSVFLLQRVHSLYRRTGASFQQAQEEFSQGIFSSRTFHRAASSAAQGAFQGN

SEQ ID NO: 59364 - protein, 129 aa, Homo sapiens
KKFKDPNAPKRPPSAFFLFCSEYRPKIKGEHPGLSIGDVAKKLGEMWNNTAADDKQPYEKKAAKLKEKYEKDIAAYRAKGKPDAAKKGVVKAEKSKKKKEEEEDEEDEEDEEEEEDEEDEDEEEDDDDE

SEQ ID NO: 59365 - protein, 131 aa, Homo sapiens [sequence omitted]

SEQ ID NO: 59366 - protein, 22 aa, Homo sapiens
MASSTCSCCWCCLGDSSSCTLQ

SEQ ID NO: 59367 - protein, 116 aa, Homo sapiens
IQSVRCYSHGSQETDEEFDARWVTYFNKPDIDAWELRKGINTLVTYDMVPEPKIIDAALRACRRLNDFASTVRILEVVKDKAGPHKEIYPYVIQELRPTLNELGISTPEELGLDKV

SEQ ID NO: 59368 - protein, 24 aa, Homo sapiens
VDSSKIKRHVLEYNEERDDFDLEA

SEQ ID NO: 59369 - protein, 184 aa, Homo sapiens
KKKDIRDYNDADMARLLEQWEKDDDIEEGDLPEHKRPSAPVDFSKIDPSKPESILKMTKKGKTLMMFVTVSGSPTEKETEEITSLWQGSLFNANYDVQRFIVGSDRAIFMLRDGSYAWEIKDFLVGQDRCADVTLEGQVYPGKGGGSKEKNKTKQDKGKKKKEGDLKSRSSKEENRAGNKREDL

SEQ ID NO: 59370 - protein, 9 aa, Homo sapiens
MKVVMTTAI

SEQ ID NO: 59371 - protein, 262 aa, Homo sapiens
IDTLCAVLERDTLSIRESRLFGAVVRWAEAECQRQQLPVTFGNKQKVLGKALSLIRFPLMTIEEFAAGPAQSGILSDREVVNLFLHFTVNPKPRVEYIDRPRCCLRGKECCINRFQQVESRWGYSGTSDRIRFTVNRRISIVGFGLYGSIHGPTDYQVNIQIIEYEKKQTLGQNDTGFSCDGTANTFRVMFKEPIEILPNVCYTACATLKGPDSHYGTKGLKKVVHETPAASKTVFFFFSSPGNNNGTSIEDGQIPEIIFYT

SEQ ID NO: 59372 - protein, 24 aa, Homo sapiens
VVKLLASTTPEEILEKLKKEAKKT

SEQ ID NO: 59373 - protein, 122 aa, Homo sapiens
KERICRVFSTSPAKDSLSFEDFLDLLSVFSDTATPDIKSHYAFRIFDFDDDGTLNREDLSRLVNCLTGEGEDTRLSASEMKQLIDNILEESDIDRDGTINLSEFQHVISRSPDFASSFKIVL

SEQ ID NO: 59374 - protein, 23 aa, Homo sapiens
MWLEKNDPSYSKSSNNNGSVRTA

SEQ ID NO: 59375 - protein, 61 aa, Homo sapiens
LTYLSILRNPVTNKKHYRLYVIYKVPQVRVLDFQKVKLKVSSNLLLVSHYRVVCFSLYFCY

SEQ ID NO: 59376 - protein, 22 aa, Homo sapiens
TLIDVLLIGVGYVGPADGSLYI

SEQ ID NO: 59377 - protein, 29 aa, Homo sapiens
ICFKFDHLRKEATDPRPCEVENAIESWRT

SEQ ID NO: 59378 - protein, 36 aa, Homo sapiens
IIDPGSTVTVSVMLQPFDYDPNEKSKHKFMVQFLLH

SEQ ID NO: 59379 - protein, 81 aa, Homo sapiens
MDKVHYILQEVVMGGMVLETNMNEIVAQIEAQNRLEKSEGGLSAAPARAVSAVKNINLPEIPRNINIGDLNIKVPNLSQFV

SEQ ID NO: 59380 - protein, 325 aa, Homo sapiens
LKKMWKSPNGTIRNILGGTVFREPIICKNIPRLVPGWTKPITIGRHAHGDQYKATDFVADRAGTFKMVFTPKDGSGVKEWEVYNFPAGGVGMGMYNTDESISGFAHSCFQYAIQKKWPLYMSTKNTILKAYDGRFKDIFQEIFDKHYKTDFDKNKIWYEHRLIDDMVAQVLKSSGGFVWACKNYDGDVQSDILAQGFGSLGLMTSVLVCPDGKTIEAEAAHGTVTRHYREHQKGRPTSTNPIASIFAWTRGLEHRGKLDGNQDLIRFAQMLEKVCVETVESGAMTKDLAGCIHGLSNVKLNEHFLNTTDFLDTIKSNLDRALGRQ

SEQ ID NO: 59381 - protein, 13 aa, Homo sapiens
KWKWESLQKWPMH

SEQ ID NO: 59382 - protein, 19 aa, Homo sapiens
VFMPERLHSARGWKELQRS

SEQ ID NO: 59383 - protein, 4 aa, Homo sapiens
VKSQ

SEQ ID NO: 59384 - protein, 70 aa, Homo sapiens
KISFELMREPCITPSGITYDRKDIEEHLQRVGHFDPVTRSPLTQEQLIPNLAMKEVIDAFISENGWVEDY

SEQ ID NO: 59385 - protein, 46 aa, Homo sapiens
ITTRKTPQMSIHKQLIDLHSPSEIVKQITSISIEPGVEVEVTIADA

SEQ ID NO: 59386 - protein, 11 aa, Homo sapiens
KILDATPACLP

SEQ ID NO: 59387 - protein, 56 aa, Homo sapiens
IPYIISYVSKIITLEEGDIILTGTPKGVGPVKENDEIEAGIHGLVSMTFKVEKPEY

SEQ ID NO: 59388 - protein, 164 aa, Homo sapiens
VYPEPPRRTPVQPNPIVYMMKAFDLIVDRPVTLVREFIERQHAKNRYYYYHRQYRRVPDITECKEEDIMCMYEAEMQWKRDYKVDQEIINIMQDRLKACQQREGQNYQQNCIKEVEQFTQVAKAYQDRYQDLGAYSSARKCLAKQRQRMLQERKAAKEAAAATS

SEQ ID NO: 59389 - protein, 88 aa, Homo sapiens [sequence omitted]

SEQ ID NO: 59390 - protein, 15 aa, Homo sapiens
VTQVWGMMVTLLTHV

SEQ ID NO: 59391 - protein, 132 aa, Homo sapiens
TCTMARGSLRRLLRLLVLGLWLALLRSVAGEQAPGTAPCSRGSSWSADLDKCMDCASCRARPHSDFCLGCAAAPPAPFRLLWPILGGALSLTFVLGLLSGFLVWRRCRRREKFTTPIEETGGEGCPAVALIQ

SEQ ID NO: 59392 - protein, 140 aa, Homo sapiens
LWHLFQNSATAVAQLYKDRVCQQPGLSLWVPFQNAATAVTNLYKESVDTHQRSFDIGIQIGYQRRNKDVLAWVKKRRRTIRREDLISFLCGKVPPPRNSRAPPRLTVVSPNRATSTETSSSVETDLQPFREAIALHGKAV

SEQ ID NO: 59393 - protein, 39 aa, Homo sapiens
TPNRTYYLMDPSGNAHKWCRKIQEVWRQRYQSHPDAAVQ

SEQ ID NO: 59394 - protein, 693 aa, Homo sapiens
LRPRPAPPGSLRRRRLPGQKMCSRVPLLLPLLLLLALGPGVQGCPSGCQCSQPQTVFCTARQGTTVPRDVPPDTVGLYVFENGITMLDAGSFAGLPGLQLLDLSQNQIASLPSGVFQPLANLSNLDLTANRLHEITNETFRGLRRLERLYLGKNRIRHIQPGAFDTLDRLLELKLQDNELRALPPLRLPRLLLLDLSHNSLLALEPGILDTANVEALRLAGLGLQQLDEGLFSRLRNLHDLDVSDNQLERVPPVIRGLRGLTRLRLAGNTRIAQLRPEDLAGLAALQELDVSNLSLQALPGDLSGLFPRLRLLAAARNPFNCVCPLSWFGPWVRESHVTLASPEETRCHFPPKNAGRLLLELDYADFGCPATTTTATVPTTRPVVREPTALSSSLAPTWLSPTEPATEAPSPPSTAPPTVGPVPQPQDCPPSTCLNGGTCHLGTRHHLACLCPEGFTGLYCESQMGQGTRPSPTPVTPRPPRSLTLGIEPVSPTSLRVGLQRYLQGSSVQLRSLRLTYRNLSGPDKRLVTLRLPASLAEYTVTQLRPNATYSVCVMPLGPGRVPEGEEACGEAHTPPAVHSNHAPVTQAREGNLPLLIAPALAAVLLAALAAVGAAYCVRRGRAMAAAAQDKGQVGPGAGPLELEGVKVPLEPGPKATEGGGEALPSGSECEVPLMGFPGPGLQSPLHAKPYI

SEQ ID NO: 59395 - protein, 1169 aa, Homo sapiens
IEIKLYTKHGTLKYQTDCAPNNGYFMIPLYDKGDFILKIEPPLGWSFEPTTVELHVDGVSDICTKGGDINFVFTGFSVNGKVLSKGQPLGPAGVQVSLRNTGTEAKIQSTVTQPGGKFAFFKVLPGDYEILATHPTWALKEASTTVRVTNSNANAASPLIVAGYNVSGSVRSDGEPMKGVKFLLFSSLVTKEDVLGCNVSPVPGFQPQDESLVYLCYTVSREDGSFSFYSLPSGGYTVIPFYRGERITFDVAPSRLDFTVEHDSLKIEPVFHVMGFSVTGRVLNGPEGDGVPEAVVTLNNQIKVKTKADGSFRLENITTGTYTIHAQKEHLYFETVTIKIAPNTPQLADIIATGFSVCGQISIIRFPDTVKQMNKYKVVLSSQDKDKSLVTVETDAHGSFCFKAKPGTYKVQVMVPEAETRAGLTLKPQTFPLTVTNRPMMDVAFVQFLASVSGKVSCLDTCGDLLVTLQSLSRQGEKRSLQLSGKVNAMTFTFDNVLPGKYKISIMHEDWCWKNKSLEVEVLEDDMSAVEFRQTGYMLRCSLSHAITLEFYQDGNGRENVGIYNLSKGVNRFCLSKPGVYKVTPRSCHRFEQAFYTYDTSSPSILTLTAIRHHVLGTITTDKMMDVTVTIKSSIDSEPALVLGPLKSVQELRREQQLAEIEARRQEREKNGNEEGEERMTKPPVQEMVDELQGPFSYDFSYWARSGEKITVTPSSKELLFYPPSMEAVVSGESCPGKLIEIHGKAGLFLEGQIHPELEGVEIVISEKGASSPLITVFTDDKGAYSVGPLHSDLEYTVTSQKEGYVLTAVEGTIGDFKAYALAGVSFEIKAEDDQPLPGVLLSLSGGLFRSNLLTQDNGILTFSNLSPGQYYFKPMMKEFRFEPSSQMIEVQEGQNLKITITGYRTAYSCYGTVSSLNGEPEQGVAMEAVGQNDCSIYGEDTVTDEEGKFRLRGLLPGCVYHVQLKAEGNDHIERALPHHRVIEVGNNDIDDVNIIVFRQINQFDLSGNVITSSEYLPTLWVKLYKSENLDNPIQTVSLGQSLFFHFPPLLRDGENYVVLLDSTLPRSQYDYILPQVSFTAVGYHKHITLIFNPTRKLPEQDIAQGSYIALPLTLLVLLAGYNHDKLIPLLLQLTSRLQGVRALGQAASDNSGPEDAKRQAKKQKTRRT

SEQ ID NO: 59396 - skipped

SEQ ID NO: 59397 - protein, 298 aa, Homo sapiens
RMWTLRSPLTRSLYVNMTSGPGGPAAAAGGRKENHQWYVCNREKLCESLQAVFVQSYLDQGTQIFLNNSIEKSGWLFIQLYHSFVSSVFSLFMSRTSINGLLGRGSMFVFSPDQFQRLLKINPDWKTHRLLDLGAGDGEVTKIMSPHFEEIYATELSETMIWQLQKKKYRVLGINEWQNTGFQYDVISCLNLLDRCDQPLTLLKDIRSVLEPTRGRVILALVLPFHPYVENGGKWEKPSEILEIKGQNWEEQVNSLPEVFRKAGFVIEAFTRLPYLCEGDMYNDYYVLDDAVFVLKPV

SEQ ID NO: 59398 - protein, 219 aa, Homo sapiens
IWNKTKHDVKFPLDSTGSELKQKIHSITGLPPAMQKVMYKGLVPEDKTLREIKVTSGAKIMVVGSTINDVLAVNTPKDAAQQDAKAEENKKEPLCRQKQHRKVLDKGKPEDVMPSVKGAQERLPTVPLSGMYNKSGGKVRLTFKLEQDQLWIGTKERTEKLPMGSIKNVVSEPIEGHEDYHMMAFQLGPTEASYYWVYWVPTQYVDAIKDTVLGKWQYF

SEQ ID NO: 59399 - protein, 169 aa, Homo sapiens
IETASGNKVSRQSVLCGSQNIVLNGKTIVMNDCIIRGDLANVRVGRHCVVKSRSVIRPPFKKFSKGVAFFPLHIGDHVFIEEDCVVNAAQIGSYVHVGKNCVIGRRCVLKDCCKILDNTVLPPETVVPPFTVFSGCPGLFSGELPECTQELMIDVTKSYYQKFLPLTQV

SEQ ID NO: 59400 - protein, 53 aa, Homo sapiens
RIEIGLHYKIPYPRPIHLPPMGLTPLRGRGLRSQEKLRKLSKPVYLRSHDEVS

SEQ ID NO: 59401 - protein, 34 aa, Homo sapiens
TRWGLLGGQEQVTLRLHAHHQGMRMVEALVEPDG

SEQ ID NO: 59402 - protein, 125 aa, Homo sapiens [sequence omitted]

SEQ ID NO: 59403 - skipped

SEQ ID NO: 59404 - protein, 46 aa, Homo sapiens
KDAVLTKCFHVFCFECVRGRYEARQRKCPKCNAAFGAHDFHRIYIS

SEQ ID NO: 59405 - protein, 5 aa, Homo sapiens
LGTLG

SEQ ID NO: 59406 - protein, 199 aa, Homo sapiens
LQLKAIEPQKEEADENYNSVNTRMRKTQHGVLSQQFVELINKCNSMQSEYREKNVERIRRQLKITNAGMVSDEELEQMLDSGQSEVFVSNILKDTQVTRQALNEISARHSEIQQLERSIRELHDIFTFLATEVEMQGEMINRIEKNILSSADYVERGQEHVKTALENQKKARKKKVLIAICVSITVVLLAVIIGVTVVG

SEQ ID NO: 59407 - protein, 71 aa, Homo sapiens
LATEVEMQGEMINRIEKNILSSADYVERGQEHVKTALENQKKARKKKVLIAICVSITVVLLAVIIGVTVVG

SEQ ID NO: 59408 - protein, 29 aa, Homo sapiens
KQKLEKAENQVLAMQKQSEGLTKEYDRLQ

SEQ ID NO: 59409 - protein, 144 aa, Homo sapiens
KKYQLTNAFGSFDLLDNTDIHLHFPAGAVTKDGPSAGVTIVTCLASLFSGRLVRSDVAMTGEITLRGLVLPVGGIKDKVLAAHRAGLKQVIIPRRNEKDLEGIPGNVRQDLSFVTASCLDEVLNAAFDGGFTVKTRPGLLNSKL

SEQ ID NO: 59410 - protein, 28 aa, Homo sapiens
LAKDLFLLTTKGLRLDFQGRISSEAPAR

SEQ ID NO: 59411 - skipped

SEQ ID NO: 59412 - protein, 40 aa, Homo sapiens
KMSLEDLHSLDSRRIQGCARRLLCDAYMCMYQSPTMSLYK

SEQ ID NO: 59413 - protein, 136 aa, Homo sapiens
VKGHVKMLRLALTVTSMTFFIIAQAPEPYIVITGFEVTVILFFILLYVLRLDRLMKWLFWPLLDIINSLVTTVFMLIVSVLALIPETTTLTVGGGVFALVTAVCCLADGALIYRKLLFNPSGPYQKKPVHEKKEVL

SEQ ID NO: 59414 - protein, 110 aa, Homo sapiens
LEFLLALYFLFADAMQLNDKWQGLCWPMMDFLRCVTAALIYFAISITAIAKYSDGASKAAGVFGFFATIVFATDFYLIFNDVAKFLKQGDSADETTAHKTEEENSDSDSD

SEQ ID NO: 59415 - protein, 43 aa, Homo sapiens
LMSSEVFAPLLRLSPPPGDHDYIYNLDESEGVCDLFDVPVLNL

SEQ ID NO: 59416 - protein, 147 aa, Homo sapiens
LRIILGANAIYCLVTLVFFYSSASFWAWLALGFSLAVYGASYHSMSSMARAAFSEDGALMDGGMDLNMEQGMAEHLKDVILLTAIVQVLSCFSLYVWSFWLLAPGRALYLLWVNVLGPWFTADSGTPAPEHNEKRQRRQERRQMKRL

SEQ ID NO: 59417 - protein, 177 aa, Homo sapiens
LGRGRGWSLLGATAMDALEGESFALSFSSASDAEFDAVVGYLEDIIMDDEFQLLQRNFMDKYYLEFEDTEENKLIYTPIFNEYISLVEKYIEEQLLQRIPEFNMAAFTTTLQHHKDEVAGDIFDMLLTFTDFLAFKEMFLDYRAEKEGRGLDLSSGLVVTSLCKSSSLPASQNNLRH

SEQ ID NO: 59418 - protein, 415 aa, Homo sapiens
LRAAETPPAWHLGAQRSPDTAAAAMESETEPEPVTLLVKSPNQRHRDLELSGDRGWSVGHLKAHLSRVYPERPRPEDQRLIYSGKLLLDHQCLRDLLPKQEKRHVLHLVCNVKSPSKMPEINAKVAESTEEPAGSNRGQYPEDSSSDGLRQREVLRNLSSPGWENISRPEAAQQAFQGLGPGFSGYTPYGWLQLSWFQQIYARQYYMQYLAATAASGAFVPPPSAQEIPVVSAPAPAPIHNQFPAENQPANQNAAPQVVVNPGANQNLRMNAQGGPIVEEDDEINRDWLDWTYSAATFSVFLSILYFYSSLSRFLMVMGATVVMYLHHVGWFPFRPRPVQNFPNDGPPPDVVNQDPNNNLQEGTDPETEDPNHLPPDRDVLDGEQTSPSFMSTAWLVFKTFFASLLPEGPPAIAN

SEQ ID NO: 59419 - protein, 12 aa, Homo sapiens
LDPFMRRWLMKV

SEQ ID NO: 59420 - protein, 372 aa, Homo sapiens [sequence omitted]

SEQ ID NO: 59421 - protein, 61 aa, Homo sapiens
LYRYPFERLKMSADDGIRNLYLDFGGPEGELTMDLHSCPKPIVFVLHTFLSAKVTRMGLLV

SEQ ID NO: 59422 - protein, 7 aa, Homo sapiens
LDSVLLV

SEQ ID NO: 59423 - protein, 253 aa, Homo sapiens
VAELKIVADQLCAKYSKEYGKLCRTNQIGTVNDRLMHKLSVEAPPKILVERYLIEIAKNYNVPYEPDSVVMAEAPPGVETDLIDVGFTDDVKKGGPGRGGSGGFTAPVGGPDGTVPMPMPMPMPMPSANTPFSYPLPKGPSDFNGLPMGTYQAFPNIHPPQIPATPPSYESVDDINADKNISSAQIVGPGPKPEASAKLPSRPADNYDNFVLPELPSVPDTLPTASAGASTSASEDIDFDDLSRRFEELKKKT

SEQ ID NO: 59424 - protein, 5 aa, Homo sapiens
IGLLG

SEQ ID NO: 59425 - protein, 30 aa, Homo sapiens
KKLGVSVSPSRARRRRKTSASSASASNSSR

SEQ ID NO: 59426 - protein, 53 aa, Homo sapiens
IKQEKLGTVYCQASSPGANMIGNKMSAISVHGVSTSGGQMYHYDMNTASLSQQ

SEQ ID NO: 59427 - protein, 1169 aa, Homo sapiens
IEIKLYTKHGTLKYQTDCAPNNGYFMIPLYDKGDFILKIEPPLGWSFEPTTVELHVDGVSDICTKGGDINFVFTGFSVNGKVLSKGQPLGPAGVQVSLRNTGTEAKIQSTVTQPGGKFAFFKVLPGDYEILATHPTWALKEASTTVRVTNSNANAASPLIVAGYNVSGSVRSDGEPMKGVKFLLFSSLVTKEDVLGCNVSPVPGFQPQDESLVYLCYTVSREDGSFSFYSLPSGGYTVIPFYRGERITFDVAPSRLDFTVEHDSLKIEPVFHVMGFSVTGRVLNGPEGDGVPEAVVTLNNQIKVKTKADGSFRLENITTGTYTIHAQKEHLYFETVTIKIAPNTPQLADIVATGFSVCGQISIIRFPDTVKQMNKYKVVLSSQDKDKSLVTVETDAHGSFCFKANPGTYKVQVMVPEAETRAGLTLKPQTFPLTVTDRPVMDVAFVQFLASVSGKVSCLDTCGDLLVTLQSLSRQGEKRSLQLSGKVNAMTFTFDNVLPGKYKISIMHEDWCWKNKSLEVEVLEDDVSAVEFRQTGYMLRCSLSHAITLEFYQDGNGRENVGIYNLSKGVNRFCLSKPGVYKVTPRSCHRFEQAFYTYDTSSPSILTLTAIRHHVLGTITTDKMMDVTVTIKSSIDSEPALVLGPLKSVQELRREQQLAEIEARRQEREKNGNEEGEERMTKPPVQEMVDELQGPFSYDFSYWARSGEKITVTPSSKELLFYPPSMEAVVSGESCPGKLIEIHGKAGLFLEGQIHPELEGVEIVISEKGASSPLITVFTDDKGAYSVGPLHSDLEYTVTSQKEGYVLTAVEGTIGDFKAYALAGVSFEIKAEDDQPLPGVLLSLSGGLFRSNLLTQDNGILTFSNLSPGQYYFKPMMKEFRFEPSSQMIEVQEGQNLKITITGYRTAYSCYGTVSSLNGEPEQGVAMEAVGQNDCSIYGEDTVTDEEGKFRLRGLLPGCVYHVQLKAEGNDHIERALPHHRVIEVGNNDIDDVNIIVFRQINQFDLSGNVITSSEYLPTLWVKLYKSENLDNPIQTVSLGQSLFFHFPPLLRDGENYVVLLDSTLPRSQYDYILPQVSFTAVGYHKHITLIFNPTRKLPEQDIAQGSYIALPLTLLVLLAGYNHDKLIPLLLQLTSRLQGVGALGQAASDNSGPEDAKRQAKKQKTRRT

SEQ ID NO: 59428 - protein, 59 aa, Homo sapiens
VLNLCETPVTDAGLLALSSMKSLCSLNMNSTKLSADTYEDLKAKLPNLKEVDVRYTEAW

SEQ ID NO: 59429 - protein, 516 aa, Homo sapiens
LPEEPRLPRESHSCCRSGAMSCVLGGVIPLGLLFLVCGSQGYLLPNVTLLEELLSKYQHNESHSRVRRAIPREDKEEILMLHNKLRGQVQPQASNMEYMTWDDELEKSAAAWASQCIWEHGPTSLLVSIGQNLGAHWGRYRSPGFHVQSWYDEVKDYTYPYPSECNPWCPERCSGPMCTHYTQIVWATTNKIGCAVNTCRKMTVWGEVWENAVYFVCNYSPKGNWIGEAPYKNGRPCSECPPSYGGSCRNNLCYREETYTPKPETDEMNEVETAPIPEENHVWLQPRVMRPTKPKKTSAVNYMTQVVRCDTKMKDRCKGSTCNRYQCPAGCLNHKAKIFGTLFYESSSSICRAAIHYGILDDKGGLVDITRNGKVPFFVKSERHGVQSLSKYKPSSSFMVSKVKVQDLDCYTTVAQLCPFEKPATHCPRIHCPAHCKDEPSYWAPVFGTNIYADTSSICKTAVHAGVISNESGGDVDVMPVDKKKTYVGSLRNGVQSESLGTPRDGKAFRIFAVRQ

SEQ ID NO: 59430 - protein, 17 aa, Homo sapiens
RKSRLSVHQRVHIGEKP

SEQ ID NO: 59431 - protein, 123 aa, Homo sapiens
ITMCDDDPPTPEEDSETQPDEEEEEEEEKVSQPEVGAAIKIIRQLMEKFNLDLSTVTQAFLKNSGELEATSAFLASGQRADGYPIWSRQDDIDLQKDDEDTREALVKKFGAQNVARRIEFRKK

SEQ ID NO: 59432 - protein, 496 aa, Homo sapiens
TPFSHEVIVMDMDPFLHCVIPNFIQSQDFLEGLQKELMNLDFHEKYNDLYKFQQSDDLKKRREPHISTLRKILFEDFRSWLSDISKIDLESTIDMSCAKYEFTDALLCHDDELEGRRIAFILYLVPPWDRSMGGTLDLYSIDEHFQPKQIVKSLIPSWNKLVFFEVSPVSFHQVSEVLSEEKSRLSISGWFHGPSLTRPPNYFEPPIPRSPHIPQDHEILYDWINPTYLDMDYQVQIQEEFEESSEILLKEFLKPEKFTKVCEALEHGHVEWSSRGPPNKRFYEKAEESKLPEILKECMKLFRSEALFLLLSNFTGLKLHFLAPSEEDEMNDKKEAETTDITEEGTSHSPPEPENNQMAISNNSQQSNEQTDPEPEENETKKESSVPMCQGELRHWKTGHYTLIHDHSKAEFALDLILYCGCEGWEPEYGGFTSYIAKGEDEELLTVNPESNSLALVYRDRETLKFVKHINHRSLEQKKTFPNRTGFWDFSFIYYE

SEQ ID NO: 59433 - protein, 23 aa, Homo sapiens
VGCAKCAHGCVCKGTLENCSCCA

SEQ ID NO: 59434 - protein, 6 aa, Homo sapiens
LPALQG

SEQ ID NO: 59435 - protein, 231 aa, Homo sapiens
LEFLTELVISLEKLENDKSFRGVILTSDRPGVFSAGLDLTEMCGRSPAHYAGYWKAVQELWLRLYQSNLVLVSAINGACPAGGCLVALTCDYRILADNPRYCIGLNETQLGIIAPFWLKDTLENTIGHRAAERALQLGLLFPPAEALQVGIVDQVVPEEQVQSTALSAIAQWMAIPDHARQLTKAMMRKATASRLVTQRDADVQNFVSFISKDSIQKSLQMYLERLKEEKG

SEQ ID NO: 59436 - protein, 282 aa, Homo sapiens
RAPSPTKRKDRSDEKSKDRSKDKGATKESSEKDRGRDKTRKRRSASSGSSSTRSRSSSTSSSGSSTSTGSSSGSSSSSASSRSGSSSTSRSSSSSSSSGSPSPSRRRHDNRRRSRSKSKPPKRDEKERKRRSPSPKPTKVHIGRLTRNVTKDHIMEIFSTYGKIKMIDMPVERMHPHLSKGYAYVEFENPDEAEKALKHMDGGQIDGQEITATAVLAPWPRPPPRRFSPPRRMLPPPPMWRRSPPRMRRRSRSPRRRSPVRRRSRSPGRRRHRSRSSSNSSR

SEQ ID NO: 59437 - protein, 88 aa, Homo sapiens
ITVQTVYVQHPITFLDRPIQMCCPSCNKMIVSQLSYNAGALTWLSCGSLCLLGCIAGCCFIPFCVDALQDVDHYCPNCRALLGTYKRL

SEQ ID NO: 59438 - protein, 12 aa, Homo sapiens
MTFIGNMIGTTR

SEQ ID NO: 59439 - protein, 39 aa, Homo sapiens
VPQNDTVIGITPSSFDTHFRSPSSSVGSPPVLYMQPSPL

SEQ ID NO: 59440 - protein, 186 aa, Homo sapiens
RNDFPDEKIPTLREAVAECLNHNLTIFFDVKGHAHKATEALKKMYMEFPQLYNNSVVCSFLPEVIYKMRQTDRDVITALTHRPWSLSHTGDGKPRYDTFWKHFIFVMMDILLDWSMHNILWYLCGISAFLMQKDFVSPAYLKKWSAKGIQVVGWTVNTFDEKSYYESHLGSSYITDSMVEDCEPHF

SEQ ID NO: 59441 - protein, 34 aa, Homo sapiens
RNLWSSCWLAPLADGMLRYMGQRQRGHPIQRGPL

SEQ ID NO: 59442 - protein, 41 aa, Homo sapiens
LMEYLENPKKYIPGTKMIFAGIKKEAERADLIAYLKKATNE

SEQ ID NO: 59443 - protein, 256 aa, Homo sapiens [sequence omitted]

SEQ ID NO: 59444 - protein, 86 aa, Homo sapiens
MELSAEYLREKLQRDLEAEHVEVEDTTLNRCSCSFRVLVVSAKFEGKPLLQRHRLVNACLAEELPHIHAFEQKTLTPDQWARERQK

SEQ ID NO: 59445 - protein, 107 aa, Homo sapiens
IISFYFMPCCPLTASSFYLLSGLLDAFDGHAARALNQGTRFGAMLDMLTDRCSTMCLLVNLALLYPGATLFFQISMSLDVASHWLHLHRSAAILGAWATWRHYSGVG

SEQ ID NO: 59446 - protein, 76 aa, Homo sapiens
RPALFTLCAGNELFYCLLYLFHFSEGPLVGSVGLFRMGLWVTAPIALLKSLISVIHLITAARNMAALDAADRAKKK

SEQ ID NO: 59447 - protein, 32 aa, Homo sapiens
IALLKSLISVIHLITAARNMAALDAADRAKKK

SEQ ID NO: 59448 - protein, 68 aa, Homo sapiens
LVALAARCRVDLPLAVLSKMDINRRRYPAHLARSSSRKYTELPHGAISEDQAVGPADIPCDSTGQTST

SEQ ID NO: 59449 - protein, 310 aa, Homo sapiens
IKKISPFEHQTYCQRTLREIQILLRFRHENVIGIRDILRASTLEAMRDVYIVQDLMETDLYKLLKSQQLSNDHICYFLYQILRGLKYIHSANVLHRDLKPSNLLINTTCDLKICDFGLARIADPEHDHTGFLTEYVATRWYRAPEIMLNSKGYTKSIDIWSVGCILAEMLSNRPIFPGKHYLDQLNHILGILGSPSQEDLNCIINMKARNYLQSLPSKTKVAWAKLFPKSDSKALDLLDRMLTFNPNKRITVEEALAHPYLEQYYDPTDEPVAEEPFTFAMELDDLPKERLKELIFQETARFQPGVLEAP

SEQ ID NO: 59450 - protein, 47 aa, Homo sapiens
VSAKFEGKPLLQRHRLVNACLAEELPHIHAFEQKTLTPDQWARERQK

SEQ ID NO: 59451 - protein, 52 aa, Homo sapiens
TGDAELYGPFTSAQMQTWVSEGYFPDGVYCRKLDPPGGQFYNSKRIDFDLYT

SEQ ID NO: 59452 - protein, 25 aa, Homo sapiens
KQTENQVLAMRKQSEGLTKEYDRLQ

SEQ ID NO: 59453 - protein, 29 aa, Homo sapiens
LEDRFLRLHDENILLKQHARKQEDKIKRL

SEQ ID NO: 59454 - protein, 12 aa, Homo sapiens
MNLIQTLTRFLL

SEQ ID NO: 59455 - protein, 45 aa, Homo sapiens
IPKNAAYRKYTEQITNEKLAMVKAEPDVKKLEDQLQGSQLEEVIL

SEQ ID NO: 59456 - protein, 33 aa, Homo sapiens
ISCDVFQSRCKEHGKIKVLEWFKYVLGIPVYRL

SEQ ID NO: 59457 - protein, 538 aa, Homo sapiens
VFGPLRVSERQHLKDKFWNFIFYKFIFIFGVLNVQTVEEVVMWCLWFAGLVFLHLMVQLCKDRFEYLSFSPTTPMSSHGRVLSLLVAMLLSCCGLAAVCSITGYTHGMHTLAFMAAESLLVTVRTAHVILRYVIHLWDLNHEGTWEGKGTYVYYTDFVMELTLLSLDLMHHIHMLLFGNIWLSMASLVIFMQLRYLFHEVQRRIRRHKNYLRVVGNMEARFAVATPEELAVNNDDCAICWDSMQAARKLPCGHLFHNSCLRSWLEQDTSCPTCRMSLNIADNNRVREEHQGENLDENLVPVAAAEGRPRLNQHNHFFHFDGSRIASWLPSFSVEVMHTTNILGITQASNSQLNAMAHQIQEMFPQVPYHLVLQDLQLTRSVEITTDNILEGRIQVPFPTQRSDSIRPALNSPVERPSSDQEEGETSAQTERVPLDLSPRLEETLDFGEVEVEPSEVEDFEARGSRFSKSADERQRMLVQRKDELLQQARKRFLNKSSEDDAASESFLPSEGASSDPVTLRRRMLAAAAERRLQKQQTS

SEQ ID NO: 59458 - protein, 189 aa, Homo sapiens
LYPLTNYTFGTKEPLYEKDSSVAARFQRMREEFDKIGMRRTVEGVLIVHEHRLPHVLLLQLGTTFFKLPGGELNPGEDEVEGLKRLMTEILGRQDGVLQDWVIDDCIGNWWRPNFEPPQYPYIPAHITKPKEHKKLFLVQLQEKALFAVPKNYKLVAAPLFELYDNAPGYGPIISSLPQLLSRFNFIYN

SEQ ID NO: 59459 - protein, 55 aa, Homo sapiens
IHCPSAAVCIGILPGLGAYSGSSDSESSSDSEGTINATGKIVSSIFRTNTFLEAP

SEQ ID NO: 59460 - protein, 164 aa, Homo sapiens
LKGLVDKLQALTGNEGRVSVENIKQLLQSAHKESSFDIILSGLVPGSTTLHSAEILAEIARILRPGGCLFLKEPVETAVDNNSKVKTASKLCSALTLSGLVEVKELQREPLTPEEVQSVREHLGHESDNLLFVQITGKKPNFEVGSSRQLKLSITKKSSPSGSH

SEQ ID NO: 59461 - protein, 58 aa, Homo sapiens
LPCLQNIFGVILFLRLTWMVGTAGVLQALLIVLICCCCTLLTAISMSAIATNGVVPGQ

SEQ ID NO: 59462 - protein, 166 aa, Homo sapiens
KVRNGHIKRITDNDIQSLVLEIEGTNVSTTYITCPADPKKTLGIKLPFLVMIIKNLKKYFTFEVQVLDDKNVRRRFRASNYQSTTRVKPFICTMPMRLDDGWNQIQFNLLDFTRRAYGTNYIETLRVQIHANCRIRRVYFSDRLYSEDELPAEFKLYLPVQNKAKQ

SEQ ID NO: 59463 - protein, 187 aa, Homo sapiens
MIDHQQKKLRLIDWGLAEFYHPAQEYNVRVASRYFKGPELLVDYQMYDYSLDMWSLGCMLASMIFRREPFFHGQDNYDQLVRIAKVLGTEELYGYLKKYHIDLDPHFNDILGQHSRKRWENFIHSENRHLVSPEALDLLDKLLRYDHQQRLTAKEAMEHPYFYPVVKEQSQPCADNAVLSSGLTAAR

SEQ ID NO: 59464 - protein, 53 aa, Homo sapiens
ITFIELIKNPAFKFWNHEFVHCAPEIEKLFQSVAQCCMGQKQAQQVMEGTGAS

SEQ ID NO: 59465 - protein, 58 aa, Homo sapiens
IHLEKPFAVLVKHTPGDQDCDELGRETGTRYLVTALIKDKILFKTRPKPIITSVPKKV

SEQ ID NO: 59466 - protein, 148 aa, Homo sapiens
LNLPLRPGVWTVKILHHWVPVAETKFLVAPLTFSNRQPIKPEEALKLHNGPLRNAYMEQSFQSLNPVLSLPINPAQVEQARRNAASTGTALEGWLDSLVGGMWTAMDICATGPTACPVMQTCSQTAWSSFSPDPKSELGAVKPDGRLR

SEQ ID NO: 59467 - protein, 39 aa, Homo sapiens
IHQTVHTWKKPYMCSVCGKAFRFSFQLSQHQSVHSEGKS

SEQ ID NO: 59468 - protein, 62 aa, Homo sapiens
INLLKECHKNHNILKFFGYCNDVDRELRKCLKNEYVENRTKSREHGIAMRKKLFNPPEESEK

SEQ ID NO: 59469 - protein, 113 aa, Homo sapiens
MVLHGAKYPHCAVNGLLVAEKQKPRKEHLPLGGPGAHHTLFVDCIPLFHGTLALAPMLEVALTLIDSWCKDHSYVIAGYYQANERVKDASPNQVAEKVASRIAEGFSDTALIM

SEQ ID NO: 59470 - protein, 551 aa, Homo sapiens
VAALRRGSAVFRAAGAAMAQLGKLLKEQKYDRQLRLWGDHGQEALESAHVCLINATATGTEILKNLVLPGIGSFTIIDGNQVSGEDAGNNFFLQRSSIGKNRAEAAMEFLQELNSDVSGSFVEESPENLLDNDPSFFCRFTVVVATQLPESTSLRLADVLWNSQIPLLICRTYGLVGYMRIIIKEHPVIESHPDNALEDLRLDKPFPELREHFQSYDLDHMEKKDHSHTPWIVIIAKYLAQWYSETNGRIPKTYKEKEDFRDLIRQGILKNENGAPEDEENFEEAIKNVNTALNTTQIPSSIEDIFNDDRCINITKQTPSFWILARALKEFVAKEGQGNLPVRGTIPDMIADSGKYIKLQNVYREKAKKDAAAVGNHVAKLLQSIGQAPESISEKELKLLCSNSAFLRVVRCRSLAEEYGLDTINKDEIISSMDNPDNEIVLYLMLRAVDRFHKQQGRYPGVSNYQVEEDIGKLKSCLTGFLQEYGLSVMVKDDYVHEFCRYGAAEPHTIAAFLGGAAAQEVIKIITKQFVIFNNTYIYSGMSQTSATFQL

SEQ ID NO: 59471 - protein, 74 aa, Homo sapiens
IPHCSMATLIGLSIKVKLLRSLPQRFKMDVHITPGTHASEHAVNKQLADKERVAAALENTHLLEVVNQCLSARS

SEQ ID NO: 59472 - protein, 35 aa, Homo sapiens
VVQINKAKSRPKRRKPRVKRPQLMQQVHPPKTPSV

SEQ ID NO: 59473 - protein, 11 aa, Homo sapiens
KILKKRHKMFK

SEQ ID NO: 59474 - protein, 46 aa, Homo sapiens
MQIAEENGLEVLDQLSQLPEGASAVGESSVRSQEDQLSRRLAALRN

SEQ ID NO: 59475 - protein, 41 aa, Homo sapiens
TEASYVNLPTIALCNTDSPLCCVDIAIPCNNKGAHSVGLMW

SEQ ID NO: 59476 - protein, 457 aa, Homo sapiens
TLLNGVAIIVGTIIGSGIFVTPTGVLKEAGSPGLALVVWAACGVFSIVGALCYAELGTTISKSGGDYAYMLEVYGSLPAFLKLWIELLIIRPSSQYIVALVFATYLLKPLFPTCPVPEEAAKLVACLCVLLLTAVNCYSVKAATRVQDAFAAAKLLALALIILLGFVQIGKGDVSNLDPNFSFEGTKLDVGNIVLALYSGLFAYGGWNYLNFVTEEMINPYRNLPLAIIISLPIVTLVYVLTNLAYFTTLSTEQMLSSEAVAVDFGNYHLGVMSWIIPVFVGLSCFGSVNGSLFTSSRLFFVGSREGHLPSILSMIHPQLLTPVPSLVFTCVMTLLYAFSKDIFSVINFFSFFNWLCVALAIIGMIWLRHRKPELERPIKVNLALPVFFILACLFLIAVSFWKTPVECGIGFTIILSGLPVYFFGVWWKNKPKWLLQGIFSTTVLCQKLMQVVPQET

SEQ ID NO: 59477 - protein, 21 aa, Homo sapiens
LLPTKRHLLLGSDNGVIRLLA

SEQ ID NO: 59478 - protein, 75 aa, Homo sapiens
LGVELQRIHRPQDAGPGATPLHWSPPRAQQLPEPCQPPGGGLPRPRQHRGAGGGGGSFLQSPREQAGSGCLQLRL

SEQ ID NO: 59479 - protein, 62 aa, Homo sapiens
LGVELQRIHRPQDAGPGATPLHWSPPRAQQLPEPCQPPGGGGGSFLQSPREQAGSGCLQLRL

SEQ ID NO: 59480 - protein, 364 aa, Homo sapiens
KVYYFSKGTLKIANKQFTAVKNDYEMTFNNETSVMPCEDDHHLPTVQFDFTGIDDLENKSKDSLVDIIGICKSYEDATKITVRSNNREVAKRNIYLMDTSGKVVTATLWGEDADKFDGSRQPVLAIKGARVSDFGGRSLSVLSSSTIIANPDIPEAYKLRGWFDAEGQALDGVSISDLKSGGVGGSNTNWKTLYEVKSENLGQGDKPDYFSSVATVVYLRKENCMYQACPTQDCNKKVIDQQNGLYRCEKCDTEFPNFKYRMILSVNIADFQENQWVTCFQESAEAILGQNAAYLGELKDKNEQAFEEVFQNANFRSFIFRVRVKVETYNDESRIKATVMDVKPVDYREYGRRLVMSIRRSALM

SEQ ID NO: 59481 - protein, 11 aa, Homo sapiens
MTLNRNCIMNW

SEQ ID NO: 59482 - protein, 52 aa, Homo sapiens
RTSSPRGDKAAYDILRRCSQCGILLPLPILNQHQEKCRWLASSKGKQVRNFS

SEQ ID NO: 59483 - protein, 148 aa, Homo sapiens
TEIEMLRAAVKRFGDDLNHISCVIKERTVAQIKATVKRKVYEDSGIPLPAESPKKGPKKVASGVLSPPPAAPPPSSSSVPEAGGPPIKKQKADVTLSALNDSDANSDVVDIEGLGETPPAKKLNFDQDSLTLDSGLLMTSADPPLLSC

SEQ ID NO: 59484 - protein, 9 aa, Homo sapiens
LANQGIIPH

SEQ ID NO: 59485 - protein, 36 aa, Homo sapiens
RTHPEIDREVVRRLREFYRPFNLKFYQMTGHDFGWD

SEQ ID NO: 59486 - protein, 346 aa, Homo sapiens
IMDGEDIPDFSSLKEETAYWKELSLKYKQSFQEARDELVEFQEGSRELEAELEAQLVQAEQRNRDLQADNQRLKYEVEALKEKLEHQYAQSYKQVSVLEDDLSQTRAIKEQLHKYVRELEQANDDLERAKRATIVSLEDFEQRLNQAIERNAFLESELDEKESLLVSVQRLKDEARDLRQELAVRERQQEVTRKSAPSSPTLDCEKMDSAVQASLSLPATPVGKGTENTFPSPKAIPNGFGTSPLTPSARISALNIVGDLLRKVGALESKLAACRNFAKDQASRKSYISGNVNCGVLNGNGTKFSRSGHTSFFDKGAVNGFDPAPPPPGLGSSRPSSAPGMLPLSV

SEQ ID NO: 59487 - protein, 208 aa, Homo sapiens
RAAMLQQDSNDDTEDVSLFDAEEETTNRPRKAKIRHPVASFFHLFFRVSAIIVYLLCGLLSSSFITCMVTIILLLSCDFWAVKNVTGRLMVGLRWWNHIDEDGKSHWVFESRKESSQENKTVSEAESRIFWLGLIACPVLWVIFAFSALFSFRVKWLAVVIMGVVLQGANLYGYIRCKVRSRKHLTSMATSYFGKQFLRQNTGDDQTS

SEQ ID NO: 59488 - protein, 31 aa, Homo sapiens
VDISMILSEAIRRIHNGESMSYLFRNIGLDD

SEQ ID NO: 59489 - protein, 30 aa, Homo sapiens
MAFQNDVYEWARDHRAHHKFSETHADPHNS

SEQ ID NO: 59490 - protein, 45 aa, Homo sapiens
LESAKAGTRFPGPQWGCANPRELGCKFVKNQHHVWQLSIGARSLP

SEQ ID NO: 59491 - protein, 254 aa, Homo sapiens
IEAMKNAHREEMERELEKSQRSQISSVNSDVEALRRQYLEELQSVQRELEVLSEQYSQKCLENAHLAQALEAERQALRQCQRENQELNAHNQELNNRLAAEITRLRTLLTGDGGGEATGSPLAQGKDAYELEVLLRVKESEIQYLKQEISSLKDELQTALRDKKYASDKYKDIYTELSIAKAKADCDISRLKEQLKAATEALGEKSPDSATVSGYDIMKSKSNPDFLKKDRSCVTRQLRNIRSKSVIEQVSWDT

SEQ ID NO: 59492 - protein, 181 aa, Homo sapiens
IFAGKQREDGRSLSDYNIQKESTLHLVLRRRGGMQIFVKTLTGKTITLEVEPSDTIENVKAKIQDKEGIPPDQQRLIFAGKQLEDGRSLSDYNIQKESTLHLVLRLRGGMQIFVKTLTGKTITLEVEPSDTIENVKAKIQDKEGIPPISRGSSLQASSWKMAVLFLTTTSRRSRPCTWSCV

SEQ ID NO: 59493 - protein, 246 aa, Homo sapiens
ILIDRCGKHFGTILNYLRDDTITLPQNRQEIKELMAEAKYYLIQGLVNMCQSALQDKKDSYQPVCNIPIITSLKEEERLIESSTKPVVKLLYNRSNNKYSYTSNSDDHLLKNIELFDKLSLRFNGRVLFIKDVIGDEICCWSFYGQGRKLAEVCCTSIVYATEKKQTKVEFPEARIYEETLNVLLYETPRVPDNSLLEATSRSRSQASPSEDEETFELRDRVRRIHVKRYSTYDDRQLGHQSTHRD

SEQ ID NO: 59494 - protein, 82 aa, Homo sapiens
LDPNDQVAMGRQWLAIQKLRSKIHKKVDRKASKGRKLRFHVLSKLLSFMAPIDHTTMNDDARTELYRSLFGQLHPPDEGHGD

SEQ ID NO: 59495 - protein, 146 aa, Homo sapiens
MHTLQRHRDILQDYTHEFHKTKANFMAIRERENLMGSVRKDIESYKSGSGVNNRRTELFLKEHDHLRNSDRLIEETISIAMATKENMTSQRGMLKSIHSKMNTLANRFPAVNSLIQRINLRKRRDSLILGGVIGICTILLLLYAFH

SEQ ID NO: 59496 - protein, 370 aa, Homo sapiens
LGSLLAKTGQAAELGGLLKYVRPFLNSISKAKAARLVRSLLDLFLDMEAATGQEVELCLECIEWAKSEKRTFLRQALEARLVSLYFDTKRYQEALHLGSQLLRELKKMDDKALLVEVQLLESKTYHALSNLPKARAALTSARTTANAIYCPPKLQATLDMQSGIIHAAEEKDWKTAYSYFYEAFEGYDSIDSPKAITSLKYMLLCKIMLNTPEDVQALVSGKLALRYAGRQTEALKCVAQASKNRSLADFEKALTDYRAELRDDPIISTHLAKLYDNLLEQNLIRVIEPFSRVQIEHISSLIKLSKADVERKLSQMILDKKFHGILDQGEGVLIIFDEPPVDKTYEAALETIQNMSKVVDSLYNKAKKLT

SEQ ID NO: 59497 - protein, 81 aa, Homo sapiens
MYPPLDPKLLDARTTALLLSVSHLVLVTRNACHLTGGLDWIDQSLSAAEEHLEVLREAALASEPDKGLPGPEGFLQEQSAI

SEQ ID NO: 59498 - protein, 76 aa, Homo sapiens
VAGKTYRWCVCGRSKKQPFCDGSHFFQRTGLSPLKFKAQETRMVALCTCKATQRPPYCDGTHRSERVQKAEVGSPL

SEQ ID NO: 59499 - protein, 41 aa, Homo sapiens
KSAEGLSLQSVMLELVALTGTMVYSITNNFPFRPAFLPPNS

SEQ ID NO: 59500 - protein, 55 aa, Homo sapiens
LFGGSLARIFTSIQETGDPLMAGTFVVSSLCNGLIAAQLLFYWNAKPPHKQKKAQ

SEQ ID NO: 59501 - protein, 5 aa, Homo sapiens
MGAVP

SEQ ID NO: 59502 - protein, 12 aa, Homo sapiens
MFPENQHVRVYP

SEQ ID NO: 59503 - protein, 219 aa, Homo sapiens
MNTSIWYNRSDVFEAWRLLLTSAPSLATSPAFRYDLLDLTRQAVQELVSLYYEEARSAYLSKELASLLRAGGVLAYELLPALDEVLASDSRFLLGSWLEQARAAAVSEAEADFYEQNSRYQLTLWGPEGNILDYANKQLAGLVANYYTPRWRLFLEALVDSVAQGIPFQQHQFDKNVFQLEQAFVLSKQRYPSQPRGDTVDLAKKIFLKYYPRWVAGSW

SEQ ID NO: 59504 - protein, 37 aa, Homo sapiens
KDNFDEMDTSREIVQQLIDEYHAATRPDYISWGTQEQ

SEQ ID NO: 59505 - protein, 4 aa, Homo sapiens
LLPV

SEQ ID NO: 59506 - skipped

SEQ ID NO: 59507 - protein, 441 aa, Homo sapiens
KKKKKQKKKKEKGSETDSAQDQPVKMNSLPAERIQEIQKAIELFSVGQGPAKTMEEASKRSYQFWDTQPVPKLGEVVNTHGPVEPDKDNIRQEPYTLPQGFTWDALDLGDRGVLKELYTLLNENYVEDDDNMFRFDYSPEFLLWALRPPGWLPQWHCGVRVVSSRKLVGFISAIPANIHIYDTEKKMVEINFLCVHKKLRSKRVAPVLIREITRRVHLEGIFQAVYTAGVVLPKPVGTCRYWHRSLNPRKLIEVKFSHLSRNMTMQRTMKLYRLPETPKTAGLRPMETKDIPVVHQLLTRYLKQFHLTPVMSQEEVEHWFYPQENIIDTFVVENANGEVTDFLSFYTLPSTIMNHPTHKSLKAAYSFYNVHTQTPLLDLMSDALVLAKMKGFDVFNALDLMENKTFLEKLKFGIGDGNLQYYLYNWKCPSMGAEKVGLVLQ

SEQ ID NO: 59508 - protein, 913 aa, Homo sapiens
TRCRGEPSGRTFQDRNRPSAEKMSLRIDVDTNFPECVVDAGKVTLGTQQRQEMDPRLREKQNEIILRAVCALLNSGGGIIKAEIENKGYNYERHGVGLDVPPIFRSHLDKMQKENHFLIFVKSWNTEAGVPLATLCSNLYHRERTSTDVMDSQEALAFLKCRTQTPTNINVSNSLGPQAAQGSVQYEGNINVSAAALFDRKRLQYLEKLNLPESTHVEFVMFSTDVSHCVKDRLPKCVSAFANTEGGYVFFGVHDETCQVIGCEKEKIDLTSLRASIDGCIKKLPVHHFCTQRPEIKYVLNFLEVHDKGALRGYVCAIKVEKFCCAVFAKVPSSWQVKDNRVRQLPTREWTAWMMEADPDLSRCPEMVLQLSLSSATPRSKPVCIHKNSECLKEQQKRYFPVFSDRVVYTPESLYKELFSQHKGLRDLINTEMRPFSQGILIFSQSWAVDLGLQEKQGVICDALLISQNNTPILYTIFSKWDAGCKGYSMIVAYSLKQKLVNKGGYTGRLCITPLVCVLNSDRKAQSVYSSYLQIYPESYNFMTPQHMEALLQSLVIVLLGFKSFLSEELGSEVLNLLTNKQYELLSKNLRKTRELFVHGLPGSGKTILALRIMEKIRNVFHCEPANILYICENQPLKKLVSFSKKNICQPVTRKTFMKNNFEHIQHIIIDDAQNFRTEDGDWYGKAKFITQTARDGPGVLWIFLDYFQTYHLSCSGLPPPSDQYPREEINRVVRNAGPIANYLQQVMQEARQNPPPNLPPGSLVMLYEPKWAQGVPGNLEIIEDLNLEEILIYVANKCRFLLRNGYSPKDIAVLFTKASEVEKYKDRLLTAMRKRKLSQLHEESDLLLQIGDASDVLTDHIVLDSVCRFSGLERNIVFGINPGVAPPAGAYNLLLCLASRAKRHLYILKASV

SEQ ID NO: 59509 - protein, 522 aa, Homo sapiens
IPLCTDIAYNQTIMPNLLGHTNQEDAGLEVHQFYPLVKVQCSPELRFFLCSMYAPVCTVLEQAIPPCRSICERARQGCEALMNKFGFQWPERLRCEHFPRHGAEQICVGQNHSEDGAPALLTTAPPPGLQPGAGGTPGGPGGGGAPPRYATLEHPFHCPRVLKVPSYLSYKFLGERDCAAPCEPARPDGSMFFSQEETRFARLWILTWSVLCCASTFFTVTTYLVDMQRFRYPERPIIFLSGCYTMVSVAYIAGFVLQERVVCNERFSEDGYRTVVQGTKKEGCTILFMMLYFFSMASSIWWVILSLTWFLAAGMKWGHEAIEANSQYFHLAAWAVPAVKTITILAMGQIDGDLLSGVCFVGLNSLDPLRGFVLAPLFVYLFIGTSFLLAGFVSLFRIRTIMKHDGTKTEKLERLMVRIGVFSVLYTVPATIVIACYFYEQAFREHWERSWVSQHCKSLAIPCPAHYTPRMSPDFTVYMIKYLMTLIVGITSGFWIWSGKTLHSWRKFYTRLTNSRHGETTV

SEQ ID NO: 59510 - protein, 146 aa, Homo sapiens
LPAFSRHRRRRLPQAVSTEEKESYRMSAIQNLHSFDPFADASKGDDLLPAGTEDYIHIRIQQRNGRKTLTTVQGIADDYDKKKLVKAFKKKFACNGTVIEHPEYGEVIQLQGDQRKNICQFLVEIGLAKDDQLKVHGFKNLTACIM

SEQ ID NO: 59511 - protein, 34 aa, Homo sapiens
IVCPLSRTSTLSTPLLMQVRVMTCFLLALRIISI

SEQ ID NO: 59512 - protein, 25 aa, Homo sapiens
LTISVLFSARAKHLGTEGMAVASYL

SEQ ID NO: 59513 - protein, 8 aa, Homo sapiens
LMITIKRN

SEQ ID NO: 59514 - skipped

SEQ ID NO: 59515 - protein, 49 aa, Homo sapiens
IHATGFNYQNEDEKVTLSFPSTLQTGTGTLKIDFVGELNDKMKGFYRSY

SEQ ID NO: 59516 - protein, 21 aa, Homo sapiens
VGIAVLWISLITEWLNLIFKW

SEQ ID NO: 59517 - protein, 26 aa, Homo sapiens
VEAAADAELSSFSGNPPGKCGGGGTL

SEQ ID NO: 59518 - protein, 769 aa, Homo sapiens
LKKYLTEGLLQFTILLSLIGVRVDVDTYLTSQLPPLREIILGPSSAYTQTQFHNLRNTLDGYGIHPKSIDLDNYFTARRLLSQVRALDRFQVPTTEVNAWLVHRDPEGSVSGSQPNSGLALESSSGLQDVTGPDNGVRESETEQGFGEDLEDLGAVAPPVSGDLTKEDIDLIDILWRQDIDLGAGREVFDYSHRQKEQDVEKELRDGGEQDTWAGEGAEALARNLLVDGETGESFPAQVPSGEDQTALSLEECLRLLEATCPFGENAEFPADISSITEAVPSESEPPALQNNLLSPLLTGTESPFDLEQQWQDLMSIMEMQAMEVNTSASEILYSAPPGDPLSTNYSLAPNTPINQNVSLHQASLGGCSQDFLLFSPEVESLPVASSSTLLPLAPSNSTSLNSTFGSTNLTGLFFPPQLNGTANDTAGPELPDPLGGLLDEAMLDEISLMDLAIEEGFNPVQASQLEEEFDSDSGLSLDSSHSPSSLSSSEGSSSSSSSSSSSSSSASSSASSSFSEEGAVGYSSDSETLDLEEAEGAVGYQPEYSKFCRMSYQDPAQLSCLPYLEHVGHNHTYNMAPSALDSADLPPPSALKKGSKEKQADFLDKQMSRDEHRARAMKIPFTNDKIINLPVEEFNELLSKYQLSEAQLSLIRDIRRRGKNKMAAQNCRKRKLDTILNLERDVEDLQRDKARLLREKVEFLRSLRQMKQKVQSLYQEVFGRLRDENGRPYSPSQYALQYAGDGSVLLIPRTMADQQARRQERKPKDRRK

SEQ ID NO: 59519 - protein, 10 aa, Homo sapiens
MVSFKKFAVV

SEQ ID NO: 59520 - protein, 364 aa, Homo sapiens
LPSSPGSEAAMAESPTEEAATAGAGAAGPGASSVAGVVGVSGSGGGFGPPFLPDVWAAAAAAGGAGGPGSGLAPLPGLPPSAAAHGAALLSHWDPTLSSDWDGERTAPQCLLRIKRDIMSIYKEPPPGMFVVPDTVDMTKIHALITGPFDTPYEGGFFLFVFRCPPDYPIHPPRVKLMTTGNNTVRFNPNFYRNGKVCLSILGTWTGPAWSPAQSISSVLISIQSLMTENPYHNEPGFEQERHPGDSKNYNECIRHETIRVAVCDMMEGKCPCPEPLRGVMEKSFLEYYDFYEVACKDRLHLQGQTMQDPFGEKRGHFDYQSLLMRLGLIRQKVLERLHNENAEMDSDSSSSGTETDLHGSLRV

SEQ ID NO: 59521 - protein, 7 aa, Homo sapiens
ILIIFMI

SEQ ID NO: 59522 - protein, 36 aa, Homo sapiens
ILAYTAEGEINNVQWASTQPDWIAICYNNCLEILRV

SEQ ID NO: 59523 - protein, 615 aa, Homo sapiens
IDLIAIADFAAGAMENWGLVTYRETALLIDPKNSCSSSRQWVALVVGHELAHQWFGNLVTMEWWTHLWLNEGFASWIEYLCVDHCFPEYDIWTQFVSADYTRAQELDALDNSHPIEVSVGHPSEVDEIFDAISYSKGASVIRMLHDYIGDKDFKKGMNMYLTKFQQKNAATEDLWESLENASGKPIAAVMNTWTKQMGFPLIYVEAEQVEDDRLLRLSQKKFCAGGSYVGEDCPQWMVPITISTSEDPNQAKLKILMDKPEMNVVLKNVKPDQWVKLNLGTVGFYRTQYSSAMLESLLPGIRDLSLPPVDRLGLQNDLFSLARAGIISTVEVLKVMEAFVNEPNYTVWSDLSCNLGILSTLLSHTDFYEEIQEFVKDVFSPIGERLGWDPKPGEGHLDALLRGLVLGKLGKAGHKATLEEARRRFKDHVEGKQILSADLRSPVYLTVLKHGDGTTLDIMLKLHKQADMQEEKNRIERVLGATLLPDLIQKVLTFALSEEVRPQDTVSVIGGVAGGSKHGRKAAWKFIKDNWEELYNRYQGGFLISRLIKLSVEGFAVDKMAGEVKAFFESHPAPSAERTIQQCCENILLNAAWLKRDAESIHQYLLQRKASPPTV

SEQ ID NO: 59524 - protein, 112 aa, Homo sapiens
VNSKAEVRFHLATAEWIAEPVRQKIAITHKNKINRLGELILTSESSRYQFRNLADCLQKIRDMITEASQTPKEPTKEDVKLHRIRIENMNRERLRQKRIHSAVKTSRRVDMD

SEQ ID NO: 59525 - protein, 15 aa, Homo sapiens
MISFEGELNEIPLRA

SEQ ID NO: 59526 - protein, 76 aa, Homo sapiens
IAKERTHFTVRLTEAKPVDKVKLIKEIKNYIQGINLVQAKKLVESLPQEIKANVAKAEAEKIKAALEAVGGTVVLE

SEQ ID NO: 59527 - protein, 81 aa, Homo sapiens
KIKCWNGVATWLWVANDENCGICRMAFNGCCPDCKVPGDDCPLVWGQCSHCFHMHCILKWLHAQQVQQHCPMCRQEWKFKE

SEQ ID NO: 59528 - protein, 18 aa, Homo sapiens
ILRLLPHAGADGCWGQRP

SEQ ID NO: 59529 - protein, 67 aa, Homo sapiens
VENPSLDLEQYAASYSGLMRIERLQFIADHCPTLRVEALKMALSFVQRTFNVDMYEEIHRKLSEATR

SEQ ID NO: 59530 - protein, 170 aa, Homo sapiens
LEPQVRDIIFKFYESKYASCLKMLDEMKDNLLLDMYLAPHVRTLYTQIRNRALIQYFSPYVSADMHRMAAAFNTTVAALEDELTQLILEGLISARVDSHSKILYARDVDQRSTTFEKSLLMGKEFQRRAKAMMLRAAVLRNQIHVKSPPREGSQGELTPANSQSRMSTNM

SEQ ID NO: 59531 - protein, 354 aa, Homo sapiens
LQLFRSHVQPLLAEAEISFTLMLTERRNHARELVRSEELGRWDALVVMSGDGLMHEVVNGLMERPDWETAIQKPLCSLPAGSGNALAASLNHYAGYEQVTNEDLLTNCTLLLCRRLLSPMNLLSLHTASGLRLFSVLSLAWGFIADVDLESEKYRRLGEMRFTLGTFLRLAALRTYRGRLAYLPVGRVGSKTPASPVVVQQGPVDAHLVPLEEPVPSHWTVVPDEDFVLVLALLHSHLGSEMFAAPMGRCAAGVMHLFYVRAGVSRAMLLRLFLAMEKGRHMEYECPYLVYVPVVAFRLEPKDGKGVFAVDGELMVSEAVQGQVHPNYFWMVSGCVEPPPSWKPQQMPPPEEPL

SEQ ID NO: 59532 - protein, 5 aa, Homo sapiens
MMKFL

SEQ ID NO: 59533 - protein, 581 aa, Homo sapiens
TPGLPPLLNISVGMERDRISALKRSFEVEEVETPNSTPPRRVQTPLLRATVASSTQKFQDLGVKNSEPSARHVDSLSQRSPKASLRRVELSGPKAAEPVSRRTELSIDISSKQVENAGAIGPSRFGLKRAEVLGHKTPEPAPRRTEITIVKPQESAHRRMEPPASKVPEVPTAPATDAAPKRVEIQMPKPAEAPTAPSPAQTLENSEPAPVSQLQSRLEPKPQPPVAEATPRSQEATEAAPSCVGDMADTPRDAGLKQAPASRNEKAPVDFGYVGIDSILEQMRRKAMKQGFEFNIMVVGQSGLGKSTLINTLFKSKISRKSVQPTSEERIPKTIEIKSITHDIEEKGVRMKLTVIDTPGFGDHINNENCWQPIMKFINDQYEKYLQEEVNINRKKRIPDTRVHCCLYFIPATGHSLRPLDIEFMKRLSKVVNIVPVIAKADTLTLEERVHFKQRITADLLSNGIDVYPQKEFDEDSEDRLVNEKFREMIPFAVVGSDHEYQVNGKRILGRKTKWGTIEVENTTHCEFAYLRDLLIRTHMQNIKDITSSIHFEAYRVKRLNEGSSAMANGMEEKEPEAPEM

SEQ ID NO: 59534 - protein, 11 aa, Homo sapiens
LRLCALGPRVH

SEQ ID NO: 59535 - protein, 53 aa, Homo sapiens
LAACGAEAAAYGRCVQASTAPGGRLSKDFCAREFEALRSCFAAAAKKTLEGGC

SEQ ID NO: 59536 - protein, 247 aa, Homo sapiens
RKEVEQVYLRCAAGAVEWMYPTGALIVNLRPNTFSPARHLTVCIRSFTDSSGANIYLEKTGELRLLVPDGDGRPGRVQCFGLEQGGLFVEATPQQDIGRRTTGFQYELVRRHRASDLHELSAPCRPCSDTEVLLAVCTSDFAVRGSIQQVTHEPERQDSAIHLRVSRLYRQKSRVFEPVPEGDGHWQGRVRTLLECGVRPGHGDFLFTGHMHFGEARLGCAPRFKDFQRMYRDAQERGLNPCEVGTD

SEQ ID NO: 59537 - protein, 5 aa, Homo sapiens
ISGSC

SEQ ID NO: 59538 - skipped

SEQ ID NO: 59539 - protein, 268 aa, Homo sapiens
RKSIFKEVEEKEVEGAEVGWYVTLHVSEVPVSVVECFRQGTPLIAFSLLPHEQKMSVLNMVVRRDPGNTEPVKAKEELIFHCGFRRFRASPLFSQHTAADKHKLQRFLTADMALVATVYAPITFPPASVLLFKQKSNGMHSLIATGHLMSVDPDRMVIKRVVLSGHPFKIFTKMAVVRYMFFNREDVLWFKPVELRTKWGRRGHIKEPLGTHGHMKCSFDGKLKSQDTVLMNLYKRVFPKWTYDPYVPEPVPWLKSEISSTVPQGGME

SEQ ID NO: 59540 - protein, 13 aa, Homo sapiens
RWNRPGSFPESLL

SEQ ID NO: 59541 - protein, 51 aa, Homo sapiens
RMTELQSALLLRRQLAELNKNPVEGFSAGLIDDNDLYRWEVLIIGPPDTLY

SEQ ID NO: 59542 - protein, 172 aa, Homo sapiens
LQNRSLPQSDPVLKVTLAVSDLQKSLNYWCNLLGMKIYEKDEEKQRALLGYADNQCKLELQGVKGGVDHAAAFGRIAFSCPQKELPDLEDLMKRENQKILTPLVSLDTPGKATVQVVILADPDGHEICFVGDEAFRELSKMDPEGSKLLDDAMAADKSDEWFAKHNKPKASG

SEQ ID NO: 59543 - protein, 31 aa, Homo sapiens
KYVMDVEEITPAIVEAFVNDFLAEKLKPEPI

SEQ ID NO: 59544 - protein, 16 aa, Homo sapiens
LTLLPYLSFFPTGLSR

SEQ ID NO: 59545 - protein, 242 aa, Homo sapiens
VGKMAYQSLRLEYLQIPPVSRAYTTACVLTTAAVQLELITPFQLYFNPELIFKHFQIWRLITNFLFFGPVGFNFLFNMIFLYRYCRMLEEGSFRGRTADFVFMFLFGGFLMTLFGLFVSLVFLGQAFTIMLVYVWSRRNPYVRMNFFGLLNFQAPFLPWVLMGFSLLLGNSIIVDLLGIAVGHIYFFLEDVFPNQPGGIRILKTPSILKAIFDTPDEDPNYNPLPEERPGGFAWGEGQRLGG

SEQ ID NO: 59546 - protein, 32 aa, Homo sapiens
TTVTRFPGLAARLPSGSLPWRSRSQILASSPL

SEQ ID NO: 59547 - protein, 125 aa, Homo sapiens
LSSPVPGRMKFVYKEEHPFEKRRSEGEKIRKKYPDRVPVIVEKAPKARIGDLDKKKYLVPSDLTVGQFYFLIRKRIHLRAEDALFFFVNNVIPPTSATMGQLYQEHHEEDFFLYIAYSDESVYGL

SEQ ID NO: 59548 - protein, 61 aa, Homo sapiens
LALLGVPHCRKPLWAGLLLASGTTLFCTSFYYQALSGDPSIQTLAPAGGTLLLLGWLALAL

SEQ ID NO: 59549 - protein, 42 aa, Homo sapiens
LPLRLCVCLCVCLAISEFASASRTKPPRHHHLENPSPSPMAD

SEQ ID NO: 59550 - protein, 19 aa, Homo sapiens
LVQIDQILIHQKAERVESK

SEQ ID NO: 59551 - protein, 190 aa, Homo sapiens
MKHVKKEKAEKLEKERQRHIGKPLLGGPFSLTTHTGERKTDKDYLGQWLLIYFGFTHCPDVCPEELEKMIQVVDEIDSITTLPDLTPLFISIDPERDTKEAIANYVKEFSPKLVGLTGTREEVDQVARAYRVYYSPGPKDEDEDYIVDHTIIMYLIGPDGEFLDYFGQNKRKGEIAASIATHMRPYRKKS

SEQ ID NO: 59552 - protein, 122 aa, Homo sapiens
IPAVLTLLVGLNPEVTGNVIWKSISAIHILFCTVWAVGLASYLLHRTQQNILHEEEGRELSGLVIITAWIILCHSSSKNPVGGRIQLAIAIVITLFPFISWVYIYINKEMRSSWPTHCKTVI

SEQ ID NO: 59553 - protein, 23 aa, Homo sapiens
ISFTTSKIGSLIDVSQSKDPEGL

SEQ ID NO: 59554 - protein, 65 aa, Homo sapiens [sequence omitted]

SEQ ID NO: 59555 - protein, 12 aa, Homo sapiens
VSTHEQVLRTKN

SEQ ID NO: 59556 - protein, 5 aa, Homo sapiens
KTMVS

SEQ ID NO: 59557 - protein, 23 aa, Homo sapiens
IKLCQRLNQESFGWDLLPVQYCG

SEQ ID NO: 59558 - protein, 9 aa, Homo sapiens
RTFKIQQDL

SEQ ID NO: 59559 - protein, 277 aa, Homo sapiens
LRESETLSASIRRADPAGAAAAMDDREDLVYQAKLAEQAERYDEMVESMKKVAGMDVELTVEERNLLSVAYKNVIGARRASWRIISSIEQKEENKGGEDKLKMIREYRQMVETELKLICCDILDVLDKHLIPAANTGESKVFYYKMKGDYHRYLAEFATGNDRKEAAENSLVAYKAASDIAMTELPPTHPIRLGLALNFSVFYYEILNSPDRACRLAKAAFDDAIAELDTLSEESYKDSTLIMQLLRDNLTLWTSDMQGDGEEQNKEALQDVEDENQ

SEQ ID NO: 59560 - protein, 988 aa, Homo sapiens
IYTYIGPVLVSVNPYRDLQIYSRQHMERYRGVSFYEVPPHLFAVADTVYRALRTERRDQAVMISGESGAGKTEATKRLLQFYAETCPAPERGGAVRDRLLQSNPVLEAFGNAKTLRNDNSSRFGKYMDVQFDFKGAPVGGHILSYLLEKSRVVHQNHGERNFHIFYQLLEGGEEETLRRLGLERNPQSYLYLVKGQCAKVSSINDKSDWKVVRKALTVIDFTEDEVEDLLSIVASVLHLGNIHFAANEESNAQVTTENQLKYLTRLLSVEGSTLREALTHRKIIAKGEELLSPLNLEQAAYARDALAKAVYSRTFTWLVGKINRSLASKDVESPSWRSTTVLGLLDIYGFEVFQHNSFEQFCINYCNEKLQQLFIELTLKSEQEEYEAEGIAWEPVQYFNNKIICDLVEEKFKGIISILDEECLRPGEATDLTFLEKLEDTVKHHPHFLTHKLADQRTRKSLGRGEFRLLHYAGEVTYSVTGFLDKNNDLLFRNLKETMCSSKNPIMSQCFDRSELSDKKRPETVATQFKMSLLQLVEILQSKEPAYVRCIKPNDAKQPGRFDEVLIRHQVKYLGLLENLRVRRAGFAYRRKYEAFLQRYKSLCPETWPTWAGRPQDGVAVLVRHLGYKPEEYKMGRTKIFIRFPKTLFATEDALEVRRQSLATKIQAAWRGFHWRQKFLRVKRSAICIQSWWRGTLGRRKAAKRKWAAQTIRRLIRGFVLRHAPRCPENAFFLDHVRTSFLLNLRRQLPQNVLDTSWPTPPPALREASELLRELCIKNMVWKYCRSISPEWKQQLQQKAVASEIFKGKKDNYPQSVPRLFISTRLGTDEISPRVLQALGSEPIQYAVPVVKYDRKGYKPRSRQLLLTPNAVVIVEDAKVKQRIDYANLTGISVSSLSDSLFVLHVQRADNKQKGDVVLQSDHVIETLTKTALSANRVNSININQGSITFAGGPGRDGTIDFTPGSELLITKAKNGHLAVVAPRLNSR

SEQ ID NO: 59561 - protein, 196 aa, Homo sapiens
LAPEGALNIHEKAWNAYPYCRTVITNEYMKEDFLIKIETWHKPDLGTQENVHKLEPEAWKHVEAVYIDIADRSQVLSKDYKAEEDPAKFKSIKTGRGPLGPNWKQELVNQKDCPYMCAYKLVTVKFKWWGLQNKVENFIHKQERRLFTNFHRQLFCWLDKWVDLTMDDIRRMEEETKRQLDEMRQKDPVKGMTADD

SEQ ID NO: 59562 - protein, 80 aa, Homo sapiens
VLSLACCTLYGISWQFDPCCKYQVEYDAYKLSRLPLHTLTSSTPVVLVRKDDLHRKRLHNTIALAALVYCVKKIYELYAV

SEQ ID NO: 59563 - protein, 89 aa, Homo sapiens
IGQFQKIVGGLIELVDQLAKEAENEKMKAIGARNLLKSIAKQREAQQQQLQALIAEKKMQLERYRVEYEALCKVEAEQNEFIDQFIFQK

SEQ ID NO: 59564 - protein, 102 aa, Homo sapiens
IRLENLDSDVVQLRERHWRIFSLSGTLETVRGRGVVGREPVLSKEQPAFQYSSHVSLQASSGHMWGTFRFERPDGSHFDVRIPPFSLESNKDEKTPPSGLHW

SEQ ID NO: 59565 - protein, 82 aa, Homo sapiens
LDDWTVLCNGPYWVRDGEVRFKHSSTEVLLSVTGEQYGRPISGQKEVHGMAQPSQNNYWKAMEGIFMKPSELLKAEAHHAEL

SEQ ID NO: 59566 - protein, 195 aa, Homo sapiens
KTCLINRFCKDTFDKNYKATIGVDFEMERFEVLGIPFSLQLWDTAGQERFKCIASTYYRGAQAIIIVFNLNDVASLEHTKQWLADALKENDPSSVLLFLVGSKKDLSTPAQYALMEKDALQVAQEMKAEYWAVSSLTGENVREFFFRVAALTFEANVLAELEKSGARRIGDVVRINSDDSNLYLTASKKKPTCCP

SEQ ID NO: 59567 - protein, 20 aa, Homo sapiens
ITDLSLPLGRQVAAKAIAAL

SEQ ID NO: 59568 - protein, 52 aa, Homo sapiens
VGYNPYSHLAYNNYRLGGNPGTNSRVTVGESTITASGKQLELTRNAFRIRSF

SEQ ID NO: 59569 - protein, 8 aa, Homo sapiens
IPEDEKKE

SEQ ID NO: 59570 - protein, 58 aa, Homo sapiens
VTLAAQILAVLLPPVMLLIDGNVAYWHNTRRVEFWNQMKLLGESVGIFGTAVILATDG

SEQ ID NO: 59571 - protein, 1024 aa, Homo sapiens
TERPRRPERAHLSPRAGAMAEQESLEFGKADFVLMDTVSMPEFMANLRLRFEKGRIYTFIGEVVVSVNPYKLLNIYGRDTIEQYKGRELYERPPHLFAIADAAYKAMKRRSKDTCIVISGESGAGKTEASKYIMQYIAAITNPSQRAEVERVKNMLLKSNCVLEAFGNAKTNRNDNSSRFGKYMDINFDFKGDPIGGHINNYLLEKSRVIVQQPGERSFHSFYQLLQGGSEQMLRSLHLQKSLSSYNYIHVGAQLKSSINDAAEFRVVADAMKVIGFKPEEIQTVYKILAAILHLGNLKFVVDGDTPLIENGKVVSIIAELLSTKTDMVEKALLYRTVATGRDIIDKQHTEQEASYGRDAFAKAIYERLFCWIVTRINDIIEVKNYDTTIHGKNTVIGVLDIYGFEIFDNNSFEQFCINYCNEKLQQLFIQLVLKQEQEEYQREGIPWKHIDYFNNQIIVDLVEQQHKGIIAILDDACMNVGKVTDEMFLEALNSKLGKHAHFSSRKLCASDKILEFDRDFRIRHYAGDVVYSVIGFIDKNKDTLFQDFKRLMYNSSNPVLKNMWPEGKLSITEVTKRPLTAATLFKNSMIALVDNLASKEPYYVRCIKPNDKKSPQIFDDERCRHQVEYLGLLENVRVRRAGFAFRQTYEKFLHRYKMISEFTWPNHDLPSDKEAVKKLIERCGFQDDVAYGKTKIFIRTPRTLFTLEELRAQMLIRIVLFLQKVWRGTLARMRYKRTKAALTIIRYYRRYKVKSYIHEVARRFHGVKTMRDYGKHVKWPSPPKVLRRFEEALQTIFNRWRASQLIKSIPASDLPQVRAKVAAVEMLKGQRADLGLQRAWEGNYLASKPDTPQTSGTFVPVANELKRKDKYMNVLFSCHVRKVNRFSKVEDRAIFVTDRHLYKMDPTKQYKVMKTIPLYNLTGLSVSNGKDQLVVFHTKDNKDLIVCLFSKQPTHESRIGELVGVLVNHFKSEKRHLQVNVTNPVQCSLHGKKCTVSVETRLNQPQPDFTKNRSGFILSVPGN

SEQ ID NO: 59572 - protein, 38 aa, Homo sapiens
LEMPKPTVMTTQAGLENTWISTLTSRVTLLVGISITTY

SEQ ID NO: 59573 - protein, 32 aa, Homo sapiens
VTSSSRQIRTKVMDVHDGKVVSTHEQVLRTKN

SEQ ID NO: 59574 - protein, 263 aa, Homo sapiens
MDKNSPEAWCAAGNCFSLQREHDIAIKFFQRAIQVDPNYAYAYTLLGHEFVLTEELDKALACFRNAIRVNPRHYNAWYGLGMIYYKQEKFSLAEMHFQKALDINPQSSVLLCHIGVVQHALKKSEKALDTLNKAIVIDPKNPLCKFHRASVLFANEKYKSALQELEELKQIVPKESLVYFLIGKVYKKLGQTHLALMNFSWAMDLDPKGANNQIKEAIDKRYLPDDEEPITQEEQIMGTDESQESSMTDADDTQLHAAESDEF

SEQ ID NO: 59575 - protein, 28 aa, Homo sapiens
IGEASDGGTMENLSRRLKASRPHSGGKQ

SEQ ID NO: 59576 - protein, 154 aa, Homo sapiens
RELNITAAKETEVGGGRKAIIIFVPVPQLKSFQKIQVRLVRELEKKFSGKHVVFIAQRRILPKPTRKSRTKNKQKCPRSRTLTAVHDAFLEDLVFPSEIVGKRIPVKLDSSRLIKVHLDKAQQNNVEHKVETFSGVYKKLTGKDVNFEFPEFQL

SEQ ID NO: 59577 - protein, 50 aa, Homo sapiens
MTQQSSLRSGTQLDRSGITAWPPCTIGGPRLPSWSMTSPTQIHLHGPRTG

SEQ ID NO: 59578 - protein, 33 aa, Homo sapiens
LSRPRCHPPHSSLLPNFLFRILSRLELAEIFLN

SEQ ID NO: 59579 - protein, 20 aa, Homo sapiens
VNIYYVCLFSPRRWLRYSPG

SEQ ID NO: 59580 - protein, 11 aa, Homo sapiens
LGPPRKRLKQS

SEQ ID NO: 59581 - protein, 324 aa, Homo sapiens
RRRVNIFGEELERLLKKKYEGHWYPEKPYKGSGFRCIHIGEKVDPVIEQASKESGLDIDDVRGNLPQDLSVWIDPFEVSYQIGEKGPVKVLYVDDNNENGCELDKEIKNSFNPEAQVFMPISDPASSVSSSPSPPFGHSAAVSPTFMPRSTQPLTFTTATFAATKFGSTKMKNSGRSNKVARTSPINLGLNVNDLLKQKAISSSMHSLYGLGLGSQQQPQQQQQPAQPPPPPPPPQQQQQQKTSALSPNAKEFIFPNMQGQGSSTNGMFPGDSPLNLSPLQYSNAFDVFAAYGGLNEKSFVDGLNFSLNNMQYSNQQFQPVMAN

SEQ ID NO: 59582 - protein, 29 aa, Homo sapiens
MVSCNRLWVGTGNGVIISIPLTESKYIFR

SEQ ID NO: 59583 - protein, 4 aa, Homo sapiens
MPDL

SEQ ID NO: 59584 - protein, 31 aa, Homo sapiens
MYKFRVDFTEALYPAFWVFSAGATLSICSPK

SEQ ID NO: 59585 - protein, 109 aa, Homo sapiens
LASLYNYDMNQYENAEKLYLRSIAIGKKLFGEGYSGLEYDYRGLIKLYNSIGNYEKVFEYHNVLSNWNRLRDRQYSVTDALEDVSTSPQSTEEVVQSFLISQNVEGPSC

SEQ ID NO: 59586 - protein, 20 aa, Homo sapiens
MKKDQRAQQRKEQKKKHKRK

SEQ ID NO: 59587 - protein, 54 aa, Homo sapiens
VTDWIEKKLEQEFQKVFVMPNMDDVYITIMHSAMDPRSTSCLLKDPPVEAADQP

SEQ ID NO: 59588 - protein, 657 aa, Homo sapiens
LVSSVSFLRCRPRKASPSSRPFPATCRTLFYILRSPPTATIDAMSGYSSDRDRGRDRGFGAPRFGGSRAGPLSGKKFGNPGEKLVKKKWNLDELPKFEKNFYQEHPDLARRTAQEVETYRRSKEITVRGHNCPKPVLNFYEANFPANVMDVIARQNFTEPTAIQAQGWPVALSGLDMVGVAQTGSGKTLSYLLPAIVHINHQPFLERGDGPICLVLAPTRELAQQVQQVAAEYCRACRLKSTCIYGGAPKGPQIRDLERGVEICIATPGRLIDFLECGKTNLRRTTYLVLDEADRMLDMGFEPQIRKIVDQIRPDRQTLMWSATWPKEVRQLAEDFLKDYIHINIGALELSANHNILQIVDVCHDVEKDEKLIRLMEEIMSEKENKTIVFVETKRRCDELTRKMRRDGWPAMGIHGDKSQQERDWVLNEFKHGKAPILIATDVASRGLDVEDVKFVINYDYPNSSEDYIHRIGRTARSTKTGTAYTFFTPNNIKQVSDLISVLREANQAINPKLLQLVEDRGSGRSRGRGGMKDDRRDRYSAGKRGGFNTFRDRENYDRGYSSLLKRDFGAKTQNGVYSAANYTNGSFGSNFVSAGIQTSFRTGNPTGTYQNGYDSTQQYGSNVPNMHNGMNQQAYAYPATAAAPMIGYPMPTGYSQ

SEQ ID NO: 59589 - protein, 75 aa, Homo sapiens
VSIKDYFLEFEGDPHCLRDVQKFLVECFRNKRRDQQQKPLYHHFTTAINTENIRLVFRDVKDTILHDNLKQLMLQ

SEQ ID NO: 59590 - protein, 321 aa, Homo sapiens
IYVEIERARLTKTLATIKEQNGDVKEAASILQELQVETYGSMEKKERVEFILEQMRLCLAVKDYIRTQIISKKINTKFFQEENTEKLKLKYYNLMIQLDQHEGSYLSICKHYRAIYDTPCIQAESEKWQQALKSVVLYVILAPFDNEQSDLVHRISGDKKLEEIPKYKDLLKLFTTMELMRWSTLVEDYGMELRKGSLESPATDVFGSTEEGEKRWKDLKNRVVEHNIRIMAKYYTRITMKRMAQLLDLSVDESEAFLSNLVVNKTIFAKVDRLAGIINFQRPKDPNNLLNDWSQKLNSLMSLVNKTTHLIAKEEMIHNLQ

SEQ ID NO: 59591 - protein, 9 aa, Homo sapiens
KYYYSEVSD

SEQ ID NO: 59592 - protein, 82 aa, Homo sapiens
LGPQFVERIILTRDKTVVLGDLLIDDKDTVRGQEETPSWEHILFTCCHNRHLVLPPTRRRLLSWSDNWREILDSKRGAAQRE

SEQ ID NO: 59593 - protein, 169 aa, Homo sapiens
LSVLLRRQPTSLLGAMTTTTTFKGVDPNSRNSSRVLRPPGGGSNFSLGFDEPTEQPVRKNKMASNIFGTPEENQASWAKSAGAKSSGGREDLESSGLQRRNSSEASSGDFLDLKGEGDIHENVDTDLPGSLGQSEEKPVPAAPVPSPVAPAPVPSRRNPPGGKSSLVLG

SEQ ID NO: 59594 - protein, 455 aa, Homo sapiens
IVPIREIGTHKPLPGITVGDIGPKFGYDEIDNGYLKMDNHRIPRENMLMKYAQVKPDGTYVKPLSNKLTYGTMVFVRSFLVGEAARALSKACTIAIRYSAVRHQSEIKPGEPEPQILDFQTQQYKLFPLLATAYAFQFVGAYMKETYHRINEGIGQGDLSELPELHALTAGLKAFTSWTANTGIEACRMACGGHGYSHCSGLPNIYVNFTPSCTFEGENTVMMLQTARFLMKSYDQVHSGKLVCGMVSYLNDLPSQRIQPQQVAVWPTMVDINSPESLTEAYKLRAARLVEIAAKNLQKEVIHRKSKEVAWNLTSVDLVRASEAHCHYVVVKLFSEKLLKIQDKAIQAVLRSLCLLYSLYGISQNAGDFLQGSIMTEPQITQVNQRVKELLTLIRSDAVALVDAFDFQDVTLGSVLGRYDGNVYENLFEWAKNSPLNKAEVHESYKHLKSLQSKL

SEQ ID NO: 59595 - protein, 568 aa, Homo sapiens
LEILQIIKESQQQHGLRHGDFQRYRGYCSRRQRRLRKTLNFKMGNRHKFTGKKVTEELLTDNRYLLLVLMDAERAWSYAMQLKQEANTEPRKRFHLLSRLRKAVKHAEELERLCESNRVDAKTKLEAQAYTAYLSGMLRFEHQEWKAAIEAFNKCKTIYEKLASAFTEEQAVLYNQRVEEISPNIRYCAYNIGDQSAINELMQMRLRSGGTEGLLAEKLEALITQTRAKQAATMSEVEWRGRTVPVKIDKVRIFLLGLADNEAAIVQAESEETKERLFESMLSECRDAIQVVREELKPDQKQRDYILEGEPGKVSNLQYLHSYLTYIKLSTAIKRNENMAKGLQRALLQQQPEDDSKRSPRPQDLIRLYDIILQNLVELLQLPGLEEDKAFQKEIGLKTLVFKAYRCFFIAQSYVLVKKWSEALVLYDRVLKYANEVNSDAGAFKNSLKDLPDVQELITQVRSEKCSLQAAAILDANDAHQTETSSSQVKDNKPLVERFETFCLDPSLVTKQANLVHFPPGFQPIPCKPLFFDLALNHVAFPPLEDKLEQKTKSGLTGYIKGIFGFRS

SEQ ID NO: 59596 - protein, 70 aa, Homo sapiens
LKKMEQNKTAATRYRQKKRAEQEALTGECKELEKKNEALKERADSLAKEIQYLKDLIEEVRKARGKKRVP

SEQ ID NO: 59597 - protein, 29 aa, Homo sapiens
VTAAYKEVGWVQQVPNATTPPATLPSSGP

SEQ ID NO: 59598 - protein, 32 aa, Homo sapiens
VGNGDTTSQDDCVSKERSSSRIRDTCGGRAHP

SEQ ID NO: 59599 - protein, 27 aa, Homo sapiens
RCASLRSPSVLFCGKAFPSVPTRKATA

SEQ ID NO: 59600 - protein, 330 aa, Homo sapiens
VGALGQGSPDSMSVGFIGAGQLAFALAKGFTAAGVLAAHKIMASSPDMDLATVSALRKMGVKLTPHNKETVQHSDVLFLAVKPHIIPFILDEIGADIEDRHIVVSCAAGVTISSIEKKLSAFRPAPRVIRCMTNTPVVVREGATVYATGTHAQVEDGRLMEQLLSSVGFCTEVEEDLIDAVTGLSGSGPAYAFTALDALADGGVKMGLPRRLAVRLGAQALLGAAKMLLHSEQHPGQLKDNVSSPGGATIHALHVLESGGFRSLLINAVEASCIRTRELQSMADQEQVSPAAIKKTILDKVKLDSPAGTALSPSGHTKLLPRSLAPAGKD

SEQ ID NO: 59601 - protein, 15 aa, Homo sapiens
IHSSLAEPRVSVREG

SEQ ID NO: 59602 - protein, 57 aa, Homo sapiens
IEQLCSTVGGQLPGLHEYGAVGGSTHTATAAMWACQHCTFMNQPGTGHCEMCSLPRT

SEQ ID NO: 59603 - protein, 23 aa, Homo sapiens
LKTFKPIDLSDLKRRSTQDAKKS

SEQ ID NO: 59604 - protein, 115 aa, Homo sapiens
KSGGSSKNLGGKSSGRRQGIKKMEGHYVHAGNIIATQRHFRWHPGAHVGVGKNKCLYALEEGIVRYTKEVYVPHPRNTEAVDLITRLPKGAVLYKTFVHVVPAKPEGTFKLVAML

SEQ ID NO: 59605 - protein, 513 aa, Homo sapiens
LPPSSGPALLRRRLPPRPAMPLYSVTVKWGKEKFEGVELNTDEPPMVFKAQLFALTGVQPARQKVMVKGGTLKDDDWGNIKIKNGMTLLMMGSADALPEEPSAKTVFVEDMTEEQLASAMELPCGLTNLGNTCYMNATVQCIRSVPELKDALKRYAGALRASGEMASAQYITAALRDLFDSMDKTSSSIPPIILLQFLHMAFPQFAEKGEQGQYLQQDANECWIQMMRVLQQKLEAIEDDSVKETDSSSASAATPSKKKSLIDQFFGVEFETTMKCTESEEEEVTKGKENQLQLSCFINQEVKYLFTGLKLRLQEEITKQSPTLQRNALYIKSSKISRLPAYLTIQMVRFFYKEKESVNAKVLKDVKFPLMLDMYELCTPELQEKMVSFRSKFKDLEDKKVNQQPNTSDKKSSPQKEVKYEPFSFADDIGSNNCGYYDLQAVLTHQGRSSSSGHYVSWVKRKQDEWIKFDDDKVSIVTPEDILRLSGGGDWHIAYVLLYGPRRVEIMEEESEQ

SEQ ID NO: 59606 - protein, 332 aa, Homo sapiens
IPPKERAPGIRASCLAITAGARPTSYGRVGCEGDVRLSPVSPLLAPPDPRLASRWEGRSRMKGKKGIVAASGSETEDEDSMDIPLDLSSSAGSGKRRRRGNLPKESVQILRDWLYEHRYNAYPSEQEKALLSQQTHLSTLQVCNWFINARRRLLPDMLRKDGKDPNQFTISRRGAKISETSSVESVMGIKNFMPALEETPFHSCTAGPNPTLGRPLSPKPSSPGSVLARPSVICHTTVTALKDVPFSLCQSVGVGQNTDIQQIAAKNFTDTSLMYPEDTCKSGPSTNTQSGLFNTPPPTPPDLNQDFSGFQLLVDVALKRAAEMELQAKLTA

SEQ ID NO: 59607 - protein, 242 aa, Homo sapiens
VKFAPKHMGLMLATCSADGIVRIYEAPDVMNLSQWSLQHEISCKLSCSCISWNPSSSRAHSPMIAVGSDDSSPNAMAKVQIFEYNENTRKYAKAETLMTVTDPVHDIAFAPNLGRSFHILAIATKDVRIFTLKPVRKELTSSGGPTKFEIHIVAQFDNHNSQVWRVSWNITGTVLASSGDDGCVRLWKANYMDNWKCTGILKGNGSPVNGSSQQGTSNPSLGSTIPSLQNSLNGSSAGRKHS

SEQ ID NO: 59608 - protein, 130 aa, Homo sapiens
LSDPEGDGAARMKLVRFLMKLSHETVTIELKNGTQVHGTITGVDVSMNTHLKAVKMTLKNREPVQLETLSIRGNNIRYFILPDSLPLDTLLVDVEPKVKSKKREAVAGRGRGRGRGRGRGRGRGRGGPRR

SEQ ID NO: 59609 - protein, 176 aa, Homo sapiens
MNGLSRPLIKPQKRVPSSRRLGLSCANCHTTTTTLWRRNAEGEPVCNACGLYMKLHGVPRPLAMKKEGIQTRKRKPKNINKSKTCSGNSNNSIPMTPTSTSSNSDDCSKNTSPTTQPTASGAGAPVMTGAGESTNPENSELKYSGQDGLYIGVSLASPAEVTSSVRPDSWCALALA

SEQ ID NO: 59610 - protein, 28 aa, Homo sapiens
LSPRRSLLPVLPPLCSVLVSAFIPEWIW

SEQ ID NO: 59611 - protein, 8 aa, Homo sapiens
KKSLQRKW

SEQ ID NO: 59612 - protein, 740 aa, Homo sapiens
VIHWEIEDNQLLKAVHLQGHEGPVYAVHAVYQRRTSDPALCTLIVSAAADSAVRLWSKKGPEVMCLQTLNFGNGFALALCLSFLPNTDVPILACGNDDCRIHIFAQQNDQFQKVLSLCGHEDWIRGVEWAAFGRDLFLASCSQDCLIRIWKLYIKSTSLETQDDDNIRLKENTFTIENESVKIAFAVTLETVLAGHENWVNAVHWQPVFYKDGVLQQPVRLLSASMDKTMILWAPDEESGVWLEQVRVGEVGGNTLGFYDCQFNEDGSMIIAHAFHGALHLWKQNTVNPREWTPEIVISGHFDGVQDLVWDPEGEFIITVGTDQTTRLFAPWKRKDQSQVTWHEIARPQIHGYDLKCLAMINRFQFVSGADEKVLRVFSAPRNFVENFCAITGQSLNHVLCNQDSDLPEGATVPALGLSNKAVFQGDIASQPSDEEELLTSTGFEYQQVAFQPSILTEPPTEDHLLQNTLWPEVQKLYGHGYEIFCVTCNSSKTLLASACKAAKKEHAAIILWNTTSWKQVQNLVFHSLTVTQMAFSPNEKFLLAVSRDRTWSLWKKQDTISPEFEPVFSLFAFTNKITSVHSRIIWSCDWSPDSKYFFTGSRDKKVVVWGECDSTDDCIEHNIGPCSSVLDVGGAVTAVSVCPVLHPSQRYVVAVGLECGKICLYTWKKTDQVPEINDWTHCVETSQSQSHTLAIRKLCWKNCSGKTEQKEAEGAEWLHFASCGEDHTVKIHRVNKCAL

SEQ ID NO: 59613 - protein, 76 aa, Homo sapiens
MICIDQQTGQRNQHVFQKLSESRETKVNFGMYLMHASLDLSSPCFLSVGSQVLPVLKENVEGHDLPASEKHQDVTS

SEQ ID NO: 59614 - protein, 67 aa, Homo sapiens
KKVVDPFSKKDWFDAKAPTTFNIRNIGKTLITRTQGTKIASDGLKGRVFEVSLADLQNDEVAFRKFS

SEQ ID NO: 59615 - protein, 115 aa, Homo sapiens
IFPGVALAVILCNTRHISDSVFLEAAKALTSQLTDEELAQGRLYPPLANIQEVSINIAIKVTEYLYANKMAFRYPEPEDKAKYVKERTWRSEYDSLLPDVYEWPESASSPPVITE

SEQ ID NO: 59616 - protein, 90 aa, Homo sapiens
LRALGLKDIFDESKADLSGIASGGRLYISRMMHKSYIEVTEEGTEATAATGSNIVEKQLPQSTLFRADHPFLFVIRKDDIILFSGKVSCP

SEQ ID NO: 59617 - protein, 44 aa, Homo sapiens
MTDDELVYNVHLAVNFLVSLLKKNWQNVRALYIKSTMGKPRCLY

SEQ ID NO: 59618 - protein, 15 aa, Homo sapiens
MFGDNIPDRNIDPLD

SEQ ID NO: 59619 - protein, 29 aa, Homo sapiens
KKHLFENSRLLQPPKGVLLYEPPQAVVKR

SEQ ID NO: 59620 - protein, 31 aa, Homo sapiens
LKNENVDRHVDLLEVAQETDAFSGRDLNAMC

SEQ ID NO: 59621 - protein, 53 aa, Homo sapiens
LGPRPFAEKSTYEEFVEGTGSLDEDTSLPEGLKDWNKEREKEKEEPPGEKVAN

SEQ ID NO: 59622 - protein, 356 aa, Homo sapiens
IQCIMDSQNKGKTSECSQYQQMLHTNLVYLATIADSNQNMQSLLPAPPTQNMPMGPGGMNQSGPPPPPRSHNMPSDGMVGGGPPAPHMQNQMNGQMPGPNHMPMQGPGPNQLNMTNSSMNMPSSSHGSMGGYNHSVPSSQSMPVQNQMTMSQGQPMGNYGPRPNMSMQPNQGPMMHQQPPSQQYNMPQGGGQHYQGQQPPMGMMGQVNQGNHMMGQRQIPPYRPPQQGPPQQYSGQEDYYGDQYSHGGQGPPEGMNQQYYPDGNSQYGQQQDAYQGPPPQQGYPPQQQQYPGQQGYPGQQQGYGPSQGGPGPQYPNYPQGQGQQYGGYRPTQPGPPQPPQQRPYGYDQGQYGNYQQ

SEQ ID NO: 59623 - protein, 50 aa, Homo sapiens
KKVDAGGKVKKGNLKAKKPKKGKPHCSRNPVLVRGIGRYSRSAMYSRKAM

SEQ ID NO: 59624 - protein, 44 aa, Homo sapiens
KIVIPKKKGPVQPAGGQKGPSGPSGPSTSSTSKSSSGSGNPTRK

SEQ ID NO: 59625 - protein, 247 aa, Homo sapiens
IRKSGLSAGKSDVYYFSPSGKKFRSKPQLARYLGNTVDLSSFDFRTGKMMPSKLQKNKQRLRNDPLNQNKGKPDLNTTLPIRQTASIFKQPVTKVTNHPSNKVKSDPQRMNEQPRQLFWEKRLQGLSASDVTEQIIKTMELPKGLQGVGPGSNDETLLSAVASALHTSSAPITGQVSAAVEKNPAVWLNTSQPLCKAFIVTDEDIRKQEERVQQVRKKLEEALMADILSRAADTEEMDIEMDSGDEA

SEQ ID NO: 59626 - protein, 632 aa, Homo sapiens
LASGHFTGSNVEDRSSSGSWGNGGHPSPSRNYGDGTPYDHMTSRDLGSHDNLSPPFVNSRIQSKTERGSYSSYGRESNLQGCHQQSLLGGDMDMGNPGTLSPTKPGSQYYQYSSNNPRRRPLHSSAMEVQTKKVRKVPPGLPSSVYAPSASTADYNRDSPGYPSSKPATSTFPSSFFMQDGHHSSDPWSSSSGMNQPGYAGMLGNSSHIPQSSSYCSLHPHERLSYPSHSSADINSSLPPMSTFHRSGTNHYSTSSCTPPANGTDSIMANRGSGAAGSSQTGDALGKALASIYSPDHTNNSFSSNPSTPVGSPPSLSAGTAVWSRNGGQASSSPNYEGPLHSLQSRIEDRLERLDDAIHVLRNHAVGPSTAMPGGHGDMHGIIGPSHNGAMGGLGSGYGTGLLSANRHSLMVGTHREDGVALRGSHSLLPNQVPVPQLPVQSATSPDLNPPQDPYRGMPPGLQGQSVSSGSSEIKSDDEGDENLQDTKSSEDKKLDDDKKDIKSITRSRSSNNDDEDLTPEQKAEREKERRMANNARERLRVRDINEAFKELGRMVQLHLKSDKPQTKLLILHQAVAVILSLEQQVRERNLNPKAACLKRREEEKVSSEPPPLSLAGPHPGMGDASNHMGQM

SEQ ID NO: 59627 - protein, 359 aa, Homo sapiens
RSLDGRLQVSHRKGLPHVIYCRLWRWPDLHSHHELKAIENCEYAFNLKKDEVCVNPYHYQRVETPVLPPVLVPRHTEILTELPPLDDYTHSIPENTNFPAGIEPQSNYIPETPPPGYISEDGETSDQQLNQSMDTGSPAELSPTTLSPVNHSLDLQPVTYSEPAFWCSIAYYELNQRVGETFHASQPSLTVDGFTDPSNSERFCLGLLSNVNRNATVEMTRRHIGRGVRLYYIGGEVFAECLSDSAIFVQSPNCNQRYGWHPATVCKIPPGCNLKIFNNQEFAALLAQSVNQGFEAVYQLTRMCTIRMSFVKGWGAEYRRQTVTSTPCWIELHLNGPLQWLDKVLTQMGSPSVRCSSMS

SEQ ID NO: 59628 - skipped

SEQ ID NO: 59629 - protein, 23 aa, Homo sapiens
KKRSPLDAIVADGTAEYRRTGDS

SEQ ID NO: 59630 - protein, 41 aa, Homo sapiens
LKSLQNNNQKQKQPSIGKSKVQTNSMTIKKAGPETPGEKKT

SEQ ID NO: 59631 - protein, 188 aa, Homo sapiens
LRVRAGPDFVRGPGGGGGRGVRGRLSPPRWALPGAPPWAAASARAAMSYMLPHLHNGWQVDQAILSEEDRVVVIRFGHDWDPTCMKMDEVLYSIAEKVKNFAVIYLVDITEVPDFNKMYELYDPCTVMFFFRNKHIMIDLGTGNNNKINWAMEDKQEMVDIIETVYRGARKGRGLVVSPKDYSTKYRY

SEQ ID NO: 59632 - protein, 433 aa, Homo sapiens
IDLASKAAQEDKAGNYEEALQLYQHAVQYFLHVVKYEAQGDKAKQSIRAKCTEYLDRAEKLKEYLKNKEKKAQKPVKEGQPSPADEKGNDSDGEGESDDPEKKKLQNQLQGAIVIERPNVKWSDVAGLEGAKEALKEAVILPIKFPHLFTGKRTPWRGILLFGPPGTGKSYLAKAVATEANNSTFFSISSSDLVSKWLGESEKLVKNLFQLARENKPSIIFIDEIDSLCGSRSENESEAARRIKTEFLVQMQGVGVDNDGILVLGATNIPWVLDSAIRRRFEKRIYIPLPEPHARAAMFKLHLGTTQNSLTEADFRELGRKTDGYSGADISIIVRDALMQPVRKVQSATHFKKVRGPSRADPNHLVDDLLTPCSPGDPGAIEMTWMDVPGDKLLEPVVSMSDMLRSLSNTKPTVNEHDLLKLKKFTEDFGQEG

SEQ ID NO: 59633 - protein, 9 aa, Homo sapiens
LLRMFLSHK

SEQ ID NO: 59634 - protein, 41 aa, Homo sapiens
VFESDGPRGSEVHTTSADAPKQGRDHSNTGTVQTVPLRKGT

SEQ ID NO: 59635 - protein, 56 aa, Homo sapiens
ILGFCGLTALYFLIRAFRLKKPQRRRYGLLANTEDPTEMASLDSDEETVFESRNLR

SEQ ID NO: 59636 - protein, 45 aa, Homo sapiens [sequence omitted]

SEQ ID NO: 59637 - protein, 228 aa, Homo sapiens
IKTLWEDPGIQECYDRRREYQLSDSAKYYLTDVDRIATLGYLPTQQDVLRVRVPTTGIIEYPFDLENIIFRMVDVGGQRSERRKWIHCFENVTSIMFLVALSEYDQVLVESDNENRMEESKALFRTIITYPWFQNSSVILFLNKKDLLEDKILYSHLVDYFPEFDGPQRDAQAAREFILKMFVDLNPDSDKIIYSHFTCATDTENIRFVFAAVKDTILQLNLKEYNLV

SEQ ID NO: 59638 - protein, 29 aa, Homo sapiens
IILAKDFAIYFSAFSGRISLLPEGLGRAL

SEQ ID NO: 59639 - protein, 187 aa, Homo sapiens
LGSLARILQFLPGDCRGAASTVDYNCNMTLEELVACDNAAQKMQTVTAAVEELLVAAQRQDRLTVGVYESAKLMNVDPDSVVLCLLAIDEEEEDDIALQIHFTLIQSFCCDNDINIVRVSGMQRLAQLLGEPAETQGTTEARDLHCLLVTNPHTDAWKSHGLVEVASYCEESRGNNQWVPYISLQER

SEQ ID NO: 59640 - protein, 158 aa, Homo sapiens
LLFSELVQHCQSRVFSVAELQSRLAALGRQVGARVLDALVAREKGARRETKVLGALLFVKGAVWKALFGKEADKLEQANDDARTFYIIEREPLINTYISVPKENSTLNCASFTAGIVEAVLTHSGFPAKVTAHWHKGTTLMIKFEEAVIARDRALEGR

SEQ ID NO: 59641 - protein, 102 aa, Homo sapiens
VKHSQSRRPSSWRQEKITRTKEEALELINGYIQKIKSGEEDFESLASQFSDCSSAKARGDLGAFSRGQMQKPFEDASFALRTGEMSGPVFTDSGIHIILRTE

SEQ ID NO: 59642 - protein, 93 aa, Homo sapiens
VDLTHEEMPQSIVEATSRLKTFNLIPAVGLNVHSMLKHQTLVLTLPTVAFLEDKLLWQDSRYRPLYPFSLPYSDFPRPLPHATQGPAATPYHC

SEQ ID NO: 59643 - protein, 656 aa, Homo sapiens
ITNIPFDVKWQSLKDLVKEKVGEVTYVELLMDAEGKSRGCAVVEFKMEESMKKAAEVLNKHSLSGRPLKVKEDPDGEHARRAMQKVMATTGGMGMGPGGPGMITIPPSILNNPNIPNEIIHALQAGRLGSTVFVANLDYKVGWKKLKEVFSMAGVVVRADILEDKDGKSRGIGTVTFEQSIEAVQAISMFNGQLLFDRPMHVKMDERALPKGDFFPPERPQQLPHGLGGIGMGLGPGGQPIDANHLNKGIGMGNIGPAGMGMEGIGFGINKMGGMEGPFGGGMENMGRFGSGMNMGRINEILSNALKRGEIIAKQGGGGGGGSVPGIERMGPGIDRLGGAGMERMGAGLGHGMDRVGSEIERMGLVMDRMGSVERMGSGIERMGPLGLDHMASSIERMGQTMERIGSGVERMGAGMGFGLERMAAPIDRVGQTIERMGSGVERMGPAIERMGLSMERMVPAGMGAGLERMGPVMDRMATGLERMGANNLERMGLERMGANSLERMGLERMGANSLERMGPAMGPALGAGIERMGLAMGGGGGASFDRAIEMERGNFGGSFAGSFGGAGGHAPGVARKACQIFVRNLPFDFTWKMLKDKFNECGHVLYADIKMENGKSKGCGVVKFESPEVAERACRMMNGMKLSGREIDVRIDRNA

SEQ ID NO: 59644 - protein, 353 aa, Homo sapiens
LRGVMRVGLVAKGLLLKGDLDLELVLLCKEKPTTALLDKVADNLAIQLAAVTEDKYEILQSVDDAAIVIKNTKEPPLSLTIHLTSPVVREEMEKVLAGETLSVNDPPDVLDRQKCLAALASLRHAKWFQARANGLKSCVIVIRVLRDLCTRVPTWGPLRGWPLELLCEKSIGTANRPMGAGEALRRVLECLASGIVMPDGSGIYDPCEKEATDAIGHLDRQQREDITQSAQHALRLAAFGQLHKVLGMDPLPSKMPKKPKNENPVDYTVQIPPSTTYAITPMKRPMEEDGEEKSPSKKKKKIQKKGTGRARWLTPVIPALWEAEAGESLELRSFETISLGNMAKPRLYKKYKN

SEQ ID NO: 59645 - protein, 364 aa, Homo sapiens
VSLPEQVDIIISEPMGYMLFNERMLESYLHAKKYLKPSGNMFPTIGDVHLAPFTDEQLYMEQFTKANFWYQPSFHGVDLSALRGAAVDEYFRQPVVDTFDIRILMAKSVKYTVNFLEAKEGDLHRIEIPFKFHMLHSGLVHGLAFWFDVAFIGSIMTVWLSTAPTEPLTHWYQVRCLFQSPLFAKAGDTLSGTCLLIANKRQSYDISIVAQVDQTGSKSSNLLDLKNPFFRYTGTTPSPPPGSHYTSPSENMWNTGSTYNLSSGMAVAGMPTAYDLSSVIASGSSVGHNNLIPLANTGIVNHTHSRMGSIMSTGIVQGSSGAQGSGGGSTSAHYAVNSQFTMGGPAISMASPMSIPTNTMHYGS

SEQ ID NO: 59646 - protein, 30 aa, Homo sapiens
ICTMGVTIPALLAARSGCESSGVDAAWGKP

SEQ ID NO: 59647 - protein, 26 aa, Homo sapiens
LLDKRGAVDTDLCSGLVVKTQRISPL

SEQ ID NO: 59648 - protein, 387 aa, Homo sapiens
ILAHGGVRFMWIKHNNLYLVATSKKNACVSLVFSFLYKVVQVFSEYFKELEEESIRDNFVIIYELLDELMDFGYPQTTDSKILQEYITQEGHKLETGAPRPPATVTNAVSWRSEGIKYRKNEVFLDVIESVNLLGKYPGVGWLGHTVSANGNVLRSEIVGSIKMRVFLSGMPELRLGLNDKVLFDNTGRGKSKSVELEDVKFHQCVRLSRFENDRTISFIPPDGEFELMSYRLNTHVKPLIWIESVIEKHSHSRIEYMIKAKSQFKRRSTANNVEIHIPVPNDADSPKFKTTVGSVKWVPENSEIVWSIKSFPGGKEYLMRAHFGLPSVEAEDKEGKPPISVKFEIPYFTTSGIQVRYLKIIEKSGYQALPWVRYITQNGDYQLRTQ

SEQ ID NO: 59649 - protein, 46 aa, Homo sapiens
KARGNEYQPSNIKRKNKHGWVRRLSTPAGVQVILRRMLKGRKSLSH

SEQ ID NO: 59650 - protein, 567 aa, Homo sapiens
IALLARNAAHALPTTLGALERLRHPRERTALWVATDHNMDNTSTVLREWLVAVKSLYHSVEWRPAEEPRSYPDEEGPKHWSDSRYEHVMKLRQAALKSARDMWADYILFVDADNLILNPDTLSLLIAENKTVVAPMLDSRAAYSNFWCGMTSQGYYKRTPAYIPIRKRDRRGCFAVPMVHSTFLIDLRKAASRNLAFYPPHPDYTWSFDDIIVFAFSCKQAEVQMYVCNKEEYGFLPVPLRAHSTLQDEAESFMHVQLEVMVKHPPAEPSRFISAPTKTPDKMGFDEVFMINLRRRQDRRERMLRALQAQEIECRLVEAVDGKAMNTSQVEALGIQMLPGYRDPYHGRPLTKGELGCFLSHYNIWKEVVDRGLQKSLVFEDDLRFEIFFKRRLMNLMRDVEREGLDWDLIYVGRKRMQVEHPEKAVPRVRNLVEADYSYWTLAYVISLQGARKLLAAEPLSKMLPVDEFLPVMFDKHPVSEYKAHFSLRNLHAFSVEPLLIYPTHYTGDDGYVSDTETSVVWNNEHVKTDWDRAKSQKMREQQALSREAKNSDVLQSPLDSAARDEL

SEQ ID NO: 59651 - protein, 31 aa, Homo sapiens
ITVDMMYGGMRGMKGLVYETSVLDPDEGIRF

SEQ ID NO: 59652 - protein, 31 aa, Homo sapiens
MEPDWPLYPPPSHACEDSLPPYKLKLDLTKL

SEQ ID NO: 59653 - protein, 54 aa, Homo sapiens
VAYYQKYVDEASKKEIKDILIQYDRTLLVADPRRCKSKKFGGPGARACYQKSYR

SEQ ID NO: 59654 - protein, 24 aa, Homo sapiens
MLAIKRCKHFELGVDKRKGQVIQF

SEQ ID NO: 59655 - protein, 280 aa, Homo sapiens
LIISTDPAHNISDAFDQKFSKVPTKVKGYDNLFAMEIDPSLGVAELPDEFFEEDNMLSMGKKMMQEAMSAFPGIDEAMSYAEVMRLVKGMNFSVVVFDTAPTGHTLRLLNFPTIVERGLGRLMQIKNQISPFISQMCNMLGLGDMNADQLASKLEETLPVIRSVSEQFKDPEQTTFICVCIAEFLSLYETERLIQELAKCKIDTHNIIVNQLVFPDPEKPCKMCEARHKIQAKYLDQMEDLYEDFHIVKLPLLPHEVRGADKVNTFSALLLEPYKPPSAQ

SEQ ID NO: 59656 - protein, 405 aa, Homo sapiens
LTGLLRTAAGWLLPARASPRERATRHPVRSPQRRARRSLQRGPERPRRDPPQTAWAARMCTKMEQPFYHDDSYTATGYGRAPGGLSLHDYKLLKPSLAVNLADPYRSLKAPGARGPGPEGGGGGSYFSGQGSDTGASLKLASSELERLIVPNSNGVITTTPTPPGQYFYPRGGGSGGGAGGAGGGVTEEQEGFADGFVKALDDLHKMNHVTPPNVSLGATGGPPAGPGGVYAGPEPPPVYTNLSSYSPASASSGGAGAAVGTGSSYPTTTISYLPHAPPFAGGHPAQLGLGRGASTFKEEPQTVPEARSRDATPPVSPINMEDQERIKVERKRLRNRLAATKCRKRKLERIARLEDKVKTLKAENAGLSSTAGLLREQVAQLKQKVMTHVSNGCQLLLGVKGHAF

SEQ ID NO: 59657 - protein, 286 aa, Homo sapiens
MKEEDVLKFLAAGTHLGGTNLDFQMEHYIYKRKSDGIYIINLKRTWEKLLLAARAIVAIENPADVSVISSRNTGQRAVLKFAAATGATPIAGRFTPGTFTNQIQAAFWEPRLLVVTDPRADHQPLTEASYVNLPTIALCNTDSPLRYVDIAIPCNNKGAHSVGLMWWMLAREVLRMRGTISREHPWEVMPDLYFYRDPEEIEKEEQAAAEKAVTKEEFQGEWTAPSPEFTATQPEVADWSEGVQVPSVPIQQFPTEDWSAQPATEDWSAAPTAQATEWVGATTDWS

SEQ ID NO: 59658 - protein, 29 aa, Homo sapiens
ISYIYGSKFQLRSSERSAKKFKAKGTIDL

SEQ ID NO: 59659 - protein, 125 aa, Homo sapiens
LKRCIRTAAGSSWEDPSLLEWDADDFRIFCGDLGNEVNDDILARAFSRFPSFLKAKVIRDKRTGKTKGYGFVSFKDPSDYVRAMREMNGKYVGSRPIKLRKSMWKDRNLDVVRKKQKEKKKLGLR

SEQ ID NO: 59660 - protein, 101 aa, Homo sapiens
IELQVESGVPLGFSTMAEDMETKIKNYKTAPFDSRFPNQNQTRNCWQNYLDFHRCQKAMTAKGGDISVCEWYQRVYQSLCPTSWVTDWDEQRAEGTFPGKI

SEQ ID NO: 59661 - protein, 115 aa, Homo sapiens
LPRRPLGRPGPSAAMNLERVSNEEKLNLCRKYYLGGFAFLPFLWLVNIFWFFREAFLVPAYTEQSQIKGYVWRSAVGFLFWVIVLTSWITIFQIYRPRWGALGDYLSFTIPLGTP

SEQ ID NO: 59662 - protein, 5 aa, Homo sapiens
MICVL

SEQ ID NO: 59663 - protein, 439 aa, Homo sapiens
ILYTIDTENSTVALAKVRSFGTEDRPTDRPIPPRDEVFEYIIFRGSDIKDLTVCEPPKPQCSLPQDPAIVQSSLGSSTSSFQSMGSYGPFGRMPTYSQFSPSSLVGQQFGAVGVAGSSLTSFGTETSNSGTLPQSSAVGSAFTQDTRSLKTQLSQGRSSPQLDPLRKSPTMEQAVQTASAHLPAPAAVGRRSPVSTRPLPSASQKAGENQEHRRAEVHKVSRPENEQLRNDNKRQVAPGAPSAPRRGRGGHRGGRGRFGIRRDGPMKFEKDFDFESANAQFNKEEIDREFHNKLKLKEDKLEKQEKPVNGEDKGDSGVDTQNSEGNADEEDPLGPNCYYDKTKSFFDNISCDDNRERRPTWAEERRLNAETFGIPLRPNRGRGGYRGRGGLGFRGGRGRGGGRGGTFTAPRGFRGGFRGGRGGREFADFEYRKTTAFGP

SEQ ID NO: 59664 - protein, 41 aa, Homo sapiens
LLQTLQLRASPVWKHLLLMLQGNRYLSKQKEWRRRLTTNAI

SEQ ID NO: 59665 - protein, 208 aa, Homo sapiens
ILGGVISAISEAAAQYNPEPPPPRTHYSNIEANESEEVRQFRRLFAQLAGDDMEVSATELMNILNKVVTRHPDLKTDGFGIDTCRSMVAVMDSDTTGKLGFEEFKYLWNNIKRWQAIYKQFDTDRSGTICSSELPGAFEAAGFHLNEHLYNMIIRRYSDESGNMDFDNFISCLVRLDAMFRAFKSLDKDGTGQIQVNIQEWLQLTMYS

SEQ ID NO: 59666 - protein, 41 aa, Homo sapiens
KELDSGLAESVSTLIWAAPRLQSEVAELKIVADQLCAKYSK

SEQ ID NO: 59667 - protein, 48 aa, Homo sapiens
TELILLPPPCPASFNADEDDRVDILGPQPESHQQLSASSHTDYASIPR

SEQ ID NO: 59668 - protein, 41 aa, Homo sapiens
VGDVECRVECSKAHPPAMYYPPTRPGWSDRVWGAEPRFSLR

SEQ ID NO: 59669 - protein, 457 aa, Homo sapiens
KKARWVLLVLILAVVGFGALMTQLFLWEYGDLHLFGPNQRPAPCYDPCEAVLVESIPEGLDFPNASTGNPSTSQAWLGLLAGAHSSLDIASFYWTLTNNDTHTQEPSAQQGEEVLRQLQTLAPKGVNVRIAVSKPSGPQPQADLQALLQSGAQVRMVDMQKLTHGVLHTKFWVVDQTHFYLGSANMDWRSLTQVKELGVVMYNCSCLARDLTKIFEAYWFLGQAGSSIPSTWPRFYDTRYNQETPMEICLNGTPALAYLASAPPPLCPSGRTPDLKALLNVVDNARSFIYVAVMNYLPTLEFSHPHRFWPAIDDGLRRATYERGVKVRLLISCWGHSEPSMRAFLLSLAALRDNHTHSDIQVKLFVVPADEAQARIPYARVNHNKYMVTERATYIGTSNWSGNYFTETAGTSLLVTQNGRGGLRSQLEAIFLRDWDSPYSHDLDTSADSVGNACRLL

SEQ ID NO: 59670 - protein, 237 aa, Homo sapiens
TPCRVSVSLQPWLWKATEVMAMFEQMRANVGKLLKGIDRYNPENLATLERYVETQAKENAYDLEANLAVLKLYQFNPAFFQTTVTAQILLKALTNLPHTDFTLCKCMIDQAHQEERPIRQILYLGDLLETCHFQAFWQALDENMDLLEGITGFEDSVRKFICHVVGITYQHIDRWLLAEMLGDLSDSQLKVWMSKYGWSADESGQIFICSQEESIKPKNIVEKIDFDSVSSIMASSQ

SEQ ID NO: 59671 - protein, 88 aa, Homo sapiens
MPPAQPLSENPPNHILFLTNLPEETNELMLSMLFNQFPGFKEVRLVPGRHDIAFVEFDNEVQAGAARDALQGFKITQNNAMKISFAKK

SEQ ID NO: 59672 - protein, 887 aa, Homo sapiens [sequence omitted]

SEQ ID NO: 59673 - protein, 38 aa, Homo sapiens
RGSPHPAQPPSQCSPSSPVTSTWSPANPRSWRWLGLQA

SEQ ID NO: 59674 - protein, 476 aa, Homo sapiens
LELEEVGIPLPTPGTGGAAPRGFQDLSSGSWTRSDRGRASGRREARRRPREAQLLGATGMARAMAAAWPLLLVALLVLSWPPPGTGDVVVQAPTQVPGFLGDSVTLPCYLQVPNMEVTHVSQLTWARHGESGSMAVFHQTQGPSYSESKRLEFVAARLGAELRNASLRMFGLRVEDEGNYTCLFVTFPQGSRSVDIWLRVLAKPQNTAEVQKVQLTGEPVPMARCVSTGGRPPAQITWHSDLGGMPNTSQVPGFLSGTVTVTSLWILVPSSQVDGKNVTCKVEHESFEKPQLLTVNLTVYYPPEVSISGYDNNWYLGQNEATLTCDARSNPEPTGYNWSTTMGPLPPFAVAQGAQLLIRPVDKPINTTLICNVTNALGARQAELTVQVKEGPPSEHSGMSRNAIIFLVLGILVFLILLGIGIYFYWSKCSREVLWHCHLCPSSTEHASASANGHVSYSAVSRENSSSQDPQTEGTR

SEQ ID NO: 59675 - protein, 44 aa, Homo sapiens
LIIKALKEPPRDRKKQKNIKRSRNITFHEVVDIARQMRHQSLAR

SEQ ID NO: 59676 - protein, 605 aa, Homo sapiens
IIWAISSWFRRGPAPQDQAGPGGAPRVASRNLFPKDTLMNLHVYISEHEHFTDFNATSALFWEQHDLVYGDWTSGENSDGCYEHFAELDIPQSVQQNGSIYIHVYFTKSGFHPDPRQKALYRRLATVHMSRMINKYKRRRFQKTKNLLTGETEADPEMIKRAEDYGPVEVISHWHPNITINIVDDHTPWVKGSVPPPLDQYVKFDAVSGDYYPIIYFNDYWNLQKDYYPINESLASLPLRVSFCPLSLWRWQLYAAQSTKSPWNFLGDELYEQSDEEQDSVKVALLETNPYLLALTIIVSIVHSVFEFLAFKNDIQFWNSRQSLEGLSVRSVFFGVFQSFVVLLYILDNETNFVVQVSVFIGVLIDLWKITKVMDVRLDREHRVAGIFPRLSFKDKSTYIESSTKVYDDMAFRYLSWILFPLLGCYAVYSLLYLEHKGWYSWVLSMLYGFLLTFGFITMTPQLFINYKLKSVAHLPWRMLTYKALNTFIDDLFAFVIKMPVMYRIGCLRDDVVFFIYLYQRWIYRVDPTRVNEFGMSGEDPTAAAPVAEVPTAAGALTPTPAPTTTTATREEASTSLPTKPTQGASSASEPQEAPPKPAEDKKKD

SEQ ID NO: 59677 - protein, 25 aa, Homo sapiens
LSRNKCQTESCWLMVFFLVLMLAGA

SEQ ID NO: 59678 - protein, 42 aa, Homo sapiens
ILRDRFKSFQRRNMIEPRERAKFKRKYKVKLVEKRAFREIQL

SEQ ID NO: 59679 - protein, 290 aa, Homo sapiens
LAGVKGLTMLDHEQVTPEDPGAQFLIRTGSVGRNRAEASLERAQNLNPMVDVKVDTEDIEKKPESFFTQFDAVCLTCCSRDVIVKVDQICHKNSIKFFTGDVFGYHGYTFANLGEHEFVEEKTKVAKVSQGVEDGPDTKRAKLDSSETTMVKKKVVFCPVKEALEVDWSSEKAKAALKRTTSDYFLLQVLLKFRTDKGRDPSSDTYEEDSELLLQIRNDVLDSLGISPDLLPEDFVRYCFSEMAPVCAVVGGILAQEIVKALSQRDPPHNNFFFFDGMKGNGIVECLGPK

SEQ ID NO: 59680 - protein, 334 aa, Homo sapiens
IWNFGCQESSLMQAAWLLGALVVPQLLGFGHGARGAEREWEGGWGGAQEEEREREALMLKHLQEALGLPAGRGDENPAGTVEGKEDWEMEEDQGEEEEEEATPTPSSGPSPSPTPEDIVTYILGRLAGLDAGLHQLHVRLHALDTRVVELTQGLRQLRNAAGDTRDAVQALQEAQGRAEREHGRLEGCLKGLRLGHKCFLLSRDFEAQAAAQARCTARGGSLAQPADRQQMEALTRYLRAALAPYNWPVWLGVHDRRAEGLYLFENGQRVSFFAWHRSPRPELGAQPSASPHPLSPDQPNGGTLENCVAQASDDGSWWDHDCQRRLYYVCEFPF

SEQ ID NO: 59681 - protein, 556 aa, Homo sapiens
TSLREPRERCAATMFSWLKRGGARGQQPEAIRTVTSALKELYRTKLLPLEEHYRFGAFHSPALEDADFDGKPMVLVAGQYSTGKTSFIQYLLEQEVPGSRVGPEPTTDCFVAVMHGDTEGTVPGNALVVDPDKPFRKLNPFGNTFLNRFMCAQLPNQVLESISIIDTPGILSGAKQRVSRGYDFPAVLRWFAERVDLIILLFDAHKLEISDEFSEAIGALRGHEDKIRVVLNKADMVETQQLMRVYGALMWALGKVVGTPEVLRVYIGSFWSQPLLVPDNRRLFELEEQDLFRDIQGLPRHAALRKLNDLVKRARLVRVHAYIISYLKKEMPSVFGKENKKKQLILKLPVIFAKIQLEHHISPGDFPDCQKMQELLMAHDFTKFHSLKPKLLEALDEMLTHDIAKLMPLLRQEELESTEVGVQGGAFEGTHMGPFVERGPDEAMEDGEEGSDDEAEWVVTKDKSKYDEIFYNLAPADGKLSGSKAKTWMVGTKLPNSVLGRIWKLSDVDRDGMLDDEEFALASHLIEAKLEGHGLPANLPRRLVPPSKRRHKGSAE

SEQ ID NO: 59682 - protein, 193 aa, Homo sapiens
VMDGSGEQPRGGGPTSSEQIMKTGALLLQGFIQDRAGRMGGEAPELALDPVPQDASTKKLSECLKRIGDELDSNMELQRMIAAVDTDSPREVFFRVAADMFSDGNFNWGRVVALFYFASKLVLKALCTKVPELIRTIMGWTLDFLRERLLGWIQDQGGWDGLLSYFGTPTWQTVTIFVAGVLTASLTIWKKMG

SEQ ID NO: 59683 - protein, 228 aa, Homo sapiens
VFGRNRSGDSLPASDRPPISSPLATSGTIFSAISCFWDLPAPFLWLAPSCQPTMSSQIRQNYSTDVEAAVNSLVNLYLQASYTYLSLGFYFDRDDVALEGVSHFFRELAEEKREGYERLLKMQNQRGGRALFQDIKKPAEDEWGKTPDAMKAAMALEKKLNQALLDLHALGSARTDPHLCDFLETHFLDEEVKLIKKMGDHLTNLHRLGGPEAGLGEYLFERLTLKHD

SEQ ID NO: 59684 - protein, 10 aa, Homo sapiens
VAKLLLRVFE

SEQ ID NO: 59685 - protein, 986 aa, Homo sapiens
LPGVLSARSPLASPRCSVPCPARPGADTTAIMPAVSKGDGMRGLAVFISDIRNCKSKEAEIKRINKELANIRSKFKGDKALDGYSKKKYVCKLLFIFLLGHDIDFGHMEAVNLLSSNKYTEKQIGYLFISVLVNSNSELIRLINNAIKNDLASRNPTFMCLALHCIANVGSREMGEAFAADIPRILVAGDSMDSVKQSAALCLLRLYKASPDLVPMGEWTARVVHLLNDQHMGVVTAAVSLITCLCKKNPDDFKTCVSLAVSRLSRIVSSASTDLQDYTYYFVPAPWLSVKLLRLLQCYPPPEDAAVKGRLVECLETVLNKAQEPPKSKKVQHSNAKNAILFETISLIIHYDSEPNLLVRACNQLGQFLQHRETNLRYLALESMCTLASSEFSHEAVKTHIDTVINALKTERDVSVRQRAADLLYAMCDRSNAKQIVSEMLRYLETADYAIREEIVLKVAILAEKYAVDYSWYVDTILNLIRIAGDYVSEEVWYRVLQIVTNRDDVQGYAAKTVFEALQAPACHENMVKVGGYILGEFGNLIAGDPRSSPPVQFSLLHSKFHLCSVATRALLLSTYIKFINLFPETKATIQGVLRAGSQLRNADVELQQRAVEYLTLSSVASTDVLATVLEEMPPFPERESSILAKLKRKKGPGAGSALDDGRRDPSSNDINGGMEPTPSTVSTPSPSADLLGLRAAPPPAAPPASAGAGNLLVDVFDGPAAQPSLGPTPEEAFLSPGPEDIGPPIPEADELLNKFVCKNNGVLFENQLLQIGVKSEFRQNLGRMYLFYGNKTSVQFQNFSPTVVHPGDLQTQLAVQTKRVAAQVDGGAQVQQVLNIECLRDFLTPPLLSVRFRYGGAPQALTLKLPVTINKFFQPTEMAAQDFFQRWKQLSLPQQEAQKIFKANHPMDAEVTKAKLLGFGSALLDNVDPNPENFVGAGIIQTKALQVGCLLRLEPNAQAQMYRLTLRTSKEPVSRHLCELLAQQF

SEQ ID NO: 59686 - protein, 351 aa, Homo sapiens
LGPIGPSSPGLTLGGLAVSEHRLSNKLLAWSGVLEWQEKRRPYSDSTAKLKRTLPCQAYVNQGENLETDQWPQKLIMQLIPQQLLTTLGPLFRNSQLAQFHFTNRDCDSLKGLCRIMGNGFAGCMLFPHISPCEVRVLMLLYSSKKKIFMGLIPYDQSGFVSAIRQVITTRKQAVGPGGVNSGPVQIVNNKFLAWSGVMEWQEPRPEPNSRSKRWLPSHVYVNQGEILRTEQWPRKLYMQLIPQQLLTTLVPLFRNSRLVQFHFTKDLETLKSLCRIMDNGFAGCVHFSYKASCEIRVLMLLYSSEKKIFIGLIPHDQGNFVNGIRRVIANQQQVLQRNLEQEQQQRGMGG

SEQ ID NO: 59687 - protein, 195 aa, Homo sapiens
ITEGQAAKKQKLEQASGASSSQEAGSSQAAKEDETSDGQASGEQEEAGPSSSQAGPSNGVAPLPRSALLVQLATARPRPVKARPLDWRVQSKDWPHAGRPAHELRYSIYRDLWERGFFLSAAGKFGGDFLVYPGDPLRFHAHYIAQCWAPEDTIPLQDLVAAGRLGTSVRKTLLLCSPQPDGKVVYTSLQWASLQ

SEQ ID NO: 59688 - protein, 124 aa, Homo sapiens
LATARPRPVKARPLDWRVQSKDWPHAGRPAHELRYSIYRDLWERGFFLSAAGKFGGDFLVYPGDPLRFHAHYIAQCWAPEDTIPLQDLVAAGRLGTSVRKTLLLCSPQPDGKVVYTSLQWASLQ

SEQ ID NO: 59689 - protein, 33 aa, Homo sapiens
LNVTTEANILPEETSSSASDQPYQRETPQVSSL

SEQ ID NO: 59690 - protein, 550 aa, Homo sapiens
VTFEDVAVTFTQEEWGQLDVTQRALYVEVMLETCGLLVALGDSTKPETVEPIPSHLALPEEVSLQEQLAQGVPRYSYLGQAMDQDGPSEMQEYFLRPGTDPQSEKLHGKMSLEHEGLATADGICSMMIQNQVSPEDALYGFDSYGPVTDSLIHEGENSYKFEEMFNENCFLVQHEQILPRVKPYDCPECGKAFGKSKHLLQHHIIHTGEKPYKCLECGKDFNRRSHLTRHQRTHNGDKPFVCSECGRTFNRGSHLTRHQRVHSGEKPFVCNECGKAFTYRSNFVLHNKSHNEKKPFACSECGKGFYESTALIQHFIIHTGERPFKCLECGKAFNCRSHLKQHERIHTGEKPFVCSQCGKAFTHYSTYVLHERAHTGEKPFECKECGKAFSIRKDLIRHFNIHTGEKPYECLQCGKAFTRMSGLTRHQWIHTGEKPYVCIQCGKAFCRTTNLIRHFSIHTGEKPYECVECGKAFNRRSPLTRHQRIHTAEKSHEPIQSGNVSCESTDLIQHSIIHTESSPVSAVNMETPSIAAHSSSLDINGFIVEETLPL

SEQ ID NO: 59691 - protein, 11 aa, Homo sapiens
LLLPITYRFKR

SEQ ID NO: 59692 - protein, 35 aa, Homo sapiens
LERQGQAKTPDSMFLAMLAVVSCASIGSGEPPTGN

SEQ ID NO: 59693 - protein, 774 aa, Homo sapiens
LEHCGVCRERLRPEREPRLLPCLHSACSACLGPAAPAAANSSGDGGAAGDGTVVDCPVCKQQCFSKDIVENYFMRDSGSKAATDAQDANQCCTSCEDNAPATSYCVECSEPLCETCVEAHQRVKYTKDHTVRSTGPAKSRDGERTVYCNVHKHEPLVLFCESCDTLTCRDCQLNAHKDHQYQFLEDAVRNQRKLLASLVKRLGDKHATLQKSTKEVRSSIRQVSDVQKRVQVDVKMAILQIMKELNKRGRVLVNDAQKVTEGQQERLERQHWTMTKIQKHQEHILRFASWALESDNNTALLLSKKLIYFQLHRALKMIVDPVEPHGEMKFQWDLNAWTKSAEAFGKIVAERPGTNSTGPAPMAPPRAPGPLSKQGSGSSQPMEVQEGYGFGSGDDPYSSAEPHVSGVKRSRSGEGEVSGLMRKVPRVSLERLDLDLTADSQPPVFKVFPGSTTEDYNLIVIERGAAAAATGQPGTAPAGTPGAPPLAGMAIVKEEETEAAIGAPPTATEGPETKPVLMALAEGPGAEGPRLASPSGSTSSGLEVVAPEGTSAPGGGPGTLDDSATICRVCQKPGDLVMCNQCEFCFHLDCHLPALQDVPGEEWSCSLCHVLPDLKEEDGSLSLDGADSTGVVAKLSPANQRKCERVLLALFCHEPCRPLHQLATDSTFSLDQPGGTLDLTLIRARLQEKLSPPYSSPQEFAQDVGRMFKQFNKLTEDKADVQSIIGLQRFFETRMNEAFGDTKFSAVLVEPPPMSLPGAGLSSQELSGGPGDGP

SEQ ID NO: 59694 - protein, 24 aa, Homo sapiens
VWATDWRLILDWVPYINGKFKKDN

SEQ ID NO: 59695 - protein, 10 aa, Homo sapiens
RKMAAPDPRR

SEQ ID NO: 59696 - protein, 12 aa, Homo sapiens
TCDLEDWSEPLL

SEQ ID NO: 59697 - protein, 115 aa, Homo sapiens
RLHFSCSSYLITTPCYSDAFAKLLESGDLSMSSIKVDGIRMSFQNLLAKICFHHHFSVVERVDSCASMYSRSIQGHHVCLLVKKGENSVSVDGKCSDSTLLSNLLEEMKATLAKC

SEQ ID NO: 59698 - protein, 34 aa, Homo sapiens
IFYRNEIRKVTGKDPLEQFGISEEARFQLSGLQA

SEQ ID NO: 59699 - protein, 36 aa, Homo sapiens
LEILAKELEEKSDRLLKVLFLVLGYTVLAGMVFLKW

SEQ ID NO: 59700 - protein, 63 aa, Homo sapiens
ISGGNNPLGTPGTSPSQNDLASLIQAGQQFAQQMQQQNPELIEQLRSQIRSRTPSASNDDQQE

SEQ ID NO: 59701 - protein, 165 aa, Homo sapiens
IASRGCPCASRAGGVRGAGSRLRAMAPKVFRQYWDIPDGTDCHRKAYSTTSIASVAGLTAAAYRVTLNPPGTFLEGVAKVGQYTFTAAAVGAVFGLTTCISAHVREKPDDPLNYFLGGCAGGLTLGARTHNYGIGAAACVYFGIAASLVKMGRLEGWEVFAKPKV

SEQ ID NO: 59702 - protein, 47 aa, Homo sapiens
KDLLKKFQTKKTGLSSEQTVNVLAQILKRLNPERKMINDKMHFSLKE

SEQ ID NO: 59703 - protein, 456 aa, Homo sapiens
LVLKSRQLFLGRPVDRASAAETMSADGAEADGSTQVTVEEPVQQPSVVDRVASMPLISSTCDMVSAAYASTKESYPHIKTVCDAAEKGVRTLTAAAVSGAQPILSKLEPQIASASEYAHRGLDKLEENLPILQQPTEKVLADTKELVSSKVSGAQEMVSSAKDTVATQLSEAVDATRGAVQSGVDKTKSVVTGGVQSVMGSRLGQMVLSGVDTVLGKSEEWADNHLPLTDAELARIATSLDGFDVASVQQQRQEQSYFVRLGSLSERLRQHAYEHSLGKLRATKQRAQEALLQLSQVLSLMETVKQGVDQKLVEGQEKLHQMWLSWNQKQLQGPEKEPPKPEQVESRALTMFRDIAQQLQATCTSLGSSIQGLPTNVKDQVQQARRQVEDLQATFSSIHSFQDLSSSILAQSRERVASAREALDHMVEYVAQNTPVTWLVGPFAPGITEKAPEEKK

SEQ ID NO: 59704 - protein, 60 aa, Homo sapiens
VLQKSEPTFAASPFSDPFQLDNPDPQPIVDGEEGLIWVIGPVLAVVFIICIVIAILLYKK

SEQ ID NO: 59705 - protein, 48 aa, Homo sapiens
LPAENKKDFYDLAAFITEGLEVHFVEHYREIFDIAFPDEQAEALAVER

SEQ ID NO: 59706 - protein, 207 aa, Homo sapiens
RDLDCSDGSDEEECRIEPCTQKGQCPPPPGLPCPCTGVSDCSGGTDKKLRNCSRLACLAGELRCTLSDDCIPLTWRCDGHPDCPDSSDELGCGTNEILPEGDATTMGPPVTLESVTSLRNATTMGPPVTLESVPSVGNATSSSAGDQSGSPTAYGVIAAAAVLSASLVTATLLLLSWLRAQERLRPLGLLVAMKESLLLSEQKTSLP

SEQ ID NO: 59707 - protein, 9 aa, Homo sapiens
MGEEPSRAE

SEQ ID NO: 59708 - protein, 11 aa, Homo sapiens
LFHVISTSGDP

SEQ ID NO: 59709 - protein, 18 aa, Homo sapiens
LPKITRNFYVDGHVPKPH

SEQ ID NO: 59710 - protein, 27 aa, Homo sapiens
VAVLLLVAVLQVCTLKRFFQDKRPVPT

SEQ ID NO: 59711 - protein, 163 aa, Homo sapiens
MWVTFVSGFLLFRSLPRHTFGLVQSKLFPFYFHISMGCAFINLCILASQHAWAQLTFWEASQLYLLFLSLTLATVNARWLEPRTTAAMWALQTVEKERGLGGEVPGSHQGPDPYRQLREKDPKYSALRQNFFRYHGLSSLCNLGCVLSNGLCLAGLALEIRSL

SEQ ID NO: 59712 - protein, 119 aa, Homo sapiens
ILASQHAWAQLTFWEASQLYLLFLSLTLATVNARWLEPRTTAAMWALQTVEKERGLGGEVPGSHQGPDPYRQLREKDPKYSALRQNFFRYHGLSSLCNLGCVLSNGLCLAGLALEIRSL

SEQ ID NO: 59713 - protein, 92 aa, Homo sapiens
LEKAHPPADMGRRKSKRKPPPKKKMTGTLETQFTCPFCNHEKSCDVKMDRARNTGVISCTVCLEEFQTPITYLSEPVDVYSDWIDACEAANQ

SEQ ID NO: 59714 - protein, 11 aa, Homo sapiens
ITQPSNTCENE

SEQ ID NO: 59715 - protein, 142 aa, Homo sapiens
TSPESGDEEVSGAGSSPVSGGVNLFANDGSFLELFKRKMEEEQRQRQEEPPPGPQRPDQSAAAAGPGDPKRKGGPGSTLSFVGKRRGGNKLALKTGIVAKKQKTEDEVLTSKGDAWAKYMAEVKKYKAHQCGDDDKTRPLVK

SEQ ID NO: 59716 - protein, 161 aa, Homo sapiens
VVLFFYPLDFTFVCPTEIIAFSNRAEDFRKLGCEVLGVSVDSQFTHLAWINTPRKEGGLGPLNIPLLADVTRRLSEDYGVLKTDEGIAYRGLFIIDGKGVLRQITVNDLPVGRSVDEALRLVQAFQYTDEHGEVCPAGWKPGSDTIKPNVDDSKEYFSKHN

SEQ ID NO: 59717 - protein, 326 aa, Homo sapiens
LPALRGSGEAAQRGLQYKYLDESSGGWRDGRALINSPEGAVGRSLQPLYRSNTSQLAFLLYNDQPPQPSKAQDSSMRGHTKGVLLLDHDGGFWLVHSVPNFPPPASSAAYSWPHSACTYGQTLLCVSFPFAQFSKMGKQLTYTYPWVYNYQLEGIFAQEFPDLENVVKGHHVSQEPWNSSITLTSQAGAVFQSFAKFSKFGDDLYSGWLAAALGTNLQVQFWHKTVGILPSNCSDIWQVLNVNQIAFPGPAGPSFNSTEDHSKWCVSPKGPWTCVGDMNRNQGEEQRGGGTLCAQLPALWKAFQPLVKNYQPCNGMARKPSRAYKI

SEQ ID NO: 59718 - protein, 95 aa, Homo sapiens [sequence omitted]

SEQ ID NO: 59719 - protein, 42 aa, Homo sapiens
MDMGTIKKRLENNYYWNAQECIQDFNTMFTNCYIYNKFRPQM

SEQ ID NO: 59720 - protein, 18 aa, Homo sapiens
IDMNFQSDLLSIFEENLF

SEQ ID NO: 59721 - protein, 281 aa, Homo sapiens
IWKVPVSYAHTVKATMPIWVVLLSRIIMKEKQSTKVYLSLIPIISGVLLATVTELSFDMWGLVSALAATLCFSLQNIFSKKVLRDSRIHHLRLLNILGCHAVFFMIPTWVLVDLSAFLVSSDLTYVYQWPWTLLLLAVSGFCNFAQNVIAFSILNLVSPLSYSVANATKRIMVITVSLIMLRNPVTSTNVLGMMTAILGVFLYNKTKYDANQQARKHLLPVTTADLSSKERHRSPLEKPHNGLLFPQHGDYQYGRNNILTDHFQYSRQSYPNSYSLNRYDV

SEQ ID NO: 59722 - protein, 22 aa, Homo sapiens
TGGRATCGQTFPPASRARMAAR

SEQ ID NO: 59723 - protein, 16 aa, Homo sapiens
MLLSGSTFNWPYGSGQ

SEQ ID NO: 59724 - protein, 204 aa, Homo sapiens
LEDLHKQNQLGAGAAAAAAAAAAGGPSGTATGSAPPGELAPAAAAPEAPVYANLSSYAGGAGGAGGAATVAFAAEPVPFPPPPPPGALGPPRLAALKDEPQTVPDVPSFGESPPLSPIDMDTQERIKAERKRLRNRIAASKCRKRKLERISRLEEKVKTLKSQNTELASTASLLREQVAQLKQKVLSHVNSGCQLLPQHQVPAY

SEQ ID NO: 59725 - protein, 9 aa, Homo sapiens
ISTYIEQSR

SEQ ID NO: 59726 - protein, 362 aa, Homo sapiens
KKQFYKASQLVSEKVGGAEGTKLDDDFKEMEKKVDVTSKAVTEVLARTIEYLQPNPASRAKLTMLNTVSKIRGQVKNPGYPQSEGLLGECMIRHGKELGGESNFGDALLDAGESMKRLAEVKDSLDIEVKQNFIDPLQNLCEKDLKEIQHHLKKLEGRRLDFDYKKKRQGKIPDEELRQALEKFEESKEVAETSMHNLLETDIEQVSQLSALVDAQLDYHRQAVQILDELAEKLKRRMREASSRPKREYKPKPREPFDLGEPEQSNGGFPCTTAPKIAASSSFRSSDKPIRTPSRSMPPLDQPSCKALYDFEPENDGELGFHEGDVITLTNQIDENWYEGMLDGQSGFFPLSYVEVLVPLPQ

SEQ ID NO: 59727 - protein, 17 aa, Homo sapiens
ILLRHFKETNLIDFQVI

SEQ ID NO: 59728 - protein, 59 aa, Homo sapiens
KRLRVDKWSGNRKELATVRTICSHVQNMIKGVTLGFHYKMRSVYAHFPHQRRYPEWVSC

SEQ ID NO: 59729 - protein, 275 aa, Homo sapiens [sequence omitted]

SEQ ID NO: 59730 - protein, 216 aa, Homo sapiens [sequence omitted]

SEQ ID NO: 59731 - protein, 32 aa, Homo sapiens
LRSCGSAGRRARARSTQPSSSRSAACHPAGVG

SEQ ID NO: 59732 - protein, 334 aa, Homo sapiens
KQILDGVHYLHSKRIAHFDLKPENIMLLDKNVPNPRIKLIDFGIAHKIEAGNEFKNIFGTPEFVAPEIVNYEPLGLEADMWSIGVITYILLSGASPFLGETKQETLTNISAVNYDFDEEYFSNTSELAKDFIRRLLVKDPKRRMTIAQSLEHSWIKAIRRRNVRGEDSGRKPERRRLKTTRLKEYTIKSHSSLPPNNSYADFERFSKVLEEAAAAEEGLRELQRSRRLCHEDVEALAAIYEEKEAWYREESDSLGQDLRRLRQELLKTEALKRQAQEEAKGALLGTSGLKRRFSRLENRYEALAKQVASEMRFVQDLVRALEQEKLQGVECGLR

SEQ ID NO: 59733 - protein, 347 aa, Homo sapiens
LEAFLTQKAKVGELKDDDFERISELGAGNGGVVTKVQHRPSGLIMARKLIHLEIKPAIRNQIIRELQVLHECNSPYIVGFYGAFYSDGEISICMEHMDGGSLDQVLKEAKRIPEEILGKVSIAVLRGLAYLREKHQIMHRDVKPSNILVNSRGEIKLCDFGVSGQLIDSMANSFVGTRSYMAPERLQGTHYSVQSDIWSMGLSLVELAVGRYPIPPPDAKELEAIFGRPVVDGEEGEPHSISPRPRPPGRPVSGHGMDSRPAMAIFELLDYIVNEPPPKLPNGVFTPDFQEFVNKCLIKNPAERADLKMLTNHTFIKRSEVEEVDFAGWLCKTLRLNQPGTPTRTAV

SEQ ID NO: 59734 - protein, 9 aa, Homo sapiens
KDYPFHEEF

SEQ ID NO: 59735 - protein, 163 aa, Homo sapiens
RSRMEIPVPVQPSWLRRASAPLPGLSAPGRLFDQRFGEGLLEAELAALCPTTLAPYYLRAPSVALPVAQVPTDPGHFSVLLDVKHFSPEEIAVKVVGEHVEVHARHEERPDEHGFVAREFHRRYRLPPGVDPAAVTSALSPEGVLSIQAAPASAQAPPPAAAK

SEQ ID NO: 59736 - protein, 7 aa, Homo sapiens
MEIILGS

SEQ ID NO: 59737 - protein, 622 aa, Homo sapiens
LRPQSLRRAAAAPATAGRRGRRSGRRDELVGRRGKKLLRLFRCRWEPEARGPLGATLPREEAGLGDPRPPPFAAGDACSLPAPYTASLRRPHSGPALGSRRPGLPQRLFPRPRAHPLHAAFIPGLSPEPPRILDPFSSRRRISLRPATDPLFKTTHLLVPDRAHLGYFRGILRHPRSKPPLHHCALLPEDLSFPSRPSYLLPGDPQPLQGRGLPTTPALFALSAVPGGAASPMPPSGLRLLPLLLPLLWLLVLTPGRPAAGLSTCKTIDMELVKRKRIEAIRGQILSKLRLASPPSQGEVPPGPLPEAVLALYNSTRDRVAGESAEPEPEPEADYYAKEVTRVLMVETHNEIYDKFKQSTHSIYMFFNTSELREAVPEPVLLSRAELRLLRLKLKVEQHVELYQKYSNNSWRYLSNRLLAPSDSPEWLSFDVTGVVRQWLSRGGEIEGFRLSAHCSCDSRDNTLQVDINGFTTGRRGDLATIHGMNRPFLLLMATPLERAQHLQSSRHRRALDTNYCFSSTEKNCCVRQLYIDFRKDLGWKWIHEPKGYHANFCLGPCPYIWSLDTQYSKVLALYNQHNPGASAAPCCVPQALEPLPIVYYVGRKPKVEQLSNMIVRSCKCS

SEQ ID NO: 59738 - protein, 227 aa, Homo sapiens
MFEPVSCTFTYLLGDRESREAVLIDPVLETAPRDAQLIKELGLRLLYAVNTHCHADHITGSGLLRSLLPGCQSVISRLSGAQADLHIEDGDSIRFGRFALETRASPGHTPGCVTFVLNDHSMAFTGDALLIRGCGRTDFQQGCAKTLYHSVHEKIFTLPGDCLIYPAHDYHGFTVSTVEEERTLNPRLTLSCEEFVKIMGNLNLPKPQQIDFAVPANMRCGVQTPTA

SEQ ID NO: 59739 - protein, 274 aa, Homo sapiens
IPLDEDEVPPGVAKPLFRSTQSLPTVDTSAQAAPQTYAEYAISQPLEGAGATCPTGSEPLAGETPNQALKPGAKSNSIIVSPRQRGNPVLKFVRNVPWEFGDVIPDYVLGQSTCALFLSLRYHNLHPDYIHGRLQSLGKNFALRVLLVQVDVKDPQQALKELAKMCILADCTLILAWSPEEAGRYLETYKAYEQKPADLLMEKLEQDFVSRVTECLTTVKSVNKTDSQTLLTTFGSLEQLIAASREDLALCPGLGPQKARRLFDVLHEPFLKVP

SEQ ID NO: 59740 - protein, 119 aa, Homo sapiens
IMSLLNKPKSEMTPEELQKREEEEFNTGPLSVLTQSVKNNTQVLINCRNNKKLLGRVKAFDRHCNMVLENVKEMWTEVPKSGKGKKKSKPVNKDRYISKMFLRGDSVIVVLRNPLIAGK

SEQ ID NO: 59741 - protein, 43 aa, Homo sapiens
ILYKDRNLHIPTMENGPELILRFQKELKEIQYGIRAHEWMFPV

SEQ ID NO: 59742 - protein, 4 aa, Homo sapiens
IRLS

SEQ ID NO: 59743 - protein, 4 aa, Homo sapiens
LRTD

SEQ ID NO: 59744 - protein, 86 aa, Homo sapiens
LETLRLKLPAVVTADLRLNEPRYATLPNIMKAKKKKIEVIKPGDLGVDLTSKLSVISVEDPPQRTAGVKVETTEDLVAKLKEIGRI

SEQ ID NO: 59745 - protein, 360 aa, Homo sapiens
MYTAFKALGDSVDYVQVCDSDTRLDPMALLELVRVLDEDPRVGAVGGDVRILNPLDSWVSFLSSLRYWVAFNVERACQSYFHCVSCISGPLGLYRNNLLQQFLEAWYNQKFLGTHCTFGDDRHLTNRMLSMGYATKYTSRSRCYSETPSSFLRWLSQQTRWSKSYFREWLYNALWWHRHHAWMTYEAVVSGLFPFFVAATVLRLFYAGRPWALLWVLLCVQGVALAKAAFAAWLRGCLRMVLLSLYAPLYMCGLLPAKFLALVTMNQSGWGTSGRRKLAANYVPLLPLALWALLLLGGLVRSVAHEARADWSGPSRAAEAYHLAAGAGAYVGYWVAMLTLYWVGVRRLCRRRTGGYRVQV

SEQ ID NO: 59746 - protein, 43 aa, Homo sapiens
IDCYSTDFCVRVRDGMRYWNMTVQWWLAQYIYKSAPARSYVLR

SEQ ID NO: 59747 - protein, 171 aa, Homo sapiens
IDCYSTDFCVRVRDGMRYWNMTVQWWLAQYIYKSAPARSYVLRSAWTMLLSAYWHGLHPGYYLSFLTIPLCLAAEGRLESALRGRLSPGGQKAWDWVHWFLKMRAYDYMCMGFVLLSLADTLRYWASIYFCIHFLALAALGLGLALGGGSPSRRKAASQPTSLAPEKLREE

SEQ ID NO: 59748 - protein, 24 aa, Homo sapiens
LLPRKTILQYPPAVTAAAVSSSHP

SEQ ID NO: 59749 - protein, 122 aa, Homo sapiens
LVICPDEGFYKSGKFVFSFKVGQGYPHDPPKVKCETMVYHPNIDLEGNVCLNILREDWKPVLTINSIIYGLQYLFLEPNPEDPLNKEAAEVLQNNRRLFEQNVQRSMRGGYIGSTYFERCLK

SEQ ID NO: 59750 - protein, 42 aa, Homo sapiens
TCVQEITAHRKKHEEAIHAVACHPSKALIASAGADALAKVFV

SEQ ID NO: 59751 - protein, 35 aa, Homo sapiens
LAHGAEQRSLSAQPGEFKHSSFQEPRNFSAVNSQL

SEQ ID NO: 59752 - protein, 110 aa, Homo sapiens
VALFTMLAGHYPFQDSEPVLLFGKIRRGAYALPAGLSAPARCLVRCLLRREPAERLTATGILLHPWLRQDPMPLAPTRSHLWEAAQVVPDGLGLDEAREEEGDREVVLYG

SEQ ID NO: 59753 - protein, 5 aa, Homo sapiens
MRPAG

SEQ ID NO: 59754 - protein, 570 aa, Homo sapiens
ISLLQPQVEESVLNLGKFHSIVRLVAFCPFASSQVALENANAVSEGVVHEDLRLLLETHLPSKKKKVLLGVGDPKIGAAIQEELGYNCQTGGVIAEILRGVRLHFHNLVKGLTDLSACKAQLGLGHSYSRAKVKFNVNRVDNMIIQSISLLDQLDKDINTFSMRVREWYGYHFPELVKIINDNATYCRLAQFIGNRRELNEDKLEKLEELTMDGAKAKAILDASRSSMGMDISAIDLINIESFSSRVVSLSEYRQSLHTYLRSKMSQVAPSLSALIGEAVGARLIAHAGSLTNLAKYPASTVQILGAEKALFRALKTRGNTPKYGLIFHSTFIGRAAAKNKGRISRYLANKCSIASRIDCFSEVPTSVFGEKLREQVEERLSFYETGEIPRKNLDVMKEAMVQAEEAAAEITRKLEKQEKKRLKKEKKRLAALALASSENSSSTPEECEEMSEKPKKKKKQKPQEVPQENGMEDPSISFSKPKKKKSFSKEELMSSDLEETAGSTSIPKRKKSTPKEETVNDPEEAGHRSGSKKKRKFSKEEPVSSGPEEAVGKSSSKKKKKFHKASQED

SEQ ID NO: 59755 - protein, 32 aa, Homo sapiens
RPHMVQTLEQYEFCYKVVQEYIDAFSDYANFK

SEQ ID NO: 59756 - protein, 159 aa, Homo sapiens
VAQKIDLPEYQGEPDEISIQKCQEAVRQVQGPVLVEDTCLCFNALGGLPGPYIKWFLEKLKPEGLHQLLAGFEDKSAYALCTFALSTGDPSQPVRLFRGRTSGRIVAPRGCQDFGWDPCFQPDGYEQTYAEMPKAEKNAVSHRFRALLELQEYFGSLAA

SEQ ID NO: 59757 - protein, 32 aa, Homo sapiens
LYNNHEIRSGKHIGVCISVANNRLFVGSIPKS

SEQ ID NO: 59758 - protein, 11 aa, Homo sapiens
LEKEFSAAWPR

SEQ ID NO: 59759 - protein, 127 aa, Homo sapiens
VMCVQIKCFHEIITIGYNVYHSYDLPWFRTLSWYFLLCVNYFFYGETVTDYFFTLVQREEPLRILSKYHRFISFTLYLIGFCMFVLSLVKKHYRLQFYMFGWTHVTLLIVVTQSHLVIHNLFEGMIW

SEQ ID NO: 59760 - protein, 300 aa, Homo sapiens
TDYFFTLVQREEPLRILSKYHRFISFTLYLIGFCMFVLSLVKKHYRLQFYMFGWTHVTLLIVVTQSHLVIHNLFEGMIWFIVPISCVICNDIMAYMFGFFFGRTPLIKLSPKKTWEGFIGGFFATVVFGLLLSYVMSGYRCFVCPVEYNNDTNSFTVDCEPSDLFRLQEYNIPGVIQSVIGWKTVRMYPFQIHSIALSTFASLIGPFGGFFASGFKRAFKIKDFANTIPGHGGIMDRFDCQYLMATFVNVYIASFIRGPNPSKLIQQFLTLRPDQQLHIFNTLRSHLIDKGMLTSTTEDE

SEQ ID NO: 59761 - protein, 12 aa, Homo sapiens
KNQNIQKPEYSE

SEQ ID NO: 59762 - protein, 147 aa, Homo sapiens
IQPILYSYSFHGPPEPVLLDSSSILADRILLMDTFFQIVIYLGETIAQWRKAGYQDMPEYENFKHLLQAPLDDAQEILQARFPMPRYINTEHGGSQARFLLSKVNPSQTHNNLYAWGQETGAPILTDDVSLQVFMDHLKKLAVSSAC

SEQ ID NO: 59763 - protein, 57 aa, Homo sapiens
LSHIKKILFQIQKRSSTIGNHGLVALVQNHDWLLNSENQDLVQHLNLIVALIPILGL

SEQ ID NO: 59764 - protein, 179 aa, Homo sapiens
LGISLEDTQKELEHMVRKILNLRVFEDESGKHWSKSVMDKQYEILCVSQFTLQCVLKGNKPDFHLAMPTEQAEGFYNSFLEQLRKTYRPELIKDGKFGAYMQVHIQNDGPVTIELESPAPGTATSDPKQLSKLEKQQQRKEKTRAKGPSESSKERNTPRKEDRSASSGAEGDVSSEREP

SEQ ID NO: 59765 - protein, 39 aa, Homo sapiens
RAITGASLADIMAKRDQKPEVRKAQREQAIRAAKEAKKG

SEQ ID NO: 59766 - protein, 239 aa, Homo sapiens
RMLTTLLPILLLSGWAFCSQDASDGLQRLHMLQISYFRDPYHVWYQGNASLGGHLTHVLEGPDTNTTIIQLQPLQEPESWARTQSGLQSYLLQFHGLVRLVHQERTLAFPLTIRCFLGCELPPEGSRAHVFFEVAVNGSSFVSFRPERALWQADTQVTSGVVTFTLQQLNAYNRTRYELREFLEDTCVQYVQKHISAENTKGSQTSRSYTSLVLGVLVGSFIIAGVAVGIFLCTGGRRC

SEQ ID NO: 59767 - protein, 11 aa, Homo sapiens
MDRPPKLRDEF

SEQ ID NO: 59768 - protein, 309 aa, Homo sapiens
VGTMSLKLQASNVTNKNDPKSINSRVFIGNLNTALVKKSDVETIFSKYGRVAGCSVHKGYAFVQYSNERHARAAVLGENGRVLAGQTLDINMAGEPKPDRPKGLKRAASAIYSGYIFDYDYYRDDFYDRLFDYRGRLSPVPVPRAVPVKRPRVTVPLVRRVKTNVPVKLFARSTAVTTSSAKIKLKSSELQAIKTELTQIKSNIDALLSRLEQIAAEQKANPDGKKKGDGGGAGGGGGGGGSGGGGSGGGGGGGSSRPPAPQENTTSEAGLPQGEARTRDDGDEEGLLTHSEEELEHSQDTDADDGALQ

SEQ ID NO: 59769 - protein, 176 aa, Homo sapiens
IYGNQDLFATSQSKEFDPLGPLPPGWEKRTDSNGRVYFVNHNTRITQWEDPRSQGQLNEKPLPEGWEMRFTVDGIPYFVDHNRRTTTYIDPRTGKSALDNGPQIAYVRDFKAKVQYFRFWCQQLAMPQHIKITVTRKTLFEDSFQQIMSFSPQDLRRRLWVIFPGEEGLDYGGVAR

SEQ ID NO: 59770 - protein, 304 aa, Homo sapiens
LSHEVLNPMYCLFEYAGKDNYCLQINPASYINPDHLKYFRFIGRFIAMALFHGKFIDTGFSLPFYKRILNKPVGLKDLESIDPEFYNSLIWVKENNIEECDLEMYFSVDKEILGEIKSHDLKPNGGNILVTEENKEEYIRMVAEWRLSRGVEEQTQAFFEGFNEILPQQYLQYFDAKELEVLLCGMQEIDLNDWQRHAIYRHYARTSKQIMWFWQFVKEIDNEKRMRLLQFVTGTCRLPVGGFADLMGSNGPQKFCIEKVGKENWLPRSHTCFNRLDLPPYKSYEQLKEKLLFAIEETEGFGQE

SEQ ID NO: 59771 - protein, 208 aa, Homo sapiens
IEECDLEMYFSVDKEILGEIKSHDLKPNGGNILVTEENKEEYIRMVAEWRLSRGVEEQTQAFFEGFNEILPQQYLQYFDAKELEVLLCGMQEIDLNDWQRHAIYRHYARTSKQIMWFWQFVKEIDNEKRMRLLQFVTGTCRLPVGGFADLMGSNGPQKFCIEKVGKENWLPRSHTCFNRLDLPPYKSYEQLKEKLLFAIEETEGFGQE

SEQ ID NO: 59772 - protein, 20 aa, Homo sapiens
MMQSGGTFGTFMAIGMGIRC

SEQ ID NO: 59773 - protein, 86 aa, Homo sapiens
VIYWFRQIIAVVLGVIWGVLPLRGFLGIAGFCLINAGVLYLYFSNYLQIDEEEYGGTWELTKEGFMTSFALFMVIWIIFYTAIHYD

SEQ ID NO: 59774 - protein, 24 aa, Homo sapiens
MERFGSRNGKTSKKITIADCRQLQ

SEQ ID NO: 59775 - protein, 46 aa, Homo sapiens
ILNMRGSSIKIVRHIIKEYAENIGDGRSPEFRENEQKRILGLLENF

SEQ ID NO: 59776 - protein, 35 aa, Homo sapiens
LPVRAASGYRMDFGRGSHHWTSKEATCRHLQPSIS

SEQ ID NO: 59777 - protein, 19 aa, Homo sapiens
MGHTVTVWNRTAKKRDLFI

SEQ ID NO: 59778 - protein, 126 aa, Homo sapiens
IRSHVATCSKYQNYIMEGVKATIKDASLQPRNVPNRYTFPCPYCPEKNFDQEGLVEHCKLFHSTDTKSVVCPICASMPWGDPNYRSANFREHIQRRHRFSYDTFVDYDVDEEDMMNQVLQRSIIDQ

SEQ ID NO: 59779 - protein, 37 aa, Homo sapiens
VNLADFITKMPSLNFSWTNLQKRLLGRQHLTLKALRM

SEQ ID NO: 59780 - protein, 268 aa, Homo sapiens
VFTASCDKTAKMWDLSSNQAIQIAQHDAPVKTIHWIKAPNYSCVMTGSWDKTLKFWDTRSSNPMMVLQLPERCYCADVIYPMAVVATAERGLIVYQLENQPSEFRRIESPLKHQHRCVAIFKDKQNKPTGFALGSIEGRVAIHYINPPNPAKDNFTFKCHRSNGTNTSAPQDIYAVNGIAFHPVHGTLATVGSDGRFSFWDKDARTKLKTSEQLDQPISACCFNHNGNIFAYASSYDWSKGHEFYNPQKKNYIFLRNAAEELKPRNKK

SEQ ID NO: 59781 - protein, 136 aa, Homo sapiens
LGSIEGRVAIHYINPPNPAKDNFTFKCHRSNGTNTSAPQDIYAVNGIAFHPVHGTLATVGSDGRFSFWDKDARTKLKTSEQLDQPISACCFNHNGNIFAYASSYDWSKGHEFYNPQKKNYIFLRNAAEELKPRNKK

SEQ ID NO: 59782 - protein, 21 aa, Homo sapiens
VAASRPPTVRVGGTEKVMCAF

SEQ ID NO: 59783 - protein, 164 aa, Homo sapiens
LMPSPNLDVHGECALQITYEYICLWDVQNPRVKLISWPLSALRRYGRDTTWFTFEAGRMCETGEGLFIFQTRDGEAIYQKVHSAALAIAEQHERLLQSVKNSMLQMKMSERAASLSTMVPLPRSAYWQHITRQHSTGQLYRLQDVSSPLKLHRTETFPAYRSEH

SEQ ID NO: 59784 - protein, 42 aa, Homo sapiens
IGVTLRKPRGDAKKCRKVYGMERRDLWCTACRWKKACQRFLD

SEQ ID NO: 59785 - protein, 113 aa, Homo sapiens
IIVYDITKEETFSTLKNWVKELRQHGPPNIVVAIAGNKCDLIDVREVMERDAKDYADSIHAIFVETSAKNAININELFIEISRRIPSTDANLPSGGKGFKLRRQPSEPKRSCC

SEQ ID NO: 59786 - protein, 37 aa, Homo sapiens
IAWVGKGIVYDTGGLSIKGKRARKRIQWLPDLFGTVA

SEQ ID NO: 59787 - protein, 87 aa, Homo sapiens
LSRGYVLPVVSYIRKCLEKLDTDISLIRYFVTEVLDVIAPPYTSDFVQLFLPILENDSIAGTIKTEGEHDPVTEFIAHCKSNFIMVN

SEQ ID NO: 59788 - protein, 187 aa, Homo sapiens
KNSKQAEREEKRVLGLVLLRGENLVSMTVEGPPPKDTGIARVPLAGAAGGPGIGRAAGRGIPAGVPMPQAPAGLAGPVRGVGGPSQQVMTPQGRGTVAAAAAAATASIAGAPTQYPPGRGGPPPPMGRGAPPPGMMGPPPGMRPPMGPPMGIPPGRGTPMGMPPPGMRPPPPGMRGPPPPGMRPPRP

SEQ ID NO: 59789 - protein, 13 aa, Homo sapiens
IKSVIGHLQTKGS

SEQ ID NO: 59790 - protein, 61 aa, Homo sapiens
RNQYCYGSRDLLGLHNMKRRQLARLGYRVVELSYWEWLPLLKRTRLEKLAFLHEKVFTSAL

SEQ ID NO: 59791 - protein, 125 aa, Homo sapiens
LKLKEAFVVEEEGVGETMTEEQSQSFLTEFINYIKQSKVVLLEDLASQVGLRTQDTINRIQDLLAEGTITGVIDDRGKFIYITPEELAAVANFIRQRGRVSIAELAQASNSLIAWGRESPAQAPA

SEQ ID NO: 59792 - protein, 36 aa, Homo sapiens
VKLAVMGLTVALGAAALAVVKSALEWAPKFQLQLFP

SEQ ID NO: 59793 - protein, 394 aa, Homo sapiens
LSDMSGPVPSRARVYTDVNTHRPREYWDYESHVVEWGNQDDYQLVRKLGRGKYSEVFEAINITNNEKVVVKILKPVKKKKIKREIKILENLRGGPNIITLADIVKDPVSRTPALVFEHVNNTDFKQLYQTLTDYDIRFYMYEILKALDYCHSMGIMHRDVKPHNVMIDHEHRKLRLIDWGLAEFYHPGQEYNVRVASRYFKGPELLVDYQMYDYSLDMWSLGCMLASMIFRKEPFFHGHDNYDQLVRIAKVLGTEDLYDYIDKYNIELDPRFNDILGRHSRKRWERFVHSENQHLVSPEALDFLDKLLRYDHQSRLTAREAMEHPYFYTVVKDQARMGSSSMPGGSTPVSSANMMSGISSVPTPSPLGPLAGSPVIAAANPLGMPVPAAAGAQQ

SEQ ID NO: 59794 - protein, 72 aa, Homo sapiens
VDTIREDPDSVPPIDVLWIKGAQGGDYFYSFGGCHRYAAYQQLQRETIPAKLVQSTLSDLRVYLGASTPDLQ

SEQ ID NO: 59795 - protein, 34 aa, Homo sapiens
LTISPDYAYGATGHPGIIPPHATLVFDVELLKLE

SEQ ID NO: 59796 - protein, 104 aa, Homo sapiens
VLSTSSPAQQAENEAKASSSILIDESEPTTNIQIRLADGGRLVQKFNHSHRISDIRLFIVDARPAMAATSFILMTTFPNKELADESQTLKEANLLNAVIVQRLT

SEQ ID NO: 59797 - protein, 45 aa, Homo sapiens
VDPRAIPVLAKWQNSYSIKVVLQEFRRLMMSKENMKLPQPPEGQC

SEQ ID NO: 59798 - protein, 242 aa, Homo sapiens
KDLINEACWDISSSGVNLQSMDSSHVSLVQLTLRSEGFDTYRCDRNLAMGVNLTSMSKILKCAGNEDIITLRAEDNADTLALVFEAPNQEKVSDYEMKLMDLDVEQLGIPEQEYSCVVKMPSGEFARICRDLSHIGDAVVISCAKDGVKFSASGELGNGNIKLSQTSNVDKEEEAVTIEMNEPVQLTFALRYLNFFTKATPLSSTVTLSMSADVPLVVEYKIADMGHLKYYLAPKIEDEEGS

SEQ ID NO: 59799 - protein, 338 aa, Homo sapiens
LAKVQENTIASLRNAASHGAAFVEFDVHLSKDFVPVVYHDLTCCLTMKKKFDADPVELFEIPVKELTFDQLQLLKLTHVTALKSKDRKESVVQEENSFSENQPFPSLKMVLESLPEDVGFNIEIKWICQQRDGMWDGNLSTYFDMNLFLDIILKTVLENSGKRRIVFSSFDADICTMVRQKQNKYPILFLTQGKSEIYPELMDLRSRTTPIAMSFAQFENLLGINVHTEDLLRNPSYIQEAKAKGLVIFCWGDDTNDPENRRKLKELGVNGLIYDRIYDWMPEQPNIFQVEQLERLKQELPELKSCLCPTVSRFVPSSLCGESDIHVDANGIDNVENA

SEQ ID NO: 59800 - protein, 1384 aa, Homo sapiens
LVSTFSMKETSYEEALANQRKEMAKTHHQKVEKKKKEKTVEKKGKTKKKEEKPNGKIPDHDPAPNVTVLLREPVRAPAVAVAPTPVQPPIIVAPVATVPAMPQEKLASSPKDKKKKEKKVAKVEPAVSSVVNSIQVLTSKAAILETAPKEVPMVVVPPVGAKGNTPATGTTQGKKAEGTQNQSKKAEGAPNQGRKAEGTPNQGKKTEGTPNQGKKAEGTPNQGKKAEGTPNQGKKAEGAQNQGKKVDTTPNQGKKVEGAPTQGRKAEGAQNQAKKVEGAQNQGKKAEGAQNQGKKGEGAQNQGKKAEGAQNQGKKAEGAQNQGKKAEGAQNQGKKAEGAQNQGKKAEGAQNQGKKAEGAQNQGKKVEGAQNQGKKAEGAQNQGKKAEGAQNQGKKAEGAQNQGKKAEGAQNQGKKAEGAQNQGKKAEGAQNQGKKAEGAQNQGKKVEGAQNQGKKAEGAQNQGKKAEGAQNQGKKAEGAQNQGQKGEGAQNQGKKTEGAQGKKAERSPNQGKKGEGAPIQGKKADSVANQGTKVEGITNQGKKAEGSPSEGKKAEGSPNQGKKADAAANQGKKTESASVQGRNTDVAQSPEAPKQEAPAKKKSGSKKKGEPGPPDADGPLYLPYKTLVSTVGSMVFNEGEAQRLIEILSEKAGIIQDTWHKATQKGDPVAILKRQLEEKEKLLATEQEDAAVAKSKLRELNKEMAAEKAKAAAGEAKVKKQLVAREQEITAVQARMQASYREHVKEVQQLQGKIRTLQEQLENGPNTQLARLQQENSILRDALNQATSQVESKQNAELAKLRQELSKVSKELVEKSEAVRQDEQQRKALEAKAAAFEKQVLQLQASHRESEEALQKRLDEVSRELCHTQSSHASLRADAEKAQEQQQQMAELHSKLQSSEAEVRSKCEELSGLHGQLQEARAENSQLTERIRSIEALLEAGQARDAQDVQASQAEADQQQTRLKELESQVSGLEKEAIELREAVEQQKVKNNDLREKNWKAMEALATAEQACKEKLLSLTQAKEESEKQLCLIEAQTMEALLALLPELSVLAQQNYTEWLQDLKEKGPTLLKHPPAPAEPSSDLASKLREAEETQSTLQAECDQYRSILAETEGMLRDLQKSVEEEEQVWRAKVGAAEEELQKSRVTVKHLEEIVEKLKGELESSDQVREHTSHLEAELEKHMAAASAECQNYAKEVAGLRQLLLESQSQLDAAKSEAQKQSDELALVRQQLSEMKSHVEDGDIAGAPASSPEAPPAEQDPVQLKTQLEWTEAILEDEQTQRQKLTAEFEEAQTSACRLQEELEKLRTAGPLESSETEEASQLKERLEKEKKLTSDLGRAATRLQELLKTTQEQLAREKDTVKKLQEQLEKAEDGSSSKEGTSV

SEQ ID NO: 59801 - protein, 380 aa, Homo sapiens
LNVDPSLQIDIPDALSERDKVKFTVHTKTTLPTFQSPEFSVTRQHEDFVWLHDTLIETTDYAGLIIPPAPTKPDFDGPREKMQKLGEGEGSMTKEEFAKMKQELEAEYLAVFKKTVSSHEVFLQRLSSHPVLSKDRNFHVFLEYDQDLSVRRKNTKEMFGGFFKSVVKSADEVLFTGVKEVDDFFEQEKNFLINYYNRIKDSCVKADKMTRSHKNVADDYIHTAACLHSLALEEPTVIKKYLLKVAELFEKLRKVEGRVSSDEDLKLTELLRYYMLNIEAAKDLLYRRTKALIDYENSNKALDKARLKSKDVKLAEAHQQECCQKFEQLSESAKEELINFKRKRVAAFRKNLIEMSELEIKHARNNVSLLQSCIDLFKNN

SEQ ID NO: 59802 - protein, 111 aa, Homo sapiens
KQVQADFITLGLSEEKATYFSEKWKQNAPTLARWAIGQTLMINQLIDMEWKFGVTSGSSELEKVGSIFLQLKLVVKKGNQTENVYIELTLPQFYSFLHEMERVRTSMECFC

SEQ ID NO: 59803 - protein, 42 aa, Homo sapiens
VELYGNNAAAESRKGQERFNRWFLTGMTVAGVVLLGSLFSRK

SEQ ID NO: 59804 - protein, 401 aa, Homo sapiens
LMRMRERYSASKPLKGARIAGCLHMTVETAVLIETLVTLGAEVQWSSCNIFSTQDHAAAAIAKAGIPVYAWKGETDEEYLWCIEQTLYFKDGPLNMILDDGGDLTNLIHTKYPQLLPGIRGISEETTTGVHNLYKMMANGILKVPAINVNDSVTKSKFDNLYGCRESLIDGIKRATDVMIAGKVAVVAGYGDVGKGCAQALRGFGARVIITEIDPINALQAAMEGYEVTTMDEACQEGNIFVTTTGCIDIILGRHFEQMKDDAIVCNIGHFDVEIDVKWLNENAVEKVNIKPQVDRYRLKNGRRIILLAEGRLVNLGCAMGHPSFVMSNSFTNQVMAQIELWTHPDKYPVGVHFLPKKLDEAVAEAHLGKLNVKLTKLTEKQAQYLGMSCDGPFKPDHYRY

SEQ ID NO: 59805 - protein, 150 aa, Homo sapiens
VDYASNCLYMEEIEGSVTVRDYIQSTMETEKTPQGLSNLAKTIGQVLARMHDEDLIHGDLTTSNMLLKPPLEQLNIVLIDFGLSFISALPEDKGVDLYVLEKAFLSTHPNTETVFEAFLKSYSTSSKKARPVLKKLDEVRLRGRKRSMVG

SEQ ID NO: 59806 - protein, 43 aa, Homo sapiens
LRPDIRTKEQIVEMLVQEQLLAILPEAARARRIRRRTDVRITG

SEQ ID NO: 59807 - protein, 776 aa, Homo sapiens
VAAWGGWGGRPRPGNILLQLRQGQLTGRGLVRAVQFTETFLTERDKQSKWSGIPQLLLKLHTTSHLHSDFVECQNILKEISPLLSMEAMAFVTEERKLTQETTYPNTYIFDLFGGVDLLVEILMRPTISIRGQKLKISDEMSKDCLSILYNTCVCTEGVTKRLAEKNDFVIFLFTLMTSKKTFLQTATLIEDILGVKKEMIRLDEVPNLSSLVSNFDQQQLANFCRILAVTISEMDTGNDDKHTLLAKNAQQKKSLSLGPSAAEINQAALLSIPGFVERLCKLATRKVSESTGTASFLQELEEWYTWLDNALVLDALMRVANEESEHNQASIVFPPPGASEENGLPHTSARTQLPQSMKIMHEIMYKLEVLYVLCVLLMGRQRNQVHRMIAEFKLIPGLNNLFDKLIWRKHSASALVLHGHNQNCDCSPDITLKIQFLRLLQSFSDHHENKYLLLNNQELNELSAISLKANIPEVEAVLNTDRSLVCDGKRGLLTRLLQVMKKEPAESSFRFWQARAVESFLRGTTSYADQMFLLKRGLLEHILYCIVDSECKSRDVLQSYFDLLGELMKFNVDAFKRFNKYINTDAKFQVFLKQINSSLVDSNMLVRCVTLSLDRFENQVDMKVAEVLSECRLLAYISQVPTQMSFLFRLINIIHVQTLTQENVSCLNTSLVILMLARRKERLPLYLRLLQRMEHSKKYPGFLLNNFHNLLRFWQQHYLHKDKDSTCLENSSCISFSYWKETVSILLNPDRQSPSALVSYIEEPYMDIDRDFTEE

SEQ ID NO: 59808 - protein, 14 aa, Homo sapiens
LDDVRFLIACTSWY

SEQ ID NO: 59809 - protein, 12 aa, Homo sapiens
IRTDSWNRHTAE

SEQ ID NO: 59810 - protein, 361 aa, Homo sapiens
VTKVSVGEFVGEGEGKSKKISKKNAAIAVLEELKKLPPLPAVERVKPRIKKKTKPIVKPQTSPEYGQGINPISRLAQIQQAKKEKEPEYTLLTERGLPRRREFVMQVKVGNHTAEGTGTNKKVAKRNAAENMLEILGFKVPQAQPTKPALKSEEKTPIKKPGDGRKVTFFEPGSGDENGTSNKEDEFRMPYLSHQQLPAGILPMVPEVAQAVGVSQGHHTKDFTRAAPNPAKATVTAMIARELLYGGTSPTAETILKNNISSGHVPHGPLTRPSEQLDYLSRVQGFQVEYKDFPKNNKNEFVSLINCSSQPPLISHGIGKDVESCHDMAALNILKLLSELDQQSTEMPRTGNGPMSVCGRC

SEQ ID NO: 59811 - protein, 14 aa, Homo sapiens
IWSKEKDKQKGHPL

SEQ ID NO: 59812 - protein, 22 aa, Homo sapiens
LSVSQDSDILFGSASSDTRDNN

SEQ ID NO: 59813 - protein, 103 aa, Homo sapiens
INGFPNAFWGWGGEDDDLWNRVQNAGYSVSRPEGDTGKYKSIPHHHRGEVQFLGRYALLRKSKERQGLDGLNNLNYFANITYDALYKNITVNLTPELAQVNEY

SEQ ID NO: 59814 - protein, 320 aa, Homo sapiens
LGLGAGSGAGPRSRRGAMARRGPGWRPLLLLVLLAGAAQGGLYFRRGQTCYRPLRGDGLAPLGRSTYPRPHEYLSPADLPKSWDWRNVDGVNYASITRNQHIPQYCGSCWAHASTSAMADRINIKRKGAWPSTLLSVQNVIDCGNAGSCEGGNDLSVWDYAHQHGIPDETCNNYQAKDQECDKFNQCGTCNEFKECHAIRNYTLWRVGDYGSLSGREKMMAEIYANGPISCGIMATERLANYTGGIYAEYQDTTYINHVVSVAGWGISDGTEYWIVRNSWGEPWGERGWLRIVTSTYKDGKGARYNLAIEEHCTFGDPIV

SEQ ID NO: 59815 - protein, 91 aa, Homo sapiens
TTRKSGWCSCSLKVVRLKPTRKFAYLGRLAHEVGWKYQAVTATLEEKRKEKAKIHYRKKKQLMRLRKQAEKNMEKKIDKYTEVLKTHRLLV

SEQ ID NO: 59816 - protein, 51 aa, Homo sapiens
IPLQIEEYLKDPTQPILEALDKDSSPKDDVWDSVSIISFPEKEQEDVLQTL

SEQ ID NO: 59817 - protein, 1953 aa, Homo sapiens
VMAQELPGLPLVTAAVELPEQPAVTVAMELTEQPVTTTELEQPVGMTTVEHPGHPEVTTATGLLGQPEATMVLELPGQPVATTALELPGQPSVTGVPELPGLPSATRALELSGQPVATGALELPGPLMAAGALEFSGQSGAAGALELLGQPLATGVLELPGQPGAPELPGQPVATVALEISVQSVVTTSELSTMTVSQSLEVPSTTALESYNTVAQELPTTLVGETSVTVGVDPLMAPESHILASNTMETHILASNTMDSQMLASNTMDSQMLASNTMDSQMLASSTMDSQMLATSSMDSQMLATSSMDSQMLATSTMDSQMLATSSMDSQMLATSSMDSQMLATSSMDSQMLATSSMDSQMLATSTMDSQMLATSTMDSQMLATSSMDSQMLASGTMDSQMLASGTMDAQMLASGTMDAQMLASSTQDSAMLGSKSPDPYRLAQDPYRLAQDPYRLGHDPYRLGHDAYRLGQDPYRLGHDPYRLTPDPYRMSPRPYRIAPRSYRIAPRPYRLAPRPLMLASRRSMMMSYAAERSMMSSYERSMMSYERSMMSPMAERSMMSAYERSMMSAYERSMMSPMAERSMMSAYERSMMSAYERSMMSPMADRSMMSMGADRSMMSSYSAADRSMMSSYSAADRSMMSSYTADRSMMSMAADSYTDSYTDTYTEAYMVPPLPPEEPPTMPPLPPEEPPMTPPLPPEEPPEGPALPTEQSALTAENTWPTEVPSSPSEESVSQPEPPVSQSEISEPSAVPTDYSVSASDPSVLVSEAAVTVPEPPPEPESSITLTPVESAVVAEEHEVVPERPVTCMVSETPAMSAEPTVLASEPPVMSETAETFDSMRASGHVASEVSTSLLVPAVTTPVLAESILEPPAMAAPESSAMAVLESSAVTVLESSTVTVLESSTVTVLEPSVVTVPEPPVVAEPDYVTIPVPVVSALEPSVPVLEPAVSVLQPSMIVSEPSVSVQESTVTVSEPAVTVSEQTQVIPTEVAIESTPMILESSIMSSHVMKGINLSSGDQNLAPEIGMQEIALHSGEEPHAEEHLKGDFYESEHGINIDLNINNHLIAKEMEHNTVCAAGTSPVGEIGEEKILPTSETKQRTVLDTYPGVSEADAGETLSSTGPFALEPDATGTSKGIEFTTASTLSLVNKYDVDLSLTTQDTEHDMVISTSPSGGSEADIEGPLPAKDIHLDLPSNNNLVSKDTEEPLPVKESDQTLAALLSPKESSGGEKEVPPPPKETLPDSGFSANIEDINEADLVRPLLPKDMERLTSLRAGIEGPLLASDVGRDRSAASPVVSSMPERASESSSEEKDDYEIFVKVKDTHEKSKKNKNRDKGEKEKKRDSSLRSRSKRSKSSEHKSRKRTSESRSRARKRSSKSKSHRSQTRSRSRSRRRRRSSRSRSKSRGRRSVSKEKRKRSPKHRSKSRERKRKRSSSRDNRKTVRARSRTPSRRSRSHTPSRRRRSRSVGRRRSFSISPSRRSRTPSRRSRTPSRRSRTPSRRSRTPSRRSRTPSRRSRTPSRRRRSRSVVRRRSFSISPVRLRRSRTPLRRRFSRSPIRRKRSRSSERGRSPKRLTDLDKAQLLEIAKANAAAMCAKAGVPLPPNLKPAPPPTIEEKVAKKSGGATIEELTEKCKQIAQSKEDDDVIVNKPHVSDEEEEEPPFYHHPFKLSEPKPIFFNLNIAAAKPTPPKSQVTLTKEFPVSSGSQHRKKEADSVYGEWVPVEKNGEENKDDDNVFSSNLPSEPVDISTAMSERALAQKRLSENAFDLEAMSMLNRAQERIDAWAQLNSIPGQFTGSTGVQVLTQEQLANTGAQAWIKKDQFLRAAPVTGGMGAVLMRKMGWREGEGLGKNKEGNKEPILVDFKTDRKGLVAVGERAQKRSGNFSAAMKDLSGKHPVSALMEICNKRRWQPPEFLLVHDSGPDHRKHFLFRVLRNGALTRPNCMFFLNRY

SEQ ID NO: 59818 - protein, 10 aa, Homo sapiens
MQRGWYSRLH

SEQ ID NO: 59819 - protein, 7 aa, Homo sapiens
MLYDRNL

SEQ ID NO: 59820 - protein, 149 aa, Homo sapiens
ILLPSFSSFMSRVLQKDAEQESQMRAEIQDMKQELSTVNMMDEFARYARLERKINKMTDKLKTHVKARTAQLAKIKWVISVAFYVLQAALMISLIWKYYSVPVAVVPSKWITPLDRLVAFPTRVAGGVGITCWILVCNKVVAIVLHPFS

SEQ ID NO: 59821 - skipped

SEQ ID NO: 59822 - protein, 23 aa, Homo sapiens
TALHYIHDGIGAMVRKVLELTGK

SEQ ID NO: 59823 - protein, 676 aa, Homo sapiens
LVQHGITNLCVIGGDGSLTGANIFRSEWGSLLEELVAEGKISETTARTYSHLNIAGLVGSIDNDFCGTDMTIGTDSALHRIMEVIDAITTTAQSHQRTFVLEVMGRHCGYLALVSALASGADWLFIPEAPPEDGWENFMCERLGETRSRGSRLNIIIIAEGAIDRNGKPISSSYVKDLVVQRLGFDTRVTVLGHVQRGGTPSAFDRILSSKMGMEAVMALLEATPDTPACVVTLSGNQSVRLPLMECVQMTKEVQKAMDDKRFDEATQLRGGSFENNWNIYKLLAHQKPPKEKSNFSLAILNVGAPAAGMNAAVRSAVRTGISHGHTVYVVHDGFEGLAKGQVQEVGWHDVAGWLGRGGSMLGTKRTLPKGQLESIVENIRIYGIHALLVVGGFEAYEGVLQLVEARGRYEELCIVMCVIPATISNNVPGTDFSLGSDTAVNAAMESCDRIKQSASGTKRRVFIVETMGGYCGYLATVTGIAVGADAAYVFEDPFNIHDLKVNVEHMTEKMKTDIQRGLVLRNEKCHDYYTTEFLYNLYSSEGKGVFDCRTNVLGHLQQGGAPTPFDRNYGTKLGVKAMLWLSEKLREVYRKGRVFANAPDSACVIGLKKKAVAFSPVTELKKDTDFEHRMPREQWWLSLRLMLKMLAQYRISMAAYVSGELEHVTRRTLSMDKGF

SEQ ID NO: 59824 - protein, 38 aa, Homo sapiens
IWPTMAALHLVPCSADKDYRSKVLFWDNAYEFNLSALK

SEQ ID NO: 59825 - protein, 685 aa, Homo sapiens
IIKVMKHEAYGECYKVSCLEIPGPSGPKGYRGQKGAKGNMGEPGEPGQKGRQGDPGIEGPIGFPGPKGVPGFKGEKGEFGADGRKGAPGLAGKNGTDGQKGKLGRIGPPGCKGDPGNRGPDGYPGEAGSPGERGDQGGKGDPGRPGRRGPPGEIGAKGSKGYQGNSGAPGSPGVKGAKGGPGPRGPKGEPGRRGDPGTKGSPGSDGPKGEKGDPGPEGPRGLAGEVGNKGAKGDRGLPGPRGPQGALGEPGKQGSRGDPGDAGPRGDSGQPGPKGDPGRPGFSYPGPRGAPGEKGEPGPRGPEGGRGDFGLKGEPGRKGEKGEPADPGPPGEPGPRGPRGVPGPEGEPGPPGDPGLTECDVMTYVRETCGCCDCEKRCGALDVVFVIDSSESIGYTNFTLEKNFVINVVNRLGAIAKDPKSETGTRVGVVQYSHEGTFEAIQLDDERIDSLSSFKEAVKNLEWIAGGTWTPSALKFAYDRLIKESRRQKTRVFAVVITDGRHDPRDDDLNLRALCDRDVTVTAIGIGDMFHEKHESENLYSIACDKPQQVRNMTLFSDLVAEKFIDDMEDVLCPDPQIVCPDLPCQTDAPWPGGEPPVTFLRTEEGPDATFPRTIPLIQQLLNATELTQDPAAYSQLVAVLVYTAERAKFATGVERQDWMELFIDTFKLVHRDIVGDPETALALC

SEQ ID NO: 59826 - protein, 7 aa, Homo sapiens
MYPSRIP

SEQ ID NO: 59827 - protein, 563 aa, Homo sapiens; identical to SEQ ID NO: 21396

SEQ ID NO: 59828 - protein, 23 aa, Homo sapiens
TALHYIHDGIGAMVRKVLELTGK

SEQ ID NO: 59829 - protein, 43 aa, Homo sapiens
LAVAELKDCIEKKTMEGRSSKVYFTINMNLDVSDEKMVIQFCF

SEQ ID NO: 59830 - protein, 21 aa, Homo sapiens
VPPSAQNETHSPSRTYTYISR

SEQ ID NO: 59831 - protein, 48 aa, Homo sapiens [sequence omitted]

SEQ ID NO: 59832 - protein, 38 aa, Homo sapiens
LQNKEHVIEALRRAKFKFPGHPKDPHLKEVRLHQVQCR

SEQ ID NO: 59833 - protein, 97 aa, Homo sapiens
INSTIEMVKPGKFPSGKTEIPFEFPLHLKGNKVLYETYHGVFVNIQYTLRCDMKRSLLAKDLTKTCEFIVHSAMRKLSFSKMGKFDRTVFRTQACAS

SEQ ID NO: 59834 - protein, 35 aa, Homo sapiens
LETTNFKVEFEVNIVVLLHPDHLITENFPLKLCRI

SEQ ID NO: 59835 - protein, 113 aa, Homo sapiens
MSAMGSATRYHTYLPPPYPGSSQAQGGPFQASSPSYHLYYGASAGSYQFSMVGGERSPPRILPPCTNASTGSALLNPSLPNQSDVVEAEGSHSNSPTNMAPSARLEEAVWRPY

SEQ ID NO: 59836 - protein, 85 aa, Homo sapiens
LKVAGQDGSVVQFKIKRHTPLSKLMKAYCERQGLSMRQIRFRFDGQPINETDTPAQLEMEDEDTIDVFQQQTGGVPESSLAGHSF

SEQ ID NO: 59837 - protein, 52 aa, Homo sapiens
LSMRQIRFRFDGQPINETDTPAQLEMEDEDTIDVFQQQTGGVPESSLAGHSF

SEQ ID NO: 59838 - protein, 167 aa, Homo sapiens
RLRLGGAALLLLLIPVAAAQEPPGAACSQNTNKTCEECLKNVSCLWCNTNKACLDYPVTSVLPPASLCKLSSARWGVCWVNFEALIITMSVVGGTLLLGIAICCCCCCRRKRSRKPDRSEEKAMREREERRIRQEERRAEMKTRHDEIRKKYGLFKEENPYARFENN

SEQ ID NO: 59839 - protein, 231 aa, Homo sapiens
LEVSLLEKYPCSKFIIAIGNNAVAFLSSFVMNSGVWEEVGCAKLWNEWCRTTDTTHLSSTEAFCVFYHLKSNPSVFLCQCSCYVAEDQQYQWLEKVFGSCPRKNMQITILTCRHVTDYKTSESTGSLPSPFLRALKTQNFKDSACCPLLEQPNIVHDLPAAVLSYCQVWKIPAILYLCYTDVMKLDLITVEAFKPILSTRSLKGLVKNIPQSTEILKKLMTTNEIQSNIYT

SEQ ID NO: 59840 - protein, 32 aa, Homo sapiens
LDKEIPPSISRVTSLLGAGRQSLLRTAKGTLI

SEQ ID NO: 59841 - protein, 48 aa, Homo sapiens
LEAARICANKYMVKSCGKDGFHIRVWLHSFHVIRINKTLSCAGADRLK

SEQ ID NO: 59842 - protein, 54 aa, Homo sapiens
LWIDRQWQYDANPFLQSVHRCMTSRLLQLPDKHSVTALLNTWAQSVHQACLSAA

SEQ ID NO: 59843 - protein, 147 aa, Homo sapiens
IKSVFGGLVNYFKSKPVETPPEQNGTLTSQPNNRLKEAISTSKEQEAKYQASHPNLRKLDDTDPVPRGAGSAMSTDAYPKNPHLRAYHQKIDSNLDELSMGLGRLKDIALGMQTEIEEQDDILDRLTTKVDKLDVNIKSTERKVRQL

SEQ ID NO: 59844 - protein, 238 aa, Homo sapiens
LPNRRFKIGDQEFDHLPALLEFYKIHYLDTTTLIEPAPRYPSPPMGSVSAPNLPTAEDNLEYVRTLYDFPGNDAEDLPFKKGEILVIIEKPEEQWWSARNKDGRVGMIPVPYVEKLVRSSPHGKHGNRNSNSYGIPEPAHAYAQPQTTTPLPAVSGSPGAAITPLPSTQNGPVFAKAIQKRVPCAYDKTALALEVGDIVKVTRMNINGQWEGEVNGRKGLFPFTHVKIFDPQNPDENE

SEQ ID NO: 59845 - protein, 6 aa, Homo sapiens
LCMLAV

SEQ ID NO: 59846 - protein, 205 aa, Homo sapiens
TASVLRSISLALRPTSGLLGTWQTQLRETHQRASLLSFWELIPMRSEPLRKKKKVDPKKDQEAKERLKRKIRKLEKATQELIPIEDFITPLKFLDKARERPQVELTFEETERRALLLKKWSLYKQQERKMERDTIRAMLEAQQEALEELQLESPKLHAEAIKRDPNLFPFEKEGPHYTPPIPNYQPPEGRYNDITKVYTQVEFKR

SEQ ID NO: 59847 - protein, 31 aa, Homo sapiens
IDTRNCKILLTEPPMNPTKNTEKTVEVMFET

SEQ ID NO: 59848 - protein, 13 aa, Homo sapiens
LGRKQLTSMALTA

SEQ ID NO: 59849 - protein, 125 aa, Homo sapiens
LRGSPGPSAIMPMFIVNTNVPRASVPDGFLSELTQQLAQATGKPPQYIAVHVVPDQLMAFGGSSEPCALCSLHSIGKIGGAQNRSYSKLLCGLLAERLRISPDRVYINYYDMNAANVGWNNSTFA

SEQ ID NO: 59850 - protein, 38 aa, Homo sapiens
IFKDLSIRSVRVVRDKDTDKFKGFCYIEFDEVDSLKEA

SEQ ID NO: 59851 - protein, 372 aa, Homo sapiens
RVLATMSSTLAKIAEIEAEMARTQKNKATAHHLGLLKARLAKLRRELITPKGGGGGGPGEGFDVAKTGDARIGFVGFPSVGKSTLLSNLAGVYSEVAAYEFTTLTTVPGVIRYKGAKIQLLDLPGIIEGAKDGKGRGRQVIAVARTCNLILIVLDVLKPLGHKKIIENELEGFGIRLNSKPPNIGFKKKDKGGINLTATCPQSELDAETVKSILAEYKIHNADVTLRSDATADDLIDVVEGNRVYIPCIYVLNKIDQISIEELDIIYKVPHCVPISAHHRWNFDDLLEKIWDYLKLVRIYTKPKGQLPDYTSPVVLPYSRTTVEDFCMKIHKNLIKEFKYALVWGLSVKHNPQKVGKDHTLEDEDVIQIVKK

SEQ ID NO: 59852 - protein, 20 aa, Homo sapiens
MLKLLGNKRDAKSKSPRDKS

SEQ ID NO: 59853 - protein, 32 aa, Homo sapiens
KMPFFGNTFSPKKTPPRKSASLSNLHSVPSND

SEQ ID NO: 59854 - protein, 320 aa, Homo sapiens
IHLLMLESGYIPQGTEAKALSMPEKWKLSGVYKLQYMHPLCEGSSATLTCVPLGNLIVVNATLKINNEIRSVKRLQLLPESFICKEKLGENVANIYKDLQKLSRLFKDQLVYPLLAFTRQALNLPDVFGLVVLPLELKLRIFRLLDVRSVLSLSAVCRDLFTASNDPLLWRFLYLRDFRDNTVRVQDTDWKELYRKRHIQRKESPKGRFVMLLPSSTHTIPFYPNPLHPRPFPSSRLPPGIIGGEYDQRPTLPYVGDPISSLIPGPGETPSQFPPLRPRFDPVGPLPGPNPILPGRGGPNDRFPFRPSRGRPTDGRLSFM

SEQ ID NO: 59855 - protein, 139 aa, Homo sapiens
LDSIMACGLVASNLNLKPGECLRVRGEVAPDAKSFVLNLGKDSNNLCLHFNPRFNAHGDANTIVCNSKDGGAWGTEQREAVFPFQPGSVAEVCITFDQANLTVKLPDGYEFKFPNRLNLEAINYMAADGDFKIKCVAFD

SEQ ID NO: 59856 - protein, 57 aa, Homo sapiens [sequence omitted]

SEQ ID NO: 59857 - protein, 538 aa, Homo sapiens
ISKIISSDRDLLAVVFYGTEKDKNSVNFKNIYVLQELDNPGAKRILELDQFKGQQGQKRFQDMMGHGSDYSLSEVLWVCANLFSDVQFKMSHKRIMLFTNEDNPHGNDSAKASRARTKAGDLRDTGIFLDLMHLKKPGGFDISLFYRDIISIAEDEDLRVHFEESSKLEDLLRKVRAKETRKRALSRLKLKLNKDIVISVGIYNLVQKALKPPPIKLYRETNEPVKTKTRTFNTSTGGLLLPSDTKRSQIYGSRQIILEKEETEELKRFDDPGLMLMGFKPLVLLKKHHYLRPSLFVYPEESLVIGSSTLFSALLIKCLEKEVAALCRYTPRRNIPPYFVALVPQEEELDDQKIQVTPPGFQLVFLPFADDKRKMPFTEKIMATPEQVGKMKAIVEKLRFTYRSDSFENPVLQQHFRNLEALALDLMEPEQAVDLTLPKVEAMNKRLGSLVDEFKELVYPPDYNPEGKVTKRKHDNEGSGSKRPKVEYSEEELKTHISKGTLGKFTVPMLKEACRAYGLKSGLKKQELLEALTKHFQD

SEQ ID NO: 59858 - protein, 7 aa, Homo sapiens
IKTTTVS

SEQ ID NO: 59859 - protein, 31 aa, Homo sapiens
LFDHAPDKLSVVKKVSYWWDVGCALPWLAAF

SEQ ID NO: 59860 - protein, 30 aa, Homo sapiens
KARPEDVVNLDLKSTLRVLYNLFTKYKNVE

SEQ ID NO: 59861 - protein, 266 aa, Homo sapiens
TLGSYLCSCSVGFRLSVDGRSCEDINECSSSPCSQECANVYGSYQCYCRRGYQLSDVDGVTCEDIDECALPTGGHICSYRCINIPGSFQCSCPSSGYRLAPNGRNCQDIDECVTGIHNCSINETCFNIQGGFRCLAFECPENYRRSAATRCERLPCHENRECSKLPLRITYYHLSFPTNIQAPAVVFRMGPSSAVPGDSMQLAITGGNEEGFFTTRKVSPHSGVVALTKPVPEPRDLLLTVKMDLSRHGTVSSFVAKLFIFVSAEL

SEQ ID NO: 59862 - protein, 33 aa, Homo sapiens
LDCSTTQSDLSLCEGFSEALKQCKYYHGLSSLP

SEQ ID NO: 59863 - protein, 21 aa, Homo sapiens
LGLWPGLLQDGAAVPGPAGRQ

SEQ ID NO: 59864 - protein, 52 aa, Homo sapiens
IVLRGYNRATGCIFYNNPAYADRMCSTSISNFEEARTSYGTDEDILFVYLDS

SEQ ID NO: 59865 - protein, 17 aa, Homo sapiens
RTPRAPPGGCGRSSRPN

SEQ ID NO: 59866 - protein, 12 aa, Homo sapiens
VSETNDTKVLRH

SEQ ID NO: 59867 - protein, 53 aa, Homo sapiens
ICGRVPMSLLLPPLALLLLLAALVAPATAATAYRPDWNRLSGLTRARVETCGG

SEQ ID NO: 59868 - protein, 90 aa, Homo sapiens
VKAFVTQDIPFYHNLVMKHLPGADPELVLLGRRYEELERIPLSEMTREEINALVQELGFYRKAAPDAQVPPEYVWAPAKPPEETSDHADL

SEQ ID NO: 59869 - protein, 299 aa, Homo sapiens
LKNRVAAQTARDRKKARMSELEQQVVDLEEENQKLLLENQLLREKTHGLVVENQELRQRLGMDALVAEEEAEAKGNEVRPVAGSAESAAGAGPVVTPPEHLPMDSGGIDSSDSESDILLGILDNLDPVMFFKCPSPEPASLEELPEVYPEGPSSLPASLSLSVGTSSAKLEAINELIRFDHIYTKPLVLEIPSETESQANVVVKIEEAPLSPSENDHPEFIVSVKEEPVEDDLVPELGISNLLSSSHCPKPSSCLLDAYSDCGYGGSLSPFSDMSSLLGVNHSWEDTFANELFPQLISV

SEQ ID NO: 59870 - protein, 28 aa, Homo sapiens
MPPVLKPTTTPVEEQPCHQNRAKNGSPK

SEQ ID NO: 59871 - protein, 549 aa, Homo sapiens
KMAKFMTPVIQDNPSGWGPCAVPEQFRDMPYQPFSKGDRLGKVADWTGATYQDKRYTNKYSSQFGGGSQYAYFHEEDESSFQLVDTARTQKTAYQRNRMRFAQRNLRRDKDRRNMLQFNLQILPKSAKQKERERIRLQKKFQKQFGVRQKWDQKSQKPRDSSVEVRSDWEVKEEMDFPQLMKMRYLEVSEPQDIECCGALEYYDKAFDRITTRSEKPLRSIKRIFHTVTTTDDPVIRKLAKTQGNVFATDAILATLMSCTRSVYSWDIVVQRVGSKLFFDKRDNSDFDLLTVSETANEPPQDEGNSFNSPRNLAMEATYINHNFSQQCLRMGKERYNFPNPNPFVEDDMDKNEIASVAYRYRRWKLGDDIDLIVRCEHDGVMTGANGEVSFINIKTLNEWDSRHCNGVDWRQKLDSQRGAVIATELKNNSYKLARWTCCALLAGSEYLKLGYVSRYHVKDSSRHVILGTQQFKPNEFASQINLSVENAWGILRCVIDICMKLEEGKYLILKDPNKQVIRVYSLPDGTFSSDEDEEEEEEEEEEEEEEET

SEQ ID NO: 59872 - protein, 694 aa, Homo sapiens
RKSSNMKRLSPAPQLGPSSDAHTSYYSESLVHESWFPPRSSLEELHGDANWGEDLRVRRRRGTGGSESSRASGLVGRKATEDFLGSSSGYSSEDDYVEDSEGRGSKVTETEPVSSFPAGYSDVDQQSSSSRLRSAVSRAGSLLWMVATSPGRLFRLLYWWAGTTWYRLTTAASLLDVFVLTRRFSSLKTFLWFLLPLLLLTCLTYGAWYFYPYGLQTFHPALVSWWAAKDSRRPDEGWEARDSSPHFQAEQRVMSRVHSLERRLEALAAEFSSNWQKEAMRLERLELRQGAPGQGGGGGLSHEDTLALLEGLVSRREAALKEDFRRETAARIQEELSALRAEHQQDSEDLFKKIVRASQESEARIQQLKSEWQSMTQESFQESSVKELRRLEDQLAGLQQELAALALKQSSVAEEVGLLPQQIQAVRDDVESQFPAWISQFLARGGGGRVGLLQREEMQAQLRELESKILTHVAEMQGKSAREAAASLSLTLQKEGVIGVTEEQVHHIVKQALQRYSEDRIGLADYALESGGASVISTRCSETYETKTALLSLFGIPLWYHSQSPRVILQPDVHPGNCWAFQGPQGFAVVRLSARIRPTAVTLEHVPKALSPNSTISSAPKDFAIFGFDEDLQQEGTLLGKFTYDQDGEPIQTFHFQAPTMATYQVVELRILTNWGHPEYTCIYRFRVHGEPAH

SEQ ID NO: 59873 - protein, 30 aa, Homo sapiens
KAIQAQKLRNSAKGKVPKSALDGVSPCWPR

SEQ ID NO: 59874 - protein, 68 aa, Homo sapiens
MGLLKSEDKVKAIANLYGPLMALNHMVQQDYFPKALAPLLLAFVTKPNSALESCSFARHSLLQTLYKV

SEQ ID NO: 59875 - protein, 39 aa, Homo sapiens
LNRADGNFLLYAHLTYVTLPLHRILTDILEVRQKPILMT

SEQ ID NO: 59876 - protein, 178 aa, Homo sapiens
LDEQAEKHNIQDEDTIHIWKTNSLPLRFWVNILKNPHFIFDVHVHEVVDASLSVIAQTFMDACTRTEHKLSRDSPSNKLLYAKEISTYKKMVEDYYKGIRQMVQVSDQDMNTHLAEISRAHTDSLNTLVALHQLYQYTQKYYDEIINALEEDPAAQKMQLAFRLQQIAAALENKVTDL

SEQ ID NO: 59877 - protein, 109 aa, Homo sapiens
LSRDSPSNKLLYAKEISTYKKMVEDYYKGIRQMVQVSDQDMNTHLAEISRAHTDSLNTLVALHQLYQYTQKYYDEIINALEEDPAAQKMQLAFRLQQIAAALENKVTDL

SEQ ID NO: 59878 - protein, 688 aa, Homo sapiens
MFAFASLYTQIPGLYGPEGILPARRTLRPQGKGRWQQLWETPTLLWEAPRLGLDTAQGLELLSLLGALVALGALLLSPLRHPVIYLLLWAAYLSACQVGQVFLYFQWDSLLLETGFLAVLVAPLRPASHRKEAPQGRQAGALPHEDLPFWLVRWLLFRLMFASGVVKLTSRCPAWWGLTALTYHYETQCLPTPAAWFAHHLPVWLHKLSVVATFLIEIAVPPLFFAPIRRLRLAAFYSQVLLQVLIIITGNYNFFNLMTLVLTTALLDDQHLAAEPGHGSRKKTATSWPKALLATLSLLLELAVYGLLAYGTVHYFGLEVDWQQRTIHSRTTFTFHQFSQWLKTLTLPTVWLGVASLVWELLSALWRWTQVRGWLRKLSAVVQLSLVGTATVALFLISLVPYSYVEPGTHGRLWTGAHRLFGAVEHLQLANSYGLFRRMTGLGGRPEVVLEGSYDGHHWTEIEFMYKPGNLSRPPPVVVPHQPRLDWQMWFAALGPHTHSPWFTSLVLRLLQGKEPVIRLVQSQVARYPFHKQPPTYVRAQRYKYWFSQPGEQGQWWRRQWVEEFFPSVSLGDPTLETLLRQFGLQEKSPPRTRSANSTLAQALHWTRSQLSPLEAPALLWGLLMAVGAVRFVQALLAPCSLRSSPLAPVSGEKRRPASQKDSGAASEQATAAPNPCSSSSRTTRRKK

SEQ ID NO: 59879 - protein, 94 aa, Homo sapiens
ITAYKKYNNRCLDGQPMKCNLHMNGNVITSDQPILLRLSDSPSMKKESELPRRVNSASSSNPPAEVDPDTILKALFKSSGASVTTQPTEFKIKL

SEQ ID NO: 59880 - protein, 291 aa, Homo sapiens
MVLFPVWFLYSLLMKLFQRSTPAITLESPDIKYPLRLIDREIISHDTRRFRFALPSPQHILGLPVGQHIYLSARIDGNLVVRPYTPISSDDDKGFVDLVIKVYFKDTHPKFPAGGKMSQYLESMQIGDTIEFRGPSGLLVYQGKGKFAIRPDKKSNPIIRTVKSVGMIAGGTGITPMLQVIRAIMKDPDDHTVCHLLFANQTEKDILLRPELEELRNKHSARFKLWYTLDRAPEAWDYGQGFVNEEMIRDHLPPPEEEPLVLMCGPPPMIQYACLPNLDHVGHPTERCFVF

SEQ ID NO: 59881 - protein, 493 aa, Homo sapiens
VCFDCGAKNPSWASITYGVFLCIDCSGSHRSLGVHLSFIRSTELDSNWSWFQLRCMQVGGNASASSFFHQHGCSTNDTNAKYNSRAAQLYREKIKSLASQATRKHGTDLWLDSCVVPPLSPPPKEEDFFASHVSPEVSDTAWASAIAEPSSLTSRPVETTLENNEGGQEQGPSVEGLNVPTKATLEVSSIIKKKPNQAKKGLGAKKGSLGAQKLANTCFNEIEKQAQAADKMKEQEDLAKVVSKEESIVSSLRLAYKDLEIQMKKDEKMNISGKKNVDSDRLGMGFGNCRSVISHSVTSDMQTIEQESPIMAKPRKKYNDDSDDSYFTSSSSYFDEPVELRSSSFSSWDDSSDSYWKKETSKDTETVLKTTGYSDRPTARRKPDYEPVENTDEAQKKFGNVKAISSDMYFGRQSQADYETRARLERLSASSSISSADLFEEPRKQPAGNYSLSSVLPNAPDMAQFKQGVRSVAGKLSVFANGVVTSIQDRYGS

SEQ ID NO: 59882 - protein, 386 aa, Homo sapiens
LTPGYHGFPARDSQGNQEPTTTPDAMVQPFTTIPFPPPPQNGIPTEYGVPHTQDYAGQTGEHNLTLYGSTQAHGEQSSNSPSTQNGSLTQTEGGAQTDGQQSQTQSSENSESKSTPKRLHVSNIPFRFRDPDLRQMFGQFGKILDVEIIFNERGSKGFGFVTFENSADADRAREKLHGTVVEGRKIEVNNATARVMTNKKMVTPYANGWKLSPVVGAVYGPELYAASSFQADVSLGNDAAVPLSGRGGINTYIPLISLPLVPGFPYPTAATTAAAFRGAHLRGRGRTVYGAVRAVPPTAIPAYPGVVYQDGFYGADLYGGYAAYRYAQPATATAATAAAAAAAAYSDGYGRVYTADPYHALAPAASYGVGAVASLYRGGYSRFAPY

SEQ ID NO: 59883 - protein, 240 aa, Homo sapiens
ILDVEIIFNERGSKGFGFVTFENSADADRAREKLHGTVVEGRKIEVNNATARVMTNKKMVTPYANGWKLSPVVGAVYGPELYAASSFQADVSLGNDAAVPLSGRGGINTYIPLIIPGFPYPTAATTAAAFRGAHLRGRGRTVYGAVRAVPPTAIPAYPGVVYQDGFYGADLYGGYAAYRYAQPATATAATAAAAAAAAYSDGYGRVYTADPYHALAPAASYGVGAVASLYRGGYSRFAPY

SEQ ID NO: 59884 - protein, 69 aa, Homo sapiens [sequence omitted]

SEQ ID NO: 59885 - protein, 65 aa, Homo sapiens [sequence omitted]

SEQ ID NO: 59886 - protein, 1892 aa, Homo sapiens
KDDIQKMNPPKFSKVEDMAELTCLNEASVLHNLKERYYSGLIYTYSGLFCVVINPYKNLPIYSEEIVEMYKGKKRHEMPPHIYAITDTAYRSMMQDREDQSILCTGESGAGKTENTKKVIQYLAYVASSHKSKKDQGELERQLLQANPILEAFGNAKTVKNDNSSRFGKFIRINFDVNGYIVGANIETYLLEKSRAIRQAKEERTFHIFYYLLSGAGEHLKTDLLLEPYNKYRFLSNGHVTIPGQQDKDMFQETMEAMRIMGIPEEEQMGLLRVISGVLQLGNIVFKKERNTDQASMPDNTAAQKVSHLLGINVTDFTRGILTPRIKVGRDYVQKAQTKEQADFAIEALAKATYERMFRWLVLRINKALDKTKRQGASFIGILDIAGFEIFDLNSFEQLCINYTNEKLQQLFNHTMFILEQEEYQREGIEWNFIDFGLDLQPCIDLIEKPAGPPGILALLDEECWFPKATDKSFVEKVMQEQGTHPKFQKPKQLKDKADFCIIHYAGKVDYKADEWLMKNMDPLNDNIATLLHQSSDKFVSELWKDVDRIIGLDQVAGMSETALPGAFKTRKGMFRTVGQLYKEQLAKLMATLRNTNPNFVRCIIPNHEKKAGKLDPHLVLDQLRCNGVLEGIRICRQGFPNRVVFQEFRQRYEILTPNSIPKGFMDGKQACVLMIKALELDSNLYRIGQSKVFFRAGVLAHLEEERDLKITDVIIGFQACCRGYLARKAFAKRQQQLTAMKVLQRNCAAYLKLRNWQWWRLFTKVKPLLQVSRQEEEMMAKEEELVKVREKQLAAENRLTEMETLQSQLMAEKLQLQEQLQAETELCAEAEELRARLTAKKQELEEICHDLEARVEEEEERCQHLQAEKKKMQQNIQELEEQLEEEESARQKLQLEKVTTEAKLKKLEEEQIILEDQNCKLAKEKKLLEDRIAEFTTNLTEEEEKSKSLAKLKNKHEAMITDLEERLRREEKQRQELEKTRRKLEGDSTDLSDQIAELQAQIAELKMQLAKKEEELQAALARVEEEAAQKNMALKKIRELESQISELQEDLESERASRNKAEKQKRDLGEELEALKTELEDTLDSTAAQQELRSKREQEVNILKKTLEEEAKTHEAQIQEMRQKHSQAVEELAEQLEQTKRVKANLEKAKQTLENERGELANEVKVLLQGKGDSEHKRKKVEAQLQELQVKFNEGERVRTELADKVTKLQVELDNVTGLLSQSDSKSSKLTKDFSALESQLQDTQELLQEENRQKLSLSTKLKQVEDEKNSFREQLEEEEEAKHNLEKQIATLHAQVADMKKKMEDSVGCLETAEEVKRKLQKDLEGLSQRHEEKVAAYDKLEKTKTRLQQELDDLLVDLDHQRQSACNLEKKQKKFDQLLAEEKTISAKYAEERDRAEAEAREKETKALSLARALEEAMEQKAELERLNKQFRTEMEDLMSSKDDVGKSVHELEKSKRALEQQVEEMKTQLEELEDELQATEDAKLRLEVNLQAMKAQFERDLQGRDEQSEEKKKQLVRQVREMEAELEDERKQRSMAVAARKKLEMDLKDLEAHIDSANKNRDEAIKQLRKLQAQMKDCMRELDDTRASREEILAQAKENEKKLKSMEAEMIQLQEELAAAERAKRQAQQERDELADEIANSSGKGALALEEKRRLEARIAQLEEELEEEQGNTELINDRLKKANLQIDQINTDLNLERSHAQKNENARQQLERQNKELKVKLQEMEGTVKSKYKASITALEAKIAQLEEQLDNETKERQAACKQVRRTEKKLKDVLLQVDDERRNAEQYKDQADKASTRLKQLKRQLEEAEEEAQRANASRRKLQRELEDATETADAMNREVSSLKNKLRRGDLPFVVPRRMARKGAGDGSDEEVDGKADGAEAKPAE

SEQ ID NO: 59887 - protein, 38 aa, Homo sapiens
IVSPIVSVVVVTLLGAAASYFKLNNRRNCFRTHEPENV

SEQ ID NO: 59888 - protein, 169 aa, Homo sapiens
IVLTNVTKNIVAFKVRTTAPEKYRVKPSNSSCDPGASVDIVVSPHGGLTVSAQDRFLIMAAEMEQSSGTGPAELTQFWKEVPRNKVMEHRLRCHTVESSKPNTLTLKDNAFNMSDKTSEDICLQLSRLLESNRKLEDQVQRCIWFQQLLLSLTMLLLAFVTSFFYLLYS

SEQ ID NO: 59889 - protein, 376 aa, Homo sapiens
VESKATSARCGLWGSGPRRRPASGMFRGLSSWLGLQQPVAGGGQPNGDAPPEQPSETVAESAEEELQQAGDQELLHQAKDFGNYLFNFASAATKKITESVAETAQTIKKSVEEGKIDGIIDKTIIGDFQKEQKKFVEEQHTKKSEAAVPPWVDTNDEETIQQQILALSADKRNFLRDPPAGVQFNFDFDQMYPVALVMLQEDELLSKMRFALVPKLVKEEVFWRNYFYRVSLIKQSAQLTALAAQQQAAGKEEKSNGREQDLPLAEAVRPKTPPVVIKSQLKTQEDEEEISTSPGVSEFVSDAFDACNLNQEDLRKEMEQLVLDKKQEETAVLEEDSADWEKELQQELQEYEVVTESEKRDENWDKEIEKMLQEEN

SEQ ID NO: 59890 - protein, 8 aa, Homo sapiens
LHLLPQKR

SEQ ID NO: 59891 - protein, 32 aa, Homo sapiens
MQQELMVHTWMVIKLLWKYKKLFLFQMLWIQT

SEQ ID NO: 59892 - protein, 37 aa, Homo sapiens
IHTKDYPHRCEYCKKGFRRPSEKNQHIMRHHKEVGLP

SEQ ID NO: 59893 - protein, 72 aa, Homo sapiens
IEKMRAEDGENYDIKKQAEILQESRMMIPDCQRRLEAAYLDLQQILESEKDLEEAEEYKEARLVLDSVKLEA

SEQ ID NO: 59894 - protein, 277 aa, Homo sapiens
LNKVEERMKELSQDSTGRVKRLPPIVRGGAIDRYWPTADGRLVEYDIDEVVYDEDSPYQNIKILHSKQFGNILILSGDVNLAESDLAYTRAIMGSGKEDYTGKDVLILGGGDGGILCEIVKLKPKMVTMVEIDQMVIDGCKKYMRKTCGDVLDNLKGDCYQVLIEDCIPVLKRYAKEGREFDYVINDLTAVPISTSPEEDSTWEFLRLILDLSMKVLKQDGKYFTQGNCVNLTEALSLYEEQLGRLYCPVEFSKEIVCVPSYLELWVFYTVWKKAKP

SEQ ID NO: 59895 - protein, 252 aa, Homo sapiens
LLLLPLLLFLLPAGAVQGWETEERPRTREEECHFYAGGQVYPGEASRVSVADHSLHLSKAKISKPAPYWEGTAVIDGEFKELKLTDYRGKYLVFFFYPLDFTFVCPTEIIAFGDRLEEFRSINTEVVACSVDSQFTHLAWINTPRRQGGLGPIRIPLLSDLTHQISKDYGVYLEDSGHTLRGLFIIDDKGILRQITLNDLPVGRSVDETLRLVQAFQYTDKHGEVCPAGWKPGSETIIPDPAGKLKYFDKLN

SEQ ID NO: 59896 - protein, 46 aa, Homo sapiens
IAAVNALHGRWFAGKMITAAYVPLPTYHNLFPDSMTATQLLVPSRR

SEQ ID NO: 59897 - protein, 256 aa, Homo sapiens
VDLQAMAPLPGVVQIQGDITQLSTAKEIIQHFKGCPADLVVCDGAPDVTGLHDVDEYMQAQLLLAALNIATHVLKPGGCFVAKIFRGRDVTLLYSQLQVFFSSVLCAKPRSSRNSSIEAFAVCQGYDPPEGFIPDLSKPLLDHSYDPDFNQLDGPTRIIVPFVTCGDLSSYDSDRSYPLDLEGGSEYKYTPPTQPPISPPYQEACTLKRKGQLAKEIRPQDCPISRVDTFPQPLAAPQCHTLLAPEMEDNEMSCSP

SEQ ID NO: 59898 - protein, 17 aa, Homo sapiens
LPPFFMFFPQDLNCHVL

SEQ ID NO: 59899 - protein, 13 aa, Homo sapiens
MSMAMVAWWKGRN

SEQ ID NO: 59900 - protein, 13 aa, Homo sapiens
IVGGRGSALARPN

SEQ ID NO: 59901 - skipped

SEQ ID NO: 59902 - protein, 128 aa, Homo sapiens
LMSILALIFIMGNSAKEALVWKVLGKLGMQPGRQHSIFGDPKKIVTEEFVRRGYLIYKPVPRSSPVEYEFFWGPRAHVESSKLKVMHFVARVRNRCSKDWPCNYDWDSDDDAEVEAILNSGARGYSAP

SEQ ID NO: 59903 - protein, 142 aa, Homo sapiens
LILCVTLALMLQRDSADSEKDGGPQFAEVFVIVWFGAVTITLNSKLLGGNISFFQSLCVLGYCILPLTVAMLICRLVLLADPGPVNFMVRLFVVIVMFAWSIVASTAFLADSQPPNRRALAVYPVFLFYFVISWMILTFTPQ

SEQ ID NO: 59904 - protein, 34 aa, Homo sapiens
IMMKLRHKNKKPGEGSKGHKKISWPYPQVRYACC

SEQ ID NO: 59905 - protein, 21 aa, Homo sapiens
LSDSMMSALDLSGNADDGVGD

SEQ ID NO: 59906 - protein, 42 aa, Homo sapiens
IIIFVPVPQLKSFQKTQVQLVRELKKKFSEAYFLYRSEENSA

SEQ ID NO: 59907 - protein, 51 aa, Homo sapiens
RQQATTVLHILKVSVMLRWEKLSWETLSLLVILAQLQCKSMLFLLSKRKET

SEQ ID NO: 59908 - protein, 9 aa, Homo sapiens
ILRSLLMKN

SEQ ID NO: 59909 - protein, 68 aa, Homo sapiens
IAVKLGTDLEYLKKVRGKVWKQRISSPLFNTKQYTMELERLYLQMWEHYAAGNKPDHMIKPVEVTESA

SEQ ID NO: 59910 - protein, 13 aa, Homo sapiens
MIFFKDGLEMEKC

SEQ ID NO: 59911 - protein, 65 aa, Homo sapiens
KAELMEISEDKTKIRRSPSTALPEVTDEYKNDVKNRSVYIKDFPTDATLEDIKKWLEDKGQVLYI

SEQ ID NO: 59912 - protein, 49 aa, Homo sapiens
LHKAFKGSIFVVFDSIESAKKFVETPGQKYKEIYLLILFKDDYFAKKKK

SEQ ID NO: 59913 - protein, 8 aa, Homo sapiens
LTRSVPGR

SEQ ID NO: 59914 - protein, 17 aa, Homo sapiens
LRSLKRRSNLSRIPAGP

SEQ ID NO: 59915 - protein, 156 aa, Homo sapiens
KDKGKPESEGEAKEGKSEREGESEMEGGSEREGKPEIEGKPESEGEPGSETRAAGKRPAEDDVPRKAKRKTNKGLAHYLKEYKEAIHDMNFSNEDMIREFDNMAKVQDEKRKSKQKLGAFLWMQRNLQDPFYPRGPREFRGGCRAPRRDIEDIPYV

SEQ ID NO: 59916 - skipped

SEQ ID NO: 59917 - protein, 65 aa, Homo sapiens
ILTLFENINDNIKNEGLASSRKEFSRSSLFFLFKESGVCVKKIKALANHNDLVVKVKVLKVLTKL

SEQ ID NO: 59918 - protein, 40 aa, Homo sapiens
LGAFLWMQRNLQDPFYPRGPREFRGGCRAPRRDTEDIPYV

SEQ ID NO: 59919 - protein, 36 aa, Homo sapiens
VVINEKLMNNHQLELAKQLHKEGHLFYCTCSSSLRH

SEQ ID NO: 59920 - protein, 321 aa, Homo sapiens
LARMPNIKIFSGSSHQDLSQKIADRLGLELGKVVTKKFSNQETCVEIGESVRGEDVYIVQSGCGEINDNLMELLIMINACKIASASRVTAVIPCFPYARQDKKDKSRAPISAKLVANMLSVAGADHIITMDLHASQIQGFFDIPVDNLYAEPAVLKWIRENISEWRNCTIVSPDAGGAKRVTSIADRLNVDFALIHKERKKANEVDRMVLVGDVKDRVAILVDDMADTCGTICHAADKLLSAGATRVYAILTHGIFSGPAISRINNACFEAVVVTNTIPQEDKMKHCSKIQVIDISMILAEAIRRTHNGESVSYLFSHVPL

SEQ ID NO: 59921 - protein, 12 aa, Homo sapiens
IKVFVNKRKNVS

SEQ ID NO: 59922 - protein, 51 aa, Homo sapiens
KRICLYQNGYILSPLSYKLTPGVDQSLQPQELRELKKFFKTRKPKPKKPTL

SEQ ID NO: 59923 - protein, 14 aa, Homo sapiens
IFFITYEQLKRLQI

SEQ ID NO: 59924 - protein, 137 aa, Homo sapiens
IKALNRNSDRSIPMTVDFIRLKSYCNDQSTGDIKVIGGDDLSTLTGKNVLIVEDIIDTGKTMQTLLSLVRQYNPKMVKVASLLVKRTPRSVGYKPDFVGFEIPDKFVVGYALDYNEYFRDLNHVCVISETGKAKYKA

SEQ ID NO: 59925 - protein, 8 aa, Homo sapiens
VFQKMIKK

SEQ ID NO: 59926 - protein, 48 aa, Homo sapiens
RIEDLNEGMDFDTMDIDLPPSKNRRERTELKPDFFDPASIMDESVGLI

SEQ ID NO: 59927 - protein, 52 aa, Homo sapiens
INLELYASYVYLSMSYYFDHDDVALKNFAKYFLHQSHEEREHAEELMKLQNQ

SEQ ID NO: 59928 - protein, 43 aa, Homo sapiens
VALPYFWEHFDKDCWSLWYSECRFPEEFTQTFMSCNLITGMFQ

SEQ ID NO: 59929 - protein, 11 aa, Homo sapiens
KKAKEVELVSE

SEQ ID NO: 59930 - protein, 30 aa, Homo sapiens
VEMWPLLTAEQNHLLHLVLQETISPSGQGV

SEQ ID NO: 59931 - protein, 47 aa, Homo sapiens
KNLCSQMSAVSGPLLQWLEDRLEQNQQHLQELQQEKEELMQELSSLE

SEQ ID NO: 59932 - protein, 30 aa, Homo sapiens; identical to SEQ ID NO: 59930

SEQ ID NO: 59933 - protein, 16 aa, Homo sapiens
IISNSAYGKFRKLFPG

SEQ ID NO: 59934 - protein, 26 aa, Homo sapiens
IAGNNDSKAKQVVSKIKEETLNDKET

SEQ ID NO: 59935 - protein, 18 aa, Homo sapiens
MTDPKLITWSPVCRNDVA

SEQ ID NO: 59936 - protein, 33 aa, Homo sapiens
KFSMNPFYEPNSPIRSSAFDRKVQFLGKKHLLS

SEQ ID NO: 59937 - protein, 312 aa, Homo sapiens
IECEIKINHEGEVNRARYMPQNPHIIATKTPSSDVLVFDYTKHPAKPDPSGECNPDLRLRGHQKEGYGLSWNSNLSGHLLSASDDHTVCLWDINAGPKEGKIVDAKAIFTGHSAVVEDVAWHLLHESLFGSVADDQKLMIWDTRSNTTSKPSHLVDAHTAEVNCLSFNPYSEFILATGSADKTVALWDLRNLKLKLHTFESHKDEIFQVHWSPHNETILASSGTDRRLNVWDLSKIGEEQSAEDAEDGPPELLFIHGGHTAKISDFSWNPNEPWVICSVSEDNIMQIWQMAENIYNDEESDVTTSELEGQGS

SEQ ID NO: 59938 - protein, 474 aa, Homo sapiens
KSEGANGTVATAAIQPKKVKGVGFGDIFKDKPIKLRPRSIEVENDFLPVEKTIGKKLPATTATPDSSKTEMDSRTKSKDYCKVIFPYEAQNDDELTIKEGDIVTLINKDCIDVGWWEGELNGRRGVFPDNFVKLLPPDFEKEGNRPKKPPPPSAPVIKQGAGTTERKHEIKKIPPERPEMLPNRTEEKERPEREPKLDLQKPSVPAIPPKKPRPPKTNSLSRPGALPPRRPERPVGPLTHTRGDSPKIDLAGSSLSGILDKDLSDRSNDIDLEGFDSVVSSTEKLSHPTTSRPKATGRRPPSQSLTSSSLSSPDIFDSPSPEEDKEEHISLAHRGVDASKKTSKTVTISQVSDNKASLPPKPGTMAAGGGGPAPLSSAAPSPLSSSLGTAGHRANSPSLFGTEGKPKMEPAASSQAAVEELRTQVRELRSIIETMKDQQKREIKQLLSELDEEKKIRLRLQMEVNDIKKALQSK

SEQ ID NO: 59939 - protein, 5 aa, Homo sapiens
IKMNT

SEQ ID NO: 59940 - protein, 289 aa, Homo sapiens
IIDKSKRDPTEEIEILLRYGQHPNIITLKDVYDDGKYVYVVTELMKGGELLDKILRQKFFSEREASAVLFTITKTVEYLHAQGVVHRDLKPSNILYVDESGNPESIRICDFGFAKQLRAENGLLMTPCYTANFVAPEVLKRQGYDAACDIWSLGVLLYTMLTGYTPFANGPDDTPEEILARIGSGKFSLSGGYWNSVSDTAKDLVSKMLHVDPHQRLTAALVLRHPWIVHWDQLPQYQLNRQDAPHLVKGAMAATYSALNRNQSPVLEPVGRSTLAQRRGIKKITSTAL

SEQ ID NO: 59941 - protein, 197 aa, Homo sapiens
VPSQADVAVFEAVSSPLPADLCHALRWYNHIKSYEKEKASLPGVKKALGKYGPADVEDTTGSGATDSKDDDDIDLFGSDDEEESEEAKRLREERLAQYESKKAKKPALVAKSSILLDVKPWDDETDMAKLEERVRSIQADGLVWGSSKLVPVGYGIKKLQIQCVVEDDKVGTDMLEEQITAFEDYVQSMDVAAFNKI

SEQ ID NO: 59942 - protein, 206 aa, Homo sapiens
RSGSRLSGPAWRPRLRRGGRQRRPGMASAGSGMEEVRVSVLTPLKLVGLVCIFLALCLDLGAVLSPAWVTADHQYYLSLWESCRKPASLDIWHCESTLSSDWQIATLALLLGGAAIILIAFLVGLISICVGSRRRFYRPVAVMLFAAVVLQVCSLVLYPIKFIETVSLKIYHEFNWGYGLAWGATIFSFGGAILYCLNPKNYEDYY

SEQ ID NO: 59943 - protein, 36 aa, Homo sapiens
LEQHLFTKLQLKLMRMMSPSLYRFFTILLCQLLIPN

SEQ ID NO: 59944 - protein, 44 aa, Homo sapiens
IGLRLKSIDNGIFVQLVQANSPASLVGLRIEDQVLQINSENCAG

SEQ ID NO: 59945 - protein, 47 aa, Homo sapiens
VDSTLGFLPWHIRLTEIVSLPSHLNISYEDFFSALRQYAACEQRLGK

SEQ ID NO: 59946 - protein, 10 aa, Homo sapiens
MAPSSPDSDP

SEQ ID NO: 59947 - protein, 47 aa, Homo sapiens
IDDEDNPVDEYQIFKAIFQTIQNRNPVWYQALTHTVLMKNKENSYKT

SEQ ID NO: 59948 - protein, 419 aa, Homo sapiens
VFNLSNAIMGSGILGLAYAMAHTGVIFFLALLLCIALLSSYSIHLLLTCAGIAGIRAYEQLGQRAFGPAGKVVVATVICLHNVGAMSSYLFIIKSELPLVIGTFLYMDPEGDWFLKGNLLIIIVSVLIILPLALMKHLGYLGYTSGLSLTCMLFFLVSVIYKKFQLGCAIGHNETAMESEALVGLPSQGLNSSCEAQMFTVDSQMSYTVPIMAFAFVCHPEVLPIYTELCRPSKRRMQAVANVSIGAMFCMYGLTATFGYLTFYSSVKAEMLHMYSQKDPLILCVRLAVLLAVTLTVPVVLFPIRRALQQLLFPGKAFSWPRHVAIALILLVLVNVLVICVPTIRDIFGVIGSTSAPSLIFILPSIFYLRIVPSEVEPFLSWPKIQALCFGVLGVLFMAVSLGFMFANWATGQSRMSGH

SEQ ID NO: 59949 - protein, 9 aa, Homo sapiens
IAVIIQSTA

SEQ ID NO: 59950 - protein, 42 aa, Homo sapiens
ILLTRYTAQQFRNAPPFLEDPSQLPPKDGTPAPGYPSYQQYH

SEQ ID NO: 59951 - protein, 46 aa, Homo sapiens
MSPSAFGLNDWDDDEILASVLAVSQQEYLDSMKKNKVHRDPPPDKS

SEQ ID NO: 59952 - protein, 37 aa, Homo sapiens
ILPKEQWTKYEEENFYLELYVQEVIRERKEREEWAKK

SEQ ID NO: 59953 - protein, 32 aa, Homo sapiens
MIQYNNLNLKTPVPSDIDISRSCKPKPIGKLA

SEQ ID NO: 59954 - protein, 36 aa, Homo sapiens
INYNCVAPGKRFRPMDNLSGGEKTVAALALLFAIHR

SEQ ID NO: 59955 - protein, 254 aa, Homo sapiens
VKGLVAVITGGASGLGLATAERLVGQGASAVLLDLPNSGGEAQAKKLGNNCVFAPADVTSEKDVQTALALAKGKFGRVDVAVNCAGIAVASKTYNLKKGQTHTLEDFQRVLDVNLMGTFNVIRLVAGEMGQNEPDQGGQRGVIINTASVAAFEGQVGQAAYSASKGGIVGMTLPIARDLAPIGIRVMTIAPGLFGTPLLTSLPEKVCNFLASQVPFPSRLGDPAEYAHLVQAIIENPFLNGEVIRLDGAIRMQP

SEQ ID NO: 59956 - protein, 131 aa, Homo sapiens
IDIFNPQTVGVGRARFTTYEVRMRTNLPIFKLKESCVRRRYSDFEWLKNELERDSKIVVPPLPGKALKRQLPFRGDEGIFEESFIEERRQGLEQFINKIAGHPLAQNERCLHMFLQEEAIDRNYVPGKVRQ

SEQ ID NO: 59957 - protein, 51 aa, Homo sapiens
LEIDNSELLHMLKSPESLHSKVDEAVAVLQAHQAKETAQKAVNSATGVPTV

SEQ ID NO: 59958 - protein, 28 aa, Homo sapiens
RAINNKQLFGRVIKASIAIDNGRAAVFI

SEQ ID NO: 59959 - protein, 212 aa, Homo sapiens
ILLAVGIWGKVSLENYFSLLNEKATNVPFVLIATGTVIILLGTFGCFATCRASAWMLKLYAMFLTLVFLVELVAAIVGFVFRHEIKNSFKNNYEKALKQYNSTGDYRSHAVDKIQNTLHCCGVTDYRDWTDTNYYSEKGFPKSCCKLEDCTPQRDADKVNNEGCFIKVMTIIESEMGVVAGISFGVACFQLIGIFLAYCLSRAITNNQYEIV

SEQ ID NO: 59960 - protein, 464 aa, Homo sapiens
IKDEPPPLSPAPLTPATPSSLDPFFSREPSSMHISSSLPPDTQKFLRFAETHRTVLNQILRQSTTHLADGPFAVLVDYIRVLDFDVKRKYFRQELERLDEGLRKEDMAVHVRRDHVFEDSYRELHRKSPEEMKNRLYIVFEGEEGQDAGGLLREWYMIISREMFNPMYALFRTSPGDRVTYTINPSSHCNPNHLSYFKFVGRIVAKAVYDNRLLECYFTRSFYKHILGKSVRYTDMESEDYHFYQGLVYLLENDVSTLGYDLTFSTEVQEFGVCEVRDLKPNGANILVTEENKKEYVHLVCQMRMTGAIRKQLAAFLEGFYEIIPKRLISIFTEQELELLISGLPTIDIDDLKSNTEYHKYQSNSIQIQWFWRALRSFDQADRAKFLQFVTGTSKVPLQGFAALEGMNGIQKFQIHRDDRSTDRLPSAHTCFNQLDLPAYESFEKLRHMLLLAIQECSEGFGLA

SEQ ID NO: 59961 - protein, 19 aa, Homo sapiens
ISGEFGLDNFDSQFTNEPV

SEQ ID NO: 59962 - protein, 598 aa, Homo sapiens
KKRMAKPKNRAVAGTGARARAGLRAGFTIDLGSGFSPPTPVRAEAEDRAQDEASALDTVGAEAVAPAASSAEAQSGAGSQAQEADGAGVGPKAESVVGAAMASAIAPPPGVTEALGAAEAPAMAGAPKVAEAPREAETSRAAVPPGTVVPTEAAAPTEVTEGPGVAAPTKVAEAPGVASPTEAAEAPVPATPTGAAAPTGAAESPGTSGSPRTAVVPGTSAAKKATPGAHTGAIPKATSATGAVPKGGGKGVTRSRNGGKGKGKKSKVEVDELGMGFRPGDGAAAAAAASANGGQAFLAEVPDSEEGESGWTDTESDSDSEPETQRRGRGRRPVAMQKRPFPYEIDEILGVRDLRKVLALLQKSDDPFIQQVALLTLSNNANYSCNQETIRKLGGLPIIANMINKTDPHIKEKALMAMNNLSENYENQGRLQVYMNKVMDDIMASNLNSAVQVVGLKFLTNMTITNDYQHLLVNSIANFFRLLSQGGGKIKVEILKILSNFAENPDMLKKLLSTQVPASFSSLYNSYVESEILINALTLFEIIYDNLRAEVFNYREFNKGSLFYLCTTSGVCVKKIRALANHHDLLVKVKVIKLVNKF

SEQ ID NO: 59963 - protein, 25 aa, Homo sapiens
MSKYQSNPKVMNLISKLSAKFGGQA

SEQ ID NO: 59964 - protein, 62 aa, Homo sapiens
IKRHTPLSKLMKAYCERQGLSVRQIRFRFDGQPINETDTPAQLEMEDEDTIDVFQQQTGGVY

SEQ ID NO: 59965 - protein, 47 aa, Homo sapiens
LFSQILRGEDIVRERAIKFLSTKLKTLPDEVLTKEVKELILTESKMS

SEQ ID NO: 59966 - protein, 17 aa, Homo sapiens
LKSQKIFVFFLREKEDI

SEQ ID NO: 59967 - protein, 753 aa, Homo sapiens
IELPWLYCYSYCCFYYCLLQHNKAFKSQRITRNKHHFRSLSTMKLKLNVLTIILLPVHLLITIYSALIFIPWYFLTNAKKKNAMAKRIKAKPTSDKPGSPYRSVTHFDSLAVIDIPGADTLDKLFDHAVSKFGKKDSLGTREILSEENEMQPNGKVFKKLILGNYKWMNYLEVNRRVNNFGSGLTALGLKPKNTIAIFCETRAEWMIAAQTCFKYNFPLVTLYATLGKEAVVHGLNESEASYLITSVELLESKLKTALLDISCVKHIIYVDNKAINKAEYPEGFEIHSMQSVEELGSNPENLGIPPSRPTPSDMAIVMYTSGSTGRPKGVMMHHSNLIAGMTGQCERIPGLGPKDTYIGYLPLAHVLELTAEISCFTYGCRIGYSSPLTLSDQSSKIKKGSKGDCTVLKPTLMAAVPEIMDRIYKNVMSKVQEMNYIQKTLFKIGYDYKLEQIKKGYDAPLCNLLLFKKVKALLGGNVRMMLSGGAPLSPQTHRFMNVCFCCPIGQGYGLTESCGAGTVTEVTDYTTGRVGAPLICCEIKLKDWQEGGYTINDKPNPRGEIVIGGQNISMGYFKNEEKTAEDYSVDENGQRWFCTGDIGEFHPDGCLQIIDRKKDLVKLQAGEYVSLGKVEAALKNCPLIDNICAFAKSDQSYVISFVVPNQKRLTLLAQQKGVEGTWVDICNNPAMEAEILKEIREAANAMKLERFEIPIKVRLSPEPWTPETGLVTDAFKLKRKELRNHYLKDIERMYGGK

SEQ ID NO: 59968 - protein, 87 aa, Homo sapiens
IPFPETFDGDTDRLPEFIVQTSSYMFVDENTFSNDALKVTFLITRLTGPALQWVIPYIKKESPLLSDYRGFLAEMKRVFGWEEDEDF

SEQ ID NO: 59969 - protein, 132 aa, Homo sapiens
IMAPSLWKGLVGIGLFALAHAAFSAAQHRSYMRLTEKEDESLPIDIVLQTLLAFAVTCYGIVHIAGEFKDMDATSELKNKTFDTLRNHPSFYVFNHRGRVLFRPSDTANSSNQDALSSNTSLKLRKLESLRR

SEQ ID NO: 59970 - protein, 70 aa, Homo sapiens
KLFIGGLNTETNEKALEAVFGKYGRIVEVLLMKDRETNKSRGFAFVTFESPADAKDAARDMNGKMTVDIP

SEQ ID NO: 59971 - protein, 248 aa, Homo sapiens
RGPLPVKRGPPPRSGGPPPKRSAPSGPVRSSSGMGGRAPVSRGRDSYGGPPRREPLPSRRDVYLSPRDDGYSTKDSYSSRDYPSSRDTRDYAPPPRDYTYRDYGHSSSRDDYPSRGYSDRDGYGRDRDYSDHPSGGSYRDSYESYGNSRSAPPTRGPPPSYGGSSRYDDYSSSRDGYGGSRDSYSSSRSDLYSSGRDRVGRQERGLPPSMERGYPPPRDSYSSSSRGAPRGGGRGGSRSDRGGGRSRY

SEQ ID NO: 59972 - protein, 5 aa, Homo sapiens
ISGCL

SEQ ID NO: 59973 - protein, 998 aa, Homo sapiens
KEKNVSSFQLKLAAKAPKSEKEMDPEYEEKMKADRAKRFEFLLKQTELFAHFIQPSAQKSPTSPLNMKLGRPRIKKDEKQSLISAGDYRHRRTEQEEDEELLSESRKTSNVCIRFEVSPSYVKGGPLRDYQIRGLNWLISLYENGVNGILADEMGLGKTLQTIALLGYLKHYRNIPGPHMVLVPKSTLHNWMNEFKRWVPSLRVICFVGDKDARAAFIRDEMMPGEWDVCVTSYEMVIKEKSVFKKFHWRYLVIDEAHRIKNEKSKLSEIVREFKSTNRLLLTGTPLQNNLHELWALLNFLLPDVFNSADDFDSWFDTKNCLGDQKLVERLHAVLKPFLLRRIKTDVEKSLPPKKEIKIYLGLSKMQREWYTKILMKDIDVLNSSGKMDKMRLLNILMQLRKCCNHPYLFDGAEPGPPYTTDEHIVSNSGKMVVLDKLLAKLKEQGSRVLIFSQMTRLLDILEDYCMWRGYEYCRLDGQTPHEEREDKFLEVEFLGQREAIEAFNAPNSSKFIFMLSTRAGGLGINLASADVVILYDSDWNPQVDLQAMDRAHRIGQKKPVRVFRLITDNTVEERIVERAEIKLRLDSIVIQQGRLIDQQSNKLAKEEMLQMIRHGATHVFASKESELTDEDITTILERGEKKTAEMNERLQKMGESSLRNFRMDIEQSLYKFEGEDYREKQKLGMVEWIEPPKRERKANYAVDAYFREALRVSEPKIPKAPRPPKQPNVQDFQFFPPRLFELLEKEILYYRKTIGYKVPRNPDIPNPALAQREEQKKIDGAEPLTPEETEEKEKLLTQGFTNWTKRDFNQFIKANEKYGRDDIDNIAREVEGKSPEEVMEYSAVFWERCNELQDIEKIMAQIERGEARIQRRISIKKALDAKIARYKAPFHQLRIQYGTSKGKNYTEEEDRFLICMLHKMGFDRENVYEELRQCVRNAPQFRFDWFIKSRTAMEFQRRCNTLISLIEKENMEIEERERAEKKKRATKTPMVKFSAFS

SEQ ID NO: 59974 - protein, 239 aa, Homo sapiens
IKNFQINNQIVKLKYCYTCKIFRPPRASHCSICDNCVERFDHHCPWVGNCVGKRNYRYFYLFILSLSLLTIYVFAFNIVYVALKSLKIGFLETLKETPGTVLEVLICFFTLWSVVGLTGFHTFLVALNQTTNEDIKGSWTGKNRVQNPYSHGNIVKNCCEVLCGPLPPSVLDRRGILPLEESGSRPPSTQETSSSLLPQSPAPTEHLNSNEMPEDSSTPEEMPPPEPPEPPQEAAEAEK

SEQ ID NO: 59975 - protein, 34 aa, Homo sapiens
ISKIISSDRDLLAVVFYGTEKDKNSVNFKNIYVL

SEQ ID NO: 59976 - protein, 5 aa, Homo sapiens
MRQTW

SEQ ID NO: 59977 - protein, 23 aa, Homo sapiens
IERLASRFLHPEVTETMEKGFSK

SEQ ID NO: 59978 - protein, 5 aa, Homo sapiens
LFPVP

SEQ ID NO: 59979 - protein, 19 aa, Homo sapiens
ILASFREMVYRKTKGKDDK

SEQ ID NO: 59980 - protein, 431 aa, Homo sapiens
LVLQLLLYRRRRRRRRLLCGVMVCFRLFPVPGSGLVLVCLVLGAVRSYALELNLTDSENATCLYAKWQMNFTVRYETTNKTYKTVTISDHGTVTYNGSICGDDQNGPKIAVQFGPGFSWIANFTKAASTYSIDSVSFSYNTGDNTTFPDAEDKGILTVDELLAIRIPLNDLFRCNSLSTLEKNDVVQHYWDVLVQAFVQNGTVSTNEFLCDKDKTSTVAPTIHTTVPSPTTTPTPKEKPEAGTYSVNNGNDTCLLATMGLQLNITQDKVASVININPNTTHSTGSCRSHTALLRLNSSTIKYLDFVFAVKNENRFYLKEVNISMYLVNGSVFSIANNNLSYWDAPLGSSYMCNKEQTVSVSGAFQINTFDLRVQPFNVTQGKYSTAQECSLDDDTILIPIIVGAGLSGLIIVIVIAYVIGRRKSYAGYQTL

SEQ ID NO: 59981 - protein, 431 aa, Homo sapiens
LVLQLLLYRRRRRRRRLLCGVMVCFRLFPVPGSGLVLVCLVLGAVRSYALELNLTDSENATCLYAKWQMNFTVRYETTNKTYKTVTISDHGTVTYNGSICGDDQNGPKIAVQFGPGFSWIANFTKAASTYSIDSVSFSYNTGDNTTFPDAEDKGILTVDELLAIRIPLNDLFRCNSLSTLEKNDVVQHYWDVLVQAFVQNGTVSTNEFLCDKDKTSTVAPTIHTTVPSPTTTPTPKEKPEAGTYSVNNGNDTCLLATMGLQLNITQDKVASVININPNTTHSTGSCRSHTALLRLNSSTIKYLDFVFAVKNENRFYLKEVNISMYLVNGSVFSIANNNLSYWDAPLGSSYMCNKEQTVSVSGAFQINTFDLRVQPFNVTQGKYSTAQDCSADDDNFLVPIAVGAALAGVLILVLLAYFIGLKHHHAGYEQF

SEQ ID NO: 59982 - protein, 807 aa, Homo sapiens
VAASSHVPIQKKLRFEDTLEFVGFDAKMAEESSSSSSSSSPTAATSQQQQLKNKSILISSVASVHHANGLAKSSTTVSSFANSKPGSAKKLVIKNFKDKPKLPENYTDETWQKLKEAVEAIQNSTSIKYNLEELYQAVENLCSYKISANLYKQLRQICEDHIKAQIHQFREDSLDSVLFLKKIDRCWQNHCRQMIMIRSIFLFLDRTYVLQNSMLPSIWDMGLELFRAHIISDQKVQNKTIDGILLLIERERNGEAIDRSLLRSLLSMLSDLQIYQDSFEQRFLEETNRLYAAEGQKLMQEREVPEYLHHVNKRLEEEADRLITYLDQTTQKSLIATVEKQLLGEHLTAILQKGLNNLLDENRIQDLSLLYQLFSRVRGGVQVLLQQWIEYIKAFGSTIVINPEKDKTMVQELLDFKDKVDHIIDICFLKNEKFINAMKEAFETFINKRPNKPAELIAKYVDSKLRAGNKEATDEELEKMLDKIMIIFRFIYGKDVFEAFYKKDLAKRLLVGKSASVDAEKSMLSKLKHECGAAFTSKLEGMFKDMELSKDIMIQFKQYMQNQNVPGNIELTVNILTMGYWPTYVPMEVHLPPEMVKLQEIFKTFYLGKHSGRKLQWQSTLGHCVLKAEFKEGKKELQVSLFQTLVLLMFNEGEEFSLEEIKQATGIEDGELRRTLQSLACGKARVLAKNPKGKDIEDGDKFICNDDFKHKLFRIKINQIQMKETVEEQASTTERVFQDRQYQIDAAIVRIMKMRKTLSHNLLVSEVYNQLKFPVKPADLKKRIESLIDRDYMERDKENPNQYNYIA

SEQ ID NO: 59983 - protein, 298 aa, Homo sapiens
LITMLGHIRIGHGNRMHHHEHHHLQAPNKEDILKISEDERMELSKSFRVYCIILVKPKDVSLWAAVKETWTKHCDKAEFFSSENVKVFESINMDTNDMWLMMRKAYKYAFDKYRDQYNWFFLARPTTFAIIENLKYFLLKKDPSQPFYLGHTIKSGDLEYVGMEGGIVLSVESMKRLNSLLNIPEKCPEQGGMIWKISEDKQLAVCLKYAGVFAENAEDADGKDVFNTKSVGLSIKEAMTYHPNQVVEGCCSDMAVTFNGLTPNQMHVMMYGVYRLRAFGHIFNDALVFLPPNGSDND

SEQ ID NO: 59984 - protein, 30 aa, Homo sapiens; identical to SEQ ID NO: 59930

SEQ ID NO: 59985 - protein, 483 aa, Homo sapiens
IFIIMGASGDLAKKKIYPTIWWLFRDGLLPENTFIVGYARSRLTVADIRKQSEPFFKATPEEKLKLEDFFARNSYVAGQYDDAASYQRLNSHMNALHLGSQANRLFYLALPPTVYEAVTKNIHESCMSQIGWNRIIVEKPFGRDLQSSDRLSNHISSLFREDQIYRIDHYLGKEMVQNLMVLRFANRIFGPIWNRDNIACVILTFKEPFGTEGRGGYFDEFGIIRDVMQNHLLQMLCLVAMEKPASTNSDDVRDEKVKVLKCISEVQANNVVLGQYVGNPDGEGEATKGYLDDPTVPRGSTTATFAAVVLYVENERWDGVPFILRCGKALNERKAEVRLQFHDVAGDIFHQQCKRNELVIRVQPNEAVYTKMMTKKPGMFFNPEESELDLTYGNRYKNVKLPDAYERLILDVFCGSQMHFVRSDELREAWRIFTPLLHQIELEKPKPIPYIYGSRGPTEADELMKRVGFQYEGTYKWVNPHKL

SEQ ID NO: 59986 - protein, 5 aa, Homo sapiens
IQIFV

SEQ ID NO: 59987 - protein, 166 aa, Homo sapiens
IFSFISKDVVSKLRIMERLRGGPQSEHYRSLQAMVAHELSNRLVDLERRSHHPESGCRTVLRLHRALHWLQLFLEGLRTSPEDARTSALCADSYNASLAAYHPWVVRRAVTVAFCTLPTREVFLEAMNVGPPEQAVQMLGEALPFIQRVYNVSQKLYAEHSLLDLP

SEQ ID NO: 59988 - protein, 17 aa, Homo sapiens
IDSILGNKPYSKKDYRS

SEQ ID NO: 59989 - protein, 276 aa, Homo sapiens
VEDFNKFCTFVLAYAGYIPYPKEELPLRSSPSPANSTAGTIDSDGWDAGFSDIASSVPLPVSDRCFSHLQPTLLQRAKPSNFLLDRKKTDKLKKKKKRKRRDSDAPGKEGYRGGLLKLEAADPYVETPTSPTLQDIPQAPSDPCSGWDSDTPSSGSCATVSPDQVKEIKTEGKRTIVRQGKQVVFRDEDSTGNDEDIMVDSDDDSWDLVTCFCMKPFAGRPMIECNECHTWIHLSCAKIRKSNVPEVFVCQKCRDSKFDIRRSNRSRTGSRKLFLD

SEQ ID NO: 59990 - protein, 28 aa, Homo sapiens
RRRMWRAEGKWLPKTSRKMIMGTAIVVM

SEQ ID NO: 59991 - protein, 606 aa, Homo sapiens
LPQILNSVLRDFSLQQINAVCDELHIYCSRCTADQLEILKVMGILPFSAPSCGLITKTDAERLCNALLYGGAYPPPCKKELAASLALGLELSERSVRVYHECFGKCKGLLVPELYSSPSAACIQCLDCRLMYPPHKFVVHSHKALENRTCHWGFDSANWRAYILLSQDYTGKEEQARLGRCLDDVKEKFDYGNKYKRRVPRVSSEPPASIRPKTDDTSSQSPAPSEKDKPSSWLRTLAGSSNKSLGCVHPRQRLSAFRPWSPAVSASEKELSPHLPALIRDSFYSYKSFETAVAPNVALAPPAQQKVVSSPPCAAAVSRAPEPLATCTQPRKRKLTVDTPGAPETLAPVAAPEEDKDSEAEVEVESREEFTSSLSSLSSPSFTSSSSAKDLGSPGARALPSAVPDAAAPADAPSGLEAELEHLRQALEGGLDTKEAKEKFLHEVVKMRVKQEEKLSAALQAKRSLHQELEFLRVAKKEKLREATEAKRNLRKEIERLRAENEKKMKEANESRLRLKRELEQARQARVCDKGCEAGRLRAKYSAQIEDLQVKLQHAEADREQLRADLLREREAREHLEKVVKELQEQLWPRARPEAAGSEGAAELEP

SEQ ID NO: 59992 - protein, 154 aa, Homo sapiens
KEFSRKQIKDMEKMFKQYDAGRDGFIDLMELKLMMEKLGAPQTHLGLKNMIKEVDEDFDSKLSFREFLLIFRKAAAGELQEDSGLCVLARLSEIDVSSEGVKGAKSFFEAKVQAINVSSRFEEEIKAEQEERKKQAEEMKQRKAAFKELQSTFK

SEQ ID NO: 59993 - protein, 17 aa, Homo sapiens
LEGSLQRFYIPSWPELD

SEQ ID NO: 59994 - protein, 306 aa, Homo sapiens
IDFSSIAVPGTSSPRQRQPPGTQQSHSSPGEITSSPQGLDNPALLRDMLLANPHELSLLKERNPPLAEALLSGDLEKFSRVLVEQQQDRARREQERIRLFSADPFDLEAQAKIEEDIRQQNIEENMTIAMEEAPESFGQVVMLYINCKVNGHPVKAFVDSGAQMTIMSQACAERCNIMRLVDRRWAGIAKGVGTQKIIGRVHLAQVQIEGDFLPCSFSILEEQPMDMLLGLDMLKRHQCSIDLKKNVLVIGTTGSQTTFLPEGELPECARLAYGAGREDVRPEEIADQELAEALQKSAEDAERQKP

SEQ ID NO: 59995 - protein, 395 aa, Homo sapiens
ICSFLAGVRQGRVIIATPGAEAMASKPEKRVASSVFITLAPPRRDVAVAEEVRQAVCEARRGRPWEAPAPMKTPEAGLAGRPSPWTTPGRAAATVPAAPMQLFNGGCPPPPPVLDGEDVLPDLDLLPPPPPPPPVLLPSEEEAPAPMGASLIADLEQLHLSPPPPPPQAPAEGPSVQPGPLRPMEEELPPPPAEPVEKGASTDICAFCHKTVSPRELAVEAMKRQYHAQCFTCRTCRRQLAGQSFYQKDGRPLCEPCYQDTLERCGKCGEVVRDHIIRALGQAFHPSCFTCVTCARCIGDESFALGSQNEVYCLDDFYRKFAPVCSICENPIIPRDGKDAFKIECMGRNFHENCYRCEDCRILLSVEPTDQGCYPLNNHLFCKPCHVKRSAAGCC

SEQ ID NO: 59996 - protein, 79 aa, Homo sapiens
IWDVLGECAQDGWDEASVGLGLISILCFAASTFPQFIKAYKTGNMDQALSLWFLLGWIGGDSCNLIGSFLADQLPLQTW

SEQ ID NO: 59997 - protein, 105 aa, Homo sapiens
IGSISSVLYLLSRLPQIRTNFLRKSTQGISYSLFALVMLGNTLYGLSVLLKNPEEGQSEGSYLLHHLPWLVGSLGVLLLDTIISIQFLVYRRSTAASELEPLLPS

SEQ ID NO: 59998 - protein, 21 aa, Homo sapiens
IQFLVYRRSTAASELEPLLPS

SEQ ID NO: 59999 - skipped

SEQ ID NO: 60000 - protein, 28 aa, Homo sapiens
ILAPCSHALVPGRTLASALRRIGTSVNI

SEQ ID NO: 60001 - protein, 654 aa, Homo sapiens
TGSRSYSPDHRQKKHRKLSELERPHKVSHGHERRDERKRCHRMSPTYSSDPESSDYGHVQSPPSCTSPHQMYVDHYRSLEEDQEPIVSHQKPGKGHSNAFQDRLGASQERHLGEPHGKGVVSQNKEHKSSHKDKRPVDAKSDEKASVVSREKSHKALSKEENRRPPSGDNAREKPPSSGVKKEKDREGSSLKKKCLPPSEAASDNHLKKPKHRDPEKAKLDKSKQGLDSFDTGKGAGDLLPKVKEKGSNNLKTPEGKVKTNLDRKSLGSLPKVEETDMEDEFEQPTMSFESYLSYDQPRKKKKKIVKTSATALGDKGLKKNDSKSTGKNLDSVQKLPKVNKTKSEKPAGADLAKLRKVPDVLPVLPDLPLPAIQANYRPLPSLELISSFQPKRKAFSSPQEEEEAGFTGRRMNSKMQVYSGSKCAYLPKMMTLHQQCIRVLKNNIDSIFEVGGVPYSVLEPVLERCTPDQLYRIEEYNHVLIEETDQLWKVHCHRDFKEERPEEYESWREMYLRLQDAREQRLRVLTKNIQFAHANKPKGRQAKMAFVNSVAKPPRDVRRRQEKFGTGGAAVPEKIKIKPAPYPMGSSHASASSISFNPSPEEPAYDGPSTSSAHLAPVVSSTVSYDPRKPTVKKIAPMMAKTIKAFKNRFSRR

SEQ ID NO: 60002 - protein, 64 aa, Homo sapiens
ILQCHGELDPMVPVRFGALTAEKLRSVVTPARVQFKTYPGVMHSSCPQEMAAVKEFLEKLLPPV

SEQ ID NO: 60003 - protein, 55 aa, Homo sapiens
KPEPKPKKAPAKKGEKVPKGKKGKADAGKEGNNPAENGDAKTDQAQKAEGAGDAK

SEQ ID NO: 60004 - protein, 655 aa, Homo sapiens
KLRRPLKRNRITEGIYGSTFLYLKFLVVWALVLLADFVLEFRFEYLWPFWLFIRSVYDSFRYQGLAFSVFFVCVAFTSNIICLLFIPIQWLFFAASTYVWVQYVWHTERGVCLPTVSLWILFVYIEAAIRFKDLKNFHVDLCRPFAAHCIGYPVVTLGFGFKSYVSYKMRLRKQKEVQKENEFYMQLLQQALPPEQQMLQKQEKEAEEAAKGLPDMDSSILIHHNGGIPANKKLSTTLPEIEYREKGKEKDKDAKKHNLGINNNNILQPVDSKIQEIEYMENHINSKRLNNDLVGSTENLLKEDSCTASSKNYKNASGVVNSSPRSHSATNGSIPSSSSKNEKKQKCTSKSPSTHKDLMENCIPNNQLSKPDALVRLEQDIKKLKADLQASRQVEQELRSQISSLSSTERGIRSEMGQLRQENELLQNKLHNAVQMKQKDKQNISQLEKKLKAEQEARSFVEKQLMEEKKRKKLEEATAARAVAFAAASRGECTETLRNRIRELEAEGKKLTMDMKVKEDQIRELELKVQELRKYKENEKDTEVLMSALSAMQDKTQHLENSLSAETRIKLDLFSALGDAKRQLEIAQGQILQKDQEIKDLKQKIAEVMAVMPSITYSAATSPLSPVSPHYSSKFVETSPSGLDPNASVYQPLKK

SEQ ID NO: 60005 - protein, 395 aa, Homo sapiens
LLGALLAAAAAAAVRVCARHAEAQAAARQELALKTLGTDGLFLFSSLDTDGDMYISPEEFKPIAEKLTGSTPAASCEEEELPPDPSEETLTIEARFQPLLPETMTKSKDGFLGVSRLALSGLRNWTAAASPSAVFATRHFQPFLPPPGQELGEPWWIIPSELSMFTGYLSNNRFYPPPPKGKEVIIHRLLSMFHPRPFVKTRFAPQGAVACLTAISDFYYTVMFRIHAEFQLSEPPDFPFWFSPAQFTGHIILSKDATHVRDFRLFVPNHRSLNVDMEWLYGASESSNMEVDIGYIPQMELEATGPSVPSVILDEDGSMIDSHLPSGEPLQFVFEEIKWQQELSWEEAARRLEVAMYPFKKVSYLPFTEAFDRAKAENKLVHSILLWGALDDQSC

SEQ ID NO: 60006 - protein, 110 aa, Homo sapiens
LLNESFISTWSLVKELEELQNNQENSSHQKLAGLHLEKYSFPVEMMICLPNGTVVHHINANYFLDITSVKPEEIESNLFSFSSTFEDPSTATYMQFLKEGLRRGLPLLQP

SEQ ID NO: 60007 - protein, 80 aa, Homo sapiens
VRESGSPSLRWPDMKESRLPPPGAAQWLPCPSSAGAGSNVRNGSHCDHPNLAKQATWGCSKCSKKNWDQPTLEAVCPGVL

SEQ ID NO: 60008 - protein, 248 aa, Homo sapiens
LPNISDLCLRDVPPVPTLADIAWIAADEEETYARVRSDTRPLRHTWKPSPLIVMQRNASVPNLRGSEERLLALKKPALPALSRTTELQDELSHLRSQIAKIVAADAASASLTPDFLSPGSSNVSSPLPCFGSSFHSTTSFVISDITEETEVEVPELPSVPLLCSASPECCKPEHKAACSSSEEDDCVSLSKASSFADMMGILKDFHRMKQSQDLNRSLLKEEDPAVLISEVLRRKFALKEEDISRKGN

SEQ ID NO: 60009 - protein, 42 aa, Homo sapiens
LENNDNISEIYAPATLPVMQEEHGSRSASGVPYRVLEHTKKE

SEQ ID NO: 60010 - protein, 52 aa, Homo sapiens
ISFSKSSKAKAQAITSCNSTTQNSAFPYTPAVKPYKKKSCFCVSRENFSDKT

SEQ ID NO: 60011 - protein, 37 aa, Homo sapiens
VNMRIEGCIIGFDEYINLVLDDAEGIHSKTKSRKQLG

SEQ ID NO: 60012 - protein, 109 aa, Homo sapiens
ISQATAQIKNLMSQLGTKQDSSKLQENLQQLQHSTNQLAKETNELLKELGSLPLPLSTSEQRQQRLQKERLMNDFSAALNNFQAVQRRVSEKEKESIARARAGSRLSVS

SEQ ID NO: 60013 - protein, 241 aa, Homo sapiens
ISQATAQIKNLMSQLGTKQDSSKLQENLQQLQHSTNQLAKETNELLKELGSLPLPLSTSEQRQQRLQKERLMNDFSAALNNFQAVQRRVSEKEKESIARARAGSRLSAEERQREEQLVSFDSHEEWNQMQSQEDEVAITEQDLELIKERETAIRQLEADILDVNQIFKDLAMMIHDQGDLIDSIEANVESSEVHVERATEQLQRAAYYQKKSRKKMCILVLVLSVIILILGLIIWLVYKTK

SEQ ID NO: 60014 - protein, 44 aa, Homo sapiens
RKSSDSDSSDSESDTGKRARHTSKDSKAAKKKKKKKKHKKKHKE

SEQ ID NO: 60015 - protein, 93 aa, Homo sapiens
VWGVRTMQARGFGSDQSENVDRGAGSIREAGGAFGKREQAEEERYFRAQSREQLAALKKHHEEEIVHHKKEIERLQKEIERHKQKIKMLKHDD

SEQ ID NO: 60016 - protein, 84 aa, Homo sapiens
IHCVFGIRYDDYDYGEVNQLLERNLKVYIKTVACYPEKTTRRMYNLFWRHFRHSEKVHVNLLLLEARMQAALLYALRAITRYMT

SEQ ID NO: 60017 - protein, 40 aa, Homo sapiens
LDVTEANKEFMEQSEELYDALMDCHWQPLDTVSSEIPAMM

SEQ ID NO: 60018 - protein, 129 aa, Homo sapiens
LCSNVLQHPWTEECMWPQGVLVKHSKNVYKAVGHYNVAIPSDVSHFRFHFFFSKPLRILNILLLLEGAVIVYQLYSLMSSEKWHQTISLALILFSNYYAFFKLLRDRLVLGKAYSYSASPQRDLDHRFS

SEQ ID NO: 60019 - protein, 589 aa, Homo sapiens
ILRSFVRLLWGFLIQAAKNFEVWKIATVFVSKGSSPDPASLITMKNQDKKNGAAKQSNPKSSPGQPEAGPEGAQERPSQAAPAVEAEGPGSSQAPRKPEGAQARTAQSGALRDVSEELSRQLEDILSTYCVDNNQGGPGEDGAQGEPAEPEDAEKSRTYVARNGEPEPTPVVNGEKEPSKGDPNTEEIRQSDEVGDRDHRRPQEKKKAKGLGKEITLLMQTLNTLSTPEEKLAALCKKYAELLEEHRNSQKQMKLLQKKQSQLVQEKDHLRGEHSKAVLARSKLESLCRELQRHNRSLKEEGVQRAREEEEKRKEVTSHFQVTLNDIQLQMEQHNERNSKLRQENMELAERLKKLIEQYELREEHIDKVFKHKDLQQQLVDAKLQQAQEMLKEAEERHQREKDFLLKEAVESQRMCELMKQQETHLKQQLALYTEKFEEFQNTLSKSSEVFTTFKQEMEKMTKKIKKLEKETTMYRSRWESSNKALLEMAEEKTVRDKELEGLQVKIQRLEKLCRALQTERNDLNKRVQDLSAGGQGSLTDSGPERRPEGPGAQAPSSPRVTEAPCYPGAPSTEASGQTGPQEPTSARA

SEQ ID NO: 60020 - protein, 439 aa, Homo sapiens
ISSHQSHLLQQLNEQRRQDVFCDCSILVEGKVFKAHRNVLFASSGYFKMLLSQNSKETSQPTTATFQAFSPDTFTVILDFVYSGKLSLTGQNVIEVMSAASFLQMTDVISVCKTFIKSSLDISEKEKDRYFSLSDKDANSNGVERSSFYSGGWQEGSSSPRSHLSPEQGTGIISGKSWNKYNYHPASQKNTQQPLAKHEPRKESIKKTKHLRLSQPSEVTHYKSSKREVRTSDSSSHVSQSEEQAQIDAEMDSTPVGYQYGQGSDVTSKSFPDDLPRMRFKCPYCTHVVKRKADLKRHLRCHTGERPYPCQACGKRFSRLDHLSSHFRTIHQACKLICRKCKRHVTDLTGQVVQEGTRRYRLCNECLAEFGIDSLPIDLEAEQHLMSPSDGDKDSRWHLSEDENRSYVEIVEDGSADLVIQQVDDSEEEEEKEIKPNIR

SEQ ID NO: 60021 - skipped

SEQ ID NO: 60022 - protein, 61 aa, Homo sapiens
RTLIYSISLGGDTDTIATMAGAIAGAYYGMDQVPESWQQSCEGYEETDILAQSLHRVFQKS

SEQ ID NO: 60023 - protein, 41 aa, Homo sapiens
RLWKLPLKLAELPASIQSSSRPFKIPVPKEKVPFTKVQEPF

SEQ ID NO: 60024 - protein, 94 aa, Homo sapiens
VDRGKAGLGLGGRPPPQPPREERAQQLLDAVEQRQRQLLDTIAACEEMLRQLGRRRPEPAGGGNVSAKPGAPPQPAVSARGGFPKDAGDGAAEP

SEQ ID NO: 60025 - protein, 117 aa, Homo sapiens
VFFFDTKKEVEQFDVATHLQTAPELVDRVFNRPRIETLQKEKVKGVTNQTGLKRIAKERQKQYNCLTQRIEREKKLFVIAQKIQTRKDLMDKTQKVKVKKETVNSPAIYKFQSRRKR

SEQ ID NO: 60026 - protein, 453 aa, Homo sapiens
VLLFSWTVYLWETFLAQRQRRIYKTTTHVPPELGQIMDSETFEKSRLYQLDKSTFSFWSGLYSETEGTLILLFGGIPYLWRLSGRFCGYAGFGPEYEITQSLVFLLLATLFSALTGLPWSLYNTFVIEEKHGFNQQTLGFFMKDAIKKFVVTQCILLPVSSLLLYIIKIGGDYFFIYAWLFTLVVSLVLVTIYADYIAPLFDKFTPLPEGKLKEEIEVMAKSIDFPLTKVYVVEGSKRSSHSNAYFYGFFKNKRIVLFDTLLEEYSVLNKDIQEDSGMEPRNEEEGNSEEIKAKVKNKKQGCKNEEVLAVLGHELGHWKLGHTVKNIIISQMNSFLCFFLFAVLIGRKELFAAFGFYDSQPTLIGLLIIFQFIFSPYNEVLSFCLTVLSRRFEFQADAFAKKLGKAKDLYSALIKLNKDNLGFPVSDWLFSMWHYSHPPLLERLQALKTMKQH

SEQ ID NO: 60027 - protein, 275 aa, Homo sapiens
MEEIRNLTVKDFRVQELPLARIKKIMKLDEDVKMISAEAPVLFAKAAQIFITELTLRAWIHTEDNKRRTLQRNDIAMAITKFDQFDFLIDIVPRDELKPPKRQEEVRQSVTPAEPVQYYFTLAQQPTAVQVQGQQQGQQTTSSTTTIQPGQIIIAQPQQGQTMQVMQQIITNTGEIQQIPVQLNAGQLQYIRLAQPVSGTQVVQGQIQTLATNAQQITQTEVQQGQQQFSQFTDGQQLYQIQQVTMPAGQDLAQPMFIQSANQPSDGQAPQVTGD

SEQ ID NO: 60028 - protein, 59 aa, Homo sapiens
ITQTEVQQGQQQFSQFTDGQQLYQIQQVTMPAGQDLAQPMFIQSANQPSDGQAPQVTGD

SEQ ID NO: 60029 - protein, 150 aa, Homo sapiens
KIELFADVVPKTAENFRQFCTGEFRKDGVPIGYKGSTFHRVIKDFMIQGGDFVNGDGTGVASIYRGPFADENFKLRHSAPGLLSMANSGPSTNGCQFFITCSKCDWLDGKHVVFGKIIDGLLVMRKIENVPTGPNNKPKLPVVISQCGEM

SEQ ID NO: 60030 - protein, 325 aa, Homo sapiens
KCSVRVHASCYGVPPAKASEDWMCSRCSANALEEDCCLCSLRGGALQRANDDRWVHVSCAVAILEARFVNIAERSPVDVSKIPLPRFKLKCIFCKKRRKRTAGCCVQCSHGRCPTAFHVSCAQAAGVMMQPDDWPFVVFITCFRHKIPNLERAKGALQSITAGQKVISKHKNGRFYQCEVVRLTTETFYEVNFDDGSFSDNLYPEDIVSQDCLQFGPPAEGEVVQVRWTDGQVYGAKFVASHPIQMYQVEFEDGSQLVVKRDDVYTLDEELPKRVKSRLSVASDMRFNEIFTEKEVKQEKKRQRVINSRYREDYIEPALYRAIME

SEQ ID NO: 60031 - protein, 328 aa, Homo sapiens
KGAMAASCVLLHTGQKMPLIGLGTWKSEPGQVKAAVKYALSVGYRHIDCAAIYGNEPEIGEALKEDVGPGKAVPREELFVTSKLWNTKHHPEDVEPALRKTLADLQLEYLDLYLMHWPYAFERGDNPFPKNADGTICYDSTHYKETWKALEALVAKGLVQALGLSNFNSRQIDDILSVASVRPAVLQVECHPYLAQNELIAHCQARGLEVTAYSPLGSSDRAWRDPDEPVLLEEPVVLALAEKYGRSPAQILLRWQVQRKVICIPKSITPSRILQNIKVFDFTFSPEEMKQLNALNKNWRYIVPMLTVDGKRVPRDAGHPLYPFNDPY

SEQ ID NO: 60032 - protein, 457 aa, Homo sapiens
LVRHLRGTMAMESTATAAVAAELVSADKIEDVPAPSTSADKVESLDVDSEAKKLLGLGQKHLVMGDIPAAVNAFQEAASLLGKKYGETANECGEAFFFYGKSLLELARMENGVLGNALEGVHVEEEEGEKTEDESLVENNDNIDETEGSEEDDKENDKTEEMPNDSVLENKSLQENEEEEIGNLELAWDMLDLAKIIFKRQETKEAQLYAAQAHLKLGEVSVESENYVQAVEEFQSCLNLQEQYLEAHDRLLAETHYQLGLAYGYNSQYDEAVAQFSKSIEVIENRMAVLNEQVKEAEGSSAEYKKEIEELKELLPEIREKIEDAKESQRSGNVAELALKATLVESSTSGFTPGGGGSSVSMIASRKPTDGASSSNCVTDISHLVRKKRKPEEESPRKDDAKKAKQEPEVNGGSGDAVPSGNEVSENMEEEAENQAESRAAVEGTVEAGATVESTAC

SEQ ID NO: 60033 - protein, 300 aa, Homo sapiens
KTEEMPNDSVLENKSLQENEEEEIGNLELAWDMLDLAKIIFKRQETKEAQLYAAQAHLKLGEVSVESENYVQAVEEFQSCLNLQEQYLEAHDRLLAETHYQLGLAYGYNSQYDEAVAQFSKSIEVIENRMAVLNEQVKEAEGSSAEYKKEIEELKELLPEIREKIEDAKESQRSGNVAELALKATLVESSTSGFTPGGGGSSVSMIASRKPTDGASSSNCVTDISHLVRKKRKPEEESPRKDDAKKAKQEPEVNGGSGDAVPSGNEVSENMEEEAENQAESRAAVEGTVEAGATVESTAC

SEQ ID NO: 60034 - protein, 115 aa, Homo sapiens
RRLLLRGANPDLKDRTGFAVIHDAARAGFLDTLQTLLEFQADVNIEDNEGNLPLHLAAKEGHLRVVEFLVKHTASNVGHRNHKGDTACDLARLYGRNEVVSLMQANGAGGATNLQ

SEQ ID NO: 60035 - protein, 70 aa, Homo sapiens
LRQPRRPRPPPLTWIRPSSSVAAAAPRGGGVGKCFVSPPPPPHRCLAGGERRDPSGARGPALIPQPRGLA

SEQ ID NO: 60036 - protein, 37 aa, Homo sapiens
KPFPRYGYKPSPPNGCGSPLFGVHLNIGIPSLTKCCN

SEQ ID NO: 60037 - protein, 70 aa, Homo sapiens
IAVTGTGAHPAFKYLAQTSGKEPTWNFWKYLVAPDGKVVGAWDPTVSVEEVRPQITALVRKLILLKREDL

SEQ ID NO: 60038 - protein, 769 aa, Homo sapiens
LEPPRRLSLGAGSGPARRRTQDGGCMPEDQAGAAMEEASPYSLLDICLNFLTTHLEKFCSARQDGTLCLQEPGVFPQEVADRLLRTMAFHGLLNDGTVGIFRGNQMRLKRACIRKAKISAVAFRKAFCHHKLVELDATGVNADITITDIISGLGSNKWIQQNLQCLVLNSLTLSLEDPYERCFSRLSGLRALSITNVLFYNEDLAEVASLPRLESLDISNTSITDITALLACKDRLKSLTMHHLKCLKMTTTQILDVVRELKHLNHLDISDDKQFTSDIALRLLEQKDILPNLVSLDVSGRKHVTDKAVEAFIQQRPSMQFVGLLATDAGYSEFLTGEGHLKVSGEANETQIAEALKRYSERAFFVREALFHLFSLTHVMEKTKPEILKLVVTGMRNHPMNLPVQLAASACVFNLTKQDLAAGMPVRLLADVTHLLLKAMEHFPNHQQLQKNCLLSLCSDRILQDVPFNRFEAAKLVMQWLCNHEDQNMQRMAVAIISILAAKLSTEQTAQLGTELFIVRQLLQIVKQKTNQNSVDTTLKFTLSALWNLTDESPTTCRHFIENQGLELFMRVLESFPTESSIQQKVLGLLNNIAEVQELHSELMWKDFIDHISSLLHSVEVEVSYFAAGIIAHLISRGEQAWTLSRSQRNSLLDDLHSAILKWPTPECEMVAYRSFNPFFPLLGCFTTPGVQLWAVWAMQHVCSKNPSRYCSMLIEEGGLQHLYNIKDHEHTDPHVQQIAVAILDSLEKHIVRHGRPPPCKKQPQARLN

SEQ ID NO: 60039 - protein, 101 aa, Homo sapiens
LRNLQDSIKRKYSCDHNTSLSRLEDLLQDSMAQDEKEQLIQSKSSVASLVGRSKTIVQLKPRSPDHVLKNTISVKAVCDYRQIEGRTILSEGYGPLASAAC

SEQ ID NO: 60040 - protein, 2502 aa, Homo sapiens
MDAVTEELQAKTGSLEEMTQRLREFQESFKNIEKKVEGAKHQLEIFDALGSQACSNKNLEKLRAQQEVLQALEPQVDYLRNFTQGLVEDAPDGSDASQLLHQAEVAQQEFLEVKQRVNSGCVMMENKLEGIGQFHCRVREMFSQLADLDDELDGMGAIGRDTDSLQSQIEDVRLFLNKIHVLKLDIEASEAECRHMLEEEGTLDLLGLKRELEALNKQCGKLTERGKARQEQLELTLGRVEDFYRKLKGLNDATTAAEEAEALQWVVGTEVEIINQQLADFKMFQKEQVDPLQMKLQQVNGLGQGLIQSAGKDCDVQGLEHDMEEINARWNTLNKKVAQRIAQLQEALLHCGKFQDALEPLLSWLADTEELIANQKPPSAEYKVVKAQIQEQKLLQRLLDDRKATVDMLQAEGGRIAQSAELADREKITGQLESLESRWTELLSKAAARQKQLEDILVLAKQFHETAEPISDFLSVTEKKLANSEPVGTQTAKIQQQIIRHKALEEDIENHATDVHQAVKIGQSLSSLTSPAEQGVLSEKIDSLQARYSEIQDRCCRKAALLDQALSNARLFGEDEVEVLNWLAEVEDKLSSVFVKDFKQDVLHRQHADHLALNEEIVNRKKNVDQAIKNGQALLKQTTGEEVLLIQEKLDGIKTRYADITVTSSKALRTLEQARQLATKFQSTYEELTGWLREVEEELATSGGQSPTGEQIPQFQQRQKELKKEVMEHRLVLDTVNEVSRALLELVPWRAREGLDKLVSDANEQYKLVSDTIGQRVDEIDAAIQRSQQYEQAADAELAWVAETKRKLMALGPIRLEQDQTTAQLQVQKAFSIDIIRHKDSMDELFSHRSEIFGTCGEEQKTVLQEKTESLIQQYEAISLLNSERYARLERAQVLVNQFWETYEELSPWIEETRALIAQLPSPAIDHEQLRQQQEEMRQLRESIAEHKPHIDKLLKIGPQLKELNPEEGEMVEEKYQKAENMYAQIKEEVRQRALALDEAVSQSTQITEFHDKIEPMLETLENLSSRLRMPPLIPAEVDKIRECISDNKSATVELEKLQPSFEALKRRGEELIGRSQGADKDLAAKEIQDKLDQMVFFWEDIKARAEEREIKFLDVLELAEKFWYDMAALLTTIKDTQDIVHDLESPGIDPSIIKQQVEAAETIKEETDGLHEELEFIRILGADLIFACGETEKPEVRKSIDEMNNAWENLNKTWKERLEKLEDAMQAAVQYQDTLQAMFDWLDNTVIKLCTMPPVGTDLNTVKDQLNEMKEFKVEVYQQQIEMEKLNHQGELMLKKATDETDRDIIREPLTELKHLWENLGEKIAHRQHKLEGALLALGQFQHALEELMSWLTHTEELLDAQRPISGDPKVIEVELAKHHVLKNDVLAHQATVETVNKAGNELLESSAGDDASSLRSRLEAMNQCWESVLQKTEEREQQLQSTLQQAQGFHSEIEDFLLELTRMESQLSASKPTGGLPETAREQLDTHMELYSQLKAKEETYNQLLDKGRLMLLSRDDSGSGSKTEQSVALLEQKWHVVSSKMEERKSKLEEALNLATEFQNSLQEFINWLTLAEQSLNIASPPSLILNTVLSQIEEHKVFANEVNAHRDQIIELDQTGNQLKFLSQKQDVVLIKNLLVSVQSRWEKVVQRSIERGRSLDDARKRAKQFHEAWKKLIDWLEDAESHLDSELEISNDPDKIKLQLSKHKEFQKTLGGKQPVYDTTIRTGRALKEKTLLPEDSQKLDNFLGEVRDKWDTVCGKSVERQHKLEEALLFSGQFMDALQALVDWLYKVEPQLAEDQPVHGDLDLVMNLMDAHKVFQKELGKRTGTVQVLKRSGRELIENSRDDTTWVKGQLQELSTRWDTVCKLSVSKQSRLEQALKQAEVFRDTVHMLLEWLSEAEQTLRFRGALPDDTEALQSLIDTHKEFMKKVEEKRVDVNSAVAMGEVILAVCHPDCITTIKHWITIIRARFEEVLTWAKQHQQRLETALSELVANAELLEELLAWIQWAETTLIQRDQEPIPQNIDRVKALIAEHQTFMEEMTRKQPDVDRVTKTYKRKNIEPTHAPFIEKSRSGGRKSLSQPTPPPMPILSQSEAKNPRINQLSARWQQVWLLALERQRKLNDALDRLEELKEFANFDFDVWRKKYMRWMNHKKSRVMDFFRRIDKDQDGKITRQEFIDGILASKFPTTKLEMTAVADIFDRDGDGYIDYYEFVAALHPNKDAYRPTTDADKIEDEVTRQVAQCKCAKRFQVEQIGENKYRFGDSQQLRLVRILRSTVMVRVGGGWMALDEFLVKNDPCRARGRTNIELREKFILPEGASQGMTPFRSRGRRSKPSSRAASPTRSSSSASQSNHSCTSMPSSPATPASGTKVIPSSGSKLKRPTPTFHSSRTSLAGDTSNSSSPASTGAKTNRADPKKSASRPGSRAGSRAGSRASSRRGSDASDFDLLETQSACSDTSESSAAGGQGNSRRGLNKPSKIPTMSKKTTTASPRTPGPKR

SEQ ID NO: 60041 - protein, 2565 aa, Homo sapiens
MDAVTEELQAKTGSLEEMTQRLREFQESFKNIEKKVEGAKHQLEIFDALGSQACSNKNLEKLRAQQEVLQALEPQVDYLRNFTQGLVEDAPDGSDASQLLHQAEVAQQEFLEVKQRVNSGCVMMENKLEGIGQFHCRVREMFSQLADLDDELDGMGAIGRDTDSLQSQIEDVRLFLNKIHVLKLDIEASEAECRHMLEEEGTLDLLGLKRELEALNKQCGKLTERGKARQEQLELTLGRVEDFYRKLKGLNDATTAAEEAEALQWVVGTEVEIINQQLADFKMFQKEQVDPLQMKLQQVNGLGQGLIQSAGKDCDVQGLEHDMEEINARWNTLNKKVAQRIAQLQEALLHCGKFQDALEPLLSWLADTEELIANQKPPSAEYKVVKAQIQEQKLLQRLLDDRKATVDMLQAEGGRIAQSAELADREKITGQLESLESRWTELLSKAAARQKQLEDILVLAKQFHETAEPISDFLSVTEKKLANSEPVGTQTAKIQQQIIRHKALEEDIENHATDVHQAVKIGQSLSSLTSPAEQGVLSEKIDSLQARYSEIQDRCCRKAALLDQALSNARLFGEDEVEVLNWLAEVEDKLSSVFVKDFKQDVLHRQHADHLALNEEIVNRKKNVDQAIKNGQALLKQTTGEEVLLIQEKLDGIKTRYADITVTSSKALRTLEQARQLATKFQSTYEELTGWLREVEEELATSGGQSPTGEQIPQFQQRQKELKKEVMEHRLVLDTVNEVSRALLELVPWRAREGLDKLVSDANEQYKLVSDTIGQRVDEIDAAIQRSQQYEQAADAELAWVAETKRKLMALGPIRLEQDQTTAQLQVQKAFSIDIIRHKDSMDELFSHRSEIFGTCGEEQKTVLQEKTESLIQQYEAISLLNSERYARLERAQVLVNQFWETYEELSPWIEETRALIAQLPSPAIDHEQLRQQQEEMRQLRESIAEHKPHIDKLLKIGPQLKELNPEEGEMVEEKYQKAENMYAQIKEEVRQRALALDEAVSQSTQFHDKIEPMLETLENLSSRLRMPPLIPAEVDKIRECISDNKSATVELEKLQPSFEALKRRGEELIGRSQGADKDLAAKEIQDKLDQMVFFWEDIKARAEEREIKFLDVLELAEKFWYDMAALLTTIKDTQDIVHDLESPGIDPSIIKQQVEAAETIKEETDGLHEELEFIRILGADLIFACGETEKPEVRKSIDEMNNAWENLNKTWKERLEKLEDAMQAAVQYQDTLQAMFDWLDNTVIKLCTMPPVGTDLNTVKDQLNEMKEFKVEVYQQQIEMEKLNHQGELMLKKATDETDRDIIREPLTELKHLWENLGEKIAHRQHKLEGALLALGQFQHALEELMSWLTHTEELLDAQRPISGDPKVIEVELAKHHVLKNDVLAHQATVETVNKAGNELLESSAGDDASSLRSRLEAMNQCWESVLQKTEEREQQLQSTLQQAQGFHSEIEDFLLELTRMESQLSASKPTGGLPETAREQLDTHMELYSQLKAKEETYNQLLDKGRLMLLSRDDSGSGSKTEQSVALLEQKWHVVSSKMEERKSKLEEALNLATEFQNSLQEFINWLTLAEQSLNIASPPSLILNTVLSQIEEHKVFANEVNAHRDQIIELDQTGNQLKFLSQKQDVVLIKNLLVSVQSRWEKVVQRSIERGRSLDDARKRAKQFHEAWKKLIDWLEDAESHLDSELEISNDPDKIKLQLSKHKEFQKTLGGKQPVYDTTIRTGRALKEKTLLPEDSQKLDNFLGEVRDKWDTVCGKSVERQHKLEEALLFSGQFMDALQALVDWLYKVEPQLAEDQPVHGDLDLVMNLMDAHKVFQKELGKRTGTVQVLKRSGRELIENSRDDTTWVKGQLQELSTRWDTVCKLSVSKQSRLEQALKQAEVFRDTVHMLLEWLSEAEQTLRFRGALPDDTEALQSLIDTHKEFMKKVEEKRVDVNSAVAMGEVILAVCHPDCITTIKHWITIIRARFEEVLTWAKQHQQRLETALSELVANAELLEELLAWIQWAETTLIQRDQEPIPQNIDRVKALIAEHQTFMEEMTRKQPDVDRVTKTYKRKNIEPTHAPFIEKSRSGGRKSLSQPTPPPMPILSQSEAKNPRINQLSARWQQVWLLALERQRKLNDALDRLEELKEFANFDFDVWRKKYMRWMNHKKSRVMDFFRRIDKDQDGKITRQEFIDGILASKFPTTKLEMTAVADIFDRDGDGYIDYYEFVAALHPNKDAYRPTTDADKIEDEVTRQVAQCKCAKRFQVEQIGENKYRFFLGNQFGDSQQLRLVRILRSTVMVRVGGGWMALDEFLVKNDPCRVHHPGSKIKRSDSSSSISSQSPIARGRTNIELREKFILPEGASQGMTPFRSRGRRSKPSSRAASPTRSSSSASQSNHSCTSMPSSPATPASGTKTSLQFSRCYDKPWLVNSKAGTPIRDSHSPDLQLPTPEVIPSSGSKLKRPTPTFHSSRTSLAGDTSNSSSPASTGAKTNRADPKKSASRPGSRAGSRAGSRASSRRGSDASDFDLLETQSACSDTSESSAAGGQGNSRRGLNKPSKIPTMSKKTTTASPRTPGPKR

SEQ ID NO: 60042 - protein, 17 aa, Homo sapiens
IYSTIFAGTLITALSSH

SEQ ID NO: 60043 - protein, 27 aa, Homo sapiens
INSLFLTDLYSPEYPGPSQRIKKPVQV

SEQ ID NO: 60044 - protein, 47 aa, Homo sapiens
LQRSIVPTMHYQDSLPRLPIPKLEDTIRRYLSAQKPLLNDGQFRTLV

SEQ ID NO: 60045 - protein, 129 aa, Homo sapiens
RIGHTVNKMRKHSDSEVASLAREVYTEWKTFTEKHSNRPSIEVRSDPKTESLRKNAQKLLSEALELKMDHLLVENIERETFHLCSRLINGPYRRTVRALVFTLKHRAEIRAQVKSGSLPVGTFVQTHKK

SEQ ID NO: 60046 - protein, 184 aa, Homo sapiens
VAGAARTPRSLPGRPAVCNMTLEEFSAGEQKTERMDKVGDALEEVLSKALSQRTITVGVYEAAKLLNVDPDNVVLCLLAADEDDDRDVALQIHFTLIQAFCCENDINILRVSNPGRLAELLLLETDAGPAASEGAEQPPDLHCVLVTNPHSSQWKDPALSQLICFCRESRYMDQWVPVINLPER

SEQ ID NO: 60047 - protein, 317 aa, Homo sapiens
LAFCLAINYKQMELYHALPFFCFLLGKCFKKGLKGKGFVLLVKLACIVVASFVLCWLPFFTEREQTLQVLRRLFPVDRGLFEDKVANIWCSFNVFLKIKDILPRHIQLIMSFCSTFLSLLPACIKLILQPSSKGFKFTLVSCALSFFLFSFQVHEKSILLVSLPVCLVLSEIPFMSTWFLLVSTFSMLPLLLKDELLMPSVVTTMAFFIACVTSFSIFEKTSEEELQLKSFSISVRKYLPCFTFLSRIIQYLFLISVITMVLLTLMTVTLDPPQKLPDLFSVLVCFVSCLNFLFFLVYFNIIIMWDSKSGRNQKKIS

SEQ ID NO: 60048 - protein, 533 aa, Homo sapiens
LAEFRTWLRTNWLRFNADKTDVMLPSVESSSPGGSATSDDHEFDPSADMLVHDFDDERTLEEEEMMEGETNFSSEIEDLAREGDMPIHELLSLYGYGSTVRLPEEDEEEEEEEEEGEDDEDADNDDNSGCSGENKEENIKDSSGQEDETQSSNDDPSQSVASQDAQEIIRPRRCKYFDTNSEVEEESEEDEDYIPSEDWKKEIMVGSMFQAEIPVGICRYKENEKVYENDDQLLWDPEYLPEDKVIIFLKDASRRTGDEKGVEAIPEGSHIKDNEQALYELVKCNFDTEEALRRLRFNVKAAREELSVWTEEECRNFEQGLKAYGKDFHLIQANKVRTRSVGECVAFYYMWKKSERYDFFAQQTRFGKKKYNLHPGVTDYMDRLLDESESAASSRAPSPPPTASNSSNSQSEKEDGTVSTANQNGVSSNGPGEILNKEEVKVEGLHINGPTGGNKKPLHADMDTNGYETDNLTTDPKLAHMTARNENDFDEKSERPAKRRRVNSNGKESPGSSEFFQEAVSHGKFEELENTDD

SEQ ID NO: 60049 - protein, 422 aa, Homo sapiens
LVISSVFFSSLLLSRFSMQEKDASSQGFLPHFQHFATQAIHVGQDPEQWTSRAVVPPISLSTTFKQGAPGQHSGFEYSRSGNPTRNCLEKAVAALDGAKYCLAFASGLAATVTITHLLKAGDQIICMDDVYGGTNRYFRQVASEFGLKISFVDCSKIKLLEAAITPETKLVWIETPTNPTQKVIDIEGCAHIVHKHGDIILVVDNTFMSPYFQRPLALGADISMYSATKYMNGHSDVVMGLVSVNCESLHNRLRFLQNSLGAVPSPIDCYLCNRGLKTLHVRMEKHFKNGMAVAQFLESNPWVEKVIYPGLPSHPQHELVKRQCTGCTGMVTFYIKGTLQHAEIFLKNLKLFTLAESLGGFESLAELPAIMTHASVLKNDRDVLGISDTLIRLSVGLEDEEDLLEDLDQALKAAHPPSGSHS

SEQ ID NO: 60050 - protein, 225 aa, Homo sapiens
KAMASKLLRAVILGPPGSGKGTVCQRIAQNFGLQHLSSGHFLRENIKASTEVGEMAKQYIEKSLLVPDHVITRLMMSELENRRGQHWLLDGFPRTLGQAEALDKICEVDLVISLNIPFETLKDRLSRRWIHPPSGRVYNLDFNPPHVHGIDDVTGEPLVQQEDDKPEAVAARLRQYKDVAKPVIELYKSRGVLHQFSGTETNKIWPYVYTLFSNKITPIQSKEAY

SEQ ID NO: 60051 - protein, 162 aa, Homo sapiens [sequence omitted]

SEQ ID NO: 60052 - protein, 49 aa, Homo sapiens
VKSVGEGVTKLKAGNTVISLYIPQCGECKFCLNPKTNLCQKIKSHKGKD

SEQ ID NO: 60053 - protein, 7 aa, Homo sapiens
MQILSKS

SEQ ID NO: 60054 - protein, 5 aa, Homo sapiens
IHSCG

SEQ ID NO: 60055 - protein, 201 aa, Homo sapiens
IDFARQKLDPKIAVAAQNCYKVTNGAFTGEISPGMIKDCRATWVVLGHSERRHVFGESDELIGQKVAHALAEGLGVIACTGEKLDEREAGITEKVVFEQTKVIADNVKDWSKVVLAYEPVWAIGTGKTATPQQDQEVHDKLRGWLKSNVSDAVAQSTRIIYGGSVTGATCKELASQPGVDGFLVGGASLKPEFVDIINAKQ

SEQ ID NO: 60056 - protein, 1094 aa, Homo sapiens
MTQRCNNRTQCIVVTGSDVFPDPCPGTYKYLEVQYECVPYIFVCPGTLKAIVDSPCIYEAEQKAGAWCKDPLQAADKIYFMPWTPYRTDTLIEYASLEDFQNSRQTTTYKLPNRVDGTGFVVYDGAVFFNKERTRNIVKFDLRTRIKSGEAIINYANYHDTSPYRWGGKTDIDLAVDENGLWVIYATEQNNGMIVISQLNPYTLRFEATWETVYDKRAASNAFMICGVLYVVRSVYQDNESETGKNSIDYIYNTRLNRGEYVDVPFPNQYQYIAAVDYNPRDNQLYVWNNNFILRYSLEFGPPDPAQVPTTAVTITSSAELFKTIISTTSTTSQKGPMSTTVAGSQEGSKGTKPPPAVSTTKIPPITNIFPLPERFCEALDSKGIKWPQTQRGMMVERPCPKGTRGTASYLCMISTGTWNPKGPDLSNCTSHWVNQLAQKIRSGENAASLANELAKHTKGPVFAGDVSSSVRLMEQLVDILDAQLQELKPSEKDSAGRSYNKLQKREKTCRAYLKAIVDTVDNLLRPEALESWKHMNSSEQAHTATMLLDTLEEGAFVLADNLLEPTRVSMPTENIVLEVAVLSTEGQIQDFKFPLGIKGAGSSIQLSANTVKQNSRNGLAKLVFIIYRSLGQFLSTENATIKLGADFIGRNSTIAVNSHVISVSINKESSRVYLTDPVLFTLPHIDPDNYFNANCSFWNYSERTMMGYWSTQGCKLVDTNKTRTTCACSHLTNFAILMAHREIAYKDGVHELLLTVITWVGIVISLVCLAICIFTFCFFRGLQSDRNTIHKNLCINLFIAEFIFLIGIDKTKYAIACPIFAGLLHFFFLAAFAWMCLEGVQLYLMLVEVFESEYSRKKYYYVAGYLFPATVVGVSAAIDYKSYGTEKACWLHVDNYFIWSFIGPVTFIILLNIIFLVITLCKMVKHSNTLKPDSSRLENIKSWVLGAFALLCLLGLTWSFGLLFINEETIVMAYLFTIFNAFQGVFIFIFHCALQKKVRKEYGKCFRHSYCCGGLPTESPHSSVKASTTRTSARYSSGTQSRIRRMWNDTVRKQSESSFISGDINSTSTLNQGLTSHGLRAHLQDLYHLEDIH

SEQ ID NO: 60057 - protein, 7 aa, Homo sapiens
ILNLSLI

SEQ ID NO: 60058 - protein, 605 aa, Homo sapiens
INKTGFKFSAEKPVIEVPSMTILDKKDGEQAKALFEKVRKFRAHVEDSDLIYKLYVVQTVIKTAKFIFILCYTANFVNAISFEHVCKPKVEHLIGYEVFECTHNMAYMLKKLLISYISIICVYGFICLYTLFWLFRIPLKEYSFEKVREESSFSDIPDVKNDFAFLLHMVDQYDQLYSKRFGVFLSEVSENKLREISLNHEWTFEKLRQHISRNAQDKQELHLFMLSGVPDAVFDLTDLDVLKLELIPEAKIPAKISQMTNLQELHLCHCPAKVEQTAFSFLRDHLRCLHVKFTDVAEIPAWVYLLKNLRELYLIGNLNSENNKMIGLESLRELRHLKILHVKSNLTKVPSNITDVAPHLTKLVIHNDGTKLLVLNSLKKMMNVAELELQNCELERIPHAIFSLSNLQELDLKSNNIRTIEEIISFQHLKRLTCLKLWHNKIVTIPPSITHVKNLESLYFSNNKLESLPVAVFSLQKLRCLDVSYNNISMIPIEIGLLQNLQHLHITGNKVDILPKQLFKCIKLRTLNLGQNCITSLPEKVGQLSQLTQLELKGNCLDRLPAQLGQCRMLKKSGLVVEDHLFDTLPLEVKEALNQDINIPFANGI

SEQ ID NO: 60059 - protein, 11 aa, Homo sapiens
KFYQRQRISSL

SEQ ID NO: 60060 - protein, 213 aa, Homo sapiens
VKARKNPKKFEDVFDEMIYFLEQTDHWGSTEMELAARGVKNLNFYDVVLDFILMDSFEDLENPPTSIQNVVNNRWLNSSFKETAVASSCWSVLKQKRQQMKQIPDGFFAHFYAICEHISPVLAWGFLGPRNSLYDLCCFFKNQVLLFLKDIFDFEKVRYSSTETLAEDLMQLLIRRTELLMAYLEADALRHTSSCLSSHGHVMSTGLLEAKVQ

SEQ ID NO: 60061 - protein, 330 aa, Homo sapiens
ILGIEKGASDEDIKKAYRKQALKFHPDKNKSPQAEEKFKEVAEAYEVLSDPKKREIYDQFGEEGLKGGAGGTDGQGGTFRYTFHGDPHATFAAFFGGSNPFEIFFGRRMGGGRDSEEMEIDGDPFSAFGFSMNGYPRDRNSVGPSRLKQDPPVIHELRVSLEEIYSGCTKRMKISRKRLNADGRSYRSEDKILTIEIKKGWKEGTKITFPREGDETPNSIPADIVFIIKDKDHPKFKRDGSNIIYTAKISLREALCGCSINVPTLDGRNIPMSVNDIVKPGMRRRIIGYGLPFPKNPDQRGDLLIEFEVSFPDTISSSSKEVLRKHLPAS

SEQ ID NO: 60062 - protein, 765 aa, Homo sapiens
VATATGAGGAAGQRSRRTQRTRQPGAPGGAEPRPPVVGSAGRAAREANEDKTMFANLKYVSLGILVFQTTSLVLTMRYSRTLKEEGPRYLSSTAVVVAELLKIMACILLVYKDSKCSLRALNRVLHDEILNKPMETLKLAIPSGIYTLQNNLLYVALSNLDAATYQVTYQLKILTTALFSVSMLSKKLGVYQWLSLVILMTGVAFVQWPSDSQLDSKELSAGSQFVGLMAVLTACFSSGFAGVYFEKILKETKQSVWIRNIQLGFFGSIFGLMGVYIYDGELVSKNGFFQGYNRLTWIVVVLQPQGIGSPSVYHAVIVIFLEFFAWGLLTAPTLVVLHETFPKHTFLMNGLIQGVKGLLSFLSAPLIGALSDVWGRKSFLLLTVFFTCAPIPLMKISPWWYFAVISVSGVFAVTFSVVFAYVADITQEHERSMAYGLVSATFAASLVTSPAIGAYLGRVYGDSLVVVLATAIALLDICFILVAVPESLPEKMRPASWGAPISWEQADPFASLKKVGQDSIVLLICITVFLSYLPEAGQYSSFFLYLRQIMKFSPESVAAFIAVLGILSIIAQTIVLSLLMRSIGNKNTILLGLGFQILQLAWYGFGSEPWMMWAAGAVAAMSSITFPAVSALVSRTADADQQGVVQGMITGIRGLCNGLGPALYGFIFYIFHVELKELPITGTDLGTNTSPQHHFEQNSIIPGPPFLFGACSVLLALLVALFIPEHTNLSLRSSSWRKHCGSHSHPHNTQAPGEAKEPLLQDTNV

SEQ ID NO: 60063 - protein, 332 aa, Homo sapiens
LANEDKTMFANLKYVSLGILVFQTTSLVLTMRYSRTLKEEGPRYLSSTAVVVAELLKIMACILLVYKDSKCSLRALNRVLHDEILNKPMETLKLAIPSGIYTLQNNLLYVALSNLDAATYQVTYQLKILTTALFSVSMLSKKLGVYQWLSLVILMTGVAFVQWPSDSQLDSKELSAGSQFVGLMAVLTACFSSGFAGVYFEKILKETKQSVWIRNIQLGFFGSIFGLMGVYIYDGELVSKNGFFQGYNRLTWIVVVLQALGGLVIAAVIKYADNILKGFATSLSIILSTLISYFWLQDFVPTSVFFLGAILVITATFLYGYDPKPAGNPTKA

SEQ ID NO: 60064 - protein, 43 aa, Homo sapiens
ICNLFIDNIINIDLLFLASRFCANQCLFPWSHPCNNSYFFVWL

SEQ ID NO: 60065 - protein, 17 aa, Homo sapiens
TLEPRRKKMLGKESCVL

SEQ ID NO: 60066 - protein, 33 aa, Homo sapiens
LGIFLAIILFPFGFICCFALRERRCPNCGATFA

SEQ ID NO: 60067 - protein, 385 aa, Homo sapiens
LRATMSSRIARALALVVTLLHLTRLALSTCPAACHCPLEAPKCAPGVGLVRDGCGCCKVCAKQLNEDCSKTQPCDHTKGLECNFGASSTALKGICRAQSEGRPCEYNSRIYQNGESFQPNCKHQCTCIDGAVGCIPLCPQELSLPNLGCPNPRLVKVTGQCCEEWVCDEDSIKDPMEDQDGLLGKELGFDASEVELTRNNELIAVGKGSSLKRLPVFGMEPRILYNPLQGQKCIVQTTSWSQCSKTCGTGISTRVTNDNPECRLVKETRICEVRPCGQPVYSSLKKGKKCSKTKKSPEPVRFTYAGCLSVKKYRPKYCGSCVDGRCCTPQLTRTVKMRFRCEDGETFSKNVMMIQSCKCNYNCPHANEAAFPFYRLFNDIHKFRD

SEQ ID NO: 60068 - protein, 485 aa, Homo sapiens
ILTNILSSPYFKVQLYELKTYHEVVDEIYFKVTHVEPWEKGSRKTAGQTGMCGGVRGVGTGGIVSTAFCLLYKLFTLKLTRKQVMGLITHTDSPYIRALGFMYIRYTQPPTDLWDWFESFLDDEEDLDVKAGGGCVMTIGEMLRSFLTKLEWFSTLFPRIPVPVQKNIDQQIKTRPRKIKKDGKEGAEEIDRHVERRRSRSPRRSLSPRRSPRRSRSRSHHREGHGSSSFDRELEREKERQRLEREAKEREKERRRSRSIDRGLERRRSRSRERHRSRSRSRDRKGDRRDRDREREKENERGRRRDRDYDKERGNEREKERERSRERSKEQRSRGEVEEKKHKEDKDDRRHRDDKRDSKKEKKHSRSRSRERKHRSRSRSRNAGKRSRSRSKEKSSKHKNESKEKSNKRSRSGSQGRTDSVEKSKKREHSPSKEKSRKRSRSKERSHKRDHSDSKDQSDKHDRRRSQSIEQESQEKQHKNKDETV

SEQ ID NO: 60069 - protein, 25 aa, Homo sapiens
IKAVDKKAAGAGKVTKSAQKAQKAK

SEQ ID NO: 60070 - protein, 392 aa, Homo sapiens
KDASLMDMNSFSPMMPTSPLSMINQIKFEDEPDLKDLFITVDEPESHVTTIETFITYRIITKTSRGEFDSSEFEVRRRYQDFLWLKGKLEEAHPTLIIPPLPEKFIVKGMVERFNDDFIETRRKALHKFLNRIADHPTLTFNEDFKIFLTAQAWELSSHKKQGPGLLSRMGQTVRAVASSMRGVKNRPEEFMEMNNFIELFSQKINLIDKISQRIYKEEREYFDEMKEYGPIHILWSASEEDLVDTLKDVASCIDRCCKATEKRMSGLSEALLPVVHEYVLYSEMLMGVMKRRDQIQAELDSKVEVLTYKKADTDLLPEEIGKLEDKVECANNALKADWERWKQNMQNDIKLAFTDMAEENIHYYEQCLATWESFLTSQTNLHLEEASEDKP

SEQ ID NO: 60071 - protein, 190 aa, Homo sapiens
VEKKYTLGDAPDYDRSQWLNEKFKLGLDFPNLPYLIDGAHKITQSNAILRYIARKHNLCGETEEEKIRVDILENQVMDNHMELVRLCYDPDFEKLKPKYLEELPEKLKLYSEFLGKRPWFAGDKITFVDFLAYDVLDMKRIFEPKCLDAFLNLKDFISRFEGLKKISAYMKSSQFLRGLLFGKSATWNSK

SEQ ID NO: 60072 - protein, 72 aa, Homo sapiens
RPLRNLVSYLKQKQAAGVISLPVGGNKDKENTGVLHAFPPCEFSQQFLDSPAKALAKSEEDYLVMIIVRGAS

SEQ ID NO: 60073 - protein, 515 aa, Homo sapiens
KMVLDLDLFRVDKGGDPALIRETQEKRFKDPGLVDQLVKADSEWRRCRFRADNLNKLKNLCSKTIGEKMKKKEPVGDDESVPENVLSFDDLTADALANLKVSQIKKVRLLIDEAILKCDAERIKLEAERFENLREIGNLLHPSVPISNDEDVDNKVERIWGDCTVRKKYSHVDLVVMVDGFEGEKGAVVAGSRGYFLKGVLVFLEQALIQYALRTLGSRGYIPIYTPFFMRKEVMQEVAQLSQFDEELYKVIGKGSEKSDDNSYDEKYLIATSEQPIAALHRDEWLRPEDLPIKYAGLSTCFRQEVGSHGRDTRGIFRVHQFEKIEQFVYSSPHDNKSWEMFEEMITTAEEFYQSLGIPYHIVNIVSGSLNHAASKKLDLEAWFPGSGAFRELVSCSNCTDYQARRLRIRYGQTKKMMDKVEFVHMLNATMCATTRTICAILENYQTEKGITVPEKLKEFMPPGLQELIPFVKPAPIEQEPSKKQKKQHEGSKKKAAARDVTLENRLQNMEVTDA

SEQ ID NO: 60074 - protein, 504 aa, Homo sapiens
KYSFMATVTKAPKKQIQFADDMQEFTKFPTKTGRRSLSRSISQSSTDSYSSAASYTDSSDDEVSPREKQQTNSKGSSNFCVKNIKQAEFGRREIEIAEQDMSALISLRKRAQGEKPLAGAKIVGCTHITAQTAVLIETLCALGAQCRWSACNIYSTQNEVAAALAEAGVAVFAWKGESEDDFWWCIDRCVNMDGWQANMILDDGGDLTHWVYKKYPNVFKKIRGIVEESVTGVHRLYQLSKAGKLCVPAMNVNDSVTKQKFDNLYCCRESILDGLKRTTDVMFGGKQVVVCGYGEVGKGCCAALKALGAIVYITEIDPICALQACMDGFRVVKLNEVIRQVDVVITCTGNKNVVTREHLDRMKNSCIVCNMGHSNTEIDVTSLRTPELTWERVRSQVDHVIWPDGKRVVLLAEGRLLNLSCSTVPTFVLSITATTQALALIELYNAPEGRYKQDVYLLPKKMDEYVASLHLPSFDAHLTELTDDQAKYLGLNKNGPFKPNYYRY

SEQ ID NO: 60075 - protein, 619 aa, Homo sapiens
LLNIMYLIVETVHQECEGDKAEWRTMRQTFRAELGSPLYNNEPFAIMLFGMVTKFCSGHAPHFPMKKVLLLLWKTVLCTLGGFEELQSMKAEKRSILGLPPLPEDSIKVIRNMRAASPPASASDLIEQQQKRGRREHKALIKQDNLDAFNERDPYKADDSREEEEENDDDNSLEGETFPLERDEVMPPPLQHPQTDRLTCPKGLPWAPKVREKDIEMFLESSRSKFIGYTLGSDTNTVVGLPRPIHESIKTLKQHKYTSIAEVQAQMEEEYLRSPLSGGEEEVEQVPAETLYQGLLPSLPQYMIALLKILLAAAPTSKAKTDSINILADVLPEEMPTTVLQSMKLGVDVNRHKEVIVKAISAVLLLLLKHFKLNHVYQFEYMAQHLVFANCIPLILKFFNQNIMSYITAKNSISVLDYPHCVVHELPELTAESLEAGDSNQFCWRNLFSCINLLRILNKLTKWKHSRTMMLVVFKSAPILKRALKVKQAMMQLYVLKLLKVQTKYLGRQWRKSNMKTMSAIYQKVRHRLNDDWAYGNDLDARPWDFQAEECALRANIERFNARRYDRAHSNPDFLPVDNCLQSVLGQRVDLPEDFQMNYDLWLEREVFSKPISWEELLQ

SEQ ID NO: 60076 - protein, 67 aa, Homo sapiens
LNTSSLLCDCHLKWLLQWLVDNNFQHSVNVSCAHPEWLAGQSILNVDLKDFVCGLYFCFKILYITHL

SEQ ID NO: 60077 - protein, 645 aa, Homo sapiens
KCHIAVGSPGRIKQLIELDYLNPGSIRLFILDEADKLLEEGSFQEQINWIYSSLPASKQMLAVSATYPEFLANALTKYMRDPTFVRLNSSDPSLIGLKQYYKVVNSYPLAHKVFEEKTQHLQELFSRIPFNQALVFSNLHSRAQHLADILSSKGFPAECISGNMNQNQRLDAMAKLKHFHCRVLISTDLTSRGIDAEKVNLVVNLDVPLDWETYMHRIGRAGRFGTLGLTVTYCCRGEEENMMMRIAQKCNINLLPLPDPIPSGLMEECVDWDVEVKAAVHTYGIASVPNQPLKKQIQKIERTLQIQKAHGDHMASSRNNSVSGLSVKSKNNTKQKLPVKSHSECGIIEKATSPKELGCDRQSEEQMKNSVQTPVENSTNSQHQVKEALPVSLPQIPCLSSFKIHQPYTLTFAELVEDYEHYIKEGLEKPVEIIRHYTGPGDQTVNPQNGFVRNKVIEQRVPVLASSSQSGDSESDSDSYSSRTSSQSKGNKSYLEGSSDNQLKDSESTPVDDRISLEQPPNGSDTPNPEKYQESPGIQMKTRLKEGASQRAKQSRRNLPRRSSFRLQTEAQEDDWYDCHREIRLSFSDTYQDYEEYWRAYYRAWQEYYAAASHSYYWNAQRHPSWMAAYHMNTIYLQEMMHSNQ

SEQ ID NO: 60078 - protein, 660 aa, Homo sapiens
VRLDTVGSDAYRLSVSRALSADQGSYRCIVSEWIAEQGNWQEIQEKAVEVATVVIQPSVLRAAVPKNVSVAEGKELDLTCNITTDRADDVRPEVTWSFSRMPDSTLPGSRVLARLDRDSLVHSSPHVALSHVDARSYHLLVRDVSKENSGYYYCHVSLWAPGHNRSWHKVAEAVSSPAGVGVTWLEPDYQVYLNASKVPGFADDPTELACRVVDTKSGEANVRFTVSWYYRMNRRSDNVVTSELLAVMDGDWTLKYGERSKQRAQDGDFIFSKEHTDTFNFRIQRTTEEDRGNYYCVVSAWTKQRNNSWVKSKDVFSKPVNIFWALEDSVLVVKARQPKPFFAAGNTFEMTCKVSSKNIKSPRYSVLIMAEKPVGDLSSPNETKYIISLDQDSVVKLENWTDASRVDGVVLEKVQEDEFRYRMYQTQVSDAGLYRCMVTAWSPVRGSLWREAATSLSNPIEIDFQTSGPIFNASVHSDTPSVIRGDLIKLFCIITVEGAALDPDDMAFDVSWFAVHSFGLDKAPVLLSSLDRKGIVTTSRRDWKSDLSLERVSVLEFLLQVHGSEDQDFGNYYCSVTPWVKSPTGSWQKEAEIHSKPVFITVKMDVLNAFKYPLLIGVGLSTVIGLLSCLIGYCSSHWCCKKEVQETRRERRRLMSMEMD

SEQ ID NO: 60079 - protein, 629 aa, Homo sapiens
RIPPLNLGPPSFPHHRATLRLSEKFILLLILSAFITLCFGAFFFLPDSSKHKRFDLGLEDVLIPHVDAGKGAKNPGVFLIHGPDEHRHREEEERLRNKIRADHEKALEEAKEKLRKSREEIRAEIQTEKNKVVQEMKIKENKPLPPVPIPNLVGIRGGDPEDNDIREKREKIKEMMKHAWDNYRTYGWGHNELRPIARKGHSPNIFGSSQMGATIVDALDTLYIMGLHDEFLDGQRWIEDNLDFSVNSEVSVFEVNIRFIGGLLAAYYLSGEEIFKIKAVQLAEKLLPAFNTPTGIPWAMVNLKSGVGRNWGWASAGSSILAEFGTLHMEFIHLSYLTGDLTYYKKVMHIRKLLQKMDRPNGLYPNYLNPRTGRWGQYHTSVGGLGDSFYEYLLKAWLMSDKTDHEARKMYDDAIEAIEKHLIKKSRGGLTFIGEWKNGHLEKKMGHLACFAGGMFALGADGSRADKAGHYLELGAEIARTCHESYDRTALKLGPESFKFDGAVEAVAVRQAEKYYILRPEVIETYWYLWRFTHDPRYRQWGWEAALAIEKYCRVNGGFSGVKDVYSSTPTHDDVQQSFFLAETLKYLYLLFSGDDLLPLDHWVFNTEAHPLPVLHLANTTLSGNPAVR

SEQ ID NO: 60080 - protein, 597 aa, Homo sapiens [sequence omitted]

SEQ ID NO: 60081 - protein, 4 aa, Homo sapiens
MYFP

SEQ ID NO: 60082 - protein, 25 aa, Homo sapiens
KDFHSPPVSLMSDPRPASGRCSSPG

SEQ ID NO: 60083 - protein, 14 aa, Homo sapiens
LQFSRLMLRLRLRL

SEQ ID NO: 60084 - protein, 78 aa, Homo sapiens
IENEEVKKTMEATLQTIQDIVTVEDFDVSDCFQYSNSMESVKSTVSETFMSKPSIAKRRANQQETEQFYFTVRECYGF

SEQ ID NO: 60085 - protein, 88 aa, Homo sapiens
IVVQKYHTINGHNCEVKKALSKQEMQSAGSQRGRGGGSGNFMGRGGNFGGGGGAMVVEVVAAEVVMEEVMVDIMDLEVMVATMVWSWL

SEQ ID NO: 60086 - protein, 100 aa, Homo sapiens
LYTYAAPTSAAALGSTSSIAHLFSPQGSSRHAAAYTTHPSTLVHQVPVSVGPSLLTSASVAPAQYQHQFATQSYIGSSRGSTIYTGYPLSPTKISQYSYL

SEQ ID NO: 60087 - protein, 477 aa, Homo sapiens
IQPPTGEPLLGNDSTRTEEVQDDNWGETTTAITGTSEHSISQEDIARISKDMEDSVGLDCKRYLGLTVASFLGLLVFLTPIAFILLPPILWRDELEPCGTICEGLFISMAFKLLILLIGTWALFFRKRRADMPRVFVFRALLLVLIFLFVVSYWLFYGVRILDSRDRNYQGIVQYAVSLVDALLFIHYLAIVLLELRQLQPMFTLQVVRSTDGESRFYSLGHLSIQRAALVVLENYYKDFTIYNPNLLTASKFRAAKHMAGLKVYNVDGPSNNATGQSRAMIAAAARRRDSSHNELYYEEAEHERRVKKRKARLVVAVEEAFIHIQRLQAEEQQKAPGEVMDPREAAQAIFPSMARALQKYLRITRQQNYHSMESILQHLAFCITNGMTPKAFLERYLSAGPTLQYDKDRWLSTQWRLVSDEAVTNGLRDGIVFVLKCLDFSLVVNVKKIPFIILSEEFIDPKSHKFVLRLQSETSV

SEQ ID NO: 60088 - protein, 287 aa, Homo sapiens
VDLPRRRRRRRRRRRRRRPRRCPPCVPLCCGRCWRSGCAGRPPRMCRDGYEPCVNKGMCVTYHSGTGYCKCPEGFLGEYCQHRDPCEKNRCQNGGTCVAQAMLGKATCRCASGFTGEDCQYSTPHPCFVSRPCLNGGTCHMLSRDTYECTCQVGFTGKECQWTDACLSHLCANGSTCTTVANQFSCKCLTGFTGQKCETDVNECDIPGHCQHGGTCLNLPGSYQCQCLQGFTGQYCDRLYVPCAHSPCVNGGTCRQTGDFTFECNCLPATWPIFPKLLSLQEKESYC

SEQ ID NO: 60089 - protein, 472 aa, Homo sapiens
VASGSGKWRQEPSLHFAMSFLIDSSIMITSQILFFGFGWLFFMRQLFKDYEIRQYVVQVIFSVTFAFSCTMFELIIFEILGVLNSSSRYFHWKMNLCVILLILVFMVPFYIGYFIVSNIRLLHKQRLLFSCLLWLTFMYFFWKLGDPFPILSPKHGILSIEQLISRVGVIGVTLMALLSGFGAVNCPYTYMSYFLRNVTDTDILALERRLLQTMDMIISKKKRMAMARRTMFQKGEVHNKPSGFWGMIKSVTTSASGSENLTLIQQEVDALEELSRQLFLETADLYATKERIEYSKTFKGKYFNFLGYFFSIYCVWKIFMATINIVFDRVGKTDPVTRGIEITVNYLGIQFDVKFWSQHISFILVGIIIVTSIRGLLITLTKFFYAISSSKSSNVIVLLLAQIMGMYFVSSVLLIRMSMPLEYRTIITEVLGELQFNFYHRWFDVIFLVSALSSILFLYLAHKQAPEKQMAP

SEQ ID NO: 60090 - protein, 488 aa, Homo sapiens
LDQVKKALCVLVQHNLVSYQVHKRGVVEYEAQCSRVLRMLRYPRYIYTTKTLYSDTGELIVEELLLNGKLTMSAVVKKVADRLTETMEDGKTMDYAEVSNTFVRLADTHFVQRCPSVPTTENSDPGPPPPAPTLVINEKDMYLVPKLSLIGKGKRRRSSDEDAAGEPKAKRPKYTTDNKEPIPDDGIYWQANLDRFHQHFRDQAIVSAVANRMDQTSSEIVRTMLRMSEITTSSSAPFTQPLSSNEIFRSLPVGYNISKQVLDQYLTLLADDPLEFVGKSGDSGGGMYVINLHKALASLATATLESVVQERFGSRCARIFRLVLQKKHIEQKQVEDFAMIPAKEAKDMLYKMLSENFMSLQEIPKTPDHAPSRTFYLYTVNILSAARMLLHRCYKSIANLIERRQFETKENKRLLEKSQRVEAIIASMQATGAEEAQLQEIEEMITAPERQQLETLKRNVNKLDASEIQVDETIFLLESYIECTMKRQ

SEQ ID NO: 60091 - protein, 235 aa, Homo sapiens
MTSGKIKKFIQENIFGICPHMTEDNKDLIQGKDLLIAYYDVDYEKNAKGSNYWRNRVMMVAKKFLDAGHKLNFAVASRKTFSHELSDFGLESTAGEIPVVAIRTAKGEKFVMQEDFSRDGNALERFLQDYFDGNLKRYLKSEPIPESNDGPVKVVVAENFDEIVNNENKDVLIEFYAPWCGHCKNLEPKYKELGEKLSKDLNIVIAKMDATANDVPSPYEVRVFLPYTSLQPTRS

SEQ ID NO: 60092 - protein, 133 aa, Homo sapiens
IYELAGKMKDLSLGGVLLFPVDDKESRNKGQDLLALIVAQHRDRSNVLSGIKMAALEEGLKKIFLAAKKKKASVHLPRIGHATKGFNWYGTERLIRKHLAARGIPTYIYYFPRSKSAVLHSQSSSSSSRQLVP

SEQ ID NO: 60093 - protein, 472 aa, Homo sapiens; identical to SEQ ID NO: 60089

SEQ ID NO: 60094 - protein, 249 aa, Homo sapiens
MCRDGYEPCVNEGMCVTYHNGTGYCKCPEGFLGEYCQHRDPCEKNRCQNGGTCVAQAMLGKATCRCASGFTGEDCQYSTSHPCFVSRPCLNGGTCHMLSRDTYECTCQVGFTGKECQWTDACLSHPCANGSTCTTVANQFSCKCLTGFTGQKCETDVNECDIPGHCQHGGTCLNLPGSYQCQCLQGFTGQYCDSLYVPCAPSPCVNGGTCRQTGDFTFECNCLPETVRRGTELWERDREVWNGKEHDEN

SEQ ID NO: 60095 - protein, 33 aa, Homo sapiens
MIMKALFSWSRLIHCVPDVLTSAISPNVGNSTA

SEQ ID NO: 60096 - protein, 234 aa, Homo sapiens
MRDYFAEDDGEMVPRTSHTAAFLSDTKDRGPPVQSQIWRSGEKVPFVQTYSLRAFEKPPQVQTQALRDFEKHLNDLKKENFSLKLRIYFLEERMQQKYEASREDIYKRNIELKVEVESLKRELQDKKQHLDKTWADVENLNSQNEAELRRQFEERQQETEHVYELLENKIQLLQEESRLAKNEAARMAALVEAEKECNLELSEKLKGVTKNWEDVPGDQVKPDQYTEALAQRDK

SEQ ID NO: 60097 - protein, 265 aa, Homo sapiens
KMEAFLGSRSGLWAGGPAPGQFYRIPSTPDSFMDPASALYRGPITRTQNPMVTGTSVLGVKFEGGVVIAADMLGSYGSLARFRNISRIMRVNNSTMLGASGDYADFQYLKQVLGQMVIDEELLGDGHSYSPRAIHSWLTRAMYSRRSKMNPLWNTMVIGGYADGESFLGYVDMLGVAYEAPSLATGYGAYLAQPLLREVLEKQPVLSQTEARDLVERCMRVLYYRDARSYNRFQIATVTEKGVEIEGPLSTETNWDIAHMISGFE

SEQ ID NO: 60098 - protein, 425 aa, Homo sapiens
VVDLIRAGEKELILTVLSVPPHEADNLDPSDDSLGQSFYDYTEKQAVPISVPRYKHVEQNGEKFVVYNVYMAGRQLCSKRYREFAILHQNLKREFANFTFPRLPGKWPFSLSEQQLDARRRGLEEYLEKVCSIRVIGESDIMQEFLSESDENYNGVSDVELRVALPDGTTVTVRVKKNSTTDQVYQAIAAKVGMDSTTVNYFALFEVISHSFVRKLAPNEFPHKLYIQNYTSAVPGTCLTIRKWLFTTEEEILLNDNDLAVTYFFHQAVDDVKKGYIKAEEKSYQLQKLYEQRKMVMYLNMLRTCEGYNEIIFPHCACDSRRKGHVITAISITHFKLHACTEEGQLENQVIAFEWDEMQRWDTDEEGMAFCFEYARGEKKPRWVKIFTPYFNYMHECFERVFCELKWRKENIFQMARSQQRDVAT

SEQ ID NO: 60099 - protein, 34 aa, Homo sapiens
IKEELVLKLTTVTATRQASVAGPSHPDLPERTHL

SEQ ID NO: 60100 - skipped

SEQ ID NO: 60101 - protein, 138 aa, Homo sapiens
LTGRDGSLASNPYSGDLTKFGRGDASSPAPATTLAQPQQNQTQTHHTTQQTFLNPALPPGYSYTSLPYYTGVPGLPSTFQYGPAVFPVAPTSSKQHGVNVSVNASATPFQQPSGYGSHGYNTGRKYPPPYKHFWTAES

SEQ ID NO: 60102 - protein, 300 aa, Homo sapiens
RFPPSANGPLEGFKGSRPSTGMSLFDLFRGFFGFPGPRSHRDPFFGGMTRDEDDDEEEEEEGGSWGRGNPRFHSPQHPPEEFGFGFSFSPGGGIRFHDNFGFDDLVRDFNSIFSDMGAWTLPSHPPELPGPESETPGERLREGQTLRDSMLKYPDSHQPRIFGGVLESDARSESPQPAPDWGSQRPFHRFDDVWPMDPHPRTREDNDLDSQVSQEGLGPVLQPQPKSYFKSISVTKITKPDGIVEERRTVVDSEGRTETTVTRHEADSSPRGDPESPRPPALDDAFSILDLFLGRWFRSR

SEQ ID NO: 60103 - protein, 45 aa, Homo sapiens
MRNSSMRVTASRPPSTIFSPSCLSTSLSSSRKLPTLTSCSSSFCS

SEQ ID NO: 60104 - protein, 164 aa, Homo sapiens
VICEPPNNKLDKFSGTLYWKENKFPLSNQNMLLRGCVLRNTEWCFGLVIFAGPDTKLMQNSGRTKFKRTSIDRLMNTLVLWIFGFLVCMGVILAIGNAIWEHEVGMRFQVYLPWDEAVDSAFFSGFLSFWSYIIILNTVVPISLYVSPECGGHPSGPQLLHQLG

SEQ ID NO: 60105 - protein, 240 aa, Homo sapiens
KYNADYDLSAQQGADTLAFMSLLEEKLIPVLVHTFWIDTKNYVEVTRKWYAEAMPFPLNFFLPGRMQRQYMERLQLLTGEHRPEDEEELEKELYREARECLTLLSQRLGSQKFFFGDAPASLDAFVFSYLALLLQAKLPSGKLQVHLRGLHNLCAYCTHILSLYFPWDGAEVPPQRQTPAGPETEEEPYRRRNQILSVLAGLAAMVGYALLSGIVSIQRATPARAPGTRTLGMAEEDEEE

SEQ ID NO: 60106 - protein, 86 aa, Homo sapiens
MAVYTYLRLIVDHHGTAQLQALRQKEVDFCISLLRERFMECLMIGRDLVRLLQNVARIPEFELLWKDIIHNPQALSPQFTGWCAMA

SEQ ID NO: 60107 - protein, 400 aa, Homo sapiens
LYIFTSGTTGLPKAARISHLKILQCQGFYQLCGVHQEDVIYLALPLYHMSGSLLGIVGCMGIGATVVLKSKFSAGQFWEDCQQHRVTVFQYIGELCRYLVNQPPSKAERGHKVRLAVGSGLRPDTWERFVRRFGPLQVLETYGLTEGNVATINYTGQRGAVGRASWLYKHIFPFSLIRYDVTTGEPIRDPQGHCMATSPGEPGLLVAPVSQQSPFLGYAGGPELAQGKLLKDVFRPGDVFFNTGDLLVCDDQGFLRFHDRTGDTFRWKGENVATTEVAEVFEALDFLQEVNVYGVTVPGHEGRAGMAALVLRPPHALDLMQLYTHVSENLPPYARPRFLRLQESLATTETFKQQKVRMANEGFDPSTLSDPLYVLDQAVGAYLPLTTARYSALLAGNLRI

SEQ ID NO: 60108 - protein, 234 aa, Homo sapiens
KQITQEEDDSDEEVAPENFFSLPEKAEPPGVEPYPYPIPTVPEELPPGTEPEPAFQDDAANAPLEFKMAAGSSGAPWMPKPGDDYSYNQFSTYGDANAAGAYYQDYYSGGYYPAQDPALVPPQEIAPDASFIDDEAFKRLQGKRNRGREEINFVEIKGDDQLSGAQQWMTKSLTEEKTMKSFSKKKGEQPTGQQRRKHQITYLIHQAKERELELKNTWSENKLSRRQTQAKYGF

SEQ ID NO: 60109 - protein, 140 aa, Homo sapiens
VLPGRLAGLALPRLPAHYQFLLDLGVRHLVSLTERGPPHSDSCPGLTLHRLRIPDFCPPAPDQIDRFVQIVDEANARGEAVGVHCALGFGRTGTMLACYLVKERGLAAGDAIAEIRRLRPGSIETYEQEKAVFQFYQRTK

SEQ ID NO: 60110 - protein, 60 aa, Homo sapiens
KNSIILTFRQLMAEEGPWGLMKGLSARIISATPSTIVIVVGYESLKKLSLRPELVDSRHW

SEQ ID NO: 60111 - protein, 171 aa, Homo sapiens [sequence omitted]

SEQ ID NO: 60112 - protein, 13 aa, Homo sapiens
LFVYMSSSSSSSS

SEQ ID NO: 60113 - protein, 447 aa, Homo sapiens
LSHHCKNVIATASDYDMAEITNIRPSFDVSPVVAGLIGASVLVVCVSVTVFVWSCCHQQAEKKQKNPPYKFIHMLKGISIYPETLSNKKKIIKVRRDKDGPGREGGRRNLLVDAAEAGLLSRDKDPRGPSSGSCIDQLPIKMDYGEELRSPITSLTPGESKTTSPSSPEEDVMLGSLTFSVDYNFPKKALVVTIQEAHGLPVMDDQTQGSDPYIKMTILPDKRHRVKTRVLRKTLDPVFDETFTFYGIPYSQLQDLVLHFLVLSFDRFSRDDVIGEVMVPLAGVDPSTGKVQLTRDIIKRNIQKCISRGELQVSLSYQPVAQRMTVVVLKARHLPKMDITGLSGNPYVKVNVYYGRKRIAKKKTHVKKCTLNPIFNESFIYDIPTDLLPDISIEFLVIDFDRTTKNEVVGRLILGAHSVTASGAEHWREVCESPRKPVAKWHSLSEY

SEQ ID NO: 60114 - protein, 60 aa, Homo sapiens
LGVMDGQLLCPKCSAKLGSFNWYGEQCSCGRWITPAFQIHKNRVDEMKILPVLGSQTGKI

SEQ ID NO: 60115 - protein, 648 aa, Homo sapiens
LDEDWDSALFAELGYFTDTDELQLEAANETYENNFDNLDFDLDLMPWESDIWDINNQICTVKDIKAEPQPLSPASSSYSVSSPRSVDSYSSTQHVPEELDLSSSSQMSPLSLYGENSNSLSSAEPLKEDKPVTGPRNKTENGLTPKKKIQVNSKPSIQPKPLLLPAAPKTQTNSSVPAKTIIIQTVPTLMPLAKQQPIISLQPAPTKGQTVLLSQPTVVQLQAPGVLPSAQPVLAVAGGVTQLPNHVVNVVPAPSANSPVNGKLSVTKPVLQSTMRNVGSDIAVLRRQQRMIKNRESACQSRKKKKEYMLGLEARLKAALSENEQLKKENGTLKRQLDEVVSENQRLKVPSPKRRVVCVMIVLAFIILNYGPMSMLEQDSRRMNPSVSPANQRRHLLGFSAKEAQDTSDGIIQKNSYRYDHSVSNDKALMVLTEEPLLYIPPPPCQPLINTTESLRLNHELRGWVHRHEVERTKSRRMTNNQQKTRILQGALEQGSNSQLMAVQYTETTSSISRNSGSELQVYYASPRSYQDFFEAIRRRGDTFYVVSFRRDHLLLPATTHNKTTRPKMSIVLPAININENVINGQDYEVMMQIDCQVMDTRILHIKSSSVPPYLRDQQRNQTNTFFGSPPAATEATHVVSTIPESLQ

SEQ ID NO: 60116 - protein, 48 aa, Homo sapiens
IQWNSLGNGLAYEDFSFPIFLLEDENETKVIKQKSSVTPCLITMCGAC

SEQ ID NO: 60117 - protein, 6 aa, Homo sapiens
KFSLFV

SEQ ID NO: 60118 - protein, 11 aa, Homo sapiens
MHICKRIKPQI

SEQ ID NO: 60119 - protein, 322 aa, Homo sapiens
LAPSGNPAPSPGSERLAGERQRPQPRQRPAAAAESGGSPTRARAGSVRPFAQAAGGGAARTMAGDSEQTLQNHQQPNGGEPFLIGVSGGTASGKSSVCAKIVQLLGQNEVDYRQKQVVILSQDSFYRVLTSEQKAKALKGQFNFDHPDAFDNELILKTLKEITEGKTVQIPVYDFVSHSRKEETVTVYPADVVLFEGILAFYSQEVRDLFQMKLFVDTDADTRLSRRVLRDISERGRDLEQILSQYITFVKPAFEEFCLPTKKYADVIIPRGADNLVAINLIVQHIQDILNGGPSKRQTNGCLNGYTPSRKRQASESSSRPH

SEQ ID NO: 60120 - protein, 10 aa, Homo sapiens
ITVFKKTPWR

SEQ ID NO: 60121 - protein, 181 aa, Homo sapiens; identical to SEQ ID NO: 19301

SEQ ID NO: 60122 - protein, 340 aa, Homo sapiens
LEQLQGHRNIVTLYGVFTIHFSPNVPSRCLLLELLDVSVSELLLYSSHQGCSMWMIQHCARDVLEALAFLHHEGYVHADLKPRNILWSAENECFKLIDFGLSFKEGNQDVKYIQTDGYRAPEAELQNCLAQAGLQSDTECTSAVDLWSLGIILLEMFSGMKLKHTVRSQEWKANSSAIIDHIFASKAVVNAAIPAYHLRDLIKSMLHDDPSRRIPAEMALCSPFFSIPFAPHIEDLVMLPTPVLRLLNVLDDDYLENEEEYEDVVEDVKEECQKYGPVVSLLVPKENPGRGQVFVEYANAGDSKAAQKLLTGRMFDGKFVVATFYPLSAYKRGYLYQTLL

SEQ ID NO: 60123 - protein, 38 aa, Homo sapiens
LEWGNKSMWLFFRGKNSHCSVPEPACGGQAPQMVSHRE

SEQ ID NO: 60124 - protein, 5 aa, Homo sapiens
MESPC

SEQ ID NO: 60125 - protein, 17 aa, Homo sapiens
LAPQRTLRRLATYQQVG

SEQ ID NO: 60126 - protein, 2719 aa, Homo sapiens
VPPAQPKPGVAAPPEVAPAPKSWASNKQGGQGDGIQVNSQFQQEFPSLQAAGDQEKKEKETNDDNYGPGPSLRPPNVACWRDGGKAAGSPSSSDQDEKLPGQDESTAGTSEQNDILKVVEKRIACGPPQAKLNGQQAALASQYRAMMPPYMFQQYPRMTYPPLHGPMRFPPSLSETNKGLRGRGPPPSWASEPERPSILSASELKELDKFDNLDAEADEGWAGAQMEVDYTEQLNFSDDDEQGSNSPKENNSEDQGSKASENNENKKETDEVSNTKSSSQIPAQPSVAKVPYGKGPSFNQERGTSSHLPPPPKLLAQQHPPPDRQAVPGRPGPFPSKQQVADEDEIWKQRRRQQSEISAAVERARKRREEEERRMEEQRKAACAEKLKRLDEKLGILEKQPSPEEIREREREKEREREKELEKEQEQEREKEREKDRERQQEKEKELEKEQEKQREMEKERKQEKEKELERQKEKEKELQKMKEQEKECELEKEREKLEEKIEPREPNLEPMVEKQESENSCNKEEEPVFTRQDSNRSEKEATPVVHETEPESGSQPRPAVLSGYFKQFQKSLPPRFQRQQEQMKQQQWQQQQQQGVLPQTVPSQPSSSTVPPPPHRPLYQPMQPHPQHLASMGFDPRWLMMQSYMDPRMMSGRPAMDIPPIHPGMIPPKPLMRRDQMEGSPNSSESFEHIARSARDHAISLSEPRMLWGSDPYPHAEPQQATTPKATEEPEDVRSEAALDQEQITAAYSVEHNQLEAHPKADFIRESSEAQVQKFLSRSVEDVRPHHTDANNQSACFEAPDQKTLSAPQEERISAVESQPSRKRSVSHGSNHTQKPDEQRSEPSAGIPKVTSRCIDSKEPIERPEEKPKKEGFIRSSEGPKPEKVYKSKSETRWGPRPSSNRREEVNDRPVRRSGPIKKPVLRDMKEEREQRKEKEGEKAEKVTEKVVVKPEKTEKKDLPPPPPPPQPPAPIQPQSVPPPIQPEAEKFPSTETATLAQKPSQDTEKPLEPVSTVQVEPAVKTVNQQTMAAPVVKEEKQPEKVISKDLVIERPRPDSRPAVKKESTLPPRTYWKEARERDWFPDQGYRGRGRGEYYSRGRSYRGSYGGRGRGGRGHTRDYPQYRDNKPRAEHIPSGPLRQREESETRSESSDFEVVPKRRRQRGSETDTDSEIHESASDKDSLSKGKLPKREERPENKKPVKPHSSFKPDNHVRIDNRLLEKPYVRDDDKAKPGFLPKGEPTRRGRGGTFRRGGRDPGGRPSRPSTLRRPAYRDNQWNPRQSEVPKPEDGEPPRRHEQFIPIAADKRPPKFERKFDPARERPRRQRPTRPPRQDKPPRFRRLREREAASKSNEVVAVPTNGTVNNVAQEPVNTLGDISGNKTPDLSNQNSSDQANEEWETASESSDFNERRERDEKKNADLNAQTVVKVGENVLPPKREIAKRSFSSQRPVDRQNRRGNNGPPKSGRNFSGPRNERRSGPPSKSGKRGPFDDQPAGTTGVDLINGSSAHHQEGVPNGTGQKNSKDSTGKKREDPKPGPKKPKEKVDALSQFDLNNYASVVIIDDHPEVTVIEDPQSNLNDDGFTEVVSKKQQKRLQDEERRKKEEQVIQVWNKKNANEKGRSQTSKLPPRFAKKQATGIQQAQSSASVPPLASAPLPPSTSASVPASTSAPLPATLTPVPASTSAPVPASTLAPVLASTSAPVPASPLAPVSASASVSASVPASTSAAAITSSSAPASAPAPTPILASVSTPASVTILASASIPILASALASTSAPTPAPAASSPAAPVITAPTIPASAPTASVPLAPASASAPAPAPTPVSAPNPAPPAPAQTQAQTHKPVQNPLQTTSQSSKQPPPSIRLPSAQTPNGTDYVASGKSIQTPQSHGTLTAELWDNKVAPPAVLNDISKKLGPISPPQPPSVSAWNKPLTSFGSAPSSEGAKNGQESGLEIGTDTIQFGAPASNGNENEVVPVLSEKSADKIPEPKEQRQKQPRAGPIKAQKLPDLSPVENKEHKPGPIGKERSLKNRKVKDAQQVEPEGQEKPSPATVRSTDPVTTKETKAVSEMSTEIGTMISVSSAEYGTNAKESVTDYTTPSSSLPNTVATNNTKMEDTLVNNVPLPNTLPLPKRETIQQSSSLTSVPPTTFSLTFKMESARKAWENSPNVREKGSPVTSTAPPIATGVSSSASGPSTANYNSFSSASMPQIPVASVTPTASLSGAGTYTTSSLSTKSTTTSDPPNICKVKPQQLQTSSLPSASHFSQLSCMPSLIAQQQQNPQVYVSQSAAAQIPAFYMDTSHLFNTQHARLAPPSLAQQQGFQPGLSQPTSVQQIPIPIYAPLQGQHQAQLSLGAGPAVSQAQELFSSSLQPYRSQPAFMQSSLSQPSVVLSGTAIHNFPTVQHQELAKAQSGLAFQQTSNTQPIPILYEHQLGQASGLGGSQLIDTHLLQARANLTQASNLYSGQVQQPGQTNFYNTAQSPSALQQVTVPLPASQLSLPNFGSTGQPLIALPQTLQPPLQHTTPQAQAQSLSRPAQVSQPFRGLIPAGTQHSMIATTGKMSEMELKAFGSGIDIKPGTPPIAGRSTTPTSSPFRATSTSPNSQSSKMNSIVYQKQFQSAPATVRMTQPFPTQFAPQAKQRAEVLQSTQRFFSEQQQSKQIGGGKAQKVDSDSSKPPETLTDPPGVCQEKVEEKPPPAPSIATKPVRTGPIKPQAIKTEETKS

SEQ ID NO: 60127 - protein, 37 aa, Homo sapiens
IFTSATTSKVACTAASTSRSTGSTWKTRPLSLQAASS

SEQ ID NO: 60128 - protein, 101 aa, Homo sapiens
ITMEHLEPHLQAEIVETIDNGFGHSRLVKENLIDYFIPFLPLEYRHVRLCARDAFLSQELLYKEETLDEIAQMMVYVPKEEQLFSSQGCKSISQRINYFLS

SEQ ID NO: 60129 - protein, 602 aa, Homo sapiens
RCTNIRPGETGMDVTSRCTLGDPNKLPEGVPQPARMPYISDKHPRQTLEVINLLRKHRELCDVVLVVGAKKIYAHRVILSACSPYFRAMFTGELAESRQTEVVIRDIDERAMELLIDFAYTSQITVEEGNVQTLLPAACLLQLAEIQEACCEFLKRQLDPSNCLGIRAFADTHSCRELLRIADKFTQHNFQEVMESEEFMLLPANQLIDIISSDELNVRSEEQVFNAVMAWVKYSIQERRPQLPQVLQHVRLPLLSPKFLVGTVGSDPLIKSDEECRDLVDEAKNYLLLPQERPLMQGPRTRPRKPIRCGEVLFAVGGWCSGDAISSVERYDPQTNEWRMVASMSKRRCGVGVSVLDDLLYAVGGHDGSSYLNSVERYDPKTNQWSSDVAPTSTCRTSVGVAVLGGFLYAVGGQDGVSCLNIVERYDPKENKWTRVASMSTRRLGVAVAVLGGFLYAVGGSDGTSPLNTVERYNPQENRWHTIAPMGTRRKHLGCAVYQDMIYAVGGRDDTTELSSAERYNPRTNQWSPVVAMTSRRSGVGLAVVNGQLMAVGGFDGTTYLKTIEVFDPDANTWRLYGGMNYRRLGGGVGVIKMTHCESHIW

SEQ ID NO: 60130 - protein, 8 aa, Homo sapiens
MTIMANIF

SEQ ID NO: 60131 - protein, 91 aa, Homo sapiens
VIQRAMLKHNLDSDPAEEYELVQVISEDKELVIPDSANVFYAMNSQVNFDFILRKKNSMEEQVKLRSRTSLTLPRTAKRGCWSNRHSKITL

SEQ ID NO: 60132 - protein, 45 aa, Homo sapiens
VNFDFILRKKNSMEEQVKLRSRTSLTLPRTAKRGCWSNRHSKITL

SEQ ID NO: 60133 - protein, 305 aa, Homo sapiens
ITDGLEIVVSPRSLHSELMCPICLDMLKNTMTTKECLHRFCADCIITALRSGNKECPTCRKKLVSKRSLRPDPNFDALISKIYPSRDEYEAHQERVLARINKHNNQQALSHSIEEGLKIQAMNRLQRGKKQQIENGSGAEDNGDSSHCSNASTHSNQEAGPSNKRTKTSDDSGLELDNNNAAMAIDPVMDGASEIELVFRPHPTLMEKDDSAQTRYIKTSGNATVDHLSKYLAVRLALEELRSKGESNQMNLDTASEKQYTIYIATASGQFTVLNGSFSLELVSEKYWKVNKPMELYYAPTKEHK

SEQ ID NO: 60134 - protein, 167 aa, Homo sapiens
LSYFLQNSSTPGKPKTGKKSKQQAFIKPSPEEAQLWSEAFDELLASKYGLAAFRAFLKSEFCEENIEFWLACEDFKKTKSPQKLSSKARKIYTDFIEKEAPKEINIDFQTKTLIAQNIQEATSGCFTTAQKRVYSLMENNSYPRFLESEFYQDLCKKPQITTEPHAT

SEQ ID NO: 60135 - protein, 535 aa, Homo sapiens
RGGKMADVLSVLRQYNIQKKEIVVKGDEVIFGEFSWPKNVKTNYVVWGTGKEGQPREYYTLDSILFLLNNVHLSHPVYVRRAATENIPVVRRPDRKDLLGYLNGEASTSASIDRSAPLEIGLQRSTQVKRAADEVLAEAKKPRIEDEECVRLDKERLAARLEGHKEGIVQTEQIRSLSEAMSVEKIAAIKAKIMAKKRSTIKTDLDDDITALKQRSFVDAEVDVTRDIVSRERVWRTRTTILQSTGKNFSKNIFAILQSVKAREEGRAPEQRPAPNAAPVDPTLRTKQPIPAAYNRYDQERFKGKEETEGFKIDTMGTYHGMTLKSVTEGASARKTQTPAAQPVPRPVSQARPPPNQKKGSRTPIIIIPAATTSLITMLNAKDLLQDLKFVPSDEKKKQGCQRENETLIQRRKDQMQPGGTAISVTVPYRVVDQPLKLMPQDWDRVVAVFVQGPAWQFKGWPWLLPDGSPVDIFAKIKAFHLKYDEVRLDPNVQKWDVTVLELSYHKRHLDRPVFLRFWETLDRYMVKHKSHLRF

SEQ ID NO: 60136 - protein, 11 aa, Homo sapiens
IRRKDLEHPLS

SEQ ID NO: 60137 - protein, 43 aa, Homo sapiens
KNRLWGPLEVRRVGRSSKQLVDIPEGQLEARAGRGRGQWLQLI

SEQ ID NO: 60138 - protein, 22 aa, Homo sapiens
LKLYLKSLFKLSSKVPVASDNG

SEQ ID NO: 60139 - protein, 168 aa, Homo sapiens
MSKYPSGERVRYECRSPYEMFGDEEVMCLNGNWTEPPQCKDSTGKCGPPPPIDNGDITSFPLSVYAPASSVEYQCQNLYQLEGNKRITCRNGQWSEPPKCLHPCVISREIMENYNIALRWTAKQKLYLRTGESAEFVCKRGYRLSSRSHTLRTTCWDGKLEYPTCAKR

SEQ ID NO: 60140 - protein, 248 aa, Homo sapiens
LKLMEDMDTVIKPRPQVVKQKKQRPKSIHRDHIESPKTPIKGPPVSSLSLASLNTGDNESVHSGKRTPRSESVEGFLSPSRCGSRNGEKDWENASTTSSVASGTEYTGPKLYKEPSAKSNKHIIQNALAHCCLAGKVNEGQKKKILEEMEKSDANNFLILFRDSGCQFRSLYTYCPETEEINKLTGIGPKSITKKMIEGLYKYNSDRKQFSHIPAKTLSASVDAITIHSHLWQTKRPVTPKKLLPTKA

SEQ ID NO: 60141 - protein, 181 aa, Homo sapiens
VALCKLLQHGINADDKRLQDIRVKGEEIYSMDEGIRTRSKSAKNPERWTNIPLLVKILKLIINELSNVMEANAARQATPAEWSQDDSNDMWEDQEEEEEEEEDGLAGQLLSDILATSKYEEDYYEDDEEDDPDALKDPLYQIDLQAYLTDFLCQFAQQPCYIMFSGHLNDNERRVLQTIGI

SEQ ID NO: 60142 - protein, 219 aa, Homo sapiens
LAGLVLRSLLWEARPRPRPAPTMPPAGLRRAAPLTAIALLVLGAPLVLAGEDCLWYLDRNGSWHPGFNCEFFTFCCGTCYHRYCCRDLTLLITERQQKHCLAFSPKTIAGIASAVILFVAVVATTICCFLCSCCYLYRRRQQLQSPFEGQEIPMTGIPVQPVYPYPQDPKAGPAPPQPGFIYPPSGPAPQYPLYPAGPPVYNPAAPPPYMPPQPSYPGA

SEQ ID NO: 60143 - protein, 36 aa, Homo sapiens
RMARQPPPPWVHAAFLLCLLSLGGAIEIPMDRPLWS

SEQ ID NO: 60144 - protein, 2075 aa, Homo sapiens
IPTPGASPQLRPRQAGLALSPQRAASPRLGKAAGPSRNSSPRAFRGRGSPKFAGAVRESAEDGEGPFSSPWNSPRTTPKAALSSRAGSGRIGERQGTQGKKKKAQEGTPVCQTRGRSPSRTSFHGETQIPGAPEGRKPPSCPGKDQRDINYKSSGTPRSLEPDEGAASWASSPVCSPVQGKRPSPSPGAISFSSVHQQSQPVTATVAPFQYRLQTDQKPGPLSQGSWPLDGYAEPLHETEESFSCMDARIVHALLAGRMLGSSVKSVQPEVELSSGGGDEGADEPRGAGRKAAAADGRGMLPKRAKAPGGGGGMAKASAAELKVFKSGSVDSRVPGGPPASNLRKQKSLTNLSFLTDSEKKLQLYEPEWSDDMAKAPKGLGKVGSKGREAPLMSKTLSKSEHSLFQAKGSPAGGAKTPLAPLAPNLGKPSRIPRGPYAEVKPLSKAPEAAVSEDGKSDDELLSSKAKAQKSSGPVPSAKGQEERAFLKVDPELVVTVLGDLEQLLFSQMLDPESQRKRTVQNVLDLRQNLEETMSSLRGSQVTHSSLEMTCYDSDDANPRSVSSLSNRSSPLSWRYGQSSPRLQAGDAPSVGGSCRSEGTPAWYMHGERAHYSHTMPMRSPSKLSHISRLELVESLDSDEVDLKSGYMSDSDLMGKTMTEDDDITTGWDESSSISSGLSDASDNLSSEEFNASSSLNSLPSTPTASRRNSTIVLRTDSEKRSLAESGLSWFSESEEKAPKKLEYDSGSLKMEPGTSKWRRERPESCDDSSKGGELKKPISLGHPGSLKKGKTPPVAVTSPITHTAQSALKVAGKPEGKATDKGKLAVKNTGLQRSSSDAGRDRLSDAKKPPSGIARPSTSGSFGYKKPPPATGTATVMQTGGSATLSKIQKSSGIPVKPVNGRKTSLDVSNSAEPGFLAPGARSNIQYRSLPRPAKSSSMSVTGGRGGPRPVSSSIDPSLLSTKQGGLTPSRLKEPTKVASGRTTPAPVNQTDREKEKAKAKAVALDSDNISLKSIGSPESTPKNQASHPTATKLAELPPTPLRATAKSFVKPPSLANLDKVNSNSLDLPSSSDTTHASKVPDLHATSSASGGPLPSCFTPSPAPILNINSASFSQGLELMSGFSVPKETRMYPKLSGLHRSMESLQMPMSLPSAFPSSTPVPTPPAPPAAPTEEETEELTWSGSPRAGQLDSNQRDRNTLPKKGLRYQLQSQEETKERRHSHTIGGLPESDDQSELPSPPALPMSLSAKGQLTNIVHGSVLSLASSASSTYSSAEERMQSEQIRKLRRELESSQEKVATLTSQLSANANLVAAFEQSLVNMTSRLRHLAETAEEKDTELLDLRETIDFLKKKNSEAQAVIQGALNASETTPKELRIKRQNSSDSISSLNSITSHSSIGSSKDADAKKKKKKSWLRSSFNKAFSIKKGPKSASSYSDIEEIATPDSSAPSSPKLQHGSTETASPSIKSSTSSSVGTDVTEGPAHPAPHTRLFHANEEEEPEKKEVSELRSELWEKEMKLTDIRLEALNSAHQLDQLRETMHNMQLEVDLLKAENDRLKVAPGPSSGSTPGQVPGSSALSSPRRSLGLALTHSFGPSLADTDLSPMDGISTCGPKEEVTLRVVVRMPPQHIIKGDLKQQEFFLGCSKVSGKVDWKMLDEAVFQVFKDYISKMDPASTLGLSTESIHGYSISHVKRVLDAEPPEMPPCRRGVNNISVSLKGLKEKCVDSLVFETLIPKPMMQHYISLLLKHRRLVLSGPSGTGKTYLTNRLAEYLVERSGREVTEGIVSTFNMHQQSCKDLQLYLSNLANQIDRETGIGDVPLVILLDDLSEAGSISELVNGALTCKYHKCPYIIGTTNQPVKMTPNHGLHLSFRMLTFSNNVEPANGFLVRYLRRKLVESDSDINANKEELLRVLDWVPKLWYHLHTFLEKHSTSDFLIGPCFFLSCPIGIEDFRTWFIDLWNNSIIPYLQEGAKDGIKVHGQKAAWEDPVEWVRDTLPWPSAQQDQSKLYHLPPPTVGPHSIASPPEDRTVKDSTPSSLDSDPLMAMLLKLQEAANYIESPDRETILDPNLQATL

SEQ ID NO: 60145 - protein, 78 aa, Homo sapiens; identical to SEQ ID NO: 60084

SEQ ID NO: 60146 - protein, 372 aa, Homo sapiens
KGSFGQVARVYDHKLRQYVALKMVRNEKRFHRQAAEEIRILEHLKKQDKTGSMNVIHMLESFTFRNHVCMAFELLSIDLYELIKKNKFQGFSVQLVRKFAQSILQSLDALHKNKIIHCDLKPENILLKHHGRSSTKVIDFGSSCFEYQKLYTYIQSRFYRAPEIILGSRYSTPIDIWSFGCILAELLTGQPLFPGEDEGDQLACMMELLGMPPPKLLEQSKRAKYFINSKGIPRYCSVTTQADGRVVLVGGRSRRGKKRGPPGSKDWGTALKGCDDYLFIEFLKRCLHWDPSARLTPAQALRHPWISKSVPRPLTTIDKVSGKRVVNPASAFQGLGSKLPPVVGIANKLKANLMSETNGSIPLCSVLPKLIS

SEQ ID NO: 60147 - protein, 34 aa, Homo sapiens
KKKQLMRLRKRAEKNVEKKTDKYTEVLKTHGLLV

SEQ ID NO: 60148 - protein, 19 aa, Homo sapiens
TCFTLTGLLGTLVTMGLLT

SEQ ID NO: 60149 - protein, 215 aa, Homo sapiens
INSVFNKYCVNMQGQVAVRNVPMTGSISHVLVQLPHVFQRMEAENLASVIDARFNFFVNKILPQYRDAVMSHTLIYIPSYFDFVRLRNYFKKEELNFTHICEYTQKSGVSRARHFFLQGEKQFLLFTERFHFYKRYTIKGIRNLIFYELPTYPHFYSEICNMLRATNRGEEATWTCTVLYSKYDAQRLAAVVGVERAAQMLQSNKNVHLFITGEK

SEQ ID NO: 60150 - protein, 4 aa, Homo sapiens
IFIF

SEQ ID NO: 60151 - protein, 62 aa, Homo sapiens
METFKPDPNSSSFKRPDGEMNIASGCPRFVAHSVLENAKNAYIKDDTLFLKVAVDLTDLEDL

SEQ ID NO: 60152 - protein, 11 aa, Homo sapiens
IQQIKEGTLQS

SEQ ID NO: 60153 - protein, 53 aa, Homo sapiens
IFQALVLDLEKEAVELEIAMLFRVNVCRYWGKGRDQSKNGSGLKFIFHFLLSL

SEQ ID NO: 60154 - protein, 28 aa, Homo sapiens
IPGKLTSIKCVIDWNSVKTQMFLFRATS

SEQ ID NO: 60155 - protein, 33 aa, Homo sapiens
LYVYYIHKTLYFYIQVCFYYTDNKDGGRFLFFS

SEQ ID NO: 60156 - protein, 281 aa, Homo sapiens
IAALHHFYSKHLGFPDNDSLVVLFAQVNCNGFTIEDEELSHLGSAIFPDVALMNHSCCPNVIVTYKGTLAEVRAVQEIKPGEEVFTSYIDLLYPTEDRNDRLRDSYFFTCECQECTTKDKDKAKVEIRKLSDPPKAEAIRDMVRYARNVIEEFRRAKHYKSPSELLEICELSQEKMSSVFEDSNVYMLHMMYQAMGVCLYMQDWEGALQYGQKIIKPYSKHYPLYSLNVASMWLKLGRLYMGLEHKAAGEKALKKAIAIMEVAHGKDHPYISEIKQEIESH

SEQ ID NO: 60157 - protein, 893 aa, Homo sapiens
KVEAGPPLCTAGLTREGAEASEPRPAAGKVGEAPCTPRPPAAAAPLALQPSPLPRATAPGSAVPAGEGGRRARPEPPEMAGGHCGSFPAAAAGSGEIVQLNVGGTRFSTSRQTLMWIPDSFFSSLLSGRISTLRDETGAIFIDRDPAAFAPILNFLRTKELDLRGVSINVLRHEAEFYGITPLVRRLLLCEELERSSCGSVLFHGYLPPPGIPSRKINNTVRSADSRNGLNSTEGEARGNGTQPVLSGTGEETVRLGFPVDPRKVLIVAGHHNWIVAAYAHFAVCYRIKESSGWQQVFTSPYLDWTIERVALNAKVVGGPHGDKDKMVAVASESSIILWSVQDGGSGSEIGVFSLGVPVDALFFIGNQLVATSHTGKVGVWNAVTQHWQVQDVVPITSYDTAGSFLLLGCNNGSIYYIDMQKFPLRMKDNDLLVTELYHDPSNDAITALSVYLTPKTSVSGNWIEIAYGTSSGAVRVIVQHPETVGSGPQLFQTFTVHRSPVTKIMLSEKHLVSVCADNNHVRTWTVTRFRGMISTQPGSTPLASFKILSLEETESHGSYSSGNDIGPFGERDDQQVFIQKVVPITNKLFVRLSSTGKRICEIQAVDCTTISSFTVRECEGSSRMGSRPRRYLFTGHTNGSIQMWDLTTAMDMVNKSEDKDVGGPTEEELLKLLDQCDLSTSRCATPNISPATSVVQHSHLRESNSSLQLQHHDTTHEAATYGSMRPYRESPLLARARRTESFHSYRDFQTINLNRNVERAVPENGNLGPIQAEVKGATGECNISERKSPGVEIKSLRELDSGLEVHKIAEGFSESKKRSSEDENENKIEFRKKGGFEGGGFLGRKKVPYLASSPSTSDGGTDSPGTASPSPTKTTPSPRHKKSDSSGQEYSL

SEQ ID NO: 60158 - protein, 31 aa, Homo sapiens
RSSAFSDFHSSPKSRNKNHAIREASCISLCR

SEQ ID NO: 60159 - protein, 78 aa, Homo sapiens
VHPDTGISSKAMGIMNSFVNDIFERIASEASRLAHYNKRSTITSREVQTAVRLLLPGELAKHAVSEGTKAVTKYTSSK

SEQ ID NO: 60160 - protein, 112 aa, Homo sapiens
IRCHCPKAPIILVGTQSDLREDVKVLIELDKCKEKPVPEEAAKLCAEEIKAASYIECSALTQKNLKEVFDAAIVAGIQYSDTQQQPKKSKSRTPDKMKNLSKSWWKKYCCFV

SEQ ID NO: 60161 - protein, 142 aa, Homo sapiens
RRRMEAVVFVFSLLDCCALIFLSVYFIITLSDLECDYINARSCCSKLNKWVIPELIGHTIVTVLLLMSLHWFIFLLNLPVATWNIYRYIMVPSGNMGVFDPTEIHNRGQLKSHMKEAMIKLGFHLLCFFMYLYSMILALIND

SEQ ID NO: 60162 - protein, 24 aa, Homo sapiens
LVHLPSQLTCCHLEYISIHYGAEW

SEQ ID NO: 60163 - protein, 53 aa, Homo sapiens
TMPQYQTWEEFSRAAEKLYLADPMKARVVLKYRHSDGNLCVKVTDDLVTKLKM

SEQ ID NO: 60164 - protein, 190 aa, Homo sapiens
IKVKFEQNGSSKNSHLVSPAVSNSHQNVLSNYFPRVSFANQKAFRGVNGSPRISVTVGNIPKNSVSSSSQRRVSSSKISLRNSSKVTESASVMPSQDVSGSEDTFPNKRPRLEDKTVFDNFFIKKEQIKSSGNDPKYSTTTAQNSSSSSSQSKMVNCPVCQNEVLESQINEHLDWCLEGDSIKVKSEESL

SEQ ID NO: 60165 - protein, 75 aa, Homo sapiens
LRLIQVIRSVEKIEKILNSQSSKETSALEASSPLLTGQILERIATEFNQLQFHAVQSKGMPLLDKVRPLPKCHTL

SEQ ID NO: 60166 - protein, 54 aa, Homo sapiens
TSDVDIIRHCLRTYATIDKTRDAEALVGQVLVKPYIDEVCVPPSTNIHELLFCL

SEQ ID NO: 60167 - protein, 44 aa, Homo sapiens
LALDVEYLGEQIQKLGLQASDIKSFSALAELVAAAKDQATAEQP

SEQ ID NO: 60168 - protein, 36 aa, Homo sapiens
KINNNCIFNVNEPATTKLEEMLGCKTPIGKPATAKL

SEQ ID NO: 60169 - protein, 16 aa, Homo sapiens
KKLFRIKLSPTVDKIF

SEQ ID NO: 60170 - protein, 38 aa, Homo sapiens
LLSYESPKKPGREIELENDLKSLQFYSVENGDCLLVRW

SEQ ID NO: 60171 - protein, 25 aa, Homo sapiens
VVFLKQLASGLLLVTGPLALNRVPL

SEQ ID NO: 60172 - protein, 36 aa, Homo sapiens
KFHCELVNSLSVKSEALSLPTVRDWTLEDSSQELWK

SEQ ID NO: 60173 - protein, 64 aa, Homo sapiens
IRRSCDVGVGGFILVTLGCWFHCRYNYAKQRIQERIAREEIKKKILYEGTHLDPERKHNGSSSN

SEQ ID NO: 60174 - protein, 1405 aa, Homo sapiens
TMAWKTLPIYLLLLLSVFVIQQVSSQDLSSCAGRCGEGYSRDATCNCDYNCQHYMECCPDFKRVCTAELSCKGRCFESFERGRECDCDAQCKKYDKCCPDYESFCAEVHNPTSPPSSKKAPPPSGASQTIKSTTKRSPKPPNKKKTKKVIESEEITEEHSVSENQESSSSSSSSSSSSTIRKIKSSKNSAANRELQKKLKVKDNKKNRTKKKPTPKPPVVDEAGSGLDNGDFKVTTPDTSTTQHNKVSTSPKITTAKPINPRPSLPPNSDTSKETSLTVNKETTVETKETTTTNKQTSTDGKEKTTSAKETQSIEKTSAKDLAPTSKVLAKPTPKAETTTKGPALTTPKEPTPTTPKEPASTTPKEPTPTTIKSAPTTPKEPAPTTTKSAPTTPKEPAPTTTKEPAPTTPKEPAPTTTKEPAPTTTKSAPTTPKEPAPTTPKKPAPTTPKEPAPTTPKEPTPTTPKEPAPTTKEPAPTTPKEPAPTAPKKPAPTTPKEPAPTTPKEPAPTTTKEPSPTTPKEPAPTTTKSAPTTTKEPAPTTTKSAPTTPKEPSPTTTKEPAPTTPKEPAPTTPKKPAPTTPKEPAPTTPKEPAPTTTKKPAPTTPKEPAPTTPKETAPTTPKKLTPTTPEKLAPTTPEKPAPTTPEELAPTTPEEPTPTTPEEPAPTTPKAAAPNTPKEPAPTTPKEPAPTTPKEPAPTTPKETAPTTPKGTAPTTLKEPAPTTPKKPAPKELAPTTTKEPTSTTSDKPAPTTPKGTAPTTPKEPAPTTPKEPAPTTPKGTAPTTLKEPAPTTPKKPAPKELAPTTTKGPTSTTSDKPAPTTPKETAPTTPKEPAPTTPKKPAPTTPETPPPTTSEVSTPTTTKEPTTIHKSPDESTPELSAEPTPKALENSPKEPGVPTTKTPAATKPEMTTTAKDKTTERDLRTTPETTTAAPKMTKETATTTEKTTESKITATTTQVTSTTTQDTTPFKITTLKTTTLAPKVTTTKKTITTTEIMNKPEETAKPKDRATNSKATTPKPQKPTKAPKKPTSTKKPKTMPRVRKPKTTPTPRKMTSTMPELNPTSRIAEAMLQTTTRPNQTPNSKLVEVNPKSEDAGGAEGETPHMLLRPHVFMPEVTPDMDYLPRVPNQGIIINPMLSDETNICNGKPVDGLTTLRNGTLVAFRGHYFWMLSPFSPPSPARRITEVWGIPSPIDTVFTRCNCEGKTFFFKDSQYWRFTNDIKDAGYPKPIFKGFGGLTGQIVAALSTAKYKNWPESVYFFKRGGSIQQYIYKQEPVQKCPGRRPALNYPVYGETTQVRRRRFERAIGPSQTHTIRIQYSPARLAYQDKGVLHNEVKVSILWRGLPNVVTSAISLPNIRKPDGYDYYAFSKDQYYNIDVPSRTARAITTRSGQTLSKVWYNCP

SEQ ID NO: 60175 - protein, 93 aa, Homo sapiens
RETEEEKEIADFDIFDDPESPFSTFNFQYPNQAFKRLHDLMHFNTLNNIDVIKEAMVESIEYRRQNPSRCSVSLSNVEARRFFNKEFLSKPKA

SEQ ID NO: 60176 - protein, 178 aa, Homo sapiens
LNSLLEGCLKDTEDSLSYEDNQDDDSDLLQDLSPEEASYSLQENLPSDESCLSLDDLAKRIEIAEVVPTEGLVSILKKRNDTVGDHPAQMQHKPSKRRVRFQEIDDSLDQDEVGGGSCILLVLLCIATVFLSVGGTALYCTFGDMESPVCTDFADNMDFYYTKLLQGVAELKHWIYLS

SEQ ID NO: 60177 - protein, 19 aa, Homo sapiens
LYRHQWRTSVSGTNATEVS

SEQ ID NO: 60178 - protein, 1237 aa, Homo sapiens
RIMVLDGGMGTMIQREKLNEEHFRGQEFKDHARPLKGNNDILSITQPDVIYQIHKEYLLAGADIIETNTFSSTSIAQADYGLEHLAYRMNMCSAGVARKAAEEVTLQTGIKRFVAGALGPTNKTLSVSPSVERPDYRNITFDELVEAYQEQAKGLLDGGVDILLIETIFDTANAKAALFALQNLFEEKYAPRPIFISGTIVDKSGRTLSGQTGEGFVISVSHGEPLCIGLNCALGAAEMRPFIEIIGKCTTAYVLCYPNAGLPNTFGDYDETPSMMAKHLKDFAMDGLVNIVGGCCGSTPDHIREIAEAVKNCKPRVPPATAFEGHMLLSGLEPFRIGPYTNFVNIGERCNVAGSRKFAKLIMAGNYEEALCVAKVQVEMGAQVLDVNMDDGMLDGPSAMTRFCNLIASEPDIAKVPLCIDSSNFAVIEAGLKCCQGKCIVNSISLKEGEDDFLEKARKIKKYGAAMVVMAFDEEGQATETDTKIRVCTRAYHLLVKKLGFNPNDIIFDPNILTIGTGMEEHNLYAINFIHATKVIKETLPGARISGGLSNLSFSFRGMEAIREAMHGVFLYHAIKSGMDMGIVNAGNLPVYDDIHKELLQLCEDLIWNKDPEATEKLLRYAQTQGTGGKKVIQTDEWRNGPVEERLEYALVKGIEKHIIEDTEEARLNQKKYPRPLNIIEGPLMNGMKIVGDLFGAGKMFLPQVIKSARVMKKAVGHLIPFMEKEREETRVLNGTVEEEDPYQGTIVLATVKGDVHDIGKNIVGVVLGCNNFRVIDLGVMTPCDKILKAALDHKADIIGLSGLITPSLDEMIFVAKEMERLAIRIPLLIGGATTSKTHTAVKIAPRYSAPVIHVLDASKSVVVCSQLLDENLKDEYFEEIMEEYEDIRQDHYESLKERRYLPLSQARKSGFQMDWLSEPHPVKPTFIGTQVFEDYDLQKLVDYIDWKPFFDVWQLRGKYPNRGFPKIFNDKTVGGEARKVYDDAHNMLNTLISQKKLRARGVVGFWPAQSIQDDIHLYAEAAVPQAAEPIATFYGLRQQAEKDSASTEPYYCLSDFIAPLHSGIRDYLGLFAVACFGVEELSKAYEDDGDDYSSIMVKALGDRLAEAFAEELHERVRRELWAYCGSEQLDVADLRRLRYKGIRPAPGYPSQPDHTEKLTMWRLADIEQSTGIRLTESLAMAPASAVSGLYFSNLKSKYFAVGKISKDQVEDYALRKNISVAEVEKWLGPILGYDTD

SEQ ID NO: 60179 - protein, 11 aa, Homo sapiens
MNPWSTAIVAF

SEQ ID NO: 60180 - protein, 5 aa, Homo sapiens
RLLPG

SEQ ID NO: 60181 - protein, 41 aa, Homo sapiens
LLYNKARQHQQEALQSLAAATGRAPDDTVEPLLPQDPRQHP

SEQ ID NO: 60182 - protein, 436 aa, Homo sapiens
LARCAPRLQSLNLTGNCLDSFPAELFRPGALPLLSELAAADNCLRELSPDIAHLASLKTLDLSNNQLSEIPAELADCPKLKEINFRGNKLRDKRLEKMVSGCQTRSILEYLRVGGRGGGKGKGRAEGSEKEESRRKRRERKQRREGGDGEEQDVGDAGRLLLRVLHVSENPVPLTVRVSPEVRDVRPYIVGAVVRGMDLQPGNALKRFLTSQTKLHEDLCEKRTAATLATHELRAVKGPLLYCARPPQDLKIVPLGRKEAKAKELVRQLQLEAEEQRKQKKRQSVSGLHRYLHLLDGNENYPCLVDADGDVISFPPITNSEKTKVKKTTSDLFLEVTSATSLQICKDVMDALILKMAEMKKYTLENKEEGSLSDTEADAVSGQLPDPTTNPSAGKDGPSLLVVEQVRVVDLEGSLKVVYPSKADLATAPPHVTVVR

SEQ ID NO: 60183 - protein, 57 aa, Homo sapiens
LEPGPHFLLCPCPCPSQHLAHTLQPAPWSGPGWRWRPGGVPSLAWLRAASGSWGQSF

SEQ ID NO: 60184 - protein, 275 aa, Homo sapiens
TASLSAAAAHAQRQGEMSSTSSKRAPTTATQRLKQDYLRIKKDPVPYICAEPLPSNILEWHYVVRGPEMTPYEGGYYHGKLIFPREFPFKPPSIYMITPNGRFKCNTRLCLSITDFHPDTWNPAWSVSTILTGLLSFMVEKGPTLGSIETSDFTKRQLAVQSLAFNLKDKVFCELFPEVVEEIKQKQKAQDELSSRPQTLPLPDVVPDGETHLVQNGIQLLNGHAPGAVPNLAGLQQANRHHGLLGGALANLFVIVGFAAFAYTVKYVLRSIAQE

SEQ ID NO: 60185 - protein, 9 aa, Homo sapiens
MSQNKAQCQ

SEQ ID NO: 60186 - protein, 433 aa, Homo sapiens
RKTYWSSRSEFKNNFLNIDPITMAYSLNSSAQERLIPLGHASKSAPMNGHCFAENGPSQKSSLPPLLIPPSENLGPHEEDQVVCGFKKLTVNGVCASTPPLTPIKNSPSLFPCAPLCERGSRPLPPLPISEALSLDDTDCEVEFLTSSDTDFLLEDSTLSDFKYDVPGRRSFRGCGQINYAYFDTPAVSAADLSYVSDQNGGVPDPNPPPPQTHRRLRRSHSGPAGSFNKPAIRISNCCIHRASPNSDEDKPEVPPRVPIPPRPVKPDYRRWSAEVTSSTYSDEDRPPKVPPREPLSPSNSRTPSPKSLPSYLNGVMPPTQSFAPDPKYVSSKALQRQNSEGSASKVPCILPIIENGKKVSSTHYYLLPERPPYLDKYEKFFREAEETNGGAQIQPLPADCGISSATEKPDSKTKMDLGGHVKRKHLSYVVSP

SEQ ID NO: 60187 - protein, 93 aa, Homo sapiens
KGSGRRTANREALGSWLGQQLHLSCLCSSGHLLMLRGSPPFQRLVPLSWNLAWAYAEAASTPLSQGLGGSIAPTPAAFAHGWPCPPLAQPKSH

SEQ ID NO: 60188 - protein, 617 aa, Homo sapiens
IPSPTPASEPESEPELESASSCHRPLLIPPVRPVGPGRALLLLPVEQGFTFSGICRVTCLYGQVQVFGFTISQGQPAQDIFSVYTHSCLSIHALHYSQPEKSKKELKREARNLLKSHLNLDDRRWSMQNFSPQCSIVLLEHLKTATVNFITSYPGSSYIFVQESPTPQIKPEYLALRSVGIRREKKRKGLQLTESTLSALEELVNVSCEEVDGCPVILVCGSQDVGKSTFNRYLINHLLNSLPCVDYLECDLGQTEFTPPGCISLLNITEPVLGPPFTHLRTPQKMVYYGKPSCKNNYENYIDIVKYVFSAYKRESPLIVNTMGWVSDQGLLLLIDLIRLLSPSHVVQFRSDHSKYMPDLTPQYVDDMDGLYTKSKTKMRNRRFRLAAFADALEFADEEKESPVEFTGHKLIGVYTDFAFRITPRNRESHNKILRDLSILSYLSQLQPPMPKPLSPLHSLTPYQVPFNAVALRITHSDVAPTHILYAVNASWVGLCKIQDDVRGYTNGPILLAQTPICDCLGFGICRGIDMEKRLYHILTPVPPEELRTVNCLLVGAIAIPHCVLKCQRGIEGTVPYVTTDYNFKLPGASEKIGAREPEEAHKEKPYRRPKFCRKMK

SEQ ID NO: 60189 - protein, 36 aa, Homo sapiens
VFHCVARTSENCHCKLHNQLSGFILHFCARESNSPD

SEQ ID NO: 60190 - protein, 534 aa, Homo sapiens
MFAGQLRESRAERVRLHGVPPDMLQLLLDFSYTGRVAVSGDNAEPLLRAADLLQFPAVKEACGAFLQQQLDLANCLDMQDFAEAFSCSGLASAAQRFILRHVGELGAEQLERLPLARLLRYLRDDGLCVPKEEAAYQLALRWVRADPPRRAAHWPQLLEAVRLPFVRRFYLLAHVEAEPLVARCPPCLRLLREARDFQAARYDRHDRGPCPRMRPRPSTGLAEILVLVGGCDQDCDELVTVDCYNPQTGQWRYLAEFPDHLGGGYSIVALGNDIYVTGGSDGSRLYDCVWRYNSSVNEWAEVAPMLKAREYHSSSVLDGLLYVVAADSTERYDHTTDSWEALQPMTYPMDNCSTTACRGRLYAIGSLAGKETMVMQCYDPDTDLWSLVDCGQLPPWSFAPKTATLNGLMYFVRDDSAEVDVYNPTRNEWDKIPSMNQVHVGGSLAVLGGKLYVSGGYDNTFELSDVVEAYDPETRAWSVVGRLPEPTFWHGSVSIFRQFMPQTFSGGRGFELDSGSDDMDPGRPRPPRDPDELH

SEQ ID NO: 60191 - protein, 179 aa, Homo sapiens
VREVYPVGIFQKRKKYNVPVQMSCHPELNQYIQDTLHCVKPLLEKNDVEKVVVVILDKEHRPVEKFVFEITQPPLLSISSDSLLSHVEQLLRAFILKISVCDAVLDHNPPGCTFTVLVHTREAATRNMEKIQVIKDFPWILADEQDVHMHDPRLIPLKTMTSDILKMQLYVEERAHKGS

SEQ ID NO: 60192 - protein, 569 aa, Homo sapiens
LEAATRAWRGLRERGEVVPLGPGVPALVANGFLALDVAANRLWVTPGEREPAVAPDFVPFVQLRPLSALAEAGEAVLLLREGLLRRVRCLQLGSPGPGPVAAGPGPASVSGLAAGSGRDCVLLQEDFLAHRGRPHVYLQRIQLNNPTERVAALQTVGPTAGPAPKAFTSTLEKVGDHQFLLYSGRSPPTPTGLVHLVVVAAKKLVNRLQVAPKTQLDETVLWVVHVSGPINPQVLKSKAAKELKALQDLARKEMLELLDMPAAELLQDHQLLWAQLFSPGVEMKKITDTHTPSGLTVNLTLYYMLSCSPAPLLSPSLSHRERDQMESTLNYEDHCFSGHATMHAENLWPGRLSSVQQILQLSDLWRLTLQKRGCKGLVKVGAPGILQGMVLSFGGLQFTENHLQFQADPDVLHNSYALHGIRYKNDHINLAVLADAEGKPYLHVSVESRGQPVKIYACKAGCLDEPVELTSAPTGHTFSVMVTQPITPLLYISTDLTHLQDLRHTLHLKAILAHDEHMAQQDPGLPFLFWFSVASLITLFHLFLFKLIYNEYCGPGAKPLFRSKEDPSV

SEQ ID NO: 60193 - protein, 1055 aa, Homo sapiens
LPLPSARRCSEAGRAPRPERAAQRHGGGGGGSSLDPRSSPRRGAASPRPLEPRELRELRSASRAPPCRSRPGLAMLRRPAPALAPAARLLLAGLLCGGGVWAARVNKHKPWLEPTYHGIVTENDNTVLLDPPLIALDKDAPLRFAESFEVTVTKEGEICGFKIHGQNVPFDAVVVDKSTGEGVIRSKEKLDCELQKDYSFTIQAYDCGKGPDGTNVKKSHKATVHIQVNDVNEYAPVFKEKSYKATVIEGKQYDSILRVEAVDADCSPQFSQICSYEIITPDVPFTVDKDGYIKNTEKLNYGKEHQYKLTVTAYDCGKKRATEDVLVKISIKPTCTPGWQGWNNRIEYEPGTGALAVFPNIHLETCDEPVASVQATVELETSHIGKGCDRDTYSEKSLHRLCGAAAGTAELLPSPSGSLNWTMGLPTDNGHDSDQVFEFNGTQAVRIPDGVVSVSPKEPFTISVWMRHGPFGRKKETILCSSDKTDMNRHHYSLYVHGCRLIFLFRQDPSEEKKYRPAEFHWKLNQVCDEEWHHYVLNVEFPSVTLYVDGTSHEPFSVTEDYPLHPSKIETQLVVGACWQEFSGVENDNETEPVTVASAGGDLHMTQFFRGNLAGLTLRSGKLADKKVIDCLYTCKEGLDLQVLEDSGRGVQIQAHPSQLVLTLEGEDLGELDKAMQHISYLNSRQFPTPGIRRLKITSTIKCFNEATCISVPPVDGYVMVLQPEEPKISLSGVHHFARAASEFESSEGVFLFPELRIISTITREVEPEGDGAEDPTVQESLVSEEIVHDLDTCEVTVEGEELNHEQESLEVDMARLQQKGIEVSSSELGMTFTGVDTMASYEEVLHLLRYRNWHARSLLDRKFKLICSELNGRYISNEFKVEVNVIHTANPMEHANHMAAQPQFVHPEHRSFVDLSGHNLANPHPFAVVPSTATVVIVVCVSFLVFMIILGVFRIRAAHRRTMRDQDTGKENEMDWDDSALTITVNPMETYEDQHSSEEEEEEEEEEESEDGEEEDDITSAESESSEEEEGEQGDPQNATRQQQLEWDDSTLSY

SEQ ID NO: 60194 - protein, 73 aa, Homo sapiens
KSPEEMYIQQKVRVLLMLRKMGSNLTASEEEFLRTYAGVVNSQLSQLPPHSIDQGAEDVVMAFSRSETEDRRQ

SEQ ID NO: 60195 - protein, 235 aa, Homo sapiens
VAASCLEDLRSKACDILAIDKSLTPVTLVLAEDGTIVDDDDYFLCLPSNTKFVALASNEKWAYNNSDGGTAWISQESFDVDETDSGAGLKWKNVARQLKEDLSSIILLSEEDLQMLVDAPCSDLAQELRQSCATVQRLQHTLQQVLDQREEVRQSKQLLQLYLQALEKEGSLLSKQEESKAAFGEEVDAVDTGISRETSSDVALASHILTALREKQAPELSLSSQDLEVGGNQGH

SEQ ID NO: 60196 - protein, 201 aa, Homo sapiens
VTRTAVLSDTTPACLFVAMRAAYLFLLFLPAGLLAQGQYDLDPLPPFPDHVQYTHYSDQIDNPDYYDYQEVTPRPSEEQFQFQSQQQVQQEVIPAPTPEPGNAELEPTEPGPLDCREEQYPCTRLYSIHRPCKQCLNEVCFYSLRRVYVINKEICVRTVCAHEELLRADLCRDKFSKCGVMASSGLCQSVAASCARSCGSC

SEQ ID NO: 60197 - protein, 276 aa, Homo sapiens
LWPGQALSLQVEQLLHHRRSRYQDILVFRSKTYGNVLVLDGVIQCTERDEFSYQEMIANLPLCSHPNPRKVLIIGGGDGGVLREVVKHPSVESVVQCEIDEDVIQVSKKFLPGMAIGYSSSKLTLHVGDGFEFMKQNQDAFDVIITDSSDPMGPAESLFKESYYQLMKTALKEDGVLCCQGECQWLHLDLIKEMRQFCQSLFPVVAYAYCTIPTYPSGQIGFMLCSKNPSTNFQEPVQPLTQQQVAQMQLKYYNSDVHRAAFVLPEFARKALNDVS

SEQ ID NO: 60198 - protein, 4 aa, Homo sapiens
LGIN

SEQ ID NO: 60199 - protein, 69 aa, Homo sapiens
IQEGLGPYSFIVFAVICLLTTIYIFLIVPETKAKTFIEINQIFTKMNKVSEVYPEKEELKELPPVTSEQ

SEQ ID NO: 60200 - protein, 81 aa, Homo sapiens
IYNMFKKVPTSNTEGGWSCSLAEYIRHNDMPIYEAADKALKTFQEEFMPVETFSEFLDVAGLLSEITDPESFLKDLLNSVP

SEQ ID NO: 60201 - protein, 333 aa, Homo sapiens
VVTAALYSVYRQKARVSQELKGAKKVHLGEDLKSILSEAPGKCVPYAVIEGAVRSVKETLNSQFVENCKGVIQRLTLQEHKMVWNRTTHLWNDCSKIIHQRTNTVPFDLVPHEDGVDVAVRVLKPLDSVDLGLETVYEKFHPSIQSFTDVIGHYISGERPKGIQETEEMLKVGATLTGVGELVLDNNSVRLQPPKQGMQYYLSSQDFDSLLQRQESSVRLWKVLALVFGFATCATLFFILRKQYLQRQERLRLKQMQEEFQEHEAQLLSRAKPEDRESLKSACVVCLSSFKSCVFLECGHVCSCTECYRALPEPKKCPICRQAITRVIPLYNS

SEQ ID NO: 60202 - protein, 37 aa, Homo sapiens
KRPPKLGQIGRSKRVVIEDDRIDDVLKNMTDKAPPGV

SEQ ID NO: 60203 - protein, 143 aa, Homo sapiens
LQVTVAGLLLVFFLFGAPLDSLPSMKALSPVRGCYEAVCCLSERSLAIARGRGKGPAAEEPLSLLDDMNHCYSRLRELVPGVPRGTQLSQVEILQRVIDYILDLQVVLAEPAPGPPDGPHLPIQTAELTPELVISNDKRSFCH

SEQ ID NO: 60204 - protein, 326 aa, Homo sapiens
KMAAMRKALPRRLVGLASLRAVSTSSMGTLPKRVKIVEVGPRDGLQNEKNIVSTPVKIKLIDMLSEAGLSVIETTSFVSPKWVPQMGDHTEVLKGIQKFPGINYPVLTPNLKGFEAAVAAGAKEVVIFGAASELFTKKNINCSIEESFQRFDAILKAAQSANISVRGYVSCALGCPYEGKISPAKVAEVTKKFYSMGCYEISLGDTIGVGTPGIMKDMLSAVMQEVPLAALAVHCHDTYGQALANTLMALQMGVSVVDSSVAGLGGCPYAQGASGNLATEDLVYMLEGLGIHTGVNLQKLLEAGNFICQALNRKTSSKVAQATCKL

SEQ ID NO: 60205 - protein, 63 aa, Homo sapiens
KVTEDGTRNPNEKPTQQRSIAFSSNNSVAKPIQKSAKAATEEASSRSPKIDQKKSPYGLWIPI

SEQ ID NO: 60206 - protein, 114 aa, Homo sapiens
TDDPALLYHKCQVVFFLLAAAFFSTFMPERWFPGSCHVFGQGHQLFHIFLVLCTLAQLEAVALDYEARRPIYEPLHTHWPHNFSGLFLLTVGSSILTAFLLSQLVQRKLDQKTK

SEQ ID NO: 60207 - protein, 1078 aa, Homo sapiens
LASCLKERQVLLAGRWRSPLGRRCRPRRRLRRSGSGGVPGAKAMAPRLQLEKAAWRWAETVRPEEVSQEHIETAYRIWLEPCIRGVCRRNCKGNPNCLVGIGEHIWLGEIDENSFHNIDDPNCERRKKNSFVGLTNLGATCYVNTFLQVWFLNLELRQALYLCPSTCSDYMLGDGIQEEKDYEPQTICEHLQYLFALLQNSNRRYIDPSGFVKALGLDTGQQQDAQEFSKLFMSLLEDTLSKQKNPDVRNIVQQQFCGEYAYVTVCNQCGRESKLLSKFYELELNIQGHKQLTDCISEFLKEEKLEGDNRYFCENCQSKQNATRKIRLLSLPCTLNLQLMRFVFDRQTGHKKKLNTYIGFSEILDMEPYVEHKGGSYVYELSAVLIHRGVSAYSGHYIAHVKDPQSGEWYKFNDEDIEKMEGKKLQLGIEEDLAEPSKSQTRKPKCGKGTHCSRNAYMLVYRLQTQEKPNTTVQVPAFLQELVDRDNSKFEEWCIEMAEMRKQSVDKGKAKHEEVKELYQRLPAGAEPYEFVSLEWLQKWLDESTPTKPIDNHACLCSHDKLHPDKISIMKRISEYAADIFYSRYGGGPRLTVKALCKECVVERCRILRLKNQLNEDYKTVNNLLKAAVKGSDGFWVGKSSLRSWRQLALEQLDEQDGDAEQSNGKMNGSTLNKDESKEERKEEEELNFNEDILCPHGELCISENERRLVSKEAWSKLQQYFPKAPEFPSYKECCSQCKILEREGEENEALHKMIANEQKTSLPNLFQDKNRPCLSNWPEDTDVLYIVSQFFVEEWRKFVRKPTRCSPVSSVGNSALLCPHGGLMFTFASMTKEDSKLIALIWPSEWQMIQKLFVVDHVIKITRIEVGDVNPSETQYISEPKLCPECREGLLCQQQRDLREYTQATIYVHKVVDNKKVMKDSAPELNVSSSETEEDKEEAKPDGEKDPDFNQSNGGTKRQKISHQNYIAYQKQVIRRSMRHRKVRGEKALLVSANQTLKELKIQIMHAFSVAPFDQNLSIDGKILSDDCATLGTLGVIPESVILLKADEPIADYAAMDDVMQVCMPEEGFKGTGLLGH

SEQ ID NO: 60208 - protein, 452 aa, Homo sapiens
MAMYLTREEWRPLDAAQRDLYRDVMQENYGNVVSLDFEIRSENEVNPKQEISEDVQFGTTSERPAENAEENPESEEGFESGDRSERQWGDLTAEEWVSYPLQPVTDLLVHKEVHTGIRYHICSHCGKAFSQISDLNRHQKTHTGDRPYKCYECGKGFSRSSHLIQHQRTHTGERPYDCNECGKSFGRSSHLIQHQTIHTGEKPHKCNECGKSFCRLSHLIQHQRTHSGEKPYECEECGKSFSRSSHLAQHQRTHTGEKPYECNECGRGFSERSDLIKHYRVHTGERPYKCDECGKNFSQNSDLVRHRRAHTGEKPYHCNECGENFSRISHLVQHQRTHTGEKPYECNACGKSFSRSSHLITHQKIHTGEKPYECNECWRSFGERSDLIKHQRTHTGEKPYECVQCGKGFTQSSNLITHQRVHTGEKPYECTECEKSFSRSSALIKHKRVHTD

SEQ ID NO: 60209 - protein, 27 aa, Homo sapiens
LAANEVYVLGPSPSVSSPARLPAPFSL

SEQ ID NO: 60210 - protein, 287 aa, Homo sapiens
TYCLGMSEFLRALGRRVAVVNLDPANEGLPYECAVDVGELVGLGDVMDALRLGPNGGLLYCMEYLEANLDWLRAKLDPLRGHYFLFDCPGQVELCTHHGALRSIFSQMAQWDLRLTAVHLVDSHYCTDPAKFISVLCTSLATMLHVELPHINLLSKMDLIEHYGKLAFNLDYYTEVLDLSYLLDHLASDPFFRHYRQLNEKLVQLIEDYSLVSFIPLNIQDKESIQRVLQAVDKANGYCFRAQEQRSLEAMMSAAMGADFHFSSTLGIQEKYLAPSNQSVEQEAMQL

SEQ ID NO: 60211 - protein, 41 aa, Homo sapiens
LLTYATRDDLIYTRIRGGMVCRIWRAILAQRAGSTPVTSGP

SEQ ID NO: 60212 - protein, 22 aa, Homo sapiens
LTASDWQSPQARGPSLFQRSPV

SEQ ID NO: 60213 - protein, 4 aa, Homo sapiens
IMGR

SEQ ID NO: 60214 - protein, 53 aa, Homo sapiens
IEHSKSLDLGLGELLLGAPAARDCAHRSWPRLDRLSLGGYAKLGGGGDLGARV

SEQ ID NO: 60215 - protein, 25 aa, Homo sapiens
LARPKGLYASGRRSDLCRCSQGTQK

SEQ ID NO: 60216 - protein, 127 aa, Homo sapiens [sequence omitted]

SEQ ID NO: 60217 - protein, 106 aa, Homo sapiens
KKFSFKKPFKLSGLSFKRNRKEGGGDSSASSPTEEEQEQGEIGACSDEGTAQEGKAAATPESQEPQAKGAEASAASEEEAGPQATEPSTPSGPESGPTPASAEQNE

SEQ ID NO: 60218 - protein, 356 aa, Homo sapiens
KKGLSDFLGVISDTFAPSPDKTIDCDVITLMGTPSGTAEPYDGTKARLYSLQSDPATYCNEPDGPPELFDAWLSQFCLEEKKGEISELLVGSPSIRALYTKMVPAAVSHSEFWHRYFYKVHQLEQEQARRDALKQRAEQSISEEPGWEEEEEELMGISPISPKEAKVPVAKISTFPEGEPGPQSPCEENLVTSVEPPAEVTPSESSESISLVTQIANPATAPEARVLPKDLSQKLLEASLEEQGLAVDVGETGPSPPIHSKPLTPAGHTGGPEPRPPARVETLREEAPTDLRVFELNSDSGKSTPSNNGKKGSSTDISEDWEKDFDLDMTEEEVQMALSKVDASGELEDVEWEDWE

SEQ ID NO: 60219 - protein, 194 aa, Homo sapiens
VYAAAGRAGAGQPGSGALTAGRGAAPQSSMDAPRRDMELLSNSLAAYAHIRANPESFGLYFVLGVCFGLLLTLCLLVISISWAPRPRPRGPAQRRDPRSSTLEPEDDDEDEEDTVTRLGPDDTLPGPELSAEPDGPLNVNVFTSAEELERAQRLEERERILREIWRTGQPDLLGTGTLGPSPTATGTLGRMHYY

SEQ ID NO: 60220 - protein, 10 aa, Homo sapiens
LFSSNILLIL

SEQ ID NO: 60221 - protein, 134 aa, Homo sapiens
LAKLSEEISAPVSERMNALFVQFAEVFPLKVFGYQPDPLNYQIAVGFLELLAGLLLVMGPPMLQEISNLFLILLMMGAIFTLAALKESLSTCIPAIVCLGFLLLLNVGQLLAQTKKVVRPTRKKTLSTFKESWK

SEQ ID NO: 60222 - protein, 32 aa, Homo sapiens
LQESFDTILDNRKELIRCLQQRAAPSRPQDQA

SEQ ID NO: 60223 - protein, 70 aa, Homo sapiens
ITWPTWPSSREGQRRDSRPIRPAWLPWATGTSWDSGPRRSGWFGWEGRQAWLEGGPWSCWPPWTHGTTGL

SEQ ID NO: 60224 - protein, 26 aa, Homo sapiens
MVLTVIGISLCITSSVSKTQGQQSTL

SEQ ID NO: 60225 - protein, 749 aa, Homo sapiens
LFHHVSRTSHSGPGLVAKMVKPKYKGRSTINPSKASTNPDRVQGAGGQNMRDRATIRRLNMYRQKERRNSRGKIIKPLQYQSTVASGTVARVEPNIKWFGNTRVIKQSSLQKFQEEMDTVMKDPYKVVMKQSKLPMSLLHDRIRPHNLKVHILDTESFETTFGPKSQRKRPNLFASDMQSLIENAEMSTESYDQGKDRDLVTEDTGVRNEAQEEIYKKGQSKRIWGELYKVIDSSDVVVQVLDARDPMGTRSPHIETYLKKEKPWKHLIFVLNKCDLVPTWATKRWVAVLSQDYPTLAFHASLTNPFGKGAFIQLLRQFGKLHTDKKQISVGFIGYPNVGKSSVINTLRSKKVCNVAPIAGETKVWQYITLMRRIFLIDCPGVVYPSEDSETDIVLKGVVQVEKIKSPEDHIGAVLERAKPEYISKTYKIDSWENAEDFLEKLAFRTGKLLKGGEPDLQTVGKMVLNDWQRGRIPFFVKPPNAEPLVAPQLLPSSSLEVVPEAAQNNPGEEVTETAGEGSESIIKEETEENSHCDANTEMQQILTRVRQNFGKINVVPQFSGDDLVPVEVSDLEEELESFSDEEEEEQEQQRDDAEESSSEPEEENVGNDTKAVIKALDEKIAKYQKFLDKAKAKKFSAVRISKGLSEKIFAKPEEQRKTLEEDVDDRAPSKKGKKRKAQREEEQEHSNKAPRALTSKERRRAVRQQRPKKVGVRYYETHNVKNRNRNKKKTNDSEGQKHKRKKFRQKQ

SEQ ID NO: 60226 - protein, 6 aa, Homo sapiens
IPRFFL

SEQ ID NO: 60227 - protein, 154 aa, Homo sapiens
VRYAKALGCPRIHLMAGRVPQGADRIAVKAEMEAVFLENLRHAAGVLAQEDLVGLLEPINTRITDPQYFLDTPQQAAAILQKVGRPNLQLQMDIFHWQIMDGNLTGNIREFLPIVGHVQVAQVPGRGEPSSPGELNFPYLFQLLEDEGYKGFVG

SEQ ID NO: 60228 - protein, 106 aa, Homo sapiens
ILQKVGRPNLQLQMDIFHWQIMDGNLTGNIREFLPIVGHVQVAQVPGRGEPSSPGELNFPYLFQLLEDEGYKGFVGCEYQPRGDTVEGLSWLRSYWDRRGHPEAGQ

SEQ ID NO: 60229 - protein, 5 aa, Homo sapiens
LRSVA

SEQ ID NO: 60230 - protein, 50 aa, Homo sapiens
LADPVCKNGISSSSDGSRWRISDDRPNFQHSQTSASSWEQTFNLVPIEPA

SEQ ID NO: 60231 - protein, 417 aa, Homo sapiens
IWYPLNLLERVGFEEVIVVTTRDVQKALCAEFKMKMKPDIVCIPDDADMGTADSLRYIYPKLKTDVLVLSCDLITDVALHEVVDLFRAYDASLAMLMRKGQDSIEPVPGQKGKKKAVEQRDFIGVDSTGKRLLFMANEADLDEELVIKGSILQKHPRIRFHTGLVDAHLYCLKKYIVDFLMENGSITSIRSELIPYLVRKQFSSASSQQGQEEKEEDLKKKELKSLDIYSFIKEANTLNLAPYDACWNACRGDRWEDLSRSQVRCYVHIMKEGLCSRVSTLGLYMEANRQVPKLLSALCPEEPPVHSSAQIVSKHLVGVDSLIGPETQIGEKSSIKRSVIGSSCLIKDRVTITNCLLMNSVTVEEGSNIQGSVICNNAVIEKGADIKDCLIGSGQRIEAKAKRVNEVIVGNDQLMEI

SEQ ID NO: 60232 - protein, 26 aa, Homo sapiens
KVCEEKLRYAAYNCVAIDTDMSPWEE

SEQ ID NO: 60233 - protein, 57 aa, Homo sapiens
IYDVIVEPPSVGSVTDEHGHQRPVAFLAYKVNGQYIMEGLASSFLFTVGGLGFIILD

SEQ ID NO: 60234 - protein, 397 aa, Homo sapiens
KEDLDALKEKFRTMESNQKSSFQEIPKLNEELLSKQKQLEKIESGEMGLNKVWINITEMNKQISLLTSAVNHLKANVKSAADLISLPTTVEGLQKSVASIGNTLNSVHLAVEALQKTVDEHKKTMELLQSDMNQHFLKETPGSNQIIPSPSATSELDNKTHSENLKQDILYLHNSLEEVNSALVGYQRQNDLKLEGMNETVSNLTQRVNLIESDVVAMSKVEKKANLSFSMMGDRSATLKRQSLDQVTNRTDTVKIQSIKKEDSSNSQVSKLREKLQLISALTNKPESNRPPETADEEQVESFTSKPSALPKFSQFLGDPVEKAAQLRPISLPGVSSTEDLQDLFRKTGQDVDGKLTYQEIWTSLGSAMPEPESLRAFDSDGDGRYSFLELRVALGI

SEQ ID NO: 60235 - protein, 670 aa, Homo sapiens
VPSASQVRASLPEPRNSAAAMASNMDREMILADFQACTGIENIDEAITLLEQNNWDLVAAINGVIPQENGILQSEYGGETIPGPAFNPASHPASAPTSSSSSAFRPVMPSRQIVERQPRMLDFRVEYRDRNVDVVLEDTCTVGEIKQILENELQIPVSKMLLKGWKTGDVEDSTVLKSLHLPKNNSLYVLTPDLPPPSSSSHAGALQESLNQNFMLIITHREVQREYNLNFSGSSTIQEVKRNVYDLTSIPVRHQLWEGWPTSATDDSMCLAESGLSYPCHRLTVGRRSSPAQTREQSEEQITDVHMVSDSDGDDFEDATEFGVDDGEVFGMASSALRKSPMMPENAENEGDALLQFTAEFSSRYGDCHPVFFIGSLEAAFQEAFYVKARDRKLLAIYLHHDESVLTNVFCSQMLCAESIVSYLSQNFITWAWDLTKDSNRARFLTMCNRHFGSVVAQTIRTQKTDQFPLFLIIMGKRSSNEVLNVIQGNTTVDELMMRLMAAMEIFTAQQQEDIKDEDEREARENVKREQDEAYRLSLEADRAKREAHEREMAEQFRLEQIRKEQEEEREAIRLSLEQALPPEPKEENAEPVSKLRIRTPSGEFLERRFLASNKLQIVFDFVASKGFPWDEYKLLSTFPRRDVTQLDPNKSLLEVKLFPQETLFLEAKE

SEQ ID NO: 60236 - protein, 8 aa, Homo sapiens
LMTLFVHT

SEQ ID NO: 60237 - protein, 20 aa, Homo sapiens
VQISMSYLIKQHHSAITQGS

SEQ ID NO: 60238 - protein, 13 aa, Homo sapiens
VKSLALRMNTRSS

SEQ ID NO: 60239 - protein, 813 aa, Homo sapiens
KMAAPEAWRARSCWFCEVAAATTMEATSREAAPAKSSASGPNAPPALFELCGRAVSAHMGVLESGVWALPGPILQSILPLLNIYYLERIEETALKKGLSTQAIWRRLWDELMKTRPSSLESVTCWRAKFMEAFFSHVLRGTIDVSSDRRLCDQRFSPLLHSSRHVRQLTICNMLQGATELVAEPNRRVLETLASSLHTLKFRHLLFSDVAAQQSLRQLLHQLIHHGAVSQVSLYSWPVPESALFILILTMSAGFWQPGPGGPPCRLCGEASRGRAPSRDEGSLLLGSRRPRRDAAERCAAALMASRRKSEAKQMPRAAPATRVTRRSTQESLTAGGTDLKRELHPPATSHEAPGTKRSPSAPAATSSASSSTSSYKRAPASSAPQPKPLKRFKRAAGKKGARTRQGPGAESEDLYDFVFIVAGEKEDGEEMEIGEVACGALDGSDPSCLGLPALEASQRFRSISTLELFTVPLSTEAALTLCHLLSSWVSLESLTLSYNGLGSNIFRLLDSLRALSGQAGCRLRALHLSDLFSPLPILELTRAIVRALPLLRVLSIRVDHPSQRDNPGVPGNAGPPSHIIGDEEIPENCLEQLEMGFPRGAQPAPLLCSVLKASGSLQQLSLDSATFASPQDFGLVLQTLKEYNLALKRLSFHDMNLADCQSEVLFLLQNLTLQEITFSFCRLFEKRPAQFLPEMVAAMKGNSTLKGLRLPGNRLGNAGLLALADVFSEDSSSSLCQLDISSNCIKPDGLLEFAKRLERWGRGAFGHLRLFQNWLDQDAVTAREAIRRLRATCHVVSDSWDSSQAFADYVSTM

SEQ ID NO: 60240 - protein, 22 aa, Homo sapiens
KTKRVLPPSWKYESSTASALVA

SEQ ID NO: 60241 - protein, 257 aa, Homo sapiens
IPPNDGMPGGPIPPGFFQPFMSPRYAGGPRPPIRMGNQPPGGVPGTQPLLPNSMDPTRQQGHPNMGGSMQRMNPPRGMGPMGPGPQNYGSGMRPPPNSLGPAMPGINMGPGAGRPWPNPNSANSIPYSSSSPGTYVGPPGGGGPPGTPIMPSPADSTNSSDNIYTMINPVPPGGSRSNFPMGPGSDGPMGGMGGMEPHHMNGSLGSGDIDGLPKNSPNNISGISNPPGTPRDDGELGGNFLHSFQNDNYSPSMTMSV

SEQ ID NO: 60242 - protein, 237 aa, Homo sapiens
MSPRYAGGPRPPIRMGNQPPGGVPGTQPLLPNSMDPTRQQGHPNMGGSMQRMNPPRGMGPMGPGPQNYGSGMRPPPNSLGPAMPGINMGPGAGRPWPNPNSANSIPYSSSSPGTYVGPPGGGGPPGTPIMPSPADSTNSSDNIYTMINPVPPGGSRSNFPMGPGSDGPMGGMGGMEPHHMNGSLGSGDIDGLPKNSPNNISGISNPPGTPRDDGELGGNFLHSFQNDNYSPSMTMSV

SEQ ID NO: 60243 - protein, 29 aa, Homo sapiens
ISYTKMHPNNENLPQLANMFLQYLSQSLH

SEQ ID NO: 60244 - protein, 24 aa, Homo sapiens
ILVWSLQSSKAQICRIYGNFRTLP

SEQ ID NO: 60245 - protein, 219 aa, Homo sapiens
VDTYQVFDRIKGSLLPIPGKNFVRLYIRSNPDLYGPFWICATLVFAIAISGNLSNFLIHLGEKTYHYVPEFRKVSIAATIIYAYAWLVPLALWGFLMWRNSKVMNIVSYSFLEIVCVYGYSLFIYIPTAILWIIPQKAVRWILVMIALGISGSLLAMTFWPAVREDNRRVALATIVTIVLLHMLLSVGCLAYFFDAPEMDHLPTTTATPNQTVAAAKSS

SEQ ID NO: 60246 - protein, 39 aa, Homo sapiens
KRGFAFVTFDDHDTVDKIVVQKYHTINGHNCEVKKPLSK

SEQ ID NO: 60247 - protein, 47 aa, Homo sapiens
IQHPRLSADPKNHRKADHPKSGRSYHEEFNPPKEPMKDDITGEPLIR

SEQ ID NO: 60248 - protein, 390 aa, Homo sapiens
LVRRAQRGRQPAGACALRETFPVKGSGGRGCPPLATALLRPRNLCAQPKLTSREVTDCSMTAKMETTFYDDALNASFLPSESGPYGYSNPKILKQSMTLNLADPVGSLKPHLRAKNSDLLTSPDVGLLKLASPELERLIIQSSNGHITTTPTPTQFLCPKNVTDEQEGFAEGFVRALAELHSQNTLPSVTSAAQPVNGAGMVAPAVASVAGGSGSGGFSASLHSEPPVYANLSNFNPGALSSGGGAPSYGAAGLAFPAQPQQQQQPPHHLPQQMPVQHPRLQALKEEPQTVPEMPGETPPLSPIDMESQERIKAERKRMRNRIAASKCRKRKLERIARLEEKVKTLKAQNSELASTANMLREQVAQLKQKVMNHVNSGCQLMLTQQLQTF

SEQ ID NO: 60249 - protein, 2087 aa, Homo sapiens
ISGQYSGSPQLLKNLNIVGNISHHTTVPLTEAVDPVDLEDYLITHPLAVDSGPLRDLIEFPPDDIEVVYSPRDCRTLVSAVPEESEMDPHVRDCIRSYTEDWAIVIRKYHKLGTGFNPNTLDKQKERQKGLPKQVFESDEAPDGNSYQDDQDDLKRRSMSIDDTPRGSWACSIFDLKNSLPDALLPNLLDRTPNEEIDRQNDDQRKSNRHKELFALHPSPDEEEPIERLSVPDIPKEHFGQRLLVKCLSLKFEIEIEPIFASLALYDVKEKKKISENFYFDLNSEQMKGLLRPHVPPAAITTLARSAIFSITYPSQDVFLVIKLEKVLQQGDIGECAEPYMIFKEADATKNKEKLEKLKSQADQFCQRLGKYRMPFAWTAIHLMNIVSSAGSLERDSTEVEISTGERKGSWSERRNSSIVGRRSLERTTSGDDACNLTSFRPATLTVTNFFKQEGDRLSDEDLYKFLADMRRPSSVLRRLRPITAQLKIDISPAPENPHYCLTPELLQVKLYPDSRVRPTREILEFPARDVYVPNTTYRNLLYIYPQSLNFANRQGSARNITVKVQFMYGEDPSNAMPVIFGKSSCSEFSKEAYTAVVYHNRSPDFHEEIKVKLPATLTDHHHLLFTFYHVSCQQKQNTPLETPVGYTWIPMLQNGRLKTGQFCLPVSLEKPPQAYSVLSPEVPLPGMKWVDNHKGVFNVEVVAVSSIHTQDPYLDKFFALVNALDEHLFPVRIGDMRIMENNLENELKSSISALNSSQLEPVVRFLHLLLDKLILLVIRPPVIAGQIVNLGQASFEAMASIINRLHKNLEGNHDQHGRNSLLASYIHYVFRLPNTYPNSSSPGPGGLGGSVHYATMARSAVRPASLNLNRSRSLSNSNPDISGTPTSPDDEVRSIIGSKAMDRSCNRMSSHTETSSFLQTLTGRLPTKKLFHEELALQWVVCSGSVRESALQQAWFFFELMVKSMVHHLYFNDKLEAPRKSRFPERFMDDIAALVSTIASDIVSRFQKDTEMVERLNTSLAFFLNDLLSVMDRGFVFSLIKSCYKQVSSKLYSLPNPSVLVSLRLDFLRIICSHEHYVTLNLPCSLLTPPASPSPSVSSATSQSSGFSTNVQDQKIANMFELSVPFRQQHYLAGLVLTELAVILDPDAEGLFGLHKKVINMVHNLLSSHDSDPRYSDPQIKARVAMLYLPLIGIIMETVPQLYDFTETHNQRGRPICIATDDYESESGSMISQTVAMAIAGTSVPQLTRPGSFLLTSTSGRQHTTFSAESSRSLLICLLWVLKNADETVLQKWFTDLSVLQLNRLLDLLYLCVSCFEYKGKKVFERMNSLTFKKSKDMRAKLEEAILGSIGARQEMVRRSRGQLGTYTIASPPERSPSGSAFGSQENLRWRKDMTHWRQNTEKLDKSRAEIEHEALIDGNLATEANLIILDTLEIVVQTVSVTESKESILGGVLKVLLHSMACNQSAVYLQHCFATQRALVSKFPELLFEEETEQCADLCLRLLRHCSSSIGTIRSHASASLYLLMRQNFEIGNNFARVKMQVTMSLSSLVGTSQNFNEEFLRRSLKTILTYAEEDLELRETTFPDQVQDLVFNLHMILSDTVKMKEHQEDPEMLIDLMYRIAKGYQTSPDLRLTWLQNMAGKHSERSNHAEAAQCLVHSAALVAEYLSMLEDRKYLPVGCVTFQNISSNVLEESAVSDDVVSPDEEGICSGKYFTESGLVGLLEQAAASFSMAGMYEAVNEVYKVLIPIHEANRDAKKLSTIHGKLQEAFSKIVHQSTGWERMFGTYFRVGFYGTKFGDLDEQEFVYKEPAITKLAEISHRLEGFYGERFGEDVVEVIKDSNPVDKCKLDPNKAYIQITYVEPYFDTYEMKDRITYFDKNYNLRRFMYCTPFTLDGRAHGELHEQFKRKTILTTSHAFPYIKTRVNVTHKEEIILTPIEVAIEDMQKKTQELAFATHQDPADPKMLQMVLQGSVGTTVNQGPLEVAQVFLSEIPSDPKLFRHHNKLRLCFKDFTKRCEDALRKNKSLIGPDQKEYQRELERNYHRLKEALQPLINRKIPQLYKAVLPVTCHRDSFSRMSLRKMDL

SEQ ID NO: 60250 - protein, 81 aa, Homo sapiens
KKIFMMLLSKVEKLSEEIMEIMQNLSSIQALEGSRELENLIGISCASHFLKREMQKTKELMTKVNKQKLFEKSTGLPHKGK

SEQ ID NO: 60251 - protein, 28 aa, Homo sapiens
VEHKVETFSGVYKKLMGKDVNCEFPEFQ

SEQ ID NO: 60252 - protein, 322 aa, Homo sapiens
MRAVRVFEFGGPEVLKLRSDIAVPIPKDHQVLIKVHACGVNPVETYIRSGTYSRKPLLPYTPGSDVAGVIEAVGDNASAFKKGDRVFTSSTISGGYAEYALAADHTVYKLPEKLDFKQGAAIGIPYFTAYRALIHSACVKAGESVLVHGASGGVGLAACQIARAYGLKILGTAGTEEGQKIVLQNGAHEVFNHREVNYIDKIKKYVGEKGIDIIIEMLANVNLSKDLSLLSHGGRVIVVGSRGTIEINPRDTMAKESSIIGVTLFSSTKEEFQQYAAALQAGMEIGWLKPVIGSQYPLEKVAEAHENIIHGSGATGKMILLL

SEQ ID NO: 60253 - protein, 591 aa, Homo sapiens
ITNDGTVCIENVNANCHLDNVCIAANINKTLTKIRSIKEPVALLQEVYRNSVTDLSPTDIITYIEILAESSSLLGYKNNTISAKDTLSNSTLTEFVKTVNNFVQRDTFVVWDKLSVNHRRTHLTKLMHTVEQATLRISQSFQKTTEFDTNSTDIALKVFFFDSYNMKHIHPHMNMDGDYINIFPKRKAAYDSNGNVAVAFVYYKSIGPLLSSSDNFLLKPQNYDNSEEEERVISSVISVSMSSNPPTLYELEKITFTLSHRKVTDRYRSLCAFWNYSPDTMNGSWSSEGCELTYSNETHTSCRCNHLTHFAILMSSGPSIGIKDYNILTRITQLGIIISLICLAICIFTFWFFSEIQSTRTTIHKNLCCSLFLAELVFLVGINTNTNKLFCSIIAGLLHYFFLAAFAWMCIEGIHLYLIVVGVIYNKGFLHKNFYIFGYLSPAVVVGFSAALGYRYYGTTKVCWLSTENNFIWSFIGPACLIILVNLLAFGVIIYKVFRHTAGLKPEVSCFENIRSCARGALALLFLLGTTWIFGVLHVVHASVVTAYLFTVSNAFQGMFIFLFLCVLSRKIQEEYYRLFKNVPCCFGCLR

SEQ ID NO: 60254 - protein, 93 aa, Homo sapiens
VIFSDSSTCFSWILIAEDAVRRKHNLKPKSCMQELFLKFVENWEGSLKSKYVRGSDPVLKLLDDNGNIAEELSILKWNTDSVEEFLSEKLERI

SEQ ID NO: 60255 - protein, 594 aa, Homo sapiens
LDMASEIHMTGPMCLIENTNGRLMANPEALKILSAITQPMVVVAIVGLYRTGKSYLMNKLAGKKKGFSLGSTVQSHTKGIWMWCVPHPKKPGHILVLLDTEGLGDVEKGDNQNDSWIFALAVLLSSTFVYNSIGTINQQAMDQLYYVTELTHRIRSKSSPDENENEVEDSADFVSFFPDFVWTLRDFSLDLEADGQPLTPDEYLTYSLKLKKGTSQKDETFNLPRLCIRKFFPKKKCFVFDRPVHRRKLAQLEKLQDEELDPEFVQQVADFCSYIFSNSKTKTLSGGIQVNGPRLESLVLTYVNAISSGDLPCMENAVLALAQIENSAAVQKAIAHYEQQMGQKVQLPTETLQELLDLHRDSEREAIEVFIRSSFKDVDHLFQKELAAQLEKKRDDFCKQNQEASSDRCSALLQVIFSPLEEEVKAGIYSKPGGYRLFVQKLQDLKKKYYEEPRKGIQAEEILQTYLKSKESMTDAILQTDQTLTEKEKEIEVERVKAESAQASAKMLQEMQRKNEQMMEQKERSYQEHLKQLTEKMENDRVQLLKEQERTLALKLQEQEQLLKEGFQKESRIMKNEIQDLQTKMRRRKACTIS

SEQ ID NO: 60256 - protein, 129 aa, Homo sapiens
KRLPGPDELFRSVTRPAFLYNPLNKQIDWERHVVKAPEEPPKEFKIWKSNYVPPPETYTTEKKPPPPELDMAIKWSNIYEDNGDDAPQNAKKARLLPEGEETLESDDEKDEHTSKKRKVEPGEPAKKKK

SEQ ID NO: 60257 - protein, 47 aa, Homo sapiens
LRMSLPQKRNLENLTVSCPFKAGGVLWDGGGKLEQQGQEVWERETLE

SEQ ID NO: 60258 - skipped

SEQ ID NO: 60259 - protein, 19 aa, Homo sapiens
IVNSLKEETLKTRNTYTDR

SEQ ID NO: 60260 - protein, 4 aa, Homo sapiens
MLVP

SEQ ID NO: 60261 - skipped

SEQ ID NO: 60262 - protein, 58 aa, Homo sapiens
LEAALEEGRQKVAEEIEKMSSRESALQIKILDLETELRKKNEEQNQLVCKMNSDPETP

SEQ ID NO: 60263 - protein, 111 aa, Homo sapiens
MYQPQKMDLTMHSALDCKQKKSRSRSGSKKKMLTLPHGADEVYILRCRFCGLVFRGPLSVQEDWIKHLQRHIVNANLPRTGAGMVEVTSLLKKPASITETSFSLLMAEAAS

SEQ ID NO: 60264 - protein, 777 aa, Homo sapiens
MASQVASPSTSLHTTSSSTTLSTPALSPSSPSQLSPDDLELLAKLEEQNRLLETDSKSLRSVNGSRRNSGSSLVSSSSASSNLSHLEEDSWILWGRIVNEWEDVRKKKEKQVKELVHKGIPHHFRAIVWQLLCSAQSMPIKDQYSELLKMTSPCEKLIRRDIARTYPEHNFFKEKDSLGQEVLFNVMKAYSLVDREVGYCQGSAFIVGLLLMQMPEEEAFCVFVKLMQDYRLRELFKPSMAELGLCMYQFECMIQEHLPELFVHFQSQSFHTSMYASSWFLTIFLTTFPLPIATRIFDIFMSEGLEIVFRVGLALLQMNQAELMQLDMEGMLQHFQKVIPHQFDGVPDKLIQAAYQVKYNSKKMKKLEKEYTTIKTKEMEEQVEIKRLRTENRLLKQRIETLEKESASLADRLIQHKCSSNYNEDFVLQLEKELVQARLSEAESQCALKEMQDKVLDIEKRNNSLPDENNIARLQEELIAVKLREAEAIMGLKELRQQVKDLEEHWQRHLARTTGRWKDPPKKNAMNELQDELMTIRLREAETQAEIREIKQRMMEMETQNQINSNHLRRAEQEVISLQEKVQYLSAQNKGLLTQLSEAKRKQAEIECKNKEEVMAVRLREADSIAAVAELRQHIAELEIQKEEGKLQGQLNKSDSNQYIGELKDQIAELNHELRCLKGQRGFSGQPPFDGIHIVNHLIGDDESFHSSDEDFIDNSLQETGVGFPLHGKSGSMSLDPAVADGSESETEDSVLETRESNQVVQKERPPRRRESYSTTV

SEQ ID NO: 60265 - protein, 28 aa, Homo sapiens
ILIYHTINTSPFTIFPITVESRRLRTPG

SEQ ID NO: 60266 - protein, 720 aa, Homo sapiens
RDPHLLDPTVEYVKFSKERHIMDRTPEKLKKELEEELLLSSEDLRSHAWYHGRIPRQVSENLVQRDGDFLVRDSLSSPGNFVLTCQWKNLAQHFKINRTVLRLSEAYSRVQYQFEMESFDSIPGLVRCYVGNRRPISQQSGAIIFQPINRTVPLRCLEEHYGTSPGQAREGSLTKGRPDVAKRLSLTMGGVQAREQNLPRGNLLRNKEKSGSQPACLDHMQDRRALSLKAHQSESYLPIGCKLPPQSSGVDTSPCPNSPVFRTGSEPALSPAVVRRVSSDARAGEALRGSDSQLCPKPPPKPCKVPFLKVPSSPSAWLNSEANYCELNPAFATGCGRGAKLPSCAQGSHTELLTAKQNEAPGPRNSGVNYLILDDDDRERPWEPAAAQMEKGQWDKGEFVTPLLETVSSFRPNEFESKFLPPENKPLETAMLKRAKELFTNNDPKVIAQHVLSMDCRVARILGVSEEMRRNMGVSSGLELITLPHGHQLRLDIIERHNTMAIGIAVDILGCTGTLEDRAATLSKIIQVAVELKDSMGDLYSFSALMKALEMPQITRLEKTWTALRHQYTQTAILYEKQLKPFSKLLHEGRESTCVPPNNVSVPLLMPLVTLMERQAVTFEGTDMWEKNDQSCEIMLNHLATARFMAEAADSYRMNAERILAGFQPDEEMNEICKTEFQMRLLWGSKGAQVNQTERYEKFNQILTALSRKLEPPPVKQAEL

SEQ ID NO: 60267 - protein, 713 aa, Homo sapiens
KSFIGVKFSKERHIMDRTPEKLKKELEEELLLSSEDLRSHAWYHGRIPRQVSENLVQRDGDFLVRDSLSSPGNFVLTCQWKNLAQHFKINRTVLRLSEAYSRVQYQFEMESFDSIPGLVRCYVGNRRPISQQSGAIIFQPINRTVPLRCLEEHYGTSPGQAREGSLTKGRPDVAKRLSLTMGGVQAREQNLPRGNLLRNKEKSGSQPACLDHMQDRRALSLKAHQSESYLPIGCKLPPQSSGVDTSPCPNSPVFRTGSEPALSPAVVRRVSSDARAGEALRGSDSQLCPKPPPKPCKVPFLKVPSSPSAWLNSEANYCELNPAFATGCGRGAKLPSCAQGSHTELLTAKQNEAPGPRNSGVNYLILDDDDRERPWEPAAAQMEKGQWDKGEFVTPLLETVSSFRPNEFESKFLPPENKPLETAMLKRAKELFTNNDPKVIAQHVLSMDCRVARILGVSEEMRRNMGVSSGLELITLPHGHQLRLDIIERHNTMAIGIAVDILGCTGTLEDRAATLSKIIQVAVELKDSMGDLYSFSALMKALEMPQITRLEKTWTALRHQYTQTAILYEKQLKPFSKLLHEGRESTCVPPNNVSVPLLMPLVTLMERQAVTFEGTDMWEKNDQSCEIMLNHLATARFMAEAADSYRMNAERILAGFQPDEEMNEICKTEFQMRLLWGSKGAQVNQTERYEKFNQILTALSRKLEPPPVKQAEL

SEQ ID NO: 60268 - protein, 257 aa, Homo sapiens
VYLEAYTSVLTVGKEALEEFYGRKLVVADREEVEQEADNILKDADISDVAFLVVGDPFGATTHSDLVLRATKLGIPYRVIHNASIMNAVGCCGLQLYKFGETVSIVFWTDTWRPESFFDKVKKNRQNGMHTLCLLDIKVKEQSLENLIKGRKIYEPPRYMSVNQAAQQLLEIVQNQRIRGEEPAVTEETLCVGLARVGADDQKIAAGTLRQMCTVDLGEPLHSLIITGGSIHPMEMEMLSLFSIPENSSESQSINGL

SEQ ID NO: 60269 - protein, 7 aa, Homo sapiens
KKKKFRN

SEQ ID NO: 60270 - protein, 250 aa, Homo sapiens
LLNWGRLRKKCPSTHSEELHDCIQKTLNEWSSQINPDLVREFPDVLECTVSHAVEKINPDEREEMKVSAKLFIVESNSSSSTRSAVDMACSVLGVAQLDSVIIASPPIEDGVNLSLEHLQPYWEELENLVQSKKIVAIGTSDLDKTQLEQLYQWAQVKPNSNQVNLASCCVMPPDLTAFAKQFDIQLLTHNDPKELLSEASFQEALQESIPDIQAHEWVPLWLLRYSVIVKSRGIIKSKGYILQAKRRGS

SEQ ID NO: 60271 - protein, 39 aa, Homo sapiens
RSCGGFPNPANMGSASFHGRYAPGVSQYLGSGWVRWAYH

SEQ ID NO: 60272 - protein, 28 aa, Homo sapiens
IQCRWHTQDLSFLSSSADRTVTLWTYNG

SEQ ID NO: 60273 - protein, 170 aa, Homo sapiens
KYSPSTEKCLPEIQGIFDRDPDTLLYLLQQKSEPEEPCIGSKAPKDDKTIIEEQATKIADLKRHVEFLVAENKRLRKENKQLKAEKARLLKGPIEKELDVDADFVETSELWSLPPHSETATASSTWKKFAANTGKAKDIPIPNLPPLDFPSPELPLMELSEDILKGFMNN

SEQ ID NO: 60274 - protein, 110 aa, Homo sapiens
KEQNSQMKIVHKKKERGHGYNSSAGAWQAMKNGGKNKNFPNNQSWNSSLSGPSLLFKSQAKQNYAGAKFSEPPSPSVLPKPPSHWVPVSFNPSDKEIMTFQLKTLLKVQV

SEQ ID NO: 60275 - protein, 580 aa, Homo sapiens
LIGSNKKRKLRDWEEKGLDLSMEALSPAGPLGDTEDAAAHGLEPHPDSEQSTGSDSEVLTERTSCSFSTHTDLASGAAGPVPAAMSSMEEIQVELQCADLWKRFHDIGTEMIITKAGRRMFPAMRVKITGLDPHQQYYIAMDIVPVDNKRYRYVYHSSKWMVAGNADSPVPPRVYIHPDSLASGDTWMRQVVSFDKLKLTNNELDDQGHIILHSMHKYQPRVHVIRKDFSSDLSPTKPVPVGDGVKTFNFPETVFTTVTAYQNQQITRLKIDRNPFAKGFRDSGRNRTGLEAIMETYAFWRPPVRTLTFEDFTTMQKQQGGSTGTSPTTSSTGTPSPSASSHLLSPSCSPPTFHLAPNTFNVGCRESQLCNLNLSDYPPCARSNMAALQSYPGLSDSGYNRLQSGTTSATQPSETFMPQRTPSLISGIPTPPSLPGNSKMEAYGGQLGSFPTSQFQYVMQAGNAASSSSSPHMFGGSHMQQSSYNAFSLHNPYNLYGYNFPTSPRLAASPEKLSASQSTLLCSSPSNGAFGERQYLPSGMEHSMHMISPSPNNQQATNTCDGRQYGAVPGSSSQMSVHMV

SEQ ID NO: 60276 - protein, 80 aa, Homo sapiens
TELLIRKLPFQRLVREIAQDFKTDLRFQSSAVTALALQEASEAYLVGLFEDTNLCAIHAKRVTIMPKDIQLVSRIRGERA

SEQ ID NO: 60277 - protein, 116 aa, Homo sapiens
LATKAARKSAPATGGVKKPHRYRPGTVALREIRRYQKSTELLIRKLPFQRLVREIAQEFKTDLRFQSSAVMALQEAREAYLVGLFEDTNLCAIHAKRVTIMPKDIQLVSRIRGERA

SEQ ID NO: 60278 - protein, 69 aa, Homo sapiens
KTMGIMNSFVNDIFERIAGEASRLAHYNKRSTITSREIQTAVRLLLPGELAKHAVSEGTKAVTKYTSSK

SEQ ID NO: 60279 - protein, 10 aa, Homo sapiens
VKGLLARPPS

SEQ ID NO: 60280 - protein, 18 aa, Homo sapiens
LPSMAASSTKSWWETGEV

SEQ ID NO: 60281 - protein, 23 aa, Homo sapiens
KTPSCKTLWQLHWVLAEFWKTGM

SEQ ID NO: 60282 - protein, 259 aa, Homo sapiens
IEEVTDDSSFLGGGGSRIDNTTTTHFAELWGHLDHTMFFQDFRPFLSSSPLDQDNRANERGHQTHTDFWGARPPRLPLGRRYRSRGSSRPDRSPAIEGILQHIFAGFFANSAIPGSPHPFSWSGMLHSNPGDYAWGQTGLDAIVTQLLGQLENTGPPPADKEKITSLPTVTVTQEQVDMGLECPVCKEDYTVEEEVRQLPCNHFFHSSCIVPWLELHDTCPVCRKSLNGEDSTRQSQSTEASASNRFSNDSQLHDRWTF

SEQ ID NO: 60283 - protein, 12 aa, Homo sapiens
LRQTPRRSERVA

SEQ ID NO: 60284 - protein, 22 aa, Homo sapiens
MKPLGAHSTLSLLVEAPHLPSF

SEQ ID NO: 60285 - protein, 25 aa, Homo sapiens
KDFHSPPVSLMSDPRPASGRCSSPG

SEQ ID NO: 60286 - protein, 14 aa, Homo sapiens
LQFSRLMLRLRLRL

SEQ ID NO: 60287 - protein, 234 aa, Homo sapiens
MRDYFAEDDGEMVPRTSHTAAFLSDTKDRGPPVQSQIWRSGEKVPFVQTYSLRAFEKPPQVQTQALRDFEKHLNDLKKENFSLKLRIYFLEERMQQKYEASREDIYKRNTELKVEVESLKRELQDKKQHLDKTWADVENLNSQNEAELRRQFEERQQETEHVYELLENKMQLLQEESRLAKNEAARMAALVEAEKECNLELSEKLKGVTKNWEDVPGDQVKPDQYTEALAQRDK

SEQ ID NO: 60288 - protein, 122 aa, Homo sapiens
KAPRKQLATKAARKSAPATGGVKKPHRYRPGTVALREIRRYQKSTELLIRKLPFQRLVREIAQDFKTDLRFQSSAVMALQEASEAYLVGLFEDTNLCAIHAKRVTIMPKDIQLARRIRGERA

SEQ ID NO: 60289 - protein, 28 aa, Homo sapiens
VRLLLPGELAKHAVSEGTKAVTKYASSK

SEQ ID NO: 60290 - protein, 6 aa, Homo sapiens
RCSWRM

SEQ ID NO: 60291 - protein, 262 aa, Homo sapiens
INLELRNRSPEEVTELVLDNCLCVNGEIEGLNDTFKELEFLSMANVELSSLARLPSLNKLRKLELSDNIISGGLEVLAEKCPNLTYLNLSGNKIKDLSTVEALQNLKNLKSLDLFNCEITNLEDYRESIFELLQQITYLDGFDQEDNEAPDSEEEDDEDGDEDDEEEEENEAGPPEGYEEEEEEEEEEDEDEDEDEDEAGSELGEGEEEVGLSYLMKEEIQDEEDDDDYVEEGEEEEEEEEGGLRGEKRKRDAEDDGEEEDD

SEQ ID NO: 60292 - protein, 302 aa, Homo sapiens
IDEGDEPSSDGEAEEPRRKRRVVTKAYKEPLKSLRPRKVNTPAGSSQKAREEKALLPLELQDDGSDSRKSMRQSTAEHTRQTFLRVQERQGQSRRRKGPHCERPLTQEELLREAKITEELNLRSLETYERLEADKKKQVHKKRKCPGPIITYHSVTVPLVGEPGPKEENVDIEGLDPAPSVSALTPHAGTGPVNPPARCSRTFITFSDDATFEEWFPQGRPPKVPVREVCPVTHRPALYRDPVTDIPYATARAFKIIREAYKKYITAHGLPPTASALGPGPPPPEPLPGSGPRALRQKIVIK

SEQ ID NO: 60293 - protein, 222 aa, Homo sapiens
IKPYKILVISADSGMIEPVVNAVSIHQVKKQSQLSLLDYFLQEHGSYTTEAFLSAQRNFVQSCAGYCLVCYLLQVKDRHNGNILLDAEGHIIHIDFGFILSSSPRNLGFETSAFKLTTEFVDVMGGLDGDMFNYYKMLMLQGLIAARKHMDKVVQIVEIMQQGSQLPCFHGSSTIRNLKERFHMSMTEEQLQLLVEQMVDGSMRSITTKLYDGFQYLTNGIM

SEQ ID NO: 60294 - protein, 23 aa, Homo sapiens
VGAAGALAVLRGPRACIAVSRWL

SEQ ID NO: 60295 - protein, 7 aa, Homo sapiens
VLDPCSL

SEQ ID NO: 60296 - protein, 547 aa, Homo sapiens
VENLNSQNEAELRRQFEERQQETEHVYELLENKIQLLQEESRLAKNEAARMAALVEAEKECNLELSEKLKGVTKNWEDVPGDQVKPDQYTETLAQRDKRIEELNQSLAAQERLVEQLSREKQQLLHLLEEPTSMEVQPMTEELLKQQKLNSHETTITQQSVSDSHLAELQEKIQQTEATNKILQEKLNEMSYELKCAQELSQKQDGTIQNLKETLKSRERETEELYQVIEGQNDTMAKLREMLHQSQLGQLHSSEGTSPAQQQVALLDLQSALFCSQLEIQKLQRVVRQKERQLADAKQCVQFVEAAAHESEQQKEASWKHNQELRKALQQLQEVLQNKSQQLRAWEAEKYNEIRTQEQNIQHLNHSLSHKEQLLQEFRELLQYRDNSDKTLEANEMLLEKLRQRIRDKAVALERAIDEKFSALEEKEKELRQLRLAVRERDHDLERLRDVLSSNEATMQTMESLLRAKGLEVEQLSTTCQNLQWLKEEMETKFSRWQKEQESIIQQLQTSLHDRNKEVEARLHATLLCKLGPGQSEIAEELCQRLQ

SEQ ID NO: 60297 - protein, 162 aa, Homo sapiens
RMLQDLLSDRNKQVLEHEMEIQGLLQSVSTREQESQAAAEKLVQALMERNSELQALHQYLGGRDSLMSQAPISNQQAEVTPTGRLGKQTDQGSMQIPSRDDSTSLTAKEDVSIPRSTLGDLDTVAGLEKELSNAKEELELMAKKERESQLYPSNMGEKVSAF

SEQ ID NO: 60298 - protein, 334 aa, Homo sapiens
ISISRMWGLKVLLLPVVSFALYPEEILDTHWELWKKTHRKQYNNKVDEISRRLIWEKNLKYISIHNLEASLGVHTYELAMNHLGDMTSEEVVQKMTGLKVPLSHSRSNDTLYIPEWEGRAPDSVDYRKKGYVTPVKNQGQCGSCWAFSSVGALEGQLKKKTGKLLNLSPQNLVDCVSENDGCGGGYMTNAFQYVQKNRGIDSEDAYPYVGQEESCMYNPTGKAAKCRGYREIPEGNEKALKRAVARVGPVSVAIDASLTSFQFYSKGVYYDESCNSDNLNHAVLAVGYGIQKGNKHWIIKNSWGENWGNKGYILMARNKNNACGIANLASFPKM

SEQ ID NO: 60299 - protein, 748 aa, Homo sapiens
KRRPGLDFDDDGEGNSKFLRCDDDQMSNDKERFARSDDEQSSADKERLARENHSEIERRRRNKMTAYITELSDMVPTCSALARKPDKLTILRMAVSHMKSLRGTGNTSTDGSYKPSFLTDQELKHLILEAADGFLFIVSCETGRVVYVSDSVTPVLNQPQSEWFGSTLYDQVHPDDVDKLREQLSTSENALTGRILDLKTGTVKKEGQQSSMRMCMGSRRSFICRMRCGSSSVDPVSVNRLSFVRNRCRNGLGSVKDGEPHFVVVHCTGYIKAWPPAGVSLPDDDPEAGQGSKFCLVAIGRLQVTSSPNCTDMSNVCQPTEFISRHNIEGIFTFVDHRCVATVGYQPQELLGKNIVEFCHPEDQQLLRDSFQQVVKLKGQVLSVMFRFRSKNQEWLWMRTSSFTFQNPYSDEIEYIICTNTNVKNSSQEPRPTLSNTIQRPQLGPTANLPLEMGSGQLAPRQQQQQTELDMVPGRDGLASYNHSQVVQPVTTTGPEHSKPLEKSDGLFAQDRDPRFSEIYHNINADQSKGISSSTVPATQQLFSQGNTFPPTPRPAENFRNSGLAPPVTIVQPSASAGQMLAQISRHSNPTQGATPTWTPTTRSGFSAQQVATQATAKTRTSQFGVGSFQTPSSFSSMSLPGAPTASPGAAAYPSLTNRGSNFAPETGQTAGQFQTRTAEGVGVWPQWQGQQPHHRSSSSEQHVQQPPAQQPGQPEVFQEMLSMLGDQSNSYNNEEFPDLTMFPPFSE

SEQ ID NO: 60300 - protein, 182 aa, Homo sapiens
TKHRPKENLELILTQSVENVGVRGDLVSVKKSLGRNRLLPQGLAVYASPENKKLFEEEKLLRQEGKLEKIQTKAGEATVKFLKSCRLEVGMKNNVKWELNPEIVARHFFKNLGVVVAPHTLKLPEEPITRWGEYWCEVTVNGLDTVRVPMSVVNFEKPKTKRYKYWLAQQAAKAMAPTSPQI

SEQ ID NO: 60301 - protein, 86 aa, Homo sapiens
MEHLIGACRDKEAKIKELLKKLEQLSEEVLAIRGENARLALQLQDSQKNHEEIISTYRNHLLNAARGYMEHEVYNILLQILSMEEE

SEQ ID NO: 60302 - protein, 13 aa, Homo sapiens
VSKTKWPPRPVLV

SEQ ID NO: 60303 - protein, 361 aa, Homo sapiens
IPFDFYLCEMAFPRVKPAPDETSFSEALLKRNQDLAPNSAEQASILSLVTKINNVIDNLIVAPGTFEVQIEEVRQVGSYKKGTMTTGHNVADLVVILKILPTLEAVAALGNKVVESLRAQDPSEVLTMLTNETGFEISSSDATVKILITTVPPNLRKLDPELHLDIKVLQSALAAIRHARWFEENASQSTVKVLIRLLKDLRIRFPGFEPLTPWILDLLGHYAVMNNPTRQPLALNVAYRRCLQILAAGLFLPGSVGITDPCESGNFRVHTVMTLEQQDMVCYTAQTLVRILSHGGFRKILGQEGDASYLASEISTWDGVIVTPSEKAYEKPPEKKEGEEEEENTEEPPQGEEEESMETQE

SEQ ID NO: 60304 - protein, 21 aa, Homo sapiens
LSSRSMLERMVITTLSPRQSS

SEQ ID NO: 60305 - protein, 40 aa, Homo sapiens
LDTNKDCEVDFVEYVRSLACLCLYCHEYFKDCPSEPPCSQ

SEQ ID NO: 60306 - protein, 4 aa, Homo sapiens
ISRL

SEQ ID NO: 60307 - protein, 929 aa, Homo sapiens
IDLLTVGESRQMVAVAEKIRTALLTAGDIYLLSTFRLPPKQGGVLFGLYSRQDNTRWLEASVVGKINKVLVRYQREDGKVHAVNLQQAGLADGRTHTVLLRLRGPSRPSPALHLYVDCKLGDQHAGLPALAPIPPAEVDGLEIRTGQKAYLRMQGFVESMKIILGGSMARVGALSECPFQGDESIHSAVTNALHSILGEQTKALVTQLTLFNQILVELRDDIRDQVKEMSLIRNTIMECQVCGFHEQRSHCSPNPCFRGVDCMEVYEYPGYRCGPCPPGLQGNGTHCSDINECAHADPCFPGSSCINTMPGFHCEACPRGYKGTQVSGVGIDYARASKQVCNDIDECNDGNNGGCDPNSICTNTVGSFKCGPCRLGFLGNQSQGCLPARTCHSPAHSPCHIHAHCLFERNGAVSCQCNVGWAGNGNVCGTDTDIDGYPDQALPCMDNNKHCKQDNCLLTPNSGQEDADNDGVGDQCDDDADGDGIKNVEDNCRLFPNKDQQNSDTDSFGDACDNCPNVPNNDQKDTDGNGEGDACDNDVDGDGIPNGLDNCPKVPNPLQTDRDEDGVGDACDSCPEMSNPTQTDADSDLVGDVCDTNEDSDGDGHQDTKDNCPQLPNSSQLDSDNDGLGDECDGDDDNDGIPDYVPPGPDNCRLVPNPNQKDSDGNGVGDVCEDDFDNDAVVDPLDVCPESAEVTLTDFRAYQTVVLDPEGDAQIDPNWVVLNQGMEIVQTMNSDPGLAVGYTAFNGVDFEGTFHVNTVTDDDYAGFLFSYQDSGRFYVVMWKQTEQTYWQATPFRAVAQPGLQLKAVTSVSGPGEHLRNALWHTGHTPDQVRLLWTDPRNVGWRDKTSYRWQLLHRPQVGYIRVKLYEGPQLVADSGVIIDTSMRGGRLGVFCFSQENIIWSNLQYRCNDTVPEDFEPFRRQLLQGRV

SEQ ID NO: 60308 - protein, 329 aa, Homo sapiens
IGYNIIWVPMASCDFSIRTYTYADTPDDFQLHNFSLPEEDTKLKIPLIHRALQLAQRPVSLLASPWTSPTRLKTRGAGNGKGPLKGQPRDIYHQTWARYIVKFLDAYAEHKLQFWAVTAENEPSAGLLSGYPFQCLGFTPEHQRDFIARDLGPTLANGTHHNVRLLMLDDQRLLLPHWAKVVLTDPEAAKGLCGFQVLGAECAARLLGSRDAVQPQHHHKPPVPCGRLDRLEPIIVDITKHTFYKQPMFYHLGHFSKFIPEGSQRVGLVASQKNDPDAVALMHPDGSAVVVVLNRSSKDVPLTIKDPAVGFLETISPGYSIHTYLWRRQ

SEQ ID NO: 60309 - protein, 29 aa, Homo sapiens
LEPLWSSLHLMTLRGWSFQVLPERNVPSL

SEQ ID NO: 60310 - protein, 77 aa, Homo sapiens
KDPDEVARLWGRRKCKPQMNYDKLSRALRYYYNKRILHKTKGKRFTYKFNFNKLVMPNYPFINIRSSGKIQTLLVGN

SEQ ID NO: 60311 - protein, 125 aa, Homo sapiens
IPKNDPLNEVHNFNFYLSNVGKDNPQGSFDCVQQTFSSSGASQLNCLGFIQDKITVCATNDSDQMTRERTTQAEEESRNRSTEVIKPGGPYVGKRVQIRKAPQAVSDTVPERKRSTPMNPANPIR

SEQ ID NO: 60312 - skipped

SEQ ID NO: 60313 - protein, 993 aa, Homo sapiens
LEGHSGTRVGSSLRQTFSFLSGMTGKAKTREKEKMKEAKDARYTNGHLFTTISVSGMTMCYACNKSITAKEALICPTCNVTIHNRCKDTLANCTKVKQKQQKAALLKNNTALQSVSLRSKTTIRERPSSAIYPSDSFRQSLLGSRRGRSSLSLAKSVSTTNIAGHFNDESPLGLRRILSQSTDSLNMRNRTLSVESLIDEAEVIYSELMSDFEMDEKDFAADSWSLAVDSSFLQQHKKEVMKQQDVIYELIQTELHHVRTLKIMTRLFRTGMLEELHLEPGVVQGLFPCVDELSDIHTRFLSQLLERRRQALCPGSTRNFVIHRLGDLLISQFSGPSAEQMCKTYSEFCSRHSKALKLYKELYARDKRFQQFIRKVTRPAVLKRHGVQECILLVTQRITKYPLLISRILQHSHGIEEERQDLTTALGLVKELLSNVDEGIYQLEKGARLQEIYNRMDPRAQTPVPGKGPFGREELLRRKLIHDGCLLWKTATGRFKDVLVLLMTDVLVFLQEKDQKYIFPTLDKPSVVSLQNLIVRDIANQEKGMFLISAAPPEMYEVHTASRDDRSTWIRVIQQSVRTCPSREDFPLIETEDEAYLRRIKMELQQKDRALVELLREKVGLFAEMTHFQAEEDGGSGMALPTLPRGLFRSESLESPRGERLLQDAIREVEGLKDLLVGPGVELLLTPREPALPLEPDSGGNTSPGVTANGEARTFNGSIELCRADSDSSQRDRNGNQLRSPQEEALQRLVNLYGLLHGLQAAVAQQDTLMEARFPEGPERREKLCRANSRDGEAGRAGAAPVAPEKQATELALLQRQHALLQEELRRCRRLGEERATEAGSLEARLRESEQARALLEREAEEARRQLAALGQTEPLPAEAPWARRPVDPRRRSLPAGDALYLSFNPPQPSRGTDRLDLPVTTRSVHRNFEDRERQELGSPEERLQDSSDPDTGSEEEGSSRLSPPHSPRDFTRMQDIPEETESRDGEAVASES

SEQ ID NO: 60314 - protein, 43 aa, Homo sapiens
IVPRLLFENEYSYTTQIDYNPKDRLLYAWDNGHQVTYHVIFAY

SEQ ID NO: 60315 - protein, 147 aa, Homo sapiens
TGTASRAATMPNFSGNWKIIRSENFEELLKVLGVNVMLRKIAVAAASKPAVEIKQEGDTFYIKTSTTVRTTEINFKVGEEFEEQTVDGRPCKSLVKWESENKMVCEQKLLKGEGPKTSWTRELTNDGELILTMTADDVVCTRVYVRE

SEQ ID NO: 60316 - protein, 173 aa, Homo sapiens; identical to SEQ ID NO: 5255

SEQ ID NO: 60317 - protein, 620 aa, Homo sapiens
KRPLLAPLCNGLINSYEDKSNDFVCPICFDMIEEAYMTKCGHSFCYKCIHQSLEDNNRCPKCNYVVDNIDHLYPNFLVNELILKQKQRFEEKRFKLDHSVSSTNGHRWQIFQDWLGTDQDNLDLANVNLMLELLVQKKKQLEAESHAAQLQILMEFLKVARRNKREQLEQIQKELSVLEEDIKRVEEMSGLYSPVSEDSTVPQFEAPSPSHSSIIDSTEYSQPPGFSGSSQTKKQPWYNSTLASRRKRLTAHFEDLEQCYFSTRMSRISDDSRTASQLDEFQECLSKFTRYNSVRPLATLSYASDLYNGSSIVSSIEFDRDCDYFAIAGVTKKIKVYEYDTVIQDAVDIHYPENEMTCNSKISCISWSSYHKNLLASSDYEGTVILWDGFTGQRSKVYQEHEKRCWSVDFNLMDPKLLASGSDDAKVKLWSTNLDNSVASIEAKANVCCVKFSPSSRYHLAFGCADHCVHYYDLRNTKQPIMVFKGHRKAVSYAKFVSGEEIVSASTDSQLKLWNVGKPYCLRSFKGHINEKNFVGLASNGDYIACGSENNSLYLYYKGLSKTLLTFKFDTVKSVLDKDRKEDDTNEFVSAVCWRALPDGESNVLIAANSQGTIKVLELV

SEQ ID NO: 60318 - protein, 35 aa, Homo sapiens
IWLAGLFFLLINCSILIQIISHYKEEPLTERIKYD

SEQ ID NO: 60319 - protein, 73 aa, Homo sapiens
KLLLAARAIVAIENPADVSVISSRNTGQRAVLKFAAATGATPIAGHFTPGTFTNQIQAAFWEPWLLMVTDPRG

SEQ ID NO: 60320 - protein, 77 aa, Homo sapiens
TRTMAGVSELESALQMEPAAFQALYSAEKPKLEDEHLVFFCQMGKRGLQATQLARSLGYTGARNYAGAYREWLEKES

SEQ ID NO: 60321 - protein, 212 aa, Homo sapiens
RYKQVKVGNCNTPKPSFFDFEGKQKWEAWKALGDSSPSQAMQEYIAVVKKLDPGWNPQIPEKKGKEANTGFGGPVISSLYHEETIREEDKNIFDYCRENNIDHITKAIKSKNVDVNVKDEEGRALLHWACDRGHKELVTVLLQHRADINCQDNEGQTALHYASACEFLDIVELLLQSGADPTLRDQDGCLPEEVTGCKTVSLVLQRHTTGKA

SEQ ID NO: 60322 - protein, 963 aa, Homo sapiens
LLLISEPGSPSDQPPGASSGRGPGSFRAQHRQLAVMGGSASSQLDEGKCAYIRGKTEAAIKNFSPYYSRQYSVAFCNHVRTEVEQQRDLTSQFLKTKPPLAPGTILYEAELSQFSEDIKKWKERYVVVKNDYAVESYENKEAYQRGAAPKCRILPAGGKVLTSEDEYNLLSDRHFPDPLASSEKENTQPFVVLPKEFPVYLWQPFFRHGYFCFHEAADQKRFSALLSDCVRHLNHDYMKQMTFEAQAFLEAVQFFRQEKGHYGSWEMITGDEIQILSNLVMEELLPTLQTDLLPKMKGKKNDRKRTWLGLLEEAYTLVQHQVSEGLSALKEECRALTKGLEGTIRSDMDQIVNSKNYLIGKIKAMVAQPAEKSCLESVQPFLASILEELMGPVSSGFSEVRVLFEKEVNEVSQNFQTTKDSVQLKEHLDRLMNLPLHSVKMEPCYTKVNLLHERLQDLKSRFRFPHIDLVVQRTQNYMQELMENAVFTFEQLLSPHLQGEASKTAVAIEKVKLRVLKQYDYDSSTIRKKIFQEALVQITLPTVQKALASTCKPELQKYEQFIFADHTNMIHVENVYEEILHQILLDETLKVIKEAAILKKHNLFEDNMALPSESVSSLTDLKPPTGSNQASPARRASAILPGVLGSETLSNEVFQESEEEKQPEVPSSLAKGESLSLPGPSPPPDGTEQVIISRVDDPVVNPVATEDTAGLPGTCSSELEFGGTLEDEEPAQEEPEPITASGSLKALRKLLTASVEVPVDSAPVMEEDTNGESHVPQENEEEEEKEPSQAAAIHPDNCEESEVSEREAQPPCPEAHGEELGGFPEVGSPASPPASGGLTEEPLGPMEGELPGEACTLTAHEGRGGKCTEEGDASQQEGCTLGSDPICLSESQVSEEQEEMGGQSSAAQATASVNAEEIKVARIHECQWVVEDAPNPDVLLSHKDDVKEGEGGQESFPELPSEE

SEQ ID NO: 60323 - protein, 278 aa, Homo sapiens
VALEHFVLVVVRVLRGPTSADETAKKIQYLIHCQWCEERIFQKDGNMVEENPYRQLPCNCHGSMPGKTAIELGPLWSSSLFNTGFLKRMLFESLHHGLDDIQTLIKTLIFESECTPQSQFSIHASSNVNKQEENGVFIKTTDDTTTDNYIAQGKRKSNEMITNLGKKQKTDVSTEHPPFYYNIHRHSIKGMNMPKLKKFLCYLSQAGFRVSRTHFDPMGVRTDAPLMQFKSILLKYSTPTYTGGQSESHVQSASEDTVTERVEMSVNDKAEASGCRRW

SEQ ID NO: 60324 - protein, 54 aa, Homo sapiens
LTAPVFRRLLALSVGPIPARFLLLPIEALEMNVSISSEMNQIMMHHYHRRNSCL

SEQ ID NO: 60325 - protein, 129 aa, Homo sapiens
LYIIGGAESWNCLNTVERYNPENNTWTLIAPMNVARRGAGVAVLNGKLFVCGGFDGSHAISCVEMYDPTRNEWKMMGNMTSPRSNAGIATVGNTIYAVGGFDGNEFLNTVEVYNLESNEWSPYTKIFQF

SEQ ID NO: 60326 - protein, 93 aa, Homo sapiens
VMLGENGTGKTTFIRMLAGRLKPEEGGEVPVLNVSYKPQKISRKSTGSVRQLLHEKIRDAYTHPQFVTDVMKPLQIENITDQEVQTLSGGELQ

SEQ ID NO: 60327 - protein, 166 aa, Homo sapiens
LTMIWRRAALAGTRLVWSRSGSAGWLDRAAGAAGAAAAAASGMESNTSSSLENLATAPVNQIQETISDNCVVIFSKTSCSYCTMAKKLFHDMNVNYKVVELDLLEYGNQFQDALYKMTGERTVPRIFVNGTFIGGATDTHRLHKEGKLLPLVHQCYLKKSKRKEFQ

SEQ ID NO: 60328 - protein, 73 aa, Homo sapiens
KRGGGRGARWGHRHHLTGSRVLRAAVWVRGAVRAQVGSAHGLPARGARILRCGAERGAAPAAAWSFPRTSGRP

SEQ ID NO: 60329 - protein, 2355 aa, Homo sapiens
LERTELNKLPKSVQNKLEKFLADQQSEIDGLKGRHEKFKVESEQQYFEIEKRLSHSQERLVNETRECQSLRLELEKLNNQLKALTEKNKELEIAQDRNIAIQSQFTRTKEELEAEKRDLIRTNERLSQELEYLTEDVKRLNEKLKESNTTKGELQLKLDELQASDVSVKYREKRLEQEKELLHSQNTWLNTELKTKTDELLALGREKGNEILELKCNLENKKEEVSRLEEQMNGLKTSNEHLQKHVEDLLTKLKEAKEQQASMEEKFHNELNAHIKLSNLYKSAADDSEAKSNELTRAVEELHKLLKEAGEANKAIQDHLLEVEQSKDQMEKEMLEKIGRLEKELENANDLLSATKRKGAILSEEELAAMSPTAAAVAKIVKPGMKLTELYNAYVETQDQLLLEKLENKRINKYLDEIVKEVEAKAPILKRQREEYERAQKAVASLSVKLEQAMKEIQRLQEDTDKANKQSSVLERDNRRMEIQVKDLSQQIRVLLMELEEARGNHVIRDEEVSSADISSSSEVISQHLVSYRNIEELQQQNQRLLVALRELGETREREEQETTSSKITELQLKLESALTELEQLRKSRQHQMQLVDSIVRQRDMYRILLSQTTGVAIPLHASSLDDVSLASTPKRPSTSQTVSTPAPVPVIESTEAIEAKAALKQLQEIFENYKKEKAENEKIQNEQLEKLQEQVTDLRSQNTKISTQLDFASKRYEMLQDNVEGYRREITSLHERNQKLTATTQKQEQIINTMTQDLRGANEKLAVAEVRAENLKKEKEMLKLSEVRLSQQRESLLAEQRGQNLLLTNLQTIQGILERSETETKQRLSSQIEKLEHEISHLKKKLENEVEQRHTLTRNLDVQLLDTKRQLDTETNLHLNTKELLKNAQKEIATLKQHLSNMEVQVASQSSQRTGKGQPSNKEDVDDLVSQLRQTEEQVNDLKERLKTSTSNVEQYQAMVTSLEESLNKEKQVTEEVRKNIEVRLKESAEFQTQLEKKLMEVEKEKQELQDDKRRAIESMEQQLSELKKTLSSVQNEVQEALQRASTALSNEQQARRDCQEQAKIAVEAQNKYERELMLHAADVEALQAAKEQVSKMASVRQHLEETTQKAESQLLECKASWEERERMLKDEVSKCVCRCEDLEKQNRLLHDQIEKLSDKVVASVKEGVQGPLNVSLSEEGKSQEQILEILRFIRREKEIAETRFEVAQVESLRYRQRVELLERELQELQDSLNAEREKVQVTAKTMAQHEELMKKTETMNVVMETNKMLREEKERLEQDLQQMQAKVRKLELDILPLQEANAELSEKSGMLQAEKKLLEEDVKRWKARNQHLVSQQKDPDTEEYRKLLSEKEVHTKRIQQLTEEIGRLKAEIARSNASLTNNQNLIQSLKEDLNKVRTEKETIQKDLDAKIIDIQEKVKTITQVKKIGRRYKTQYEELKAQQDKVMETSAQSSGDHQEQHVSVQEMQELKETLNQAETKSKSLESQVENLQKTLSEKETEARNLQEQTVQLQSELSRLRQDLQDRTTQEEQLRQQITEKEEKTRKAIVAAKSKIAHLAGVKDQLTKENEELKQRNGALDQQKDELDVRITALKSQYEGRISRLERELREHQERHLEQRDEPQEPSNKVPEQQRQITLKTTPASGERGIASTSDPPTANIKPTPVVSTPSKVTAAAMAGNKSTPRASIRPMVTPATVTNPTTTPTATVMPTTQVESQEAMQSEGPVEHVPVFGSTSGSVRSTSPNVQPSISQPILTVQQQTQATAFVQPTQQSHPQIEPANQELSSNIVEVVQSSPVERPSTSTAVFGTVSATPSSSLPKRTREEEEDSTIEASDQVSDDTVEMPLPKKLKSVTPVGTEEEVMAEESTDGEVETQVYNQDSQDSIGEGVTQGDYTPMEDSEETSQSLQIDLGPLQSDQQTTTSSQDGQGKGDDVIVIDSDDEEEDDDENDGEHEDYEEDEEDDDDDEDDTGMGDEGEDSNEGTGSADGNDGYEADDAEGGDGTDPGTETEESMGGGEGNHRAADSQNSGEGNTGAAESSFSQEVSREQQPSSASERQAPRAPQSPRRPPHPLPPRLTIHAPPQELGPPVQRIQMTRRQSVGRGLQLTPGIGGMQQHFFDDEDRTVPSTPTLVVPHRTDGFAEAIHSPQVAGVPRFRFGPPEDMPQTSSSHSDLGQLASQGGLGMYETPLFLAHEEESGGRSVPTTPLQVAAPVTVFTESTTSDASEHASQSVPMVTTSTGTLSTTNETATGDDGDEVFVEAESEGISSEAGLEIDSQQEEEPVQASDESDLPSTSQDPPSSSSVDTSSSQPKPFRRVRLQTTLRQGVRGRQFNRQRGVSHAMGGRGGINRGNIN

SEQ ID NO: 60330 - protein, 24 aa, Homo sapiens
LWLFCWLEDRPGAATPPLGKAETL

SEQ ID NO: 60331 - protein, 274 aa, Homo sapiens
RSRRPQVTLLDPNEKYLLRLLDKTTVSHNTKRFRFALPTAHHTLGLPVGKHIYLSTRIDGSLVIRPYTPVTSDEDQGYVDLVIKVYLKGVHPKFPEGGKMSQYLDSLKVGDVVEFRGPSGLLTYTGKGHFNIQPNKKSPPEPRVAKKLGMIAGGTGITPMLQLIRAILKVPEDPTQCFLLFANQTEKDIILREDLEELQARYPNRFKLWFTLDHPPKDWAYSKGFVTADMIREHLPAPGDDVLVLLCGPPPMVQLACHPNLDKLGYSQKMRFTY

SEQ ID NO: 60332 - protein, 63 aa, Homo sapiens
KGNQWVGYDDQESVKSKVQYLKDRQLAGAMVWALDLDDFQGSFCGQDLRFPLTNAIKDALAAT

SEQ ID NO: 60333 - protein, 46 aa, Homo sapiens
LMEACWDGDPLKRPLLGIVQPMLQGIMNRLCKSNSEQPNRGLDDST

SEQ ID NO: 60334 - protein, 34 aa, Homo sapiens
IEKMMRNSTEDIMSLSTQGDYINLQTKSSSWSCC

SEQ ID NO: 60335 - protein, 68 aa, Homo sapiens [sequence omitted]

SEQ ID NO: 60336 - protein, 146 aa, Homo sapiens
IIVGAIGVGKTSLLHQYVHKTFYEEYQTTLGASILSKIIILGDTTLKLQIWDTGGQERFRSMVSTFYKGSDGCILAFDVTDLESFEALDIWRGDVLAKIVPMEQSYPMVLLGNKIDLADRKYQSILENHLTESIKLSPDQSRSRCC

SEQ ID NO: 60337 - protein, 42 aa, Homo sapiens
MDELLQQCFLHALKCRVKKADLPLLTSTFLGSHMFSCWYGKH

SEQ ID NO: 60338 - protein, 20 aa, Homo sapiens
TTVRSSVWLFSRWLSWGNAW

SEQ ID NO: 60339 - protein, 29 aa, Homo sapiens
MIEKHGGYKFSAPVVPSSFNFGGPVPGMN

SEQ ID NO: 60340 - protein, 437 aa, Homo sapiens
TFGWIRAEVMGALVNAIFLTGLCFAILLEAIERFIEPHEMQQPLVVLGVGVAGLLVNVLGLCLFHHHSGFSQDSGHGHSHGGHGHGHGLPKGPRVKSTRPGSSDINVAPGEQGPDQEETNTLVANTSNSNGLKLDPADPENPRSGDTVEVQVNGNLVREPDHMELEEDRAGQLNMRGVFLHVLGDALGSVIVVVNALVFYFSWKGCSEGDFCVNPCFPDPCKAFVEIINSTHASVYEAGPCWVLYLDPTLCVVMVCILLYTTYPLLKESALILLQTVPKQIDIRNLIKELRNVEGVEEVHELHVWQLAGSRIIATAHIKCEDPTSYMEVAKTIKDVFHNHGIHATTIQPEFASVGSKSSVVPCELACRTQCALKQCCGTLPQAPSGKDAEKTPAVSISCLELSNNLEKKPRRTKAENIPAVVIEIKNMPNKQPESSL

SEQ ID NO: 60341 - protein, 61 aa, Homo sapiens
KSRDSFLKRVKENDQKKKEAKEKGTWVQLKRQPAPPREAHFVRTNGKEPELLEPIPYEFMA

SEQ ID NO: 60342 - protein, 178 aa, Homo sapiens
MDSDIKVLEDQFDEIIVDIATKRKQYPRKILECVIKTIKAKQEILKQYHPVVHPLDLKYDPDPAPHMENLKCRGETVAKEISEAMKSLPALIEQGEGFSQVLRMQPVIHLQRIHQEVFSSCHRKPDAKPENFITQIETTPTETASRKTSDMVLKRKQTKDCPQRKWYPLRPKKINLDT

SEQ ID NO: 60343 - protein, 104 aa, Homo sapiens
LSSNLQHHFSLSSVYSHYFPDTGIPEVTTCHSRSAITVDYIFYSAEKEDVAGHPGAEVALVGGLKLLARLSLLTEQDLWTVNGLPNENNSSDHLPLLAKFRLEL

SEQ ID NO: 60344 - protein, 60 aa, Homo sapiens
LRPGARSGLFALWMEWRCGPLWSANKALGWRGRLAAFLVVGPSEQSSWFWRWLRRLDCGV

SEQ ID NO: 60345 - protein, 26 aa, Homo sapiens
MKIMKTTRSQTPPGRAPAASASSPTL

SEQ ID NO: 60346 - protein, 34 aa, Homo sapiens
RLALQHGDGHVVDYLSQPVIDYILKSQLYINASG

SEQ ID NO: 60347 - protein, 56 aa, Homo sapiens
VHAVGGKHRARMPGGCGPEAGAARDALLWPLVSQQEPASTMGGAGETSEETSGQIR

SEQ ID NO: 60348 - protein, 54 aa, Homo sapiens
KKQGHDQKAAAKAALIYTCTVCRTRMPDPKTFKQHFESKHPKTSLPPELADVQA

SEQ ID NO: 60349 - protein, 586 aa, Homo sapiens
ICQARAAVMVYDDANKKWVPAGGSTGFSRVHIYHHTGNNTFRVVGRKIQDHQVVINCAIPKGLKYNQATQTFHQWRDARQVYGLNFGSKEDANVFASAMMHALEVLNSQETGPTLPRQNSQLPAQVQNGPSQEELEIQRRQLQEQQRQKELERERLERERMERERLERERLERERLERERLEQEQLERERQERERQERLERQERLERQERLERQERLDRERQERQERERLERLERERQERERQEQLEREQLEWERERRISSAAAPASVETPLNSVLGDSSASEPGLQAASQPAETPSQQGIVLGPLAPPPPPPLPPGPAQASVALPPPPGPPPPPPLPSTGPPPPPPPPPLPNQVPPPPPPPPAPPLPASGFFLASMSEDNRPLTGLAAAIAGAKLRKVSRMEDTSFPSGGNAIGVNSASSKTDTGRGNGPLPLGGSGLMEEMSALLARRRRIAEKGSTIETEQKEDKGEDSEPVTSKASSTSTPEPTRKPWERTNTMNGSKSPVISRRDSPRKNQIVFDNRSYDSLHRPKSTPLSQPSANGVQTEGLDYDRLKQDILDEMRKELTKLKEELIDAIRQELSKSNTA

SEQ ID NO: 60350 - protein, 23 aa, Homo sapiens
RKRGHSGDRRSPSRRWHDRGSEA

SEQ ID NO: 60351 - protein, 18 aa, Homo sapiens
TQLHARACTDHLHVPLGL

SEQ ID NO: 60352 - protein, 67 aa, Homo sapiens
LELAGNAARDNKKTRIIPRHLQLAIRNDEELNKLLGRVTIAQGGVLPNIQAVLLPKKTESHHKAKGK

SEQ ID NO: 60353 - protein, 31 aa, Homo sapiens
KMPLAQGCEEGGEVAARAARAAAAAAAACVL

SEQ ID NO: 60354 - protein, 19 aa, Homo sapiens
RKMKSFHRNPLKIGLTAKP

SEQ ID NO: 60355 - protein, 1708 aa, Homo sapiens
LRREKNILEYLEWAKPFTSKVKQMRLHREDFEILKVIGRGAFGEVAVVKLKNADKVFAMKILNKWEMLKRAETACFREERDVLVNGDNKWITTLHYAFQDDNNLYLVMDYYVGGDLLTLLSKFEDRLPEDMARFYLAEMVIAIDSVHQLHYVHRDIKPDNILMDMNGHIRLADFGSCLKLMEDGTVQSSVAVGTPDYISPEILQAMEDGKGRYGPECDWWSLGVCMYEMLYGETPFYAESLVETYGKIMNHKERFQFPAQVTDVSENAKDLIRRLICSREHRLGQNGIEDFKKHPFFSGIDWDNIRNCEAPYIPEVSSPTDTSNFDVDDDCLKNSETMPPPTHTAFSGHHLPFVGFTYTSSCVLSDRSCLRVTAGPTSLDLDVNVQRTLDNNLATEAYERRIKRLEQEKLELSRKLQESTQTVQALQYSTVDGPLTASKDLEIKNLKEEIEKLRKQVTESSHLEQQLEEANAVRQELDDAFRQIKAYEKQIKTLQQEREDLNKELVQASERLKNQSKELKDAHCQRKLAMQEFMEINERLTELHTQKQKLARHVRDKEEEVDLVMQKVESLRQELRRTERAKKELEVHTEALAAEASKDRKLREQSEHYSKQLENELEGLKQKQISYSPGVCSIEHQQEITKLKTDLEKKSIFYEEELSKREGIHANEIKNLKKELHDSEGQQLALNKEIMILKDKLEKTRRESQSEREEFESEFKQQYEREKVLLTEENKKLTSELDKLTTLYENLSIHNQQLEEEVKDLADKKESVAHWEAQITEIIQWVSDEKDARGYLQALASKMTEELEALRNSSLGTRATDMPWKMRRFAKLDMSARLELQSALDAEIRAKQAIQEELNKVKASNIITECKLKDSEKKNLELLSEIEQLIKDTEELRSEKGIEHQDSQHSFLAFLNTPTDALDQFETDPVENTYVWNPSVKFHIQSRSTSPSTSSEAEPVKTVDSTPLSVHTPTLRKKGCPGSTGFPPKRKTHQFFVKSFTTPTKCHQCTSLMVGLIRQGCSCEVCGFSCHITCVNKAPTTCPVPPEQTKGPLGIDPQKGIGTAYEGHVRIPKPAGVKKGWQRALAIVCDFKLFLYDIAEGKASQPSVVISQVIDMRDEEFSVSSVLASDVIHASRKDIPCIFRVTASQLSASNNKCSILMLADTENEKNKWVGVLSELHKILKKNKFRDRSVYVPKEAYDSTLPLIKTTQAAAIIDHERIALGNEEGLFVVHVTKDEIIRVGDNKKIHQIELIPNDQLVAVISGRNRHVRLFPMSALDGRETDFYKLSETKGCQTVTSGKVRHGALTCLCVAMKRQVLCYELFQSKTRHRKFKEIQVPYNVQWMAIFSEQLCVGFQSGFLRYPLNGEGNPYSMLHSNDHTLSFIAHQPMDAICAVEISSKEYLLCFNSIGIYTDCQGRRSRQQELMWPANPSSCCYNAPYLSVYSENAVDIFDVNSMEWIQTLPLKKVRPLNNEGSLNLLGLETIRLIYFKNKMAEGDELVVPETSDNSRKQMVRNINNKRRYSFRVPEEERMQQRREMLRDPEMRNKLISNPTNFNHIAHMGPGDGIQILKDLPMNPRPQESRTVFSGSVSIPSITKSRPEPGRSMSASSGLSARSSAQNGSALKREFSGGSYSAKRQPMPSPSEGSLSSGGMDQGSDAPARDFDGEDSDSPRHSTASNSSNLSSPPSPASPRKTKSLSLESTDRGSWDP

SEQ ID NO: 60356 - protein, 28 aa, Homo sapiens
VRLLLPGELAKHAVSEGTKAVTKYTSSK

SEQ ID NO: 60357 - protein, 289 aa, Homo sapiens
VAAEAEPGKEEPPARSSLFQEKANLYPPSNTPGDALSPGGGLRPNGQTKPLPALKLALEYIVPCMNKHGICVVDDFLGKETGQQIGDEVRALHDTGKFTDGQLVSQKSDSSKDIRGDKITWIEGKEPGCETIGLLMSSMDDLIRHCNGKLGSYKINGRTKAMVACYPGNGTGYVRHVDNPNGDGRCVTCIYYLNKDWDAKVSGGILRIFPEGKAQFADIEPKFDRLLFFWSDRRNPHEVQPAYATRYAITVWYFDADERARAKVKYLTGEKGVRVELNKPSDSVGKDVF

SEQ ID NO: 60358 - protein, 37 aa, Homo sapiens
IIIFVPVPQLKSFQKIQVRLVCELEKKFSGKHVVFIA

SEQ ID NO: 60359 - protein, 570 aa, Homo sapiens
LCDLPRMPWAMIWDFTEPVCRGCVNYEGADRVEFVIETARQLKRAHGCFPEGRSPPGAAASAAAKPPPLSAKDILLQQQQQLGHGGPEAAPRAPQALERYPLAAAAERPPRLGSDFGSSRPAASLAQPPTPQPPPVNGILVPNGFSKLEEPPELNRQSPNPRRGHAVPPTLVPLMNGSATPLPTALGLGGRAAASLAAVSGTAAASLGSAQPTDLGAHKRPASVSSSAAVEHEQREAAAKEKQPPPPAHRGPADSLSTAAGAAELSAEGAGKSRGSGEQDWVNRPKTVRDTLLALHQHGHSGPFESKFKKEPALTAGRLLGFEANGANGSKAVARTARKRKPSPEPEGEVGPPKINGEAQPWLSTSTEGLKIPMTPTSSFVSPPPPTASPHSNRTTPPEAAQNGQSPMAALILVADNAGGSHASKDANQVHSTTRRNSNSPPSPSSMNQRRLGPREVGGQGAGNTGGLEPVHPASLPDSSLATSAPLCCTLCHERLEDTHFVQCPSVPSHKFCFPCSRQSIKQQGASGEVYCPSGEKCPLVGSNVPWAFMQGEIATILAGDVKVKKERDS

SEQ ID NO: 60360 - protein, 1236 aa, Homo sapiens
VGFTSGYVRFYTENGVLLLAQLLNEDPVLQLKCRTYEIPRHPGVTEQNEELSILYPAAIVTIDGFSLFQSLRACRNQVAKAAASGNENIQPPPLAYKKWGLQDIDTIIDHASVGIMTLSPFDQMKTASNIGGFNAAIKNSPPAMSQYITVGSNPFTGFFYALEGSTQPLLSHVALAVASKLTSALFNAASGWLGWKSKHEEEAVQKQKPKVEPATPLAVRFGLPDSRRHGESICLSPCNTLAAVTDDFGRVILLDVARGIAIRMWKGYRDAQIGWIQTVEDLHERVPEKADFSPFGNSQGPSRVAQFLVIYAPRRGILEVWSTQQGPRVGAFNVGKHCRLLYPGYKIMGLNNVTSQSWQPQTYQICLVDPVSGSVKTVNVPFHLALSDKKSERAKDMHLVKKLAALLKTKSPNLDLVETEIKELILDIKYPATKKQALESILASERLPFSCLRNITQTLMDTLKSQELESVDEGLLQFCANKLKLLQLYESVSQLNSLDFHLDTPFSDNDLALLLRLDEKELLKLQALLEKYKQENTRTNVRFSDDKDGVLPVKTFLEYLEYEKDVLNIKKISEEEYVALGSFFFWKCLHGESSTEDMCHTLESAGLSPQLLLSLLLSVWLSKEKDILDKPQSICCLHTMLSLLSKMKVAIDETWDSQSVSPWWQQMRTACIQSENNGAALLSAHVGHSVAAQISNNMTEKKFSQTVLGADSEALTDSWEALSLDTEYWKLLLKQLEDCLILQTLLHSKGNTQTSKVSSLQAEPLPRLSVKKLLEGGKGGIADSVAKWIFKQDFSPEVLKLANEERDAENPDEPKEGVNRSFLEVSEMEMDLGAIPDLLHLAYEQFPCSLELDVLHAHCCWEYVVQWNKDPEEARFFVRSIEHLKQIFNAHVQNGIALMMWNTFLVKRFSAATYLMDKVGKSPKDRLCRRDVGMSDTAMTSFLGSCLDLLQILMEADVSRDEIQVPVLDTEDAWLSVEGPISIVELALEQKHIHYPLVEHHSILCSILYAVMRFSLKTVKPLSLFDSKGKNAFFKDLTSIQLLPSGEMDPNFISVRQQFLLKVVSAAVQAQHSATKVKDPTEEATPTPFGKDQDWPALAVDLAHHLQVSEDVVRRHYVGELYNYGVDHLGEEAILQVHDKEVLASQLLVLTGQRLAHALLHTQTKEGMELLARLPPTLCTWLKAMDPQDLQNTEVPIATTAKLVNKVIELLPEKHGQYGLALHLIEAVEAISLPSL

SEQ ID NO: 60361 - skipped

SEQ ID NO: 60362 - protein, 39 aa, Homo sapiens
VTFNSSSIIFIITSDESLSVDDSDKTNGSKVDVIQVRPL

SEQ ID NO: 60363 - protein, 480 aa, Homo sapiens
IMSDVTIVKEGWVQKRGEYIKNWRPRYFLLKTDGSFIGYKEKPQDVDLPYPLNNFSVAKCQLMKTERPKPNTFIIRCLQWTTVIERTFHVDTPEEREEWTEAIQAVADRLQRQEEERMNCSPTSQIDNIGEEEMDASTTHHKRKTMNDFDYLKLLGKGTFGKVILVREKASGKYYAMKILKKEVIIAKDEVAHTLTESRVLKNTRHPFLTSLKYSFQTKDRLCFVMEYVNGGELFFHLSRERVFSEDRTRFYGAEIVSALDYLHSGKIVYRDLKLENLMLDKDGHIKITDFGLCKEGITDAATMKTFCGTPEYLAPEVLEDNDYGRAVDWWGLGVVMYEMMCGRLPFYNQDHEKLFELILMEDIKFPRTLSSDAKSLLSGLLIKDPNKRLGGGPDDAKEIMRHSFFSGVNWQDVYDKKLVPPFKPQVTSETDTRYFDEEFTAQTITITPPEKYDEDGMDCMDNERRPHFPQFSYSASGRE

SEQ ID NO: 60364 - protein, 486 aa, Homo sapiens
LHVAGGRRAVQFAHSSPAASPSGSPRVTGAMAFAETYPAASSLPNGDCGRPRARPGGNRVTVVLGAQWGDEGKGKVVDLLAQDADIVCRCQGGNNAGHTVVVDSVEYDFHLLPSGIINPNVTAFIGNGVVIHLPGLFEEAEKNVQKGKGLEGWEKRLIISDRAHIVFDFHQAADGIQEQQRQEQAGKNLGTTKKGIGPVYSSKAARSGLRMCDLVSDFDGFSERFKVLANQYKSIYPTLEIDIEGELQKLKGYMEKIKPMVRDGVYFLYEALHGPPKKILVEGANAALLDIDFGTYPFVTSSNCTVGGVCTGLGMPPQNVGEVYGVVKAYTTRVGIGAFPTEQDNEIGELLQTRGREFGVTTGRKRRCGWLDLVLLKYAHMINGFTALALTKLDILDMFTEIKVGVAYKLDGEIIPHIPANQEVLNKVEVQYKTLPGWNTDISNARAFKELPVNAQNYVRFIEDELQIPVKWIGVGKSRESMIQLF

SEQ ID NO: 60365 - protein, 34 aa, Homo sapiens
KRSSQCFFPYNGEFCFSLGWRKSILWCVKRQSVF

SEQ ID NO: 60366 - protein, 373 aa, Homo sapiens
KEKLMRCSQCRVAKYCSAKCQKKAWPDHKRECKCLKSCKPRYPPDSVRLLGRVVFKLMDGAPSESEKLYSFYDLESNINKLTEDKKEGLRQLVMTFQHFMREEIQDASQLPPAFDLFEAFAKVICNSFTICNAEMQEVGVGLYPSISLLNHSCDPNCSIVFNGPHLLLRAVRDIEVGEELTICYLDMLMTSEERRKQLRDQYCFECDCFRCQTQDKDADMLTGDEQVWKEVQESLKKIEELKAHWKWEQVLAMCQAIISSNSERLPDINIYQLKVLDCAMDACINLGLLEEALFYGTRTMEPYRIFFPGSHPVRGVQVMKVGKLQLHQGMFPQAMKNLRLAFDIMRVTHGREHSLIEDLILLLEECDANIRAS

SEQ ID NO: 60367 - protein, 358 aa, Homo sapiens
RNHCGLSDSSPQLWPEPDFRNPPRKASKASLDFKRYVTDRRLAETLAQIYLGKPSRPPHLLLECNPGPGILTQALLEAGAKVVALESDKTFIPHLESLGKNLDGKLRVIHCDFFKLDPRSGGVIKPPAMSSRGLFKNLGIEAVPWTADIPLKVVGMFPSRGEKRALWKLAYDLYSCTSIYKFGRIEVNMFIGEKEFQKLMADPGNPDLYHVLSVIWQLACEIKVLHMEPWSSFDIYTRKGPLENPKRRELLDQLQQKLYLIQMIPRQNLFTKNLTPMNYNIFFHLLKHCFGRRSATVIDHLRSLTPLDARDILMQIGKQEDEKVVNMHPQDFKTLFETIERSKDCAYKWLYDETLEDR

SEQ ID NO: 60368 - protein, 2177 aa, Homo sapiens
KRTGLLIGLEETEGSVLCLYDLGISKVVKAVVLPGRVTAIEPIINHGGASASTQHLHPSLRWLFGVAAVVTDVGQILLVDLCLDDLSCNQNEVEASDLEVLTGIPAEVPHIRESVMRQGRHLCFQLVSPTGTAVSTLSYISRTNQLAVGFSDGYLALWNMKSMKREYYIQLESGQVPVYAVTFQEPENDPRNCCYLWAVQSTQDSEGDVLSLHLLQLAFGNRKCLASGQILYEGLEYCEERYTLDLTGGMFPLRGQTSNTKLLGCQSIEKFRSHGDREEGVNEALSPDTSVSVFTWQVNIYGQGKPSVYLGLFDINRWYHAQMPDSLRSGEYLHNCSYFALWSLESVVSRTSPHGILDILVHERSLNRGVPPSYPPPEQFFNPSTYNFDATCLLNSGVVHLTCTGFQKETLTFLKKSGPSLNELIPDGYNRCLVAGLLSPRFVDVQPSSLSQEEQLEAILSAAIQTSSLGLLTGYIRRWITEEQPNSATNLRFVLEWTWNKVVLTKEEFDRLCVPLFDGSCHFMDPQTIQSIQQCYLLLSNLNIVLSCFASEAREITERGLIDLSNKFVVSHLICQYAQVVLWFSHSGLLPEGIDDSVQLSRLCYNYPVIQNYYTSRRQKFERLSRGKWNPDCLMIDGLVSQLGERIEKLWKRDEGGTGKYPPASLHAVLDMYLLDGVTEAAKHSITIYLLLDIMYSFPNKTDTPIESFPTVFAISWGQVKLIQGFWLIDHNDYESGLDLLFHPATAKPLSWQHSKIIQAFMSQGEHRQALRYIQTMKPTVSSGNDVILHLTVLLFNRCMVEAWNFLRQHCNRLNIEELLKHMYEVCQEMGLMEDLLKLPFTDTEQECLVKFLQSSASVQNHEFLLVHHLQRANYVPALKLNQTLKINVMNDRDPRLRERSLARNSILDQYGKILPRVHRKLAIERAKPYHLSTSSVFRLVSRPKPLSAVPKQVVTGTVLTRSVFINNVLSKIGEVWASKEPINSTTPFNSSKIEEPSPIVYSLPAPELPEAFFGTPISKASQKISRLLDLVVQPVPRPSQCSEFIQQSSMKSPLYLVSRSLPSSSQLKGSPQAISRASELHLLETPLVVKKAKSLAMSVTTSGFSEFTPQSILRSTLRSTPLASPSPSPGRSPQRLKETRISFVEEDVHPKWIPGAADDSKLEVFTTPKKCAVPVETEWLKSKDRTTSFFLNSPEKEHQEMDEGSQSLEKLDVSKGNSSVSITSDETTLEYQDAPSPEDLEETVFTASKPKSSSTALTTNVTEQTEKDGDKDVFASEVTPSDLQKQMGNLEDAETKDLLVAAEAFSELNHLSPVQGTEASLCAPSVYEGKIFTQKSKVPVLDEGLTSVETYTPAIRANDNKSMADVLGDGGNSSLTISEGPIVSERRLNQEVALNLKEDHEVEVGVLKESVDLPEEKLPISDSPPDTQEIHVIEQEKLEAQDSGEEARNLSFNELYPSGTLKLQYNFDTIDQQFCDLADNKDTAECDIAEVDGELFVAQSNFTLILEGEEGEVEPGDFASSDVLPKAANTATEEKLVCSGENDNHGQIANLPSAVTSDQKSQKVDTLPYVPEPIKVAIAENLLDVIKDTRSKEITSDTMEQSIHETIPLVSQNIMCPTKLVKSAFKTAQETSTMTMNVSQVDDVVSSKTRTRGQRIQNVNVKSAQQEASADVATPKMPGQSVRKKTRKAKEISEASENIYSDVRGLSQNQQIPQNSVTPRRGRRKKEVNQDILENTSSVEQELQITTGRESKRLKSSQLLEPAVEETTKKEVKVSSVTKRTPRRIKRSVENQESVEIINDLKVSTVTSPSRMIRKLRSTNLDASENTGNKQDDKSSDKQLRIKHVRRVRGREVSPSDVREDSNLESSQLTVQAEFDMSAIPRKRGRPRKINPSEDVGSKAVKEERSPKKKEAPSIRRRSTRNTPAKSENVDVGKPALGKSILVPNEELSMVMSSKKKLTKKTESQSQKRSLHSVSEERTDEMTHKETNEQEERLLATASFTKSSRSSRTRSSKAILLPDLSEPNNEPLFSPASEVPRKAKAKKIEVPAQLKELVSDLSSQFVISPPALRSRQKNTSNKNKLEDELKDDAQSVETLGKPKAKRIRTSKTKQASKNTEKESAWSPPPIEIRLISPLASPADGVKSKPRKTTEVTGTGLGRNRKKLSSYPKQILRRKML

SEQ ID NO: 60369 - protein, 19 aa, Homo sapiens
VSFHGSTNYTVYPAMLFAS

SEQ ID NO: 60370 - protein, 54 aa, Homo sapiens
LAEKLKENYIVLLPESIPFLAELMEDECEEVEHQCQKTIQQLETVLGEPLQSYF

SEQ ID NO: 60371 - protein, 96 aa, Homo sapiens
INNWIVQLSKIIPDCSMESTKSGQSKGGILSKACDYIQELRQSNHRLSEELQGLDQLQLDNDVLRQQVEDLKNKNLLLRAQLRHHGLEVVIKNDSN

SEQ ID NO: 60372 - protein, 287 aa, Homo sapiens
VDLPRRRRRRRRPRRCPPCAPLCCGRCWRSGCAARPPRMCRDGYEPCVNEGMCVTYHNGTGYCKCPEGFLGEYCQHRDPCEKNRCQNGGTCVAQAMLGKATCRCASGFTGEDCQYSTSHPCFVSRPCLNGGTCHMLSRDTYECTCQVGFTGKECQWTDACLSHPCANGSTCTTVANQFSCKCLTGFTGQKCETDVNECDIPGHCQHGGICLNLPGSYQCQCLQGFTGQYCDSLYVPCAPSPCVNGGTCRQTGDFTFECNCLPETVRRGTELWERDREVWNGKEHDEN

SEQ ID NO: 60373 - protein, 574 aa, Homo sapiens
IFSQRAPPASGDGFEPQMVKSPSFGGASEASARTPPQVVQPSPSLSTFFGDTAASHSLASDFFDSFTTSAFISVSNPGAGSPAPASPPPLAVPGTEGRPEPVAMRGPQAAAPPASPEPFAHIQAVFAGSDDPFATALSMSEMDRRNDAWLPGEATRGVLRAVATQQRGAVFVDKENLTMPGLRFDNIQGDAVKDLMLRFLGEKAAAKRQVLNADSVEQSFVGLKQLISCRNWRAAVDLCGRLLTAHGQGYGKSGLLTSHTTDSLQLWFVRLALLVKLGLFQNAEMEFEPFGNLDQPDLYYEYYPHVYPGRRGSMVPFSMRILHAELQQYLGNPQESLDRLHKVKTVCSKILANLEQGLAEDGGMSSVTQEGRQASIRLWRSRLGRVMYSMANCLLLMKDYVLAVEAYHSVIKYYPEQEPQLLSGIGRISLQIGDIKTAEKYFQDVEKVTQKLDGLQGKIMVLMNSAFLHLGQNNFAEAHRFFTEILRMDPRNAVANNNAAVCLLYLGKLKDSLRQLEAMVQQDPRHYLHESVLFNLTTMYELESSRSMQKKQALLEAVAGKEGDSFNTQCLKLA

SEQ ID NO: 60374 - protein, 223 aa, Homo sapiens
LKLLFLLDDSFEWSLSNLAEKHNEKNKKDKPWFDFRKWYQIMKKAFDEKKQKWEEARAKYLWKSEKPLYYSFVDKPVAYKKREMVVNLQKQFSTLVESTATAGKKSPSSFQFNWTEEDTDRTCFHGHSLQGVLKEKGQSLLTKNSLYWLSTQKFCRCYCTHVTTYEESNYSLSYQFILNLFSFLLRIKTSLLHEEVSLVEKKLFEKKYSVKRKKSRSKKVRRH

SEQ ID NO: 60375 - protein, 96 aa, Homo sapiens
INAVRIEQEFLTEALPVKLIGMNCTLMKQYIEFVADRLMLELGFSKVFRVENPFDFMENISLEGKTNFFEKRVGEYQRMGVMSSPTENSFTLDADF

SEQ ID NO: 60376 - protein, 42 aa, Homo sapiens
KPRHQEGEIFDTEKEKYEITGQRKIDQKAVDSQILPKIKVIP

SEQ ID NO: 60377 - protein, 141 aa, Homo sapiens
MTLLTIRIEKTGLKDAGQCINPYITVSVKDLNGIDLTPVQDTPVASRKEDTYVHFNVDIELQKHVEKLTKGAAIFFEFKHYKPKKRFTSTKCFAFMEMDEIKLGPNVIELYKKPTDFKRKQLQLLTKKPLYLHLHQTLHKE
